United States Patent Application Publication US 2026/0117211 A1 - sequence listing, part 4

SEQ ID NO: 16066 - protein, 521 aa, unidentified
  REGION 1..521: note = Human gut metagenome
MWLRPGYGNTTGTCSLAYSKGDIMNYGYVLDQQGNPLMPTRRYGWVRRALKSGKAKAVCTLPFTMQLMYDPDTTKIQNLTLGIDPGRINIGMATADETGRCLYSSQCETRNREIPKLMEKRRQHRQASRRGERLSRKRLARRLGTTMGNILERMLPGYEKPVMVKDIINTESRFNNRRRKEGWLTPTAAQLLRTHLNLVEKVCRILPVSGIALEANRFAFMELEAGGHLESGVDYQRGPLYGYRSIREALEELQDGRCLLCGERAIKHDHYLIPRSKGGSNTMANMTGLCEKCHTSVHTDQTAAEKLKTIKAGQNKKYGALSVLNQIIPYLVEILSNRFNGNIRLVSGWETKQFRDEHQINKDHDIDAYCIAVVGQEPKMIDVPETHFEIRQFRRHDRARIKSQTERVYRLDGTKVATNRRKRMEQRTDSLEDWYQKMAEQHGHQQADRMRSRLQVQKSTRRYNNPDRLMPGTVFLYQGKTYIMTGQLTGGQYFRAAGCDKKNFPARSVQIVRHNQGLVYV

SEQ ID NO: 16067 - protein, 512 aa, unidentified; identical to SEQ ID NO: 3741
  REGION 1..512: note = Human gut metagenome

SEQ ID NO: 16068 - protein, 395 aa, unidentified
  REGION 1..395: note = Human gut metagenome
MDTGYIHIGISVKSEKHEYLAEQIDTLTNERSRHDACRMYRRQRRNRKRYRQLRFSNRKKDKGWITPSLKHKKDVHVQAISRIIKVMPVTNITMEMGNFDTQVLKAKEEGKPLPQGADYQHGERYGIATLREAVFARDDYKCQCCGRTIKDGAILHVHHIKYRSQGGTNSMPNLATVCDKCHTPKNHKPGGKLYNWKPKLPSFKGATFMTTIRWQLYNEVKSLFPDINVHITYGAATKEQRRELNIDKSHVNDAFAMGKFHPKHRANAVLYKKKRRNNRCLEKFYDAKYIDSRDGSKKTGQELFNGRINRNHKKDSENLHQYRLQKIKAGKRTIRKQHYNIQPHDIIMYKNRKRETSGCHCNGTRVVLLPDKKTAAIKKVKIYKYAGGYFKSAFN

SEQ ID NO: 16069 - protein, 432 aa, Moorena sp.
MQPTKQQNWVFQINGDKQPLDMINPGRCRELQNRGKLASFRRFPYVVIQQQTIENPQTKEYILKIDPGSQWTGFAIQCGNDILFRAELNHRGEAIKFDLVKRAWFRRGRRSRNLRYRKKRLNRAKPEGWLAPSIRHRVLTVETWIKRFMRYCPIAWIEIEQIRFDTQKLANPEIDGVEYQQGELQGYEVREYLLQKWGRKCAYCGTENVPLEVEHIQSKSKGGSSRIGNLTLACHVCNVKKGNLDVRDFLAKSPDILNQVLENSTKPLKDAAAVNSTRYAIVKMAKSICENVKCSSGARTKMNRVRQGLEKTHSLDAACVGESGASIRVLTDRPLLITCKGHGSRQSIRVNASGFPAVKNAKTVFTHIAAGDVVRFTIGKDRKKAQAGTYTARVKTPTPKGFEVLIDGARISLSTMSNVVFVHRSDGYGYEL

SEQ ID NO: 16070 - protein, 331 aa, unidentified
  REGION 1..331: note = Human gut metagenome
MVYVISKQGTPLMPTERFGKVRRILKNSLAHVVRRIPFTIQLDYDTTEFAQPITLGIDAGSKHIGVSATTTEKELYAADVELRNDIVDKLSTRRKQRRTRRNRLRHRKPRFDNRVSSKNKGWLAPSIENKIHTHMSVVKNVCKILPVSNIVVETASFDMQKIKHLDIQGEEYQQGEQFGFWNVREYVLWRDGHVCQHCHGKSKDPILNVHHLESRKTGGDAPSNLITLCETCHKAYHRGKFELKIKRGKPLRDAAFMGIMRWAFYKRLKKEHPNVSMTFGYITKNTRITNNLPKEHYVDARCISGHPKAKPMGYYFYQKKVRCHNRQIQRQ

SEQ ID NO: 16071 - protein, 423 aa, unidentified; identical to SEQ ID NO: 2998
  REGION 1..423: note = coral metagenome

SEQ ID NO: 16072 - protein, 413 aa, unidentified
  REGION 1..413: note = Campylobacterales bacterium
KNKTPLAPTSKAKARILLKKGKATVDKIFPFTIRLKENKECQKSFEIKFDVGSSVTGVAIVDAIKCFFFAQIVHRGKTVKKAMDSRRATRRSRRNSKTRYREPRFDNRTRPKGWLPPSIKSRVDNVINFAKKYSKLISINSIVVERVSFDISSMTQDRKLYGVEYQNGELKDRKLREYIFAKNNNKCVYCGKKGQEIEHIVPKSKGGTNLIYNLTLSCRNCNIKKGKLTLKEFGKKIGKDLSPLEPKKTPKNASIIQSAREYTIKELKKDFEVKIGEGWETYANREEIDLPKEHYFDAMCIGDTYKYKIFTNSVLEVKAQGRGKRQVCLMDRFGFPRTKAKGEKIIKGFQTGDIVKAVVTKGKKLGTYLGKVAVRSSGYFNITTKLGTIQGINHKYCKTIQKGDGYSYATIKI

SEQ ID NO: 16073 - protein, 458 aa, Moorena sp.; identical to SEQ ID NO: 4474

SEQ ID NO: 16074 - protein, 428 aa, unidentified
  REGION 1..428: note = Human gut metagenome
KVYVINKHGRPLMPCSPAKARHLLDEGKAKVKKRTPFTIQLVYGSSGYTQEVILGVDAGSKSIEISASTKKEEVFAADVTPRNDVVDLLSTRREFRRARRNRKTRYRKPRFNNRVRSKHKGWLAPSVEVKIQEHITSIKMVCRILPVSKVVVETAEFDLQLLKAIEEGKPVPQGEDYQQGEMYGHYNVRQYVLWRDNYTCQCCGAHPTKKKEVRLHVHHLESRKTGGDAPGNLVTLCDSCHEKLHKGLITEDDFKKRKRRSTRDATFMGIMRKTLMQRLCSELPIPVIETRGYITKATREKLLVLPKSHTNDALAIAQGKQGFNVGYLPGIVQINKIYTIRPVRHHNRQLHKATILKGGIRKSNQTEKYVFGYCLFDKVQFNGQDCFIWGRRTTGIFTIKTINGKMIKDGISFKKLKPVEKSTGYLIA

SEQ ID NO: 16075 - protein, 470 aa, unidentified; identical to SEQ ID NO: 2949
  REGION 1..470: note = Human gut metagenome

SEQ ID NO: 16076 - protein, 451 aa, unidentified
  REGION 1..451: note = metagenome
VTTILKTCFAAFNLAKVVVLMDAWDIIVVLNKRGKPLMPCSPAKARLLLKEKKAIVKRRTPFTIQLTIATGESKQPVTLGVDAGYKHVGLSASTEKAELYASEIELRQDITDLLSARRALRQSRRNRKTRYRAPRFDNRIRTKRKGWLAPSVENRINAHLSRIEAVLRLLPVTKITVETASFDLQLLKNPDISGKEYQEGEQLGFWNIREYVLCRDGHVCQHCYGRSKDPVLNVHHLESRRTGGDSPGNLITLCETCHKALHRGEITLKAKRGQSFRAEAFMGIMRWEVHSRLRALHPGIEVSNTYGYRTKHARIANGIAKSHCADAFCIAGNLGAERLGEFFFQKQTRRNHRQIHKLSILKGGIRKRNQAPFEVKGFRLFDKVACQGEEGFIFGRRSSGFFDVRKLDGTRISAGISCKKLHLLEKRRTYLTEIRKEEALPPLPEGRGLRA

SEQ ID NO: 16077 - protein, 413 aa, unidentified
  REGION 1..413: note = Human gut metagenome
MTSYAFVLDANGKQLAPAKEQKAWFLIRKKRAALVSKYPMVIQLKKKIQENEICKDEIRCGIDDGGLHVGIALVQKCKTKNKVVFKGTIEQRNDVKHLMEVRRNYRRYHRYHKRYRQARFDNRKSSKRKGRIAPSILQKRQATIRVINRLNKWINITNYWLEDVSIDIRALTDGYKPYRWQYQKSNRLDENIRKAAILRDGGKCMECGKSNCRLEVHHIKPRRRNGSNTLDNLITLCESCHQKTEGQEELYMDRYFSLLKSSDNKNLNYAQHVMIGKMWLRKQLSGLGVLYLTSGGDTANKRIDWNIEKSHTNDAVCITDLQPDTCDIKEWAIKPMRRQSKAKTDHVLGIHHRDLVEYTFKNGETHRGYVTALYPDQKAINFQSQTKHCKKVNARKCKLLWNYSKIYWFENAS

SEQ ID NO: 16078 - protein, 470 aa, unidentified; identical to SEQ ID NO: 2825
  REGION 1..470: note = Human gut metagenome

SEQ ID NO: 16079 - protein, 453 aa, Moorena sp.
MSVAVLSSTGRKLMPTSNYRARKLLKGGRATIECYRPIFTIRLTDRKEGETQPIEYACDTGYQHVGVSIKSKKHEFVHAQYDMLSDETERHNNRRKYRRTRRNRLRYRKPRFDKRSKKNKDMASSLRHRKENQIRLFESFCKVLPITSATFEMGKFDTQLLQAIADGKPLPEGKDYQQGSKYLFQTEREAVFARDNYTCQVCGKSIKDGAILHTHHIGFWKNYRSNRISNLLTVCGHCHTAKNHKPGGKLWGLEPKSTDLQDATYMSTVRWSMYRDLMLSHPEVDIHIQYGAKTAVIRKTLHLSKTHANDAYCIGSLHPKHRTTEAVYQKKRRNNRILAKFYDAKYVDVRDGKKKTGATLSCGRTNRRESRRSDKNLRIFRGKKVSKGRTSVRKRRYFYQPGDTVLHRSQRFAVNGTHCNGTRVILSTGKSVKKTDLVCIKKEGGWRFLPTPD

SEQ ID NO: 16080 - protein, 423 aa, Arthrospira sp.
MSNHVFVLDTNRKPLRPCKPGVARSLLKAGKASVFRRYPFTIILNKEVDANPEPLELKLDPGSKVTGIALKQGNHIIFAAELQHRGQQIKEALLSRRQLRRSRRNRKTRYRPARFLNRTRSKGWLAPSLQHRVDTLMTWVHRFRRLAPVGRIAQELVRFDLQLMENPEISGVEYQQGELQGYEVREYLLFKWDRTCAYCGAQNVPLEVEQIQPRSKGGSDRVSNLTMACHSCNQAKGNGDIRDFLSGQPDVLSRLLRQAKSPLKDAAAVNSTRWALFKALKATGLPVTTGTGGQTKFNRLRLNLPKAHWLDAACVGPVESLEVLTSKPLLILAKGHGTRQMCGTNKYGFPNRHRSRRQIHKGFQTGDMVTALVTAGKKIGSYLGRVLCRASGSFDITTASVRVAGISHKYCQPIHRKDGYAYA

SEQ ID NO: 16081 - protein, 411 aa, unidentified
  REGION 1..411: note = Fermentation metagenome
MEYSFVVDKNNRPLAPTKATRAWYLIRKGRARLKSKYPMIIQLNREVDVDKEEDETHVLCGIDDGSVYVGIAIVQKCPTRNKVIFKGIIEQRQDVKHLLDVRREYRRYHRQHKRYRKPRFNNRSVSKRKGRIAPSIKQKKDAIIRTLLWLNRWINIQEYYLEDVAIDIRAITDGYKPYRWQYQKSNRLDENLRKAAILRDDCKCQECGRSNCLLEVHHIRARKFNGADTIGNLITLCSGCHQKTEGKEQSFEDKYFKKVNSKPSRVDYAMHVMQGKTYLREQISQLGLLHLTTGGDTANKRIEWNIEKSHINDAICITNCYPDTVGIKEWTIKPMRRKSKAKTDNVLGIKHRDLVSYTYRNGETHTGYVTALYPELKALNFQSKTKHCKKVNARKCKLLWKYNKIYWLECA

SEQ ID NO: 16082 - protein, 413 aa, unidentified; identical to SEQ ID NO: 8326
  REGION 1..413: note = Human gut metagenome

SEQ ID NO: 16083 - protein, 374 aa, unidentified; identical to SEQ ID NO: 12633
  REGION 1..374: note = Human gut metagenome

SEQ ID NO: 16084 - protein, 430 aa, Mitsuokella sp.; identical to SEQ ID NO: 8353

SEQ ID NO: 16085 - protein, 417 aa, unidentified; identical to SEQ ID NO: 13222
  REGION 1..417: note = Human gut metagenome

SEQ ID NO: 16086 - protein, 470 aa, unidentified; identical to SEQ ID NO: 7284
  REGION 1..470: note = Human gut metagenome

SEQ ID NO: 16087 - protein, 462 aa, unidentified
  REGION 1..462: note = Human gut metagenome
MSVLVIGRNGRALMPTTSRKARILLKKETASVVCRHPFTIQLLYKTGCATQEGCIGIDTGSQHIGVGITCGNRVILKEEHELRSSMEKRSLLVTRAAMRRGRRYRKVRYRKPKWGQHTKRMYFEKPNRRGQHWRKVKTTTQSPRSKGWLPPSLQSKCDHHFRIIDRYLKYLPDSITRNLVIEAGRFDMARMNDPMIHGEMYQRGPMYDAENLRAYIFARDNYQCACCKAKAGTTRKADGTTVKLVAHHILFRSRGATDNPKYMVSVCDHCHTTKAHQPGGVLYFWMENNKKVTRGLRDATFMNILRQRLFARYPQAAFTYGNITAADRKQLRLPKSHANDAVAISLFGKEVSAVRDTCQTVHYKQVRKSKRSLHEAIPRKGRKNPNTKAVRNKKNTTQVNGFKLWDSVLADGKKLFICSFTGTSAYLVDKNGCYVSQPGKTYKQWPLSKLKRLHHNGNWLMT

SEQ ID NO: 16088 - protein, 470 aa, Blautia sp.; identical to SEQ ID NO: 2925

SEQ ID NO: 16089 - protein, 477 aa, Blautia sp.; identical to SEQ ID NO: 2707

SEQ ID NO: 16090 - protein, 430 aa, unidentified
  REGION 1..430: note = Human gut metagenome
MPKVYVLNRHGRPLMPCTPAKARHLLDAGKAKVRHRTPFTIQLLYGSTGYTQEVILGVDAGSKTIGLSASTETEELFSAEVKPRNDVVELMSARRQFRRARRNRTTRYRKPRFDNRVRSKHKGWLAPSVEVKIQEHMTAIRRACAILPVSKVVVETAEFDLQLLKAVAEGKPVPQGEDYQKGEMYGHYNVRQYVLWRDGYTCRVCGAHGSVRKGVPLHVHHLESRRVGGDAPDNLVTLCTACHDKLHKGIIMAADIKKRKRRSTRDATFMGIMRMTLLRRLREQLPVPVVETRGYITKATRENLLVLPKSHANDALAIAHGPQGFRAEHLPNIRQADRLYTIRPVRHHNRQLHKATILKGGVRKTNQAEKYICGFRLYDKVLYNGIECFVWGRRTSGSFLLRQLNGEKVKDGVSYKHLKLLERSQSYLVA

SEQ ID NO: 16091 - protein, 425 aa, unidentified
  REGION 1..425: note = Human gut metagenome
MENTLKVFVLNMRGQPLMPCSPPKARKLLRAGKAVPVRRTPFVIQLTVPTGETKQPITLGVDAGYKHVGLSATTAKEELLASEVELRQDVTGLLSDRLALRRARRNRKTRYRAPRFDNRVRSKHKGWLAPSVENRIQAHISRIEAVCRVLPITKIVIETASFDIQKIKNPEVEGTDYQQGEQLGFWNVREYVLFRDGHVCQACKGRSKDLILNVHHIESRKTGGDAPGNLITLCEACHKAYHAGKLKQFSPRRGASFRAETFMGIMRWTVLNRLRERHPELPVTNTYGYLTKHKRIVAGLPKTHCADAFCIAGVLDAKRRGEYLFQKQTRRHNRQIHKLTILKGGVRKRHQAPYLVHGFRLFDKVLCKGEVGFIFGRRSSGAFDVRRLDGTKISAGISYKKLSLLEKRKMFLTELRKEGRDSSRV

SEQ ID NO: 16092 - protein, 421 aa, unidentified
  REGION 1..421: note = Human gut metagenome
MQYVYVLNKHGEPLMPCSPGKARLLLKQQKACVVKRTPFTIKLLYGSTGYKQPITLGVDAGSKHVGLSASTEKRELYREEFTPRNDVVDLLSTRRQNRRSRRNRKTRYRAPRFDNRVHSKHKGWLAPSVEVKIQEHITVIKRICRILPITLVRVETAEFDTQRLKAMLKGKPLPVGTDYQLGEMYDEYNVRQYVLKRDNYTCQCCGAHPTEKKPVRLHVHHLESRHVGGNAPNNLITLCVACHKALHEGKITLDKGKKRGKPLRDAAFMGIMRNTLLARLKDELNIPVKQTYGYITKLLREKNKIPKSHVNDARCIAKAPNAKPCDTMLYTRALRHHIRQIHKAKILNGGIRKKNQAPYLVKGFRLWDKVRYNGEECFITGRRSSGYFALKKYDGTVISNSASYKKLMLLEAATNYITERS

SEQ ID NO: 16093 - protein, 424 aa, unidentified; identical to SEQ ID NO: 8578
  REGION 1..424: note = Human gut metagenome

SEQ ID NO: 16094 - protein, 518 aa, unidentified
  REGION 1..518: note = Human gut metagenome
LSNLKLIDALLEKTEYIYVLGIDGKPQMPTNRKVRIRSLFKSGRAKIVDTVPFTIRLLYENDAVLQSITIAEDPGRTNIGTAVLTQLGDLVFSTVVETRNKSIKKLMTDRKAHRQASRRGERKARQRLAKKHGSMIKAGMMMRKLPQYAADKFVTCKIIKNTEARFCNRKRMPDWLTPTVNHLVQTHINLIKKIEKYLPITDVAIEVNRFAFMQMENPNINGLDFQNGPLKGFDDVKAAIREQQHGKCLMCKNDIEHFHHIVPRSKGGSDTIQNQAGLCKKCHAKVHTDSEFLAKFKDKKEGLIKKYGALSALNQAVPFICKELIKIYGVEHVHFCTGKDTSLIRSSLGYEKTKENQMHEVDAYCIGLAAIGADKVKRPSFNNVFKIKQFRRQDRQRVHYQKERTYYLDGKKIATNRKPRFEQKGNALSDWYKEQIEAYGQHEAGKMRSRLTVKKSKRSYNTAKRLMPGCIFYYDGQRHVMTGQSSYGRYLRAYNCGTKDFHASKCQIIRFDTGLVFV

SEQ ID NO: 16095 - protein, 417 aa, unidentified
  REGION 1..417: note = Human gut metagenome
MPCSPAKARLLLKEKKAIVKRRTPFTIQLTIATGEAKQPVALGVDSGYKHIGLSATTEKAELYASEVELRQDITDLLSARLALRCSRRSRKTRYRAPRFDNRVASKRKGWLAPSVENRIAAHMSRVEAVMRVLPVTAITVETAAFDTQLLKNPDIAGEAYQQGEQLGFWNVREYVLFRDGHVCQHCRGKYKDPILNVHHIESRRTGGDAPNNLITLCETCHKAFHRGEIKLKVKRGKSFKAATFMGIMRWTLFERLKKAHPELSVRNTYGYLTKHKRISHGIAKSHCADAYCIADNLGAKRLEGFFFQKQTRKHNRQIHKLSILKGGLRKKNQAPYEVKGFRLFDKVICKGEEAFIFGRRTSGSFDVRRLDGTRISAGINYKKLRLLEPRTTYLTEFRKEAALPHLHECRGFRAEFL

SEQ ID NO: 16096 - protein, 450 aa, Moorena sp.; identical to SEQ ID NO: 4205

SEQ ID NO: 16097 - protein, 456 aa, Halomonas sp.
MAVFVLGKNKQPLMPCSEKRARLLLERGRAVVVNLTPFVIRLRDRCLSDCALQLTLLGIDPGSKETGLALMRLEENATDEQAPAIRHVLCLFQLVHRGFQIRQALEQRAGFRRRRRSKNLRYRQPRFDNRTRKKGWLPPSLQHRVDTTMAWVGKLCRWAPVTHLSMELVRFDLQKMEHPEISGIEYQQDTLLGYEVREYLLEKWGRECAYCGTGDTPLEIEHVVAKSRNGSSRVANLTIACHDCNQAKDSQWLADFFATNKGLKKRLKANGLSADVRLERVQRQLKLPLRDATAVNATRWALYGSLKTTGLPVVVGSGGRTQYNRQRLGIPKTHALDAACVGKFDTLKGWRVPTQVIKAMGRGSYQRTRLDKFGFPRGYLMRQKQVKGFQTGDRVRAIVPAGKKTGSHTGRVAIRKTGSFNIQTEQGAVQGISWRHCTLLQRGDGYGYHPLPTIQH

SEQ ID NO: 16098 - protein, 441 aa, Sulfobacillus sp.; identical to SEQ ID NO: 4231

SEQ ID NO: 16099 - protein, 405 aa, unidentified; identical to SEQ ID NO: 13871
  REGION 1..405: note = Human gut metagenome

SEQ ID NO: 16100 - protein, 425 aa, Nodularia sp.; identical to SEQ ID NO: 3165

SEQ ID NO: 16101 - protein, 570 aa, Streptomyces sp.; identical to SEQ ID NO: 5250

SEQ ID NO: 16102 - protein, 423 aa, Moorena sp.
MRVFVLNKNRQPLDPCKPARARILLSTGKAKVYRRYPFTIILTEEIKDPVTHEHQLKIDPGAKTSGLAIVQGTRLIWGAELSHRGFQIRVALSSRRQLRRSRRNRKTRYRKPRFLNRTRPKGWLAPSLTSRVQNILTWVKKLIRFCPITGISQELVRFDTQKLQNPEISGIEYQQGTLYGYELREYLLEKWNRKCAYCGATGTQLEIEHIKPLSKGGSNRVSNLTIACHPCNQAKSNQDIELFLSKKPSILKRILSQSLRPLADAASVNSTRWKLYYELKSIGLPVEVGSGGLTKFNRCRQNLPKTHWLDAANVGKVETLIIEVTLPLVITAKGHGTRQLCRTNKYGFPIRHCSRIKFHKGFQTGDIVRAVVTKGKNIGTYVGRVATRKSGSFNISTLGGLVQGISHKYCRFIHRKDGYAYTN

SEQ ID NO: 16103 - protein, 465 aa, unidentified
  REGION 1..465: note = gut metagenome
MSTCACVLSKNGERLMPTIRLGKVRHLLKDGKAKIIKHHPFTIQLLYDSETNIQPIEICEDVGYNYIGISVKSQSHEYVSAQYDTLQDEKSCHDACRRMRRTRRNRLRYRQKRFDNRKRDKGWLAPSLKHKKELNVNVIKMYCEVVPITHATVEVGSSDTMLVKAIEEGKATPEGADYQKGPRYNLATLREAVFYRDNYTCQVCGRKIADGAILHMHHMFYWKGRHDNSLSELITVCEKCHTPANHQKGGKLYGFGEDIKFANLSGAAFMNTVRWQIVNELYAAFGKPFVTFTYGAMTKEKRIALHLEKSHNNDAYAMGEFHPNCRCTFEHYEKVRRNNRILEKFYDSRYIDIRTGEIATGKELFNGRINRSHKKDSENLHKYRGKRIRKGYRALRRKKVALNPGDLVSLNGEILTVHGTHTKKNGSVNVEFKTPSKSGKKSTSLKKLKIIKTISPMRSAWDKVS

SEQ ID NO: 16104 - protein, 442 aa, unidentified; identical to SEQ ID NO: 3234
  REGION 1..442: note = Human gut metagenome

SEQ ID NO: 16105 - protein, 375 aa, unidentified; identical to SEQ ID NO: 5779
  REGION 1..375: note = Human gut metagenome

SEQ ID NO: 16106 - protein, 435 aa, unidentified; identical to SEQ ID NO: 4695
  REGION 1..435: note = Human gut metagenome

SEQ ID NO: 16107 - protein, 400 aa, unidentified
  REGION 1..400: note = Human gut metagenome
MCIRDSRQRLAKRYGSMVKSGMVMRKLPMYAADRFVTCKFIRNTQARFCIRKRCPDWITPTVQHLVQTHLNIIRKISRYLPVTDIAFEVNRFAFMHMENPKAMGVDFQNGPLKGYDDVKEAICTQQHGKCLMCKKPIAHFHHIVPRSRGGSDTIQNLAGLCPECHTKVHTDTTFRKDFDRKKSGQLKKYGALSALNQAVPFICKKLLEEYGEEHVHFCGGLDTSLIRTALGFEKTKKNQMHEVDAYCIGLAALEINEVETPAFDHTFQIRQFRRQDRSIIHHQTGRSYYQGKEKVAQNRKPGFEQKTTALSQWYEEQVRIHGEKEAEKLRSQLRVEKSCRHYNDMDRFLPGAVFLYEGKRYVLSGRITNGKYLRACGQGMKNFPAAECTFIRHNAGLVFI

SEQ ID NO: 16108 - protein, 254 aa, unidentified
  REGION 1..254: note = Human gut metagenome
LKVFVLNMRGQPLMPCSPAKARHLLMDKKAVVKRRTPFTLQLTIATGETKQDVTLGVDAGAKHIGLSASTEKEEVFASEVELRQDITGLLAARLAFRRARRHRKTRYRAPRFLNRVHSKHRGWLAPSVENRIQAHMSRIDAICGLLPVTKIVIETASFDIQKIKNPDVEGTDYQQGDQLGFWNVREYVLFRDGHVCQHCRGRSKDKVLNVHHLESRQTGGDAPNNLITLCETCHKAYHAGKIKLKVKRGQSFRA

SEQ ID NO: 16109 - protein, 441 aa, unidentified; identical to SEQ ID NO: 4242
  REGION 1..441: note = Synthetic metagenome

SEQ ID NO: 16110 - protein, 458 aa, unidentified; identical to SEQ ID NO: 9884
  REGION 1..458: note = IscB polypeptide

SEQ ID NO: 16111 - protein, 431 aa, Escherichia sp.; identical to SEQ ID NO: 3801

SEQ ID NO: 16112 - protein, 512 aa, unidentified
  REGION 1..512: note = Human gut metagenome
MSTVYVLNKDGKPLMPTTRCGHVRHLLKEQKARVVASKPFTIQLLYKTNDVVQPLYLGIDPGRTNIGVAVVKADGTAVFTAHLETRNKEIPKLMKKRKDSRRARRTNGRRCRRQRRAKANGTISKKCVKHDTAQNGSVSKRAKEIGVIKRHLPGCEKDVLCIGIKNKEAKFSNRTRPEGWLTPTANQLLQTHINLVKKIRKFLPISDAVLEINKFAFMQLDNPNIQKWQYQQGPLYQKANLEEAVSEMQEHHCLFCKKPIAHYHHVVPQSENGSDTIGNIVGLCTKHHDLVHKDTAWQKKLAKKKTGLNKKYGALSVLNQIIPALTKELSSLFPKHFFATNGKSTYDYRSAHGVSKDHWLDAYCIACSVLPNDVCDSGINNRVPYELKQFRRHDRRALNNENMSRVYTLNDNVVATNRHKATKQITDSLEEFRQNHPDDVCKLKVKEHHPTYRNMNRNYPGSVFLIGKQVHVMQGIAGSKDGEATTYKDTNANSIAAGKCKFVAKNSGILFV

SEQ ID NO: 16113 - protein, 442 aa, Ktedonobacter sp.
MNDASLGGPCIGENRKETMSRVLIVDQQRRPLMPCTPARARLLLKQKKAAVLRRCPFTLILHESRPEAVVQPLRLKIDPGSKVSGLALVNDTSGEVVWAAEVTHRGGQVHKDLQKRAGVRRGRRQRHTWYRPARYLNRRRPKGWLPPSLESRVQNVETWTRRLIFWAPVGSLSYEAVRFDTQALQNPEIEGTQYQHGTLAGLEVKEYLLLKWGQRCAYCEKMGLPLQLEHIIPKIRGGSNRVTNLTLACEQCNGKKGNQTAEEFGFPHLQAQAKAPLKDAAAVNSTRRVLHQRLMRTGLPIEASSGGHTKWNRGERDIAKTHWLDAANVGPSTPARLLFQHVRPWLIEANRRQDRQLCLVNALGFPRSKPKKKSPKHDFRTGDIVRAVVPAHLENPGIYVGRMAAKASGAFTITTKQRKVSDIGYRYCTRLQHTDGYSYLIK

SEQ ID NO: 16114 - protein, 422 aa, Petrotoga sp.; identical to SEQ ID NO: 5403

SEQ ID NO: 16115 - protein, 430 aa, unidentified
  REGION 1..430: note = Human gut metagenome
MPNKVYVINKHGRPLMPCSPAKARHLLDEGKAKVKKRTPFTIQLVYGSSGYTQEVILGVDAGSKTIGMSASTTKEELLSAEVKPRNDVVDLLSTRREFRRARRNRKTRYRKPRFDNRVRSKHRGWLAPSVEVKIQEHITSIKRVCRILPVSKVVIETAEFDLQLLKAIADGKPVPQGEDYQQGEMYGHYNVRQYVLWRDNYTCQCCGAHATKKKEVRLHVHHLESRKTGGDAPGNLVTLCDSCHEKLHKGLIAEKDFKKRKRRSTRDATFMGIMRKTLMQRLCSELPIPVIETRGYITKATREKLLVLLKSHTNDALAIAQGKQGFNVGYLPGIVQIDKICTIRPVRHHNRQLHKATILKGGIRKSNQAEKYVFGYRLFDKVQFNGQDCFIWGRTTGIFTIKTINGKMIKDGISFKKLKLVEKSTSYLIA

SEQ ID NO: 16116 - protein, 461 aa, Desulfotignum sp.
MGAFAESGVSRVFVIDKRGEPLMPCHPARARKFLAQGRARVHQMFPFTIRLVDRIREDSDVHPVNVKIDPGAKTTGMAVVRQDGGHAWILHLSELTHRGAAIRKKLDQRSNYRRRRRTANLWYRKKRFNNRTRPKGWLPPSLKSRVDNTLSWVKKYQRFCPITGIFLERVRFDTQKLQNPDISGIAYQQGTLFGYEVKEYLLERFKRTCAYCNGLSKDPVLEIEHFVPRNPSKGDKGSNRINNLAIACKTCNQDSKKNLQPADWISLLSRSRKNIDQVRLQNATRFLEGKRPSLASTAAVNATRNAIFFELRGLGLPVECATGGRTKYNRSRLDIPKTHCLDAACTGQVDSVSGWKQNVFLIKAMGRGSYQRTRVDKYGFPRGTLMAQKTVKGFATGDMVKVIVPTGKKKGTYIGRVAVRKSGSFNIQTNTETVQGISWKHCTIISRQNGYNCAIQVSSPT

SEQ ID NO: 16117 - protein, 423 aa, unidentified
  REGION 1..423: note = Human gut metagenome
MKQDQKYAFVQDNRGVVLSPTKVEKAWYLIRHNKATLVKTEPIVIRLNRKQNNTDMSFMKVGLDPGDTTGVAIVQESHLNMSKNKAVFKANIQHRNDIKSLIESRREYRRLHRYNKRYRQARFNNRASSRRKDKVAPSIKNKKDEILRVLRYLSKYICIDGIYIEDVSFDIRALTDEYKPYRWQYQRSNRLDENIRKAVIQRDKCKCKMCGAKDTQLEVHHITPKREGGNNTLKNLITLCSECHKSITGVEDDYKSYLYSLIDGKQIPLAPAMHVMIGKNYLYQQLRQFIGGDSYVYLTTGGDTANSRLDWNIEKSHSNDAACITDVRCLPENLKTYVYTIKPQRKKKKTKQNTSNLAIKHRDLVWYTPRGRAPIKCCVTAIMQTGCCAGKYKLKSVDGERFGPIAESSLKKIQQGTSSLMFV

SEQ ID NO: 16118 - protein, 418 aa, Moorena sp.
MQNYAFVIDTNKQPLNPISPKKARRLLDKGKAAVFRMYPFTIILKTAVENSTISPCKIKIDPGSKFTGFALVQNHQVIWAMELEHRGGLIKKKLEARSAVRRGRRNRHTRYRKPRFLNRRRSEGWLGPSLEHRVLTIETWVKRLIKFCPIHEIWVERVKFDTQKMQNPEITGAEYQQGELAGYEVREYLLEKWGRECAYCGKKSVPLHIEHIHPKSFGGSDRVSNLCLACEKCNQRKGNKPIEEFLKKKPSLLQKIKNKALSPLRDATAVNMTRNKVVKVLKKILPVVTGTGAMTKYNRIRLGFSKEHWIDAACVGDIETLVLRTSQPLLVTCKGQGGRQKAALNKYGYPIRHNPLKPIKGWATGDIAKHQKLGIGKVTPRSKGSFGFTPLGTKGYKSCKPQDISVIHRKDGYTYSFC

SEQ ID NO: 16119 - protein, 452 aa, unidentified; identical to SEQ ID NO: 13261
  REGION 1..452: note = IscB polypeptide

SEQ ID NO: 16120 - protein, 406 aa, unidentified
  REGION 1..406: note = Human gut metagenome
MVYVQDINGKPMMPTTRHGKVRRLLKDNKAVVVNLCPFTIKLTYVTSDYKQQIVLGVDAGTKHVGLSATTKSKELYSSEVILRNDIVDLLSTRRELRRTRRNRLRHRKHRFNNRIKSRRPGWVAPSVKYKIDAHIRVIDNVCSILPIFRIVIEVAQFDIQKINNPNISGKEYQEGDQLRFWNVREYVLARDGHKCQYCKGKSKDNILNVHHIESRKTGGDSPSNLITLCETCHKEYHKGNIDLKIRRGKSLRDAAVMGIMKWRLYEELRSRYDRVSMTFGYITKHNRIKYGIEKSHVSDAFVISMNINAKRIERQYLKRLIRRHNRQMHKMKILKGGKKKNNQASFEVFGFRLFDKVLYNNKIFFVYGRRKSGSFNIRDFNGENSKDVSRKKFKLIRGKRHPIILK

SEQ ID NO: 16121 - protein, 518 aa, Collinsella sp.
MANYERRYLMPDTDYIYVLGADGKPQMPTKRKRHVKRLLDTGKARIACHVPYTIQLLYKNTPVLQPVMLAEDPGRTNIGMAVLSVKGELLMSAVVETRNREIVRLMNHRRGYRRASRIGERKARQRLAKRFGTMLKAGLIMRKLPKFAADKFITCHCIKNTESRFCNRKRPDGWLTPTSRQLVETHINLIHKIQKYLPVTDIAMEVNRFAFLSLENPSVLGMDFQNGPLKGFDNLHDAVNELQHGKCLLCDKKIEHYHHIVPRSMNGSNTIGNIAGLCMECHDKVHKHASYQKKLNDVKKGLDKKYGALSALNQAVPFICKRLEAEFGKEHVSYCTGRDTAKMRNSFGFQKTKDNQMHETDAWCIGIIALNRVPDVVPDFGQTYCIKQFRRQDRSFVYAQTERVYKLDGVTVAKNRKKRTEQKTDSLEDWYNRQMALYGKQKADFMRSRLTVIKSKRRYNDSIRVMPGAVFMYNGECHVLSGHLTEGKYFRAVGNAKTNYPASKCKITRHNEGLVFVC

SEQ ID NO: 16122 - protein, 466 aa, Cupriavidus sp.; identical to SEQ ID NO: 6544

SEQ ID NO: 16123 - protein, 471 aa, Streptomyces sp.; identical to SEQ ID NO: 14708

SEQ ID NO: 16124 - protein, 424 aa, unidentified; identical to SEQ ID NO: 3351
  REGION 1..424: note = Human gut metagenome

SEQ ID NO: 16125 - protein, 418 aa, unidentified; identical to SEQ ID NO: 13636
  REGION 1..418: note = Human metagenome

SEQ ID NO: 16126 - protein, 431 aa, Escherichia sp.; identical to SEQ ID NO: 3801

SEQ ID NO: 16127 - protein, 418 aa, unidentified; identical to SEQ ID NO: 6784
  REGION 1..418: note = Human gut metagenome

SEQ ID NO: 16128 - protein, 429 aa, Moorena sp.
MCNEVFVLDANHKPLNPCRPVTARKLLTAGKAAVYRRYPFTIILKKQVEAEPKPMSLKIDPGSKMTGLAIVYGNQVVWSAEIEHRGSKIKSALDSRRAVRRSRRNRKCRYRKPRFNNRKRPEGWLAPSLQHRVATTMTWVLRLIKLTPIGSISQELVRFDTQKLQNPEISGIEYQQGELMGYEVREYLYQKWDRQCVYCGAHSVKLEIEHIVPKSKGGTNRVSNLTLACHRCNQAKGNLNAQDFLLGKPDVLKRILARAKQPLLDAAAVNSTRWKLYQSLKKTGLSVEVGTGGRTKYNRIKLGLPKSHWIDAACVGEVATLEIVTRQPLLIKAMGHGCRQVIQMDGIGFPRKGYKPKHPVKGWKTGDIVNVVAGKNAGLKGVRIKTVRAKGNFDLIGADQDSSNKVLSASRNYIQCVHRQDGYYYSFAK

SEQ ID NO: 16129 - protein, 420 aa, unidentified
  REGION 1..420: note = Human gut metagenome
MQYVYVLNKHGEPLMPCSPRKARLLLKQKKACVVKRTPFTIKLLYGSTGYKQPITLGVDAGSKHIGISAATEKYELYCEEATPRNEVVDLLSARRAFRRSRRNRKTRYRAPRFNNRVHSKHKGWLAPSVEVKIQEHITLIKRVCRILPVTFVRVETAEFDTQRLKAMLEGKPLPVGTDYQLGEMYDEYNVRQYVLKRDNYTCQCCGAHPTKTKAVKLHVHHIETRRTGGNAPNNLITLCTACHKALHAGKVTLDGKKRGRSLKDAAFMGVMRKTLMERLLKELKIPVQGTYGYITKYLREKHSIPKSHTNDARCISKNPLAIPCDTCYYTKAIRHHNRQLHKATILKGGIRKANQAPYTVKGYRLWDKVSYNDSECFITGRRTSGYFALKKLDGTVVSNSASYKKMRLLEVATNYITERR

SEQ ID NO: 16130 - protein, 462 aa, Ruminococcus sp.
MVIALDKHKKPIGFVTEKRARQLMESHRACIYRTYPTVIIIMDRDVREFTNVPTYRIKIDPGSKYTGIAIVCNETNEVVMMLQLEHRGENIVELLQTRSAARKNRRNRETPYRRSKWANGSNGSRPSKERKMPPSIKSIGDNVIRIVEKLKRFIRITECSFESTRFDTQLMDNPDISGEEYQHGTLFGYELREYLMEYYRHTCQYCGGKSEDSVLEWEHIIPKSRGGSDSVRNATLSCCSCNRDKGALTPNEWLKQLKEKTPGCKKDGELTQTRITHLESILSNGKVYGSNRYAAWSNILRKYEEKALFEIFGNVECSTGGRTKYNREMILHTSKDHHYDALAIGSISESGFTDRTKGYVLYIKAMGRGNRMRGHINQCGIITDKWTDRRKRFNGLQTGDIVHVTIPSGKYEGTYTGRLMIRKSGSHDIRTLDGKLVTGTKKSIYKIMQHADGYNYKYEKAE

SEQ ID NO: 16131 - protein, 417 aa, unidentified
  REGION 1..417: note = Human oral metagenome
MFVYVISKDGQPLMPTSRFGKVRRLLKNKKAKVIRSCPFTIKLLYEPETLIVQEVVLGQDTGSKHIGTACIANDKVLYQSEVTLRDDIKKKMDGRRATRKRRRDRKTRYRKSRFLNRANSTKKDRLPPSVRSKVQSHIDEIEFCKKILPISKIVLEVSQFDTALMKNPALINEKVKRWGYQKGFNYEYSSRREAVLHRDNYTCQCCGKKHVKLEVHHIIFRSMGGTDDEKNLITLCEKCHKAVHDGILILTKKPKKLNLKYATQMSIIRSQLLKIYPDAIETFGFVTKENRNNLNLSKEHFTDACVIASGGKEFKQSNWLFKKRRVAKQNRQLCKGVRGEKKIPTGKILGFRKFDKVEYLKEIYFIKARRSRGDFVLMDIDNNAIDFRNKGGRKEPSYKILKRLNTRKSILCISQRI

SEQ ID NO: 16132 - protein, 418 aa, unidentified
  REGION 1..418: note = Human gut metagenome
MVYVLSQNGQPLMPTENHAKVRVFLKQGKAKVVQRCPFTIQLLYESTTHTQKINLGIDAGSKTIGISATTDSKVLYEAEVVLRNDIVELLSGRRALRRSRRNRKTRYRKPRLDNRRRPDGWLAPSIRQKIKTHVTVVENVMKILPVTKIIVETASFDIQKIKNPEIEGAEYQYGEQLDFWNVREYVLFRDGHTCQCCKGKSKDNILNVHHIESRKTGGNAPNNLITLCETCHQAYHKGIITLPKEIHRGMRFRDASFMGIMRWAFYDRLKELYTPLDVEVVNTYGYITKNTRIEHGLPKEHYVDARCISGNPAAKPLGHYYFQKKVRCHNRQIHKNTILKGGIKKRNQAAYLVKGYRLFDKVKYQNQEYFIFGRRSSGFFDIRTLDGTKVNKGSISCKKLQLVEKSKHYLTEQRKVAA

SEQ ID NO: 16133 - protein, 425 aa, Nodularia sp.; identical to SEQ ID NO: 3165

SEQ ID NO: 16134 - protein, 460 aa, unidentified
  REGION 1..460: note = IscB polypeptide
MVEVTSRVKEHTVECSTSFTLCTPVFKQSCDGRGSDADKVLAGNNSDVDRSQHRESSDLRVQNIVYVLNMRGQPLMPTRQQKANKLLKQGKAKVVKRKPFTIQLNYPTGEAKQPIKLGIDSGYENVGFSATTSKRELLSGELKLRTNISKLLEQRRNYRRARRNKLWHREPRFNNRGRSDGWFAPSIQHKLDSHIRLIEAIKKILPITDINVEVASFDIQKIKNPDIQGTEYQNGVLKNFWNVREYVLHRDNHTCQHCKGKSRDKILQVHHVHGKKAGATDRPEELLTVCKTCHDNHHKGINVIPDKEIHRFKPETFMTMVRWKLVNQLKDTYGSAHHTYGYITKSNRISMNISKSHVNDAFAIAGGTSDIQRCISYNFKHVRRNNRSIQFNRKGFKPSIRRQRYKLQPNDLVQYRKKFFRVKGIFNYGKWVRLVDSIGNIINSNVKNVELICYGKGIFG

SEQ ID NO: 16135 - protein, 267 aa, unidentified; identical to SEQ ID NO: 6860
  REGION 1..267: note = Human gut metagenome

SEQ ID NO: 16136 - protein, 512 aa, unidentified
  REGION 1..512: note = Human gut metagenome
MSTIYVLNKDGKPLMPTTRGGHVRHLLKEQKARVVRTKPFTIQLLYETDDVVQHLYLGIDPGRTNIGVAVVKTDGTAVFTAHLETRNKEIPKPMKKRKDSRRARRTNGRRCRRQRRAKANGTISKKCVKQTTAQNGSVSKRAKEIGVIKRHLPGCEKEVLCIGIKNKEAKFSNRVKPKGWLTPTANQLLQTHINLVKKIQKFLPISDVVLEVNKFAFMQLDNPNIQKWQYQQGPLYQKASLEEAVSEMQEHHCLFCKKPIDHYHHVVPQHKNGSNTIGNIVGLCAKHHDLVHKDTTWQKKLAKKKTGLNKKYGALSVLNQIIPTLTKELSSLFLKHFFVTNGKSTYDYRAAHGVSKDHWLDAYCIACSVLPNDTCDKTINSRVPYEFKQFRRHDRRALNNENMSRVYTFNGKMVATNRHKATEQTTDSLEEFRQRQPNDVCNLKVKEHHPTYRNMNRNYPGSVFLIGKQVHVMQGIAGSKDGEATTYKDTNANSIAAGKCKFVAKNSGILFV

SEQ ID NO: 16137 - protein, 458 aa, unidentified; identical to SEQ ID NO: 15778
  REGION 1..458: note = Human gut metagenome

SEQ ID NO: 16138 - protein, 380 aa, unidentified
  REGION 1..380: note = Human gut metagenome
TTGETKQDCHIGIDTGSKYIGAAVRSEDKVFWKGEIELRQDIRSNLDTKRIYRRSRRNRKTRYRKPRFLNRKRRDEWLPPSLQSRINHTFHWIDTLSSLVPNPILHIEVGKFDVAKMINPEIHGVDYQHGQTYGFFDERYFVFARDNYTCQCCGKSKNKILNTHHIIYRSNGGTNRVDNLITVCTDCHTSQNHRKGGIFYQWQEQHKKVKQYKEPPFMNTLRKRIFVAYPDAEITYGSETTPKRKAMKLDKTHYNDAIVISGINEIKENPEEWLLIKQFRKKKRSLHEATARKGRKKPNRNQTRNSKNTPYYKGFYLNDKVSVFGKSGYITGFTSNAAYIKDENNDYITLPNKTYKQVSINKMKLECHNNNWQYIIKNAV

SEQ ID NO: 16139 - protein, 452 aa, Defluviitoga tunisiensis
MWVLSVEGNPLMPTKRHGKVRCLLKQQLAKVVKVKPFTIQLLYETTSYTQNITLGIDSGYNYIGFSAVTEKEELICGEVKLRNDISELLKERRMYRRIRRNRLRYRKPRFDNRISSKKEGWLAPSIKHKLDSHVRFINYLKKILPIANIVVEVANFDTHKLKNPNVVGKGYQQGEQQDFWNVREYVLYRDNYTCQLCGKKNTILEVHHIGYWKQDRTDRPGNLITLCAKCHNSNNHKDGGKLYGMKPVQKPLKDATFMSTIRWKLVNALMCDYTYGYITKSKRVSLGLEKTHYNDAFCIAGGINQQRIEPIYFEQIRRNNRSVEKFYDAKYVDIRDKSIKTGQELFCGRRTRNKNLNEENLHKYRGAKKSKGRRNIRKQRYAYQPKDIVTFESKKYSVQGVQNKGEYIKLMEMSKPVKTDLVKPYMFRKGFSVFYNCNSSPTYRSGSLLAGK

SEQ ID NO: 16140 - protein, 451 aa, Moorena sp.; identical to SEQ ID NO: 3199

SEQ ID NO: 16141 - protein, 420 aa, unidentified
  REGION 1..420: note = Human gut metagenome
MQYAYVLNKRGDPLMPCSPGKARILLKQQKACVVKRTPFTIKLLHGSAGYKQPITLGVDAGSKHVGLSASTEKRELYSEEFTPRNDVVELLSTRRQNRRSRRNRKTRYRAPRFNNRVHSKHKGWLAPSVEVKIQEHITVIKRICRILPVTLVRVETAEFDTQRLKAMLAGKPLPVGTDYQLGEMYDEYNVRQYVLKRDNYTCQCCGAHTTAKKTVKLHVHHLESRKVGGNAPSNLITLCTTCHNNLHKGKITLDGKKRGKTLRDAAFMGIMRNTLLTRLRNELNIPVQNTYGYITKLLREQNDIKKSHVNDARCISKHPLAKPCSVCYRTKAIRHHNRQIHKAKILKGGIRKANQAPYIVKGFRLWDKVLYNEQECFISGRRSSGYFALRKFDGTTITNSISFKKLRLLEPATNYLIERK

SEQ ID NO: 16142 - protein, 420 aa, unidentified; identical to SEQ ID NO: 8162
  REGION 1..420: note = gut metagenome

SEQ ID NO: 16143 - protein, 515 aa, unidentified; identical to SEQ ID NO: 3339
  REGION 1..515: note = Human gut metagenome

SEQ ID NO: 16144 - protein, 480 aa, unidentified
  REGION 1..480: note = Human gut metagenome
LYTKPLDNIGEGSLPPSGEINLKGMTFMVYVKSIDGKALMPTSNAKARKLLKQKKAKVVSLRPFVVKLTYKTKTEYTQKLNLGVDSGYSNIGFSVIDAKQEYIAGEVKLLEGMKKRLLEKASYRRIRRSRLRYRKARWNNRVKSKKKGWLAPSLKHKLDTHIKFIDYLKNILPIEKITIEVANFDIQKMKDDLISGVDYQNGDMFSFWNVREFVLHRDGHKCQNPNCKHKDKKEQILKVHHIRYRSEGGSDRPENLITLCSKCHTPANHKKGKFLYDWCVNGKKVRGFKDATFMSMIRWYLVNELKSKHNNVSITYGYITKNHRIQNGIEKSHLNDAFAIAKGTNQARTKDRFLVIQDRLKNRSLEKFYDSKIIDIRTEKKVSGGDLNCGRSTRNKNLNTENLRKYRGVKISEGQRRIRKQKYFYQPNDLVKYDGKVYTVKGTQNEGKYIALKEIKKVPKVELLIPYVFKKGLNWSYGLC

SEQ ID NO: 16145 - protein, 431 aa, unidentified
  REGION 1..431: note = Human gut metagenome
MPNKVYVINKHGRPLMPCSPAKARHLLDAGKAKVKKRTPFTIQLVYGSSGYTQEVILGVDAGSKTIGLSASAETEELLSAEVKPRNDVVDLLSTHREFRRARRNRKTRYRKPRFDNRVRSKHKGWLAPSVEVKIQEHITSIKRVCRILPVSKVVVETAEFDLQLLKAIADGKPVPQGEDYQQGEMYGHYNVRQYVLWRDNYTCQCCGAHATKKKEVRLHVHHLESRKVGGDAPDNQVTLCESCHEKLRKGLIAEKDFKKRKRRSTRDATFMGIMRKTLMQRLCSELPIPVVKTRGYITKATREKLLVLPKSHTNDALAIAQGKRGFNVGYLPKIAQIDKIYTIRPVRHHNRQLHKATILKGGIRKSNQTEKYVFGYCLFDKVQFNGQDCFIFGRRTSGYFVVKTIDGKVIHNSASFKKLNLVERASNYLIA

SEQ ID NO: 16146 - protein, 443 aa, Anoxybacillus sp.; identical to SEQ ID NO: 4041

SEQ ID NO: 16147 - protein, 465 aa, unidentified; identical to SEQ ID NO: 5709
  REGION 1..465: note = Human gut metagenome

SEQ ID NO: 16148 - protein, 466 aa, unidentified; identical to SEQ ID NO: 4972
  REGION 1..466: note = Human gut metagenome

SEQ ID NO: 16149 - protein, 415 aa, unidentified
  REGION 1..415: note = Human gut metagenome
LMPCSPAKARLLLKEKKAIVVRRTPFTIQLTIATGETKQPVSLGVDAGYKHVGLSASTEKAELYASEVELRQDITDLLSARRALRQSRRNRKTRYRAPRFDNRIRTKRKGWLAPSVENRIDAHLSRIEAVLRLLPVTKITVETASFDLQLLKNPDISGKEYQEGEQLGFWNIREYVLCRDGHVCQHCYGRSKDPVLNVHHLESRRTGGDSPGNLITLCETCHKALHRGEITLKAKRGQSFRAEAFMGIMRSEVLNRLKASHPELEVNNTYGYRTKHARIANDIAKSHCADAFCIAGNLGAERLGEFFFQKQTRRNNRQIHKLSILKGGIRKRNQAPFEVNGFRLFDKVACKGEEGFIFGRRSSGFFDVRKLDGTRISAGISCKKLHLLEKRRTYLTEIRKEEALPALPEGRGLRA

SEQ ID NO: 16150 - protein, 443 aa, Anoxybacillus sp.; identical to SEQ ID NO: 4343

SEQ ID NO: 16151 - protein, 420 aa, unidentified; identical to SEQ ID NO: 14214
  REGION 1..420: note = Human gut metagenome

SEQ ID NO: 16152 - protein, 515 aa, unidentified
  REGION 1..515: note = Human gut metagenome
MTALEERLSKTEYIYVLGFDGKPQMPTRRKRHVLKLLKTGRARIAEDIPFTIRLTYRNAPVLQPVTLAEDPGRTNIGAAVLSPLGDLLFAAVIETRNKEIKKLMADRQKSRQASRRGERKARQRLAKRYGSIVKSGMVMRKLPMYAADRFVICKFIRNTQARFCNRKRCPDWITPTVQHLVQTHLNIIRKISRYLPVTDIAFEVNRFAFMHMENPKAMGVDFQNGPLKGYGDVKEAIRTQQHGKCLMCKKPIAHFHHIVPRSRGGSDTIQNLAGLCTECHTKVHTDTAFRKDFDEKKSGQLKKYGALSALNQAVPFICKKLLEEYGEEHVHFCGGLDTSLIRTALGFEKTKKNQMHEVDAYCIGLAALEINEVETPAFDHTFQIRQFRRQDRSIIHHQTGRSYYQGKEKVAQNRKPGFEQKTTALSQWYKEQIRIHGEKEAEKLRSQLMVEKSCRHYNDMDRFLPGAVFLYEGKRYVLSGRITNGKYLRACGQGMKNFPAAECTFIRHNAGLVFI

SEQ ID NO: 16153 - protein, 413 aa, unidentified
  REGION 1..413: note = metagenome
MPCSPAKARLLLKEKKAIVKRRTPFTIQLTIATGETKQPGSLGVDAGYEHVGLSASTEKAELYASEVELRQDITDLLSARRALRQSRRNRKTRYRAPRFDNRIRTKRKGWLAPSVENRINAHLSRIETVIRLLPVTKISVETTSFDMQLLKNSDIAGKEYQESEQLGFWNVREYVLFRDGHVCQHCHGRSKDPVLNVHHLESRRTGGDSPGNLITLCETCHKELHRGEITLKAKRGQSFRAETFMGIMRWDVLDRLKASHPKLEVQNTYGYRTKHARIVNGIAKSHCADAFCIAGNLGAERLGEFFFQKQTRRNNRQIHKLSILKGGRRKRNQASFEVKGFRLFDKVACKGEEIFIFSRRSSGYFDVRKLDGTRISAGISYKKLRLLEKRRTYLTEIRKEAFSPLPEGRSLRA

SEQ ID NO: 16154 - protein, 512 aa, unidentified; identical to SEQ ID NO: 3720
  REGION 1..512: note = Human gut metagenome

SEQ ID NO: 16155 - protein, 428 aa, Moorena sp.
MQRVFVLDHNKQPLMPCHPARARKLLKKGKAAVYRRYPFTIIMTHRLCGDLQPIEIKFDLGSRTTGIALVGHFDRGSEVIWAGNLNHRGYQIKKDLNSRRAIRRTRRNRKTRYRPARFLNRRRPTGWLPPSLRSRVLNVNNWMLKLSQLAPLTQIAVETVRFDTQKIQKPEISGVEYQQGELAGYELREYLLEKWGRECVYCGAKNVPLEIEHIQARSKGGSDRVSNLTLACTPCNIDKGNKDIKEFLKRKPKRLKKIQTIATASLKDAAAINATRYATGNALKGFGLPIAFSSGGRTKFNRTSCGYPKDHWIDAACVGESGSDVFIPKMITPLIITAKGRGSRQKCRMNQYGFPRTRPKKHKRVKGFQTGDIVKAVVTKGKKIGTYVGRVVVRASGSFDIGIGKKKVSGISYKYCQLIQRVDGYEYT

SEQ ID NO: 16156 - protein, 451 aa, unidentified; identical to SEQ ID NO: 3581
  REGION 1..451: note = Human gut metagenome

SEQ ID NO: 16157 - protein, 451 aa, unidentified; identical to SEQ ID NO: 3061
  REGION 1..451: note = Human gut metagenome

SEQ ID NO: 16158 - protein, 431 aa, unidentified
  REGION 1..431: note = Human gut metagenome
MPNKVYVINKHGRPLMPCSPAKARHLLDAGKAKVKKRTPFTIQLVYGSSGYTQEVILGVDAGSKTIGMSASTTKEELLSAEVKPRNDVVDLLSTRREFRRARRNRKTRYRKPRFDNRVRSKHKGWLAPSVEVKIQEHITSIKRVCRILPVSKVVIETAEFDLQLLKAIADGKPVPQGEDYQQGEMYGHYNVRQYVLWRDGYTCQCCGAHATKKKEVRLHVHHLESRKVDGDAPDNQVTLCESCHEKLHKGLIAEKDFKKRKRKSTRDATFMGIMRKTLMQRLCSELPIPVIETRGYITKATREKLLVLPKSHTNDALAIAQGKQGFNVGYLPGILQIDKIYTIRPVRHHNRQLHKATILKGGIRKSNQTEKYVFGYCLFDKVQFNGQDCFIWGRRTTGIFTIKTINGKMIKDGISFKKLKPVEKSTGYLIA

SEQ ID NO: 16159 - protein, 418 aa, unidentified; identical to SEQ ID NO: 4327
  REGION 1..418: note = Human gut metagenome

SEQ ID NO: 16160 - protein, 435 aa, unidentified; identical to SEQ ID NO: 4695
  REGION 1..435: note = Human gut metagenome

SEQ ID NO: 16161 - protein, 414 aa, unidentified
  REGION 1..414: note = Human gut metagenome
MPCSPAKARLLLKEKKAIVKRRTPFTIQLTIATGETKQPVGLGVDAGYKHVGLSASTDKAELYASQVELRQDITDLLSARRALRRARRNRKTRYRAPRFNNRIRTKRKGWLAPSVENRINAHLSRIEAVLRLLPVTKITVETASFDMLLLKNPDIAGKEYQEGEQLGFWNVREYVLFRDGHVCQHCYGRSKDPVLNVHHLESRRTGGDSPGNLITLCETCHEALHRGEIALKTKRGHSFRAEAFMGMMRWEVLNRLKASHSELEVNNTYGYRTKHARIVNGIDKSHCADAFCIAGNLGAERLCEFFFQKQTRRNNRQIHKLSILKGGIRKRNQAPFEIKGFCLFDKVACKGEESFIFGRRSSGYFDVRKLDGTRISAGISYKKLRLLEKRRTYLTEIRKEEALPPLPEGRGLRA

SEQ ID NO: 16162 - protein, 424 aa, unidentified
  REGION 1..424: note = Human gut metagenome
LVWNKRGKPLMPCSPAKARLLLKEKKAIVVRRTPFTIQLTIATGETKQPVSLGVDAGYKHVGLSASTEKAELYASEIELRQDITDLLSARRELRRARRNRKTRYRAPRFDNRIRTKRKGWLAPSVENRINAHLSRIETVLRLLPVTKITVETASFDMQLLKNPDIAEKEYQEGEQLGFWNVREYVLFRDGHVCQYCHGRSKDPVLNVHHLESRRTGGDSPGNLITLCETCHKALHRGEIKLRAKRGQSFRAETFMGIMRWEVLNRLKASHSKLEVNNTYGYLTKHARIKSGITKSHCSDAFCIAGNLGAKRLGEFLFQKQTRRNNRQIHKLSILKGGIRKRNQAPFEVKGFRLFDKVACQGEEGFIFGRRSSGFFDVRKLDGTRISAGISCKKLHLLEKRRTYLTEIRKEEALPALPEGRGLRA

SEQ ID NO: 16163 - protein, 431 aa, unidentified
  REGION 1..431: note = metagenome
MPNKVYIINKHGRPLMPCSPAKARHLLDAGKAKVKKRTPFTIQLVYGSSGYTQEVILGVDAGSKTIGMSASTTKEELLSAEVKPRNDVVDLLSTRREFRRARRNRKTRYRKPRFDNRVRSKHRGWLAPSVEVKIQEHITSIKRVCRILPVSKVVVETAEFDLQLLKAIADGKPVPQGEDYQKGEMYGHYNVRQYVLWRDNYTCQCCGTHPSKKKEVRLHVHHLESRKVGGDAPDNQVTLCESCHEKLHKGLIAEKDFKKRKRRSTRDATFMGIMRKTLMQRLCSELPIPVVKTRGYITKATREKLLVLPKSHTNDALAIAQGKRGFNVGYLPEIAQIDKIYTIRPVRHHNRQLHKATILKGGIRKSNQTEKYVFGYRLFDKVQFNGQDCFIWGRRTTGIFTIKTINGKMIKDGISFKKLKLVEKSTSYLIA

SEQ ID NO: 16164 - protein, 425 aa, Moorena sp.; identical to SEQ ID NO: 7055

SEQ ID NO: 16165 - protein, 409 aa, unidentified
  REGION 1..409: note = Fermentation metagenome
MVYVLNIQGKPLMPCKKAKARKLLKQGKAKVIKREPFTIQLIFECENQVQEVTLGVDAGSQAIGLSVTTDKDELFSAEVELRNDIVDLLSTRRQNRRTRRNRLRYRKPRFLNRVGSKNKGWLAPSIENKINTHLKVISKIYEILPISKTIVEVASFDIQKIKNPDIQGKEYQQGEQLDFWNVREYVLFRDGHKCQGKKNCKNKILNVHHIESRKIGGDSPNNLITLCENCHEDYHDGRLKLNLKRGQSFRDATFMGIMRWSFYNRLKEIYPNVQMTYGYITKNTRIVNGLPKEHRIDALCISGNLSVKQSEYWYYIKQIRKHNRQIHKANILKGGKKKLNQAPYEVKGFKLFDKVKYKGQECFIFGRRSSGYFDLRKLDKVVVHRSASYKDLELIQKSNSLLIERRSAG

SEQ ID NO: 16166 - protein, 431 aa, unidentified
  REGION 1..431: note = Human gut metagenome
MVYVLDQEGRPLMPTNRHGKVKHLLREGKAKVVKRTPFTIQLLYESTHYTQDIILGVDAGSKTIGMSATTEKQEVFAAEVTPRNDIVKLMSERRSLRRARRNRKTRYRPARFNNRVRSKHKGWLAPSVEVKIQEHITSIKRVLHLLPITKVIVETAEFDLQLLKAIENGDPLPEGTDYQKGEQLGHYNLRQYILHRDAYTCQACGEHKEGTKLHVHHLESRRVGGNAPANLVTLCEACHKALHQGLITEDDLKKRKRRSTRDATFMGIMRKTLMTRLRNELTIPVAETRGYFTKYTRVEVLQLPKSHINDAFSICQGSIGFKASKETQANRIEEHYLIKPVRHHNRKLHKLTILKDGIRKSNQSDRYTKGYRLYDKVLFNGQECFIFGRRTSGYFDLRKLDGTKVHASASWKKLALLERQSNYLIEGKVAG

SEQ ID NO: 16167 - protein, 334 aa, unidentified
  REGION 1..334: note = Human gut metagenome
MVYVLANDGQPLMPTERHGKVCRMLKSGIAKVVKKCPFTIQLQYESERNVQPVALGIDAGSKHVGVSATTKAKVLYESDVELRDDIVKLLATRRQLRRRRRSRKTRYRPARFDNRRRKEGWLTPSIRQKIESHLTVVANVCKILPVSQIIVETASFDIQKIKNPDIQGIEYQQGEQMDFWNIREYVLFRDGHTCQCCKGKSKDKVLNVHHIESRKTGGNAPNNLITLCETCHKGYHNGTVTLPKNIKRGMKFKDAAFMGIMRWTFYNTLKEQYEPDIPVHYTYGYITKNTRINHNLPKGHCIDARCISGNPDAVSDGTYYYQKKVRCHNRQIHK

SEQ ID NO: 16168 - protein, 436 aa, unidentified; identical to SEQ ID NO: 15633
  REGION 1..436: note = Human oral metagenome

SEQ ID NO: 16169 - protein, 304 aa, unidentified
  REGION 1..304: note = Human gut metagenome
LAPSVENRINAHLSRIEAVLRLLPVTKITVETASFDMQLLKNPDISGKEYQEGEQLGFWNIREYVLCRDGHVCQHCYGRSKDPVLNVHHLESRRTGGDSPGNLVTLCETCHKALHRGEITLKAKRGQSFRAEAFMGIMRWEVQNRLKASHPELEVNNTYGYRTKHARIANDIAKSHCADAFCIAGNLGAERLGEFFFQKQTRRNNRQIHKLSILKGGIRKRNQAPFEVNGFRLFDKVACKGEEGFIFGRRSSGFFDVRKLDGTCISAGISYKKLHLLEKRRTYLTEIRKEEALPPLPEGRGLRA

SEQ ID NO: 16170 - protein, 553 aa, unidentified; identical to SEQ ID NO: 8282
  REGION 1..553: note = Freshwater metagenome

SEQ ID NO: 16171 - protein, 515 aa, unidentified
  REGION 1..515: note = Human gut metagenome
MATVHVLNKDGKPLMPTTRCGHIRHLLKEKKARVVRTNPFTIKLVYETDDVVQPLYLGIDPGRTNIGVAVVKVDGTAVFTAHLETRNKEIPKLMAKRKEHRQGRRHYRRCKRQRRAAAHGTLSKKCKKQDTAQGGNISKRAQTIGVFERNLPGCEKSVLCIGIKNKEARFNNRVRPARWLTPTANQLLLTHVNFVKKICKFLPISDVVLEINKFAFMALDNPNIQKWQYQQGPLYQKGSLENAVSEQQDHHCLFCEKTIEHYHHVILRSENGSDTIANIVGLCAEHHDLIHKDDKLKEELAKKKQGLNKKYGALSVLNQIIPALTYELGSRFQGHFYVTTGKSTYDYRAAHSVSKDHWLDAYCIACSVLPDGCFDNTINSRVPYELKQFRRHDRQVCQQQNVKRKYYLDKKLVATNRHKAIKQETDSLEEYRNNGGTTDKLVVKEHKPTNKRLNRILPGALMAANGKLNVMVASRGLHNGIPDNYVFDNNSKAKPSKCTLINKNKGIVFVSNSVS

SEQ ID NO: 16172 - protein, 413 aa, unidentified; identical to SEQ ID NO: 3290
  REGION 1..413: note = Human gut metagenome

SEQ ID NO: 16173 - protein, 420 aa, unidentified; identical to SEQ ID NO: 5866
  REGION 1..420: note = Human gut metagenome

SEQ ID NO: 16174 - protein, 419 aa, unidentified; identical to SEQ ID NO: 4877
  REGION 1..419: note = Human gut metagenome

SEQ ID NO: 16175 - protein, 414 aa, unidentified
  REGION 1..414: note = Human gut metagenome
MPCSPAKARLLLKEKKAIVVRRTPFTIQLTIATGEAKQPVSLGVDAGYKHVGLSASTEKAELYASEVELRQDITDLLSARRALRQSRRNRKTRYRAPRFDNRIRTKRKGWLAPSVENRINAHLSRIEAVLRLLPVTKITVETASFDTQLLKNPDIAGKEYQEGEQLGFWNIREYVLCRDGHVCQHCYGRSKDPVLNVHHLESRRTGGDSPGNLITLCETCHKALHRGEIKLRAKRGQSFRAETFMGIMRWGVLNRLKASHPKLEVHNTYGYRTKHARIANGIAKSHCADAFCIAGNLGAERLCEFFFQKQTRRNNRQIHKLSILKGGIRKRNQAPFEVKGFRLFDKVACQGEEGFIFGRRSSGFFDVRKLDGTRISAGISYKKLHLLEKRRTYLTEIRKEEALPPPPEAAQRPR

SEQ ID NO: 16176 - protein, 415 aa, Bacillus sp.
MRVFVKNVRGEPLMPCSHRKARILLKQGKVKIIGYTPFTIQLQYATGEAVQPVTIGVDSGAKHIGIAITTEDKVLAKGTIELRQDFKENLTLRAILRRGRRQRKTRYRKARFLNRKKKEGWLPPSIQSRVDNQIHWIEIFRSLLPSPKVIVEVGKFDAQKLKNPDIQGTEYQQGDTFGFWNTRYYIFARDNYTCQICKKKGGILHTHHIIERCSGGSDMADNLVTVHDECHQKFHQGKLKHSFKKPKQYKETAFMNILRLQIMNRLDCDITYGSYTTPKRKELGLSKTHVNDAIAITHPTQLQEYDQSGEFRIKQFRKKKRSLHEATARKGRKTKNTSAKRNKKNTPHIDGIYLGDKVKVFGQVGFVTGFTGKMVYVQDIHGQYIQNPSKSYKQVKMSDMERIHHTNNWQFLQIS

SEQ ID NO: 16177 - protein, 477 aa, unidentified
  REGION 1..477: note = Human gut metagenome
MIIALDKYKRPLGFLTERRCRILMERKRAVLYRVFPTVVILMDVDARTIPDLPSFRIKIDPGSKYTGIAIIRNDTDEFVYAMQIEHRGDAVRAALNKRKNARRNRRSRETGYRRAKWGNRCLSEKDKRSYDSSREDDWLPPSIRSAADNVISWVRRLGRWINLTECSFEAVRFDTQLMEDPDIEGEEYQHGTLFGLEIKEYLMEKFGHTCQYCGGKSGDPVLEWEHMRPKSRGGSDRVKNALLSCSSCNKDKGNRTPEEWLELIKARLPREKGKRKELDEERVELIQKVIDGKPQGGALRYAAWVSSSRRYLEKALFGIFGNVECSSGGRTKYNRTELGYPKEHHYDALCVGTVPEKGYHDRTNGYYLYAKAAGRGTRLRGHLNKCGVIVAKWTDRKKGFFGFQTGDIVVAEVPHKTPKPYKYEGRFVGRVMVRATGSFDIKTTDGKLVTVKEQYCRLLQANSGYQYTMKRAIPLGH

SEQ ID NO: 16178 - protein, 459 aa, unidentified
  REGION 1..459: note = Human metagenome
MLYALILNSFKRKDFVKRMTKTATQKVIQVCVLDQNGQPLMPTQRLGKVYRLLKSKKAHIVAYEPFTVQLDYEPKTHIIQPLTLGVDSGAIHSGYSLANEHREYYNAEVIARDDISKNISDKRMYRRNRRARKTRYRKPRFNNRKNKGEGWIPPSLEQKVEVQVKEIKHLHKYFPIKDIIIEVAEFDIQKIVNSDISGKEYQQGTLQGYNIRNYLIEKYNHKCFYCDKEVSAFEVEHMIPKARNGSNRIDNLTLSCPDCNQKKGTLTAEEFIRQTLSPQKAAQKLRQLPKTKKLLKYMAHMNATRWVLYNTIKEIYNSVSLTYGYITKHNRINAGLPKAHHIDAKCITGFSTVPSFEVTVVKTKMRRHNRQLHRATFSKGHVRRAATLPRIVHDFQLYDIVLFNNHRYYIKSRRSSGYFTIVSLEGLNNSKRSYKKLTFLAHTNAYLINHYVNDKIKKC

SEQ ID NO: 16179 - protein, 420 aa, unidentified
  REGION 1..420: note = Freshwater metagenome
MSVFVINQRNQPLMPCSPRKARLLLKQGEAKIVKRTPFTIQLLQATGETKQDITLGVDAGSKHIGLSATTQKKEMFSAEVELRNDIVDLLSTRRQNRRTRRNRLRYRKPRFLNRVGSKNKGWLAPSIENKIQTHISIVEKLYKLLPITKIIVEVASFDIQKIKNPDIQGTEYQQGNKLNFWNTREYVLFRDGHKCHGKKGCKNKILNVHHIESRKTGGDSQDNLITLCEECHNHYHSGKLKLNLKRGKSFRDAAFMGIMRLAFYNKLKVLYPNVSLTYGYMTKNTRIINNLPKEHRIDALCITGNPIVKRLKNYYYVKQVRKHNRQIHKANILKGGKKKLNQAPYLVKGFRLFDKVKFEDRECFIFGRRSTGYFDLRTLDGTKIHASASVKKLKLLEVRKSLLWERREQGIGVHGIPPLP

SEQ ID NO: 16180 - protein, 456 aa, Halomonas sp.
MAVFVLDKHKRPLMPCSEKRARLLLARGRAVVHKRYPFTIRLKDRVSGETQPLRLGIDPGSKTTGLALMREPDSQQRHVLCLFELIHRGFQIKKALQQRAAFRRRRCSANLRYRAPRFNNRIKPKGWLAPSLQHRVDTVMAWVNRLSRLAPVTAISQELVRFDTQKLDNPEISGVEYQQGTLLGYEVREYLLEKWGRECAYCGTGDTPLEIEHVVPRSRGGSNRVSNLTLSCHPCNAEKDSQTLTDFFATNKGLKKRLKANGLSADAQLERVQRQLKQPMRDASAVNATRWALFSALKTTDLPVAVSSGGRTKYNRQRLNIPKTHALDAACVGAFGKLHDWTVPTLTIKAMGRGSYQRTRLTKHGFPRGYLMRQKQVHGFQTGDMVRAIVPTGKKAGTHTGRVAIRKTGSFNIQTEQGAVQGISHKYCTVIQRGDGYGYYITPFTNLTGGAGQAVA

SEQ ID NO: 16181 - protein, 443 aa, Actinomadura sp.
MGREVRIRQPAVFVLDKNGRPLQPTTPPRARKLLSSGRAVVARHTPFVIRLRDRTVRESRVDGVEIGIDPGSRHTGMAVFTSRREERRARFGVRLDHRGSAIGKKLRQRAAYRRRRRTANLRHRAPRFDNRVRTDGWIAPSVRHRLETTVSWVDRLSRWAPVTAAHLERTAFDTHAMAAGRPLEGAEYQHGTLHGYEVREYLLAKFGRTCVYCDATGVPLNIDHVVPRSRAGSDRVSNLVPACIPCNRAKGDLPVEHFAPAKAASIKVRALAPLRDAAALNTARRALWKALDARMPVRASSGGRTKWNRTRHHLPKSHTLDALAVGELDSITEILTVFLAVGCTGRGTYARTRPDRHGFPRLRLPRRKDVFGFRTGDLARAVVPSGKNAGTHTGRIAVRSSGTFTVRSRGGLFTARHIRFRLLQRADGYAYTTGKEAGTAARP

SEQ ID NO: 16182 - protein, 211 aa, Clostridium sp.
LTHQFKKGVPVMVYVLDKNGQPLMPTDRHRKVRLMLQSGQAKVIKRCPFTIQLTYNTGHQAQEISLGIDAGSKHIGVSATTKTRVLYEADVELRNDIVDLLSSRRELRRGRRNRKTRYRPARFDNRRREDGWLAPSIRQKIGTHLTVVENICKILPISRITVETASFDIQKIKNPDIQGAEYQQGDQLGFWNNREYVLFRDNHTCQCCKGK

SEQ ID NO: 16183 - protein, 422 aa, unidentified; identical to SEQ ID NO: 5333
  REGION 1..422: note = Human gut metagenome

SEQ ID NO: 16184 - protein, 419 aa, unidentified; identical to SEQ ID NO: 6987
  REGION 1..419: note = Human gut metagenome

SEQ ID NO: 16185 - protein, 432 aa, unidentified; identical to SEQ ID NO: 4738
  REGION 1..432: note = Human gut metagenome

SEQ ID NO: 16186 - protein, 557 aa, unidentified; identical to SEQ ID NO: 3108
  REGION 1..557: note = Human gut metagenome

SEQ ID NO: 16187 - protein, 465 aa, unidentified
  REGION 1..465: note = Human gut metagenome
MSTCVCVLSNNGERLMPTIRLGKVRHLLKDGKAKIIKHHPFTIQLLYDSKTNTQPIEICEDVGYNYIGISVKSQSHEYVSAQYDTLPDEKACHDSCRKLRRTRRNRLRYRKPRFDNRKRGEGWLAPSLEHKKELNVNIIKMYCEVMPITHAIVEVGSFDTMLVKAIEEGKATPESADYQKGPRYKLATLREAVFYRDNYTCQVCGRKANEGAILHVHHMFYWKGRHGNSLSELITVCEKCHTPASHQKGGKLYGFGEDIKFANLSGAAFMNTVRWQIVNVLYAAFGKPFVTFTYGAMTKEKRIALHLEKSHNNDAYAMGSFHPVNRCAFEHYEKVKRNNRILEKFYDSQYIDTRTGELTNGKNLFNGRISRSHKKDSENLHKYRGKRICKEHRALRRKKLALNPGDLVSLNGEILVVHGTHTKKNGSVNVEFKVPSKSGKKSASLKKLEIIKTSNSMRSAWKKVS

SEQ ID NO: 16188 - protein, 416 aa, Moorena sp.; identical to SEQ ID NO: 14170

SEQ ID NO: 16189 - protein, 417 aa, unidentified; identical to SEQ ID NO: 2758
  REGION 1..417: note = Human gut metagenome

SEQ ID NO: 16190 - protein, 440 aa, unidentified
  REGION 1..440: note = Human oral metagenome
MTKTFTQKTSQVCVLDQNGIPLMPTKRLGKVYRLLKNQKAHIVNYEPFTIQLDYEPKTHIIQPMTLGVDSGAIHSGYSLANEHREYYSAEVIARDNISKNLSDRRMYRQTRRSRKTRYRKPRFNNRKNKGKGWIPPSLEQKVTVQVNEIKHLHKYFPIENIIIEVAEFDIQKIKNPDISGKEYQQGTLYGYNIRNYLLEKYHHKCFYCDKEVSVFEVEHMIPRSRNGSNRIDNLTLSCHDCNQKKGTLTAEEFIRQTLSPQKAAQKLRQLPKTKQLLKYMAHMNATRWALYNTIKEMYESVSQTYGYITKYNRIDAGLPKAHHIDAKCITGFSTVPSFDVIVVKTKMRRHNRQLHRATFSKGHIRKAATLPRFVHGFQLYDIVMFNNHRYYIQSRRSTGSFTLVSLEGLKDENRMYSKLTQLAHTNAYMMNHMLMINKIN

SEQ ID NO: 16191 - protein, 535 aa, unidentified
  REGION 1..535: note = Human gut metagenome
VLRPRYQYPTRWYPSREQGSGNGCLSGEENTDLEQEVSGTLSKGDHSHPGEQDFCVPAITIQGGPAMSVFVVGLNGCRLMPTSERKARLLLKHGKASVYRKVPFTIKLNYKTGSTTQSGYLGIDTGSQHIGVSVVREDGTVLHKEEIGLRDSMSKRKLMQSRASSRRGRRHRKTRYRHPKWRPKAKRVYCEIPDRKGRHWKKKEITFASKRPKGWLPPSLQSKTDHHIWWIKKLQDLLPEGYRLSIELGRFDPARLKDPEIHGELYQKGPQYDYENVRAYVLNRDRYTCQVCGKKGGKLHVHHILYRSHGATDDPQYMATVCSDCHNTENHQQGGILYQWMQKQKKFTRGLRDATFMNILRKRLIEAFPGATFTYGNITKADRERLRLPKSHGNDATAIAIVKTGIMTVKDKEPVIYIQQVRRKKRSLHEETPRKGRKEPNRTASRYDKNTKAVTVTKRKNKKISITGCLFDRVELNGKKGWISGFTDKSCYVKDENDQYIRTSPKYKQVSLSKLKILHHCGNWAIGARQSLGKG

SEQ ID NO: 16192 - protein, 279 aa, unidentified
  REGION 1..279: note = metagenome
VVVETAEFDLQLLKAIEEGKPVPQGEDYQQGEMYGHYNVRQYVLWRDDYTCQCCGAHATKKKEVRLHVHHLESRKVGGDAPDNQVTLCESCHEKLHKGLIAEKDFKKRKRRSTRDATFMGIMRKTLMQRLCSELPIPVIETRGYITKATREKLLVLPKSHTNDALAIAQGKRGFNVGYLPEIAQIDKIYTIRPVRHHNRQLHKATILKGGIRKSNQTEKYVFGYRLFDKVQFNGQDCFIWGRRTTGIFTIKTINGKMIKDGISFKKLKLVEKSTSYLIA

SEQ ID NO: 16193 - protein, 512 aa, unidentified
  REGION 1..512: note = Human gut metagenome
MSTVYVLNKDGKPLMPTTRCGHVRRLLKEQKARVVTSKPFTIQLLYETDDVVQSLYLGIDPGRTNIGVAVVKTDGTAVFTAHLETRNKEIPKLMKKRKDSRRARRTNGRRCRRQRRAKANGTISKKCVKQTTAQNGSVSKRAKEIGVIKRHLPGCEKEVLCIGIKNKEAKFSNRTRPEGWLTPTANQLLQTHINLVKKIRKFLPISDVVLEINKFAFMRLDNPNIQKWQYQQGPLYQKASLEEAVSEMQEHHCLFCKKPIDHYHHVVPQHKNGSNTIGNIVGLCAKHHDLVHKDTTWQKKLAKKKTGLNKKYGALSVLNQIIPTLTKELSSLFLKHFFVTNGKSTYDYRAAHGVSKDHWLDAYCIACSVLPNDTCDKTINSRVPYEFKQFRRHDRRALNNENMSRVYTFNGKMVATNRHKATEQTTDSLEEFRQRQPNDVCNLKVKEHHPTYRNMNRNYPGSVFLVGKQVHVIQGIAGSKDGKATTYNDTNTNSIAAGKCKFVAKNSGILFV

SEQ ID NO: 16194 - protein, 471 aa, Acidithiobacillus sp.; identical to SEQ ID NO: 13024

SEQ ID NO: 16195 - protein, 416 aa, unidentified
  REGION 1..416: note = Human gut metagenome
MVYVLDKNGQPLMPTDRHRKVRLMLQSGQAKVIKRCPFTIQLNYDSGHQTQEISLGIDAGSKHIGVSTTTKIKVLYEVDVELRNDIVDLLSSRRELRRGRRNRKTRYRQAKFNNRRRGNGWLAPSIRQKIGTHLTVVENICKILPISRIMVETASFDIQKIKNPDIQGAEYQQGDQLGFWNNREYVLFRDNHTCQCCKGKSKDKILNVHHIESRKTGGNAPNNLITLCETCHTGYHKGTVQLPKAIKRGMRFKDAAFMGIMRWAFYEALKQQYEPVGTPVHNTYGYITKHTRIEHNLPKEHYVDARCISGNPDAFPNGEYYYQKKVRCHNRQMHKLTILKGGIRKQNQATYLVKGYRLFDKVSYQGKGYFVFGRRQSGFFDIRTLSGEKVNKGSLSCKKLKFIATRTYYLTERRAV

SEQ ID NO: 16196 - protein, 423 aa, Arthrospira sp.; identical to SEQ ID NO: 3735

SEQ ID NO: 16197 - protein, 456 aa, unidentified
  REGION 1..456: note = Human gut metagenome
MSTCVCVLSNNGERLMPTIRLGKVRHLLKDGKAKIIKHHPFTIQLLYDSKTNTQPIEICEDVGYNYIGISVKSQSHEYVSAQYDTLQDEKACHDSCRKLRRTRRNRLRYRKPRFDNRKRSEGWLAPSLEHKKQLNIRLIERYVSVIPITRATVEVGSFDTMLLQAIQKGESKPEGVDYQKGPRYNLATLREAVFYRDNYTCQVCGRKIADGAILHMHHMFYWKGRHGYQLDELVTACEKCHTPANHQKGGKLFGFGENKEFANLSGAAFMNAVRWQIVNALYATYGKEFVTITYGAMTKEKRIILGIEKTHNNDAYAMGDYHPVHRCVFRHYQKRRRNNRVLEKFYDATYIDARTGNKAKGKELFNGRISRNHKKDSEDLHKYRSKKVSKGRRSIRRQRYAIQPYDTVRLENKTYITSGCHNKGTRLLIPANGKSKSVAISKVQVVCHAGAWIQII

SEQ ID NO: 16198 - protein, 442 aa, unidentified
  REGION 1..442: note = Human gut metagenome
MSTSVFVLDKRHRPLMPCRPARARRLLRAGRARVVKRFPFVIRLVDRTVEQSEVQPVLIKLDPGSRETGAAVVRDDEKKRHHALAFFVIKHRGGAIRDALKARSAFRRRRRSQNFRCRSPRFLNRVKPKGWLPPSLRHRVETTLSFVRRMCRYLPVSGIATELVKFDSQKLQNPEVSGVKYQQGTLFEYEVREYLLEKFGRKCVYCGAEGVPLNIDHVVPRAKGGSNRVSNLVLACVSCNQKKGARSLEDFLKGKPAVLARVRRELKTPLRDAAAVNATRWVLFNELKATGLPVETGSGALTKLNRHAFGVEKEHWLDALCVGRLNGVVTRKGLNVLEIRCMGRGSRQRTRLTKYGFPRGYLMRQKCVHGFATGDMVEANVPKGKKAGLWRGRVAVRVSGSFNIQTPKGVIQGVGWKHCRLISHNDGYGYAWLGHAPHSSPA

SEQ ID NO: 16199 - protein, 456 aa, unidentified
  REGION 1..456: note = Human gut metagenome
MSTCVCVLSNSGERLMPTFRLGKVRRLLKDGKAKIVKHHPFTIQLLYDSKTNTQPIEICEDVGYNYIGISVKSKSHEYVSAQYDTLQDEKEHHDDCRKYRRTRRNRLRYRKPRFDNRKRSEGWLAPSLEHKKQLNIRLVERYVSVIPITHATVEVGSFDTMLLQAIQKGESKPEGADYQKGPRYNLATLREAVFYRDNYTCQVCGRKIADGAILHMHHMFYWKGRHGYQLDELVTACEKCHTPANHQKGGKLFGFGEDKEFANLSGAAFMNAVRWQIVNALYATYGKEFVTITYGAMTKEKRIALQLEKTHSNDAYAMGDYYLAHRCVFRHYQKRRRNNRVLEKFYDATYIDARTGNKAKGKELFNGRINRNHKKDSENFHKYRSKKVSKGRRSIRRQRYAIQPYDTVRLESKTYITSGCHNKGTRLLIPANGKSKSVAISKVQVVCHAGAWIQII

SEQ ID NO: 16200 - protein, 427 aa, Enterococcus sp.; identical to SEQ ID NO: 5630

SEQ ID NO: 16201 - protein, 376 aa, Moorena sp.
LKLDPGRKTTGLALAGENETVNTTTDKLMRALPMIMLLELKHPVQAIRDALTSCHAFRRRQRGKLRYRLARFDNLARPDGWLAPSLRHRVDTTMSWVWRLLRWVPATAVSQELVRFETQALENPEISGTEYQQGTLFWLRGAGVSAREVGRKCAYSDGQNVPLEIEHIQPKSFGGSDRVSNLMLACRPCNQRKGNQQLKQFLAKPPERTRRILAQAKAPLRDAAVNSSGWALFQRLKARGLEVEVASGGRTKWNRRRFSIPKTHCLEAVCGGQGDAIWNWQQQVLQVQGRGCGSYQRTRLRRQGFLRGYLTRSKSAFGFQTGDLVWAVGTTGKKVDAYLGRVAIGASGNFNIQTGNRLVQGQASTDSAPCLAGRWV

SEQ ID NO: 16202 - protein, 414 aa, unidentified
  REGION 1..414: note = Human gut metagenome
MPCSPAKARLLLKEKKAIVVRRTPFTIQLTIATGESKQPVSLGVDAGYKHVGLSASTEKAELYASEVELRQDITDLLSARRALRQSRRNRKMRYRAPRFDNRIRTKRKGWLAPSVENRINAHLSRIETVIRLLPVTKISVETTSFDMQLLKNSDIAGKECQESEQLGFWNVREYVLFRDGHVCQHCHGRSKDPVLNVHHLESRRTGGDSPGNLITLCETCHKELHRGEITLKAKRGQSFRAETFMGIMRWEVLDRLKASHPKLEVQNTYGYRTKHARIVNGIAKSHCADAFCIAGNLGAERLGEFLFQKQTRRNNRQIHKLSILKGGIRKRNQVPFEVKGFRLFDKVACKGEEGFIFGRRSSGFFDVRKLDGTHVSAGISYKKLRLLEKRQTYLTEIRKEEALPPLPEGRGLRA

SEQ ID NO: 16203 - protein, 426 aa, Ferroplasma sp.
VDLLSPVGGHKADMPVFILNDDGKPLIPCKPAKARHLLSDKKAKVISSNPFTIQLLWHCEENVETITLGIDSGYKHIGFSAVTDNKELISGEVVIRTDIPKLNEEKAMYRRKKRNKLWYRKPRFMNRGNNKEGWFAPSIEHKLETHIRLIEKLKRILPVSNTVIEVASFDTQKMKNPEISGIEYQQGELQGYEIREYLLEKFHHICVYCSKTGVPLEIEHLTPRSRDGPDTVNNLAISCHECNQKKNNLTAEEFGYPEVRKRALITMRDAAFMNTVRWKLTQLTGSEHTLGFITKKNRISLSLDKTHVNDAFVIAGGTVQIRTSPFTITQRRRNNRSIQTNRKGFRPSIRRKRYAFQPGDIVVYDHERFSVVGMHNYGKSIVIKGGGKKMDINTKKVKLVKYGKGLQFAPQFLPTLSDGVSLGGVR

SEQ ID NO: 16204 - protein, 442 aa, unidentified
  REGION 1..442: note = Human gut metagenome
MSTSVFVLDKKHRPLMPCRPARARRLLRAGRARVVKRFPFVIRLVDRTVEQSEVQPVLIKLDPGSRETGAAVVRDDEKKRHHALAFFVIEHRGGAIRDALKARSAFRRRRRSQNFRCRSPRFLNRVKPKGWLPPSLRHRVETTLSFVRRMCRYLPVSGIAAELVKFDSQKLQTPEVSGIEYQQGTLFEYEVREYLLEKFGRKCVYCGAEGVPLNIDHVVPRAKGGSNRVSNLVLACVSCNQKKGARSLEDFLKGKPEVLARVRRELKTPLRDAAAVNATRWVLFNELKATGLPVETGSGALTKFNRHAFGVEKEHWLDALCVGRLNGAVTRKGLNVLEIRCMGRGSRQRTRLTKYGFPRGYLMRQKCVHGFATGDMVEANVPKGKKAGLWRGRVAVRVSGSFNIQTPKGVIQGVGWKHCRLISHNDGYGYAWLGHAPHSSPA

SEQ ID NO: 16205 - protein, 477 aa, Blautia sp.; identical to SEQ ID NO: 2707

SEQ ID NO: 16206 - protein, 433 aa, Moorena sp.
MSVFVLDRSGTPLMPCSEKRARLLLARRRARVHRVIPFVIRLVDRKAEACSLQPLRVKLDPGSKVTGVALVSDAEHAVIVLNLFELVHRGRQISEALTARRAFRRRRRGANLRYRTPRFLNRRRPEGWLPPSLCHRVDTTIAWVNRICCWAPITALSSELVRFDMQALENPGISGIEYQQGRLAGYELREYLLEKWDRMCIYCDARGRPLQIEHLTARARNGSNSIANLGLACSDCNQHKGSLGVREYVGDPKRLARILATASRPLRDAAAVNATRWALANALHATGLPLEIASGGRTKFNRIAHGIPKTHALDAACVGHVRGVLNWQRPSLKIQATGRGRYQRTRLSRDGFPRGYMMRQKQVHGFQTGDHVRADVPGGKKAGVHFGRVAVRATGSFNIQMASGVVQGISHRYCELVQRGDGYAYHLQATDGF

SEQ ID NO: 16207 - protein, 431 aa, unidentified
  REGION 1..431: note = Human gut metagenome
MPNKVYVINKHGRPLMPCSPAKARHLLDAGKAKVKKRTPFTIQLVYGSSGYTQEVILGVDAGSKTIGVSASTKKEELFAANVIPRNDVVDLLSTRRESRRARRNRKTRYRKPRFDNRVRSKHKGWLAPSVEVKIQEHITSIKRVCRILPVSKVVIETAEFDLQLLKAIADGKPVPQGEDYQQGEMYGHYNVRQYVLWRDNYTCQCCGAHATKKKEVRLHVHHLESRKVGGDAPDNQVTLCESCHEKLHKGLIAEKDFKKRKRRSTRDATFMGIMRKTLMQRLCSELPIPVVKTRGYITKATREKLLVLPKSHTNDALAIAQGKQGFNVGYLPGIVQINKIYTIRPVRHHNRQLHKATILKGGIRKSNQTEKYVFGYRLFDKVQFNGQDCFIWGRRTTGIFTIKTINGKMIKDGISFKKLKLVEKSTGYLIA

SEQ ID NO: 16208 - protein, 377 aa, Anoxybacillus sp.
IKATYRLKIDYGSRHTGLAILRGQEVVWLGQLDHRTDIKERMDKRRAFRRARRNRKTRYRKPRFLNRRRKDGWLPPSLESRVQNIQTWVNRLKKLCPIGYISYENAKFDTQLMRNPEINGVEYQQGTLQGYEVREYLLEKFGRKCCYCGKEGVPLEIEHIIPKSRGGTDRVDNLCLACHDCNQRKGSKTAEEFGYPHIQEMVKKTLKDASVVNATRWKVYEVLKQSGCEVECGTGARTKMNRIRLGLPKIHYFDACCVGESTTNHLYFKTKEVLFIKAKGRGSRSRTNLDRYGFPRGYLARQKFFFGFQTGDMVKAVVPRGKYQGVWFGEVACRKTGSFDIKGKDGKRIAQGINYRYVQVIQRFDGYAYGKGVAELA

SEQ ID NO: 16209 - protein, 427 aa, unidentified
  REGION 1..427: note = Human gut metagenome
LRVFVLNKRGKPLMPCSPAKARLLLKEKKAIVKRRTPFTIQLTIATGEAKQPVSLGIDAGYKHVGLSASTEKAELYASEVELRQDITDLLSARRALRQSRRNRKTRYRAPRFDNRIRTKRKGWLAPSVENRINAHLSRIEAVLRLLPITKITVETASFDMQRLKNPDISGKEYQEGEQLGFWNVREYVLFRDGHVCRHCHGRSKDPVLNVHHLESRRTGSDSPDNLITLCETCHKALHRGEITLKAKRGQSFRAQAFMGIMRREVLNRLKASYPELKVHETYGYLTKHARIANGIVKSHGADAFCIAGNLGAERLGEFFFQKQTRRNNRQIHKLSILKGGIRKRNQAPFEAKGFRLFDKVACQGEEGFIFGRRSSGYFDVRKLDGTRISAGISYKKLRLLEKRRTYLTEIRKEETLPPLPEGRGLRA

SEQ ID NO: 16210 - protein, 408 aa, unidentified; identical to SEQ ID NO: 4826
  REGION 1..408: note = Human gut metagenome

SEQ ID NO: 16211 - protein, 408 aa, unidentified; identical to SEQ ID NO: 4810
  REGION 1..408: note = Human gut metagenome

SEQ ID NO: 16212 - protein, 421 aa, unidentified
  REGION 1..421: note = Human gut metagenome
MLIYVLSKNGQPLMPTHRCGFVRRLLNSQKAKVVRRCPFTIQLQYDTDCKTQPVTLGIDAGSKHIGVSATTESKVLYEADIELRNDIVDLLATRRQMRRARRSRKTRYRKARFDNRKRNDKWLAPSIQHKVNCHLEAVRFVHKLLPISKIIVEVASFDIQKIKNPLITSTDYQNGELLDWKNVREYVLFRDSHICQCCKGKSKDPVLQVHHIESRKTGGNAPNNLITLCKTCHNGYHHGTVKLPAKIKRGMKFNDATFMGIMRWGFYNQLKSLYPDVSLTYGYITKDIRISNGLAKTHFIDARCISGNPLATSDNTVYFLKKRRRHNRQIHKFNILKGGRKKRNQAAYLVKGYRLFDKVNYNRKEYFIFGRRASGFFDIRTLSGEKVNKGSISCKKLKLLEASKGYLTERRNAFLSPLNSV

SEQ ID NO: 16213 - protein, 442 aa, unidentified; identical to SEQ ID NO: 4522
  REGION 1..442: note = Human gut metagenome

SEQ ID NO: 16214 - protein, 421 aa, unidentified
  REGION 1..421: note = Human gut metagenome
MRGQPLMPCSPAKARHLLKAGKAVVKRRTPFTIQLRIATGETKQNVTLGVDAGAKHVGLSATTEKEEVFASEVELRQDITGLLAARLSLRRDRRHRKTRYRAPRFLNRVRSKHKGWLAPSVENRIQAHMSRIDAVCRLLPVTKIVIETASFDIQKIKDPSVEGTDYQQGDQLGFWNVREYVLFRDGHVCQHCHGRSKDKILNVHHLESRQTGGDAPNNLITLCETCHKAYHAGKIKLKVKRGQSFRAEAFMGIMRWTLLDRMRKAHSGLPVENTYGYLTKNTRITLGLPKTHCVDAYCIAGNLKAVRRGVCLHQRQVRKHNRQIHKCTVLSKTLKDGTKIGYRKFNQTPHLVKNFRLFDKVRCLGQTGFIFGRRSSGYFDVRRLDGVKISSCINYRKLTLLEKRGTCLTELRKEDGASSPV

SEQ ID NO: 16215 - protein, 426 aa, unidentified
  REGION 1..426: note = Human metagenome
MLVYILKQNGQPFMPTERFGKVRRLLKEKKAKVVRREPFTIKLLYEPDTDVVQACYCGVDTGSKYIGVAVVGNDRVLYQSQIELRTDIKKKMDRRRGFRRLRRSRKTRYRKARFLNRRNSIKKDRFPPSVKHKVQAHIDEIEFCKKILPVSDENLILEVSQFDIALMKNPSLTSEEVKKWGYQQGFDYGYSSRREAIRHRDNYTCQCCGKKNCRLEVHHIKFRRDGGTDDEDNLITLCKECHDGVHAGTIELNKKPKKSKNLKYATHMSIIRSQLLKKYPDAIETFGFVTAENRNHLKLKKDHYIDACVIASGGLEFEHSNIILYKRRVSKGDYQLCKGIRGEQIIPTGKICGFRKFDKVVYLRKEYFIKGRMSSGFAVLMGIDGNKVGFSYMSKGLKTPKLLNCKRVLSRSSCLCITQKIVLNIV

SEQ ID NO: 16216 - protein, 429 aa, Moorena sp.
MCNYVFVLDVNHKPLNPCRPVTARKLLTAGKAAVYRRYPFTIILKKQVEAEPKPMSLKIDPGSKFTGLAIVYSNQVVWSAEIEHRGAQIKSALDSRRAVRRSRRNRKCRYRKPRFKNRKRPEGWLAPSLQHRVATTMTWVLKLMKLTAIGSIFQELVRFDTQKLQNPEISGIEYQQGELMGYEVREYLYQKWGRQCVYCGAKSVKLEVEHIIPKSKGGTNRVNNLTLACHGCNQAKGNLDARDFLSGKPDVLKRILGRAKQPLLDAAAVNSTRWQLYQSLKETGLSVAVGTGGRTKYNRIKLGLPKSHWIDAACVGEVATLEIVTRQPLLIKAMGHGCRQVIQMDKYGFPRKGYKPKHPVKGWKTGDIVNVVAGKNAGLKGVRIKTVRAKGNFDLIGADQDTSNKVLSASRNYIQCVHRQDGYYYSFAE

SEQ ID NO: 16217 - protein, 452 aa, unidentified
  REGION 1..452: note = Viral metagenome
MVYVISMDEKPLMPTTNAKARILLKEKKATVKRLRPFTIQLTYETKTTYVQKTTLGIDSGYLNIGFSVVDDKKELISGEVKLLQGMKERLIEKSSYRRNRRQRLRYRKARFDNRKKSKPKGWLAPSLQHKLNTHVKFINFLHSLIPVEKTIVEVANFDIQKMKDDLISGKGYQEGDMLGFWNVREYVLHRDGHKCQNPNCKNKSKNPVLMVHHLVYRSEGGTDRPENLATLCDKCHTPANHKKGKFLYDWMVQGKQMKGFKDATFMSMIRWMLINGLKETYPNINFTYGYLTKNKRIEQGIEKSHRNDAFVIANGTTQKRDENPFLVTQSRLKDRSLEKFYDAKYIDTRTGEKVSASDLPCGRSTRNKKLNTENLKIYRGQKLSKGQRRIRKQKYSYQANDLVKYEGKVYTVKGTQNGGKYVALKEMKKVPKVELLTPYVFKKGLNWSYNSI

SEQ ID NO: 16218 - protein, 487 aa, unidentified
  REGION 1..487: note = uncultured beta proteobacterium
GPRSSDSRQAIGDVRNGSDSNAGLQHGRGEMFSKHVTAARRVERSNPMSRVFVIAKHGDPLMPCEPARARQLLRKGMAVVHRTFPFVIRLKQRETGDVQPIKLKLDPGSKTTGIALTREAPGKSVALKLIELEHRGRQISDALTSRSSLRRRRRGQLRYRAPRFLNRGNKKNGWLAPSLMHRVHSTMSWVERLRRWVPVSDIASELVRFDMQALENPEVTGVEYQQGTLAGYEVREYLLEKWARKCAYCDATGVPLQIEHIVARARGGTDRISNLTLACGCCNQRKGASSIQEYLAKDQSRLKKILASAKAPLKDAAAVNATRWRLANELKTTGLRIELASGGRTKFNRTQFGVPKSHALDAMCVGNVVGVERWNQPTLLARSTGRGGYQRAITDAYGFPKAHKTRTKMQFGFQTGDMVRALIPRGKYTGVHTGRVSVRATGKFDLKSDSRPRFGVGHKHCTIVQRADGYSYSWKPTPTADQKGTTA

SEQ ID NO: 16219 - protein, 431 aa, Ktedonobacter sp.
MSKVFVLDMYEKPLEPVHPGRARILLSQRKAAVFRTFPFTIILKIKGEPLQIEPLRIKLDPGSRTTGIAIVNDRSGEVVFAAELSHRGHKIKESLDSRRAVRRSRRRRKTRYRKARFLNRRHHASWLPPSLESRVANVQTWVNRLARYAPISAMSMELVRFDMQLMENAEISGVEYQQGALAGYEVREYLLEKWNRKCAYCLKQGISLQIEHIVPRAKGGTNRVSNLTLSCEKCNTAKGTLDSAVFLKKKPAVLQRILAQVKKPLKDASAVNTTRWALYERLKATGLPIECGSSGLTKFNRTRKELPKAHWLDAANVGKSTPDVLFVKNIVPLLITATGHGRRQMCVTDSHAIGFPKQHKERHKTFLGYRTGDIVKAVTPKGTIRGRIAIRHRPSFRIGKVDIHPKYMRRLHRADGYEYQVKGVVALPPHS

SEQ ID NO: 16220 - protein, 292 aa, unidentified
  REGION 1..292: note = Human gut metagenome
MKDDLISGIDYQNGDMFGFWNVREFVLHRDGHKCQNPNCKHKDKKEQILKVHHIRYRSEGGSDRPENLITLCSKCHIPANHKKGKFLYDWCVNGKKVRGFKDATFMSMIRWYLVNELKSKHNNVSITYGYITKNHRIQNGIEKSHLNDAFAIAKGTNQARTKDRFLVIQDRLKNRSLEKFYDSKIIDIRTEKKVSGGDLNCGRSTRNKNLNTENLRKYRGAKISKGQRRIRKQKYFYQSNDLVKYDGKVYTVKGTQNEGKYIALKEIKKVPKVELLIPYVFKKGLNWSYGLC

SEQ ID NO: 16221 - protein, 420 aa, unidentified
  REGION 1..420: note = Human gut metagenome
MQYVYVLNKHGEPLMPCSPGKARLLLKQQKACVVKRTPFTIKLLYGSAGYKQPITLGVDAGSKHVGLSASTEKRELYCEEFTPRNDVVDLLSTRKQNRRSRRNRKTRYRAPRFDNRVHSMRKGWLAPSVEVKIQEHITVIKRICRILPITLVRVETAEFDTQRLKAMLEGKPLPVGTDYQLGEMYDEYNVRQYVLKRDHYTCQCCGAHTTTKKTVKLHVHHLESRKVGGNAPSNLITLCTTCHDALHKGKVSLDGKERGKPLRDAAFMGIMRKTLMARLRDELSIPVQGTYGYITKMRREQNDIKKSHVNDARCISKHPLAEPCSVCYRTKAIRHHNRQTHKANFSKGGIRKRSQMPYVVEGYRLWDKVLYKGQECFVSGRRASGSFTLKKLDGTRISKGVTFKKLRLLEPATNYLIERM

SEQ ID NO: 16222 - protein, 512 aa, unidentified
  REGION 1..512: note = Human gut metagenome
MSTVYVLNKDGKPLMPTTRGGHVRYLLKEKKARVVTSKPFTIQLLYETDDVVQPLYLGIDPGRTNIGVAVVKTDGTAVFTAHLETRNKEIPKLMQGRKKARRARRTNGRRCRRQRRAKANGTISKKCVKQTTAQNGSVSKRAKKIGVIKRHLPGCEKKVLCIGIKNKEAKFSNRTRPEGWLTPTANQLLQTHINLIKKIRKFLPVNDVVLEINKFAFMQLDNPNIQKWQYQQGPLYQKASLEEAVSEMQEHHCLFCKQSIVHYHHVVPQSENGSDTIGNIVGLCTKHHDLVHKDTAWQKKLAKKKTGLNKKYGALSILNQIIPALTKELSFLFPKHFFATNGKSTYDYRAAHGVSKDHWLDAYCIACSVLADDVCDNNISSHVPYELKQFRRHDRRALHKENMSRVHTLNGKSVATNRHKATEQTTDSLEEFRQRKPNDVCKLKVKEHHPEYRNPERNFPGCVFLVGKHTHVMQGTSGSHNGKADGYYDTNGNSYPSGKCKFVAKNKGIVFA

SEQ ID NO: 16223 - protein, 436 aa, unidentified
  REGION 1..436: note = Human metagenome
MTKTLTTQTTQACVLDQQGKPLMPTTRLGKVYRLLKTQKAHIVSYEPFTIQLDYEPDTRVIQPITLGVDSGAIHSGYSVANEHREYYSAEVIARNDISNRLSDRHMYRQNRRYRKTRYRKPRFNNRKNKKKGWLPPSLEQKVAVQVNEIDHLHRYFPIETIIVETAEFDIQKIKNPDISGIEYQQGTLQGYNIRNYLLEKHGRKCFYCGKAVSDFEVEHMFPKSKGGSNRIDNLTLSCHDCNEKKGTLTAEEFIQQTLPAKKATAKLKQLPQEKRLFKYMAYMNATRWALYDAIKERYPNVKMTYGYITKYNRIQAGLPKAHHIDAKCITGFSTVPSMSQTVVKVKMRRHNRQLHRATFSKGHVRKAASLPTKVFGFQLYDLVLYNNHRYYIKGRRSSGSFALVSVEGLKDEKRSYKKLTLLAHTNAYLTNHYVNA

SEQ ID NO: 16224 - protein, 424 aa, unidentified; identical to SEQ ID NO: 8578
  REGION 1..424: note = Human gut metagenome

SEQ ID NO: 16225 - protein, 512 aa, unidentified
  REGION 1..512: note = Human gut metagenome
MSTVYVLNKDGKPLMPTTRGGHVRHLLKEQKARVVRTKPFTIQLLYETDDVVQPLYLGIDPGRTNIGVAVVKADSTAVFTAHLETRNEEIPKLMQGRKKARRARRTNGRRCRRQRRAKANGTISKKCVKQTTAQNGSASKRAKEIGVIKRHLPGCEKDVLCIGIKNKEAKFSNRTRPEGWLTPTANQLLKTHINLVKKIRKFLPISDVVLEINKFAFMRLDNPNIQKWQYQQGPLYQKASLEEAVSEMQEHHCLFCKKSIAHYHHVVPQSENGSNTIGNIVGLCTKHHDFVHKDTAGQKKLAKKKTGLNKKYGALSVLNQIIPALTKELSSLFPKHFFATNGKSTHDYRIAHDVSKDHWLDAYCIACSVLPNDTCDRTINSRVPYELKQFRRHDRRALHKENMSRVYTLNGKSVATNRHKATEQTTDSLKEFRQRQPNDVCKLKVKEHHPTYRNMNRNYPGSVFLIGKQVHVMQGIAGSKDGEATTYKDTNANSIAAGKCKFVAKNSGILFV

SEQ ID NO: 16226 - protein, 544 aa, Actinomadura sp.
MATLDTRQQTHRRVLPQPAALESASVDTPGVGTKRGVDAAEAASGVHHGRGETTAAPPGGGGVTPGPSGAGEQGREARTRPPAVFVLDKHGTPLQPTTPARARKLLNAGRAVVARHTPFVIRLKDRTAERSQIDGVEVGVDPGSRHTGIAVFTARGGERRGRYAIRLDHRGAAITKKLRQRAAYRRGRRTRNLRHRPPRFSDRARPSGWLPPSLRHRVETTVSWIDRLTRWAPVRAVHVERVAFDTHALTAGRPLEGVEYQHGTLHGFEVREYLLAKFGRACVYCDAAGVPVNIDHVHPRSQGGSDRVSNLVLACIPCNRAKSDRPVQEFAPGRAAAIKARAKAPLRDAAAVQSTRWVLWRALDERLPTSVGSGGRTKWNRTRSRLPKSHTLDALAVGTLDSITGTVDTVLVAGCAGRGSYARTRTDRHGFPRLRLPRVKGFFGFQTGDLVRAVVPTGKKAGTHTGRVAVRATGRFNITTGTETVQGIGHRHVRLLQRADGYAYTTRPETRPEQPASRAGRLVSAQGGHTAPALLRRRSKSSSA

SEQ ID NO: 16227 - protein, 425 aa, Nodularia sp.; identical to SEQ ID NO: 3165

SEQ ID NO: 16228 - protein, 420 aa, unidentified; identical to SEQ ID NO: 3685
  REGION 1..420: note = Human gut metagenome

SEQ ID NO: 16229 - protein, 331 aa, Moorena sp.
MVYVLDKYGHPLMPTERHGKVRRLLNSSKAKVIKRCPFTIQLMYESMTNTQDISLGVDAGSKHIGISATTTDKELYAADIELRNDIVELLSTRREARRARRNRNTRYRAPRFNNRKREDNWLAPSVRAKVVTHLKVVNGVQKILPVSKIIVEVASFDIQKFKNPNIFGAEYQQGKQLNFWNVREYVLFRDGHTCQCCKGKSKDKILNVHHIESRKTGGDSPDNLITLCETCHKGYHNGTLKLPKTIRRGMSFRDATFMGVMRWAFYNKLKELYPNVKMTYGYITKNTRIENDLPKEHYIDARCISGNPLARPLGYVYYQKKVRCHNRQIHK

SEQ ID NO: 16230 - protein, 474 aa, Lactobacillus sp.
MDNIVEGQQRNSALGLPMRIAAGNMIAGKGGKMEYENANRVFLLNKDGKPLMPCRPRKARLLLKSGKAFVVKKYPFTIQLKYGSYGYKQKVSLGVDTGQRHIGFAVTSQDKVLHQSEVELRQDVHTNLYTRKIYRRGRRNRKTRYRQARFLNRVHGKRDGLWLPPSVKGKASHNIAWIKRYLAVLPNPDLHIEVGKFDMAKMVNPAISGKQYQEGSLKDWKNYEYYVLARDKYTCQLCHKHGEGVKLVVHHIVYRSQGGTDRVDNLITLCTNCHTTKNHQPGGKLYKWMKAKKKVTKQLKGATFMNILRKRIMIAFPEASYQYGYQTFFERKKFNLPKGHFTDAIAISGIKSVGQMPETVAMISQFRKKKRSLHEATARKGRKEPNRTSKRNAKNTKHARGLWLNDYVHVIGTNLRGYVQSYTSKGAYVRLSDGLGNYVIKDGKNYISTKLCKLITHNGNWQKAEQKLLLYEFK

SEQ ID NO: 16231 - protein, 443 aa, unidentified
  REGION 1..443: note = metagenome
LTKDENRPSSRTTGLRAEQAEPAGIRKGDTLKVFVLNMRGKPLMPCSPAKARHMLKAGKAFVVRRTPFTIKLTIATGETKQDVTLGVDAGARHVGISATTEKEEVFASEVALRQDITGLLADRLAFRRARRNRKTRYRAPRFNNRVRSKHKGWLAPSVENRIQAHISRIEAVCRLLPVTKIVIETASFDIQKIRNPEVEGTGYQQGDQLGFWNVREYVLFRDGHICQHCRGRSKDPILNVHHLESRKTGGDAPNNLITLCETCHKAYHAGKIKLKVKRGQSFRAEAFMGIMRWTLLDRVRKTHPKLPVENTYGYLTKHKRIVLGLPKTHCADAFCITGNLNALRRGDFLFQRQTRKHNRQIHKCSILKGGVRKLNQAPFLVKGFRLFDKVRIGGQIGFVFGRRVRGTFNIRRLDKTVIGTDINCKKLSLLETRKTFLTELRKE

SEQ ID NO: 16232 - protein, 448 aa, Thiorhodococcus sp.; identical to SEQ ID NO: 9652

SEQ ID NO: 16233 - protein, 477 aa, unidentified; identical to SEQ ID NO: 8085
  REGION 1..477: note = Human gut metagenome

SEQ ID NO: 16234 - protein, 461 aa, unidentified
  REGION 1..461: note = Human gut metagenome
VQPLYLGIDPGRTNIGVAVVKTDGTAVFTAHLETRNKEIPKLMQGRKKARRARRTNGRRCRRQRRAKANDTISKKCVKQATAQNGSVSKRAKEIGVIKRHLPGCEKEILCIGIKNKEAKFNNRTRPEGWLTPTANQLLQTHINLVKKIRKFLPISDVVLEINKFAFMQLDNPNIQKWQYQQGPLYQKASLEEAVSEMQEHHCLFCKKPIAHYHHVVPQSENGSDTIGNIVGLCTKHHDLVHKDTVWQKKLAKKKTGLNKKYGALSVLNQIIPALTKELSSLFPKHFFATNGKSTYDYRSAHGVSKDHWLDAYCIACSVLPNDVCDSGINNRVPYELKQFRRHDRRALNNENMSRVYTLNDNVVATNRHKATKQTTDSLEEFRQNHPDDVCKLKVKEHHPTYRNMNRNYPGSVFLIGKQVHVMQGIAGSKDWEATTYKDTNANSIAAGKCKFVAKNSGILFV

SEQ ID NO: 16235 - protein, 499 aa, unidentified; identical to SEQ ID NO: 6993
  REGION 1..499: note = Human gut metagenome

SEQ ID NO: 16236 - protein, 582 aa, unidentified; identical to SEQ ID NO: 8788
  REGION 1..582: note = Human gut metagenome

SEQ ID NO: 16237 - protein, 451 aa, Ruminococcus sp.; identical to SEQ ID NO: 2424

SEQ ID NO: 16238 - protein, 404 aa, unidentified
  REGION 1..404: note = Human gut metagenome
LLKEKKAIVVRRTPFTIQLTIATGESKQPVSLGVDAGYKHVGLSASTEKAELYASEVELRQDITDLLSARRALRQSRRNRKTRYRAPRFDNRIRTKRKGWLAPSVENRINAHLSRIETVIRLLPVTKISVETTSFDMQLLKNSDIAGKEYQESEQLGFWNVREYVLFRDGHVCQHCHGRSKDPVLNVHHLESRRTGGDSPGNLITLCETCHKELHRGEITLKAKRGQSFRAETFMGIMRWEVLDRLKASHPKLEVQNTYGYRTKHARIVNGIAKSHCADAFCIAGNLGAERLGEFLFQKQTRRNNRQIHKLSILKGGIRKRNQVPFEVKGFRLFDKVACKGEEGFVFGRRSSGYFDVRKLDGTRISAGISYKKLRLLEKRQTYLTEIRKEEALPPLPEGRGLRA

SEQ ID NO: 16239 - protein, 408 aa, unidentified; identical to SEQ ID NO: 6729
  REGION 1..408: note = Human gut metagenome

SEQ ID NO: 16240 - protein, 514 aa, unidentified; identical to SEQ ID NO: 6277
  REGION 1..514: note = Human gut metagenome

SEQ ID NO: 16241 - protein, 415 aa, Bacillus sp.; identical to SEQ ID NO: 10988

SEQ ID NO: 16242 - protein, 454 aa, unidentified
  REGION 1..454: note = Human gut metagenome
LDTVAVISASGKKLMPTNSYRARRLLKSKRAVIYRYRPVFTIKLAGRTDGYTQPIEYKCDTGYQNIGISICSDTKEFVNEQRDLLKDEVKRHSDSRKYRRTRRNRLRYRKKRFDNRRSMISKDGFAPSIRNKRDVHVRLYEEYYKVFPITKAVFEMGQFDTQVLKAVEAGLPIPDGTDYQRGEQYGYATLREAVFARDDYKCICCGKSAIKDGVKLRIHHIGYLSGDRSNRMANLGSVCENCHTSKNHKPGGKLYNLKPELKTFKGATFMTTVRYSMVKKLKVMTPTVDIKVTYGAATKLARKDLNVRKTHSNDAYCMGEFHPKHRSDFKHYKKCRRNNRVLSRFYDAKYRDLRDGSVKTGSQLSCGRTNRRIPRHTELNERIYRGHKISKGKLVVRRQHYQYRPGDTVWAEGKRCTVKGIISNGTRIALNERNPVSVNKIDKTVHTGGWAKAS

SEQ ID NO: 16243 - protein, 434 aa, unidentified
  REGION 1..434: note = Human metagenome
MSIVYVLGMNGQPLMPTRRSGWVYRALRDGRAKVVSKCPFTIKLLYESTNFIQPLTLGVDTGSKYVGSAVVNDETSKVLYESQTELRDDIKSKMDRRRQFRRTRRNRLRYRPARFNNRRASKHKERYNPTLIAKFQGHKREIEFIKSILPISSLVLEVGEFDTQLLQDTSLAYRKWGYQKGELYQQENFKQAARARDNYRCQCCGKKDCRLEVHHLLPRSKGGSDKLANLITLCTDCHHLAHSSEEQLLAFQKRFGKKAKGTLRYATQMNVLRHMLQREYPNAEITYGFITKEVRRIFSIEKTHATDACCIASRGILFKNKNSNKYKKKCVANGDYARTDVCRGKFVILPKGKIAGFRRYDKVLHDNKEYFVVGRESVGYVYLIDIDNNRLQVERTRRNTGEKYISKAKIKASLVKKITGVKSCICVENYLNRL

SEQ ID NO: 16244 - protein, 414 aa, unidentified
  REGION 1..414: note = Human gut metagenome
MPCSPAKARLLLKEKKAIVKRRTPFTIQLTIATGESKQPVSLGVDAGYKHVGLSASTEKAELYASEVELRQDITDLLSARRALRQSRRNRKTRYRAPRFDNRIRTKRKGWLAPSVENRINAHLSRIEAVLRLLPVTKITVETASFDLQLLKNPDISGKEYQEGEQLGFWNIREYVLCRDGHVCQHCYGRSKDPVLNVHHLESRRTGGDSPGNLITLCETCHKALHRGEITLKAKRGQSFRAEAFMGIMRWEVLNRLKASHPELEVNNTYGYRTKHARIANDIAKSHCADAFCIAGNLGAERLGEFFFQKQTRRNNRQIHKLSILKGGIRKRNQAPFEVNGFRLFDKVACKGEEGFIFGRRSSGFFDVRKLDGTRISAGISYKKLHLLEKRRTYLTEIRKEEVLPPLPEGRGLRA

SEQ ID NO: 16245 - protein, 442 aa, Sutterella sp.
MSTSVFVLDKKHRPLMPCRPARARRLLRAGRARVVKRFPFVIRLVDRTLEKSEVQPVLIKLDPGSRETGAAVVREDEKKRHHALAFFVIKHRGGVIRDALKARSAFRRRRRSQNLRYRTPRFLNRVRPKGWLPPSLRHRVDTTLSVVRKLCRYLPVSGLAMELVKFDSQKLQNPEVAGVEYQQGTLFEYEVREYLLEKFDRKCGYCGAEGVPLNIDHVVPRAKGGSNRVSNLVLACVDCNQKKGARSLEDFLKGKPEVLARVRQALKTPLRDAAAVNATRWVLFNELKATGLPVETGSGAQTKLNRHAFGVGKEHWLDALCVGRINGVVIPKGLNVLEIKCAGRGSYQRTRLTKYGFPRGYLMRQKRIHGFATGDMVEANVPKGKKAGLWRGRVAVRASGSFNIQTPKGVIQGVGWKYCRLISHNDGYGYAWLGHAPHSSPA

SEQ ID NO: 16246 - protein, 465 aa, unidentified
  REGION 1..465: note = Human gut metagenome
MSTCVCVLSNSGERLMPTIRLGKVRRLLKDGKAKIIKHHPFTIQLLYDSKANTQPIEICEDVGYNYIGISVKSQSHEYVSAQYDTLQDEKACHDSCRKLRRTRRNRLRYRKPRFDNRKRGEGWLAPSLEHKKQLNIRLIERYVSVIPITHATVEVGSFDTMLVKAIEEGKATPESADYQKGPRYNLATLREAVFYRDNYICKVCGRKATEGAILHMHHMFYWKGRHGDSLSELITVCEKCHTPANHQKSGKLYGFGENVKFADLSGAAFMNTVRWQIVNELYAAFGKDFVTVTYGAMTKEKRIALHLEKSHNNDAYAMGSFHPVNRCAFEHYEKVKRNNRILEKFYDSQYIDTRTGELTNGKSLFNGRISRSHKKDSENLHKYRGKRICKGHRALRRKKLALNPGDLVSLNGEILVVHGTHTKKNGSVNVEFKTPSRGGKKSASLKKLKIVKTSNLMHSAWTKVS

SEQ ID NO: 16247 - protein, 408 aa, unidentified; identical to SEQ ID NO: 5302
  REGION 1..408: note = metagenome

SEQ ID NO: 16248 - protein, 462 aa, unidentified
  REGION 1..462: note = Human gut metagenome
MSVLVIGRNGRALMPTNPRKARLLLKKKTASVVCRHPFTIQLLYKTGCATQKGSIGIDTGSQHIGVGITCGDKVILKDEHALRSSMEKRSLLATRAVMRRGRRYRKVRYRKPKWRHHTKRMYFEKANRRGQHWRKVKTTTQSPRPKGWLPPSLQSKCDHHFCIIDRYLKYLPDPITRNLVIETGRFDMARMNDPTIHGEMYQRGPMYDAENLRAYIFARDNYQCACCKAKAGTTRKADGTTVKLVAHHILFRSRGATDNPKYMVSVCDHCHTTKAHQPGGILYSWMENNKKVARGLRDATFMNILRKRLFARYPQAAFTYGNITATDRKQLRLPKSHANDAVAISLFGKEASTVKNICQTMHYKQIRKSKRSLHEAIPRKGRKNPNTKAVRNKKNTTQVNGFKLWDSVLANGKKLFICSFTGTSAYLIDKNGCYISQPGKTYKQWPLSKLKRLHPNGNWLMA

SEQ ID NO: 16249 - protein, 433 aa, Lactobacillus sp.
MQNRVFVINKHGKALMPCKPRKARILLRDGKAKVLKKEPFTIQLLYGSAGYKQDISIGIDSGQRHIGLAVTSQDKVLFQGEVELRQDVKKLIDTRRIYRRSRRNRKTRYRKARFLNRIASKKDNWLPPSVASKVNHNINWIKRLLSVLPKADLHIEVGKFDMQKMKNPAINGEGYQQGDLYGYQTVKQFVLARDNYTCQVCKKKGGRLKIHHIIYRSLGGTNTVDNLITVCSNCHTTKNHQTGILAKWCKDKKKVNKSYKGATFMNILRRSLYTAFPQAKFQYGAWTTLQRADLELTKSHYNDAVAISGIRKIQAKPTSIMMFKQFRKKKRSLHEATARKGRKTPNITSKRNAKNTKYAKGFWLNDYVKIKDSNKKGYISGFSKTTCYIKDIFGNYLTTSNKYKQVALSKLDRLSHHNNWSKQEINENVYQMN

SEQ ID NO: 16250 - protein, 512 aa, unidentified; identical to SEQ ID NO: 12631
  REGION 1..512: note = Human gut metagenome

SEQ ID NO: 16251 - protein, 413 aa, unidentified; identical to SEQ ID NO: 5705
  REGION 1..413: note = Human gut metagenome

SEQ ID NO: 16252 - protein, 413 aa, unidentified; identical to SEQ ID NO: 3476
  REGION 1..413: note = Human gut metagenome

SEQ ID NO: 16253 - protein, 424 aa, Moorena sp.
MVVMNVVYVLSPDRVPLMPCSCAIARLLLKQGKAKVVRRTPFTIKMYTQPVDTHTQPLTLGIDTGSAVIGSAVSDECGNILYVSEVEVRNDIAQTMKKRATSLRNRRYRKTRYRPARWLNRRNSLKTGRFSPTMTSKTEAHLREIRFVQSLLPIQSIVLETGTFNPHALKHPAVLQNKWMYQKGINYGLANTKAYVLTRDGYVCQRCKGQSKDRRLEVHHIVFRSQQGSDEEANLLTLCKTCHDGLHAGTVTLKQKGKRKGNLLHATQMNSIRIQLLSRVEAIETWGFVTKEHRLLAGLPKEHIFDAAMIATRGNIPVFQTTEVLLKKCISDGDYQQTKGKHSQQRIPTGKIAGFRKFDKVRYLGVEYFIKGRMSTGYAILMDLSGNKLALKPTPKFDNMKRVSARSSWIINQKAMPSFSSSPT

SEQ ID NO: 16254 - protein, 424 aa, Symploca sp.
MFVLTVDKNRNSLNPTHAARARRFLKEGRAVVLRRYPFTIMLKEVEGSNALEYRLKLDPGSKTTGIAVVTDDRVIWGAELHHRGYSIKQSLESRRALRRGRRNRHTRYRQPRFDNRARADGWLAPSLQHRVLTIKTWVERLRRFCPISAISMELVRFDIQLMQNPEVSGVLYQQGELVGYEVREYLLEKWGRKCAYCHKEGVPLEVEHIQPRSKGGPNRVSNLTLACTKCNQRKGNKPVEQFLSRKPELLKGILAAAKRPLKDAAAVNSTRWALYRALKQTGLAVETGTGGRTKFNRTSQELPKTHWLDAACVGSSISERLKVLVAKPLAITATGHGTRQMCRTDKFGFPSRYVPRYKFVKSFQTGDIVKAIVTVGKKIGTYVGRVAVRSTGSFNISTVNGLIQGISHKYCKHIQKKDGYSYAH

SEQ ID NO: 16255 - protein, 420 aa, unidentified
  REGION 1..420: note = Human gut metagenome
MQYVYVLNKHGEPLMPCSPRKARLLLKQKKACVIKRTPFTVKLLYGSTGYKQPVTLGVDAGSKHIGISATTEKHELYREEATPRNDVVDLLSARRAFRRSRRNRKTRYRAPRFDNRVHSKHKGWLAPSVEVKIQEHITLVEHVCRILPVTLVRVETAEFDTQRLKAMLEGKPLPVGTDYQLGEMYDEYNVRQYVLKRDNYTCQCCGAHSTKTKGVKLHAHHIETRRTGGNAPNNLITLCTACHKALHAGKVTLDGKKRGKPLKDAAFMGIMRKTLMERLRKELKIPVQGTYGYITKCLREKNGIPKSHTNDARCISKNPLAIPCDTCYYTKAVRHHNRQLHKATILKGGIRKANQAPYIVKGYRLWDKVAYNGTECFITGRRTSGYFALKELDGTVVSNSISYKKLRLLEAATNYITERK

SEQ ID NO: 16256 - protein, 423 aa, unidentified; identical to SEQ ID NO: 4024
  REGION 1..423: note = Lachnospiraceae bacterium UBA2727

SEQ ID NO: 16257 - protein, 414 aa, unidentified
  REGION 1..414: note = Human gut metagenome
MVYVINKQGQALMPTERFGKVRRLLKNSLAHVVCRIPFAIQLDYDTTDYTQPVSLGVDAGSKHIGISATTSEKELYAADVELRNDIVDKLSTRREQRRTRRGRLRYRKARFNNRVSSKRKGWIAPSIENKIQTHLTIVEKIHKFLPITNIVVETASFDIQKINNPSIYGSEYQQGEQLDFFNVREYVLFRDNHICQHCKGKSKDKVLNVHHIESRKTGGDSPKNLITLCETCHKAYHRGEFELNVKRGKSFRDAAFMGIMRWSFYDRLKNIYPNVSMTFGYITKNTRITNNLPKDHYVDARCISGNPVAKPLGYYFYQKKVRCQNRQIHKANFLKGGRKKLNQAPFLVKGFRLFDLVEYQKDLYYIFGRRDRGFFDIRKLDGIKVNKGSINYKHLRLIDKRKSILTEKRTQVNL

SEQ ID NO: 16258 - protein, 450 aa, Moorena sp.; identical to SEQ ID NO: 2935

SEQ ID NO: 16259 - protein, 512 aa, unidentified; identical to SEQ ID NO: 13894
  REGION 1..512: note = Human gut metagenome

SEQ ID NO: 16260 - protein, 418 aa, unidentified; identical to SEQ ID NO: 8891
  REGION 1..418: note = Human gut metagenome

SEQ ID NO: 16261 - protein, 408 aa, unidentified; identical to SEQ ID NO: 6232
  REGION 1..408: note = Human gut metagenome

SEQ ID NO: 16262 - protein, 415 aa, Ruminococcus sp.; identical to SEQ ID NO: 4916

SEQ ID NO: 16263 - protein, 442 aa, unidentified; identical to SEQ ID NO: 7529
  REGION 1..442: note = Human gut metagenome

SEQ ID NO: 16264 - protein, 456 aa, unidentified; identical to SEQ ID NO: 3676
  REGION 1..456: note = Marine metagenome

SEQ ID NO: 16265 - protein, 427 aa, unidentified; identical to SEQ ID NO: 10893
  REGION 1..427: note = Cyanobacteria bacterium UBA8543

SEQ ID NO: 16266 - protein, 470 aa, unidentified
  REGION 1..470: note = Human gut metagenome
MSVFVVGLNGCRLMPTSERKARLLLKQGKAFVEQKVPFRIRLNYKTGSTTQLGYLGIDTGSQHIGVSVVREDGTVLHKEEIGLRDSMSKRKLLEAKASLRRGRRYRKTRYRHPKWRPKTKRVYCEVPDRKGRHWQKKKITFTSKRPKGWLPPSLQSKTDHHIRWIKKLQDLLPEGYRLSIELGRFDPARMKNPEIHGDLYQKGPQYDYENVRAYVLDRDRYTCQICKKKGGKLHVHHILYRSHGATDDPQYMVTVCSDCHSAQNHLPGGILYQWMQEQKRFSRGLRDATFMNILRKRLIRAFPEAVFTYGNVTKVDREKLKLPKSHGNDATAIALVKTGITAVKDKESVICIQQVRRKKRSLHEETPRKGRKEPNRTAARNNKNTKAVTVTKRQNKKKVSMTGCLFDRVELNGKKGWISGFTGKSCYVKDADDQYLSTSPKYKQVSLSKLRILHHCGNWIIGAKKTLGKG

SEQ ID NO: 16267 - protein, 406 aa, unidentified
  REGION 1..406: note = Human gut metagenome
MVYIQDIDGKPMMPTTRHGKVRRLLKDSKAVVVNTCPFTIKLMYKTSGYKQEIVLGVDAGTKHVGLSATTKSKELYSSEVILRSDIVELLSTRRESRRTRRNRLRYRKPRFNNRIKSKRTGWVAPSVRHRIDAHIRVIDNICSILPVSRVIVEVAQFDTQKIKNPDISGDEYQEGDQLGFWNVREYILARDGHKCQHCKGKSKDPILNVHHIESRKTGGDSPSNLITLCETCHKEYHKGNIDLKVKRGKSLRDAAVMGIMKWKLYDELKSRCDNVSMTFGYITKYNRIKYGIEKSHTSDAFVISRNFNAKRIERQYLKRLIRRHNRQIHKMKISKGGKKKNNQAPFEIFRFRLFDKVLYNNEILFVYGRRKSGNFNIRDFNGENPKDVSHKKLKLIRGKRHLIILK

SEQ ID NO: 16268 - protein, 450 aa, Moorena sp.; identical to SEQ ID NO: 2935

SEQ ID NO: 16269 - protein, 326 aa, Moorena sp.; identical to SEQ ID NO: 7203

SEQ ID NO: 16270 - protein, 350 aa, Aphanizomenon sp.; identical to SEQ ID NO: 7152

SEQ ID NO: 16271 - protein, 454 aa, Streptomyces sp.; identical to SEQ ID NO: 9429

SEQ ID NO: 16272 - protein, 431 aa, unidentified; identical to SEQ ID NO: 4463
  REGION 1..431: note = Human gut metagenome

SEQ ID NO: 16273 - protein, 389 aa, unidentified; identical to SEQ ID NO: 11598
  REGION 1..389: note = Human gut metagenome

SEQ ID NO: 16274 - protein, 437 aa, unidentified; identical to SEQ ID NO: 6287
  REGION 1..437: note = Wastewater metagenome

SEQ ID NO: 16275 - protein, 426 aa, unidentified
  REGION 1..426: note = Human gut metagenome
LAKDHYRSIDREETNLRVYVLNKRGEPLMPCSAAKARILLKEKKAKVKRRTPFTIQLTIATGETKQPVTLGVDSGYRHVGLSASTEKAELYASEIELRQDIPELLAARRALRGARRSRKTRYRAPRFDNRKRDKGWLAPSVENRIGAHVSRVEAVLRILPVTKIIVETASFDVQRIKNPDVQGVEYQEGEQLGFWNVREYVLFRDGHECQHCHGKSKDRVLNVHHIESRRTGGDAPNNLITLCETCHKAFHRGEFELKVKRGRSFQAEAFMGVMRWTFFERLRARHPEIEVRNTYGYLTKDTRIANKIEKSHCADAFCIAGNLKAKRLGYYFFQKQTRRHNRQIHKLTILKGGVRKRHQTPYEIKEFRLYDKVLYRGKTAFIFGRRSSGYFDIRTLDGERISAAVNSKKLRLLEKRRTFLIELRRN

SEQ ID NO: 16276 - protein, 466 aa, unidentified
  REGION 1..466: note = Human gut metagenome
MSTCACVLSKNGERLMPTIRLGKVRHLLKDGKAKIIKYHPFTIQLLYDSKTDTQPIEICEDVGYNYIGISVKSESHEYVSAQYDTLQDEKDCHDDCRKMRRSRRNRLRYRQTRFDNRKRGEGWLAPSLEHKKELNVNVIKMYCEVAPITHATVEVGSFDTMLVKAIEEGKAAPEGVDYQKGPRYNLATLREAVFYRDNYTCQVCGREAQKDSAILHVHHMFYWKGRHGNSLSELLTVCEKCHTPANHQKGGKLYGFGENIKFSNLSGAAFMNTVRWQIVNELYTAFGKPFVTFTYGVMTKEKRIALNLEKSHNNDAYAMGSFHPADRCAFEHYEKVKRNNRILERFHDSQYIDIRTGKVTNGKSLFNGRINRSHKKDSENLHKYRGKRIRKGYRALRRKKVALNPGDSVSFNGEILIIQSTHTKKNGSVNVEFKTPSKSGKKSASLKKLKIVKMSNSMHSAWTKVS

SEQ ID NO: 16277 - protein, 442 aa, unidentified; identical to SEQ ID NO: 3234
  REGION 1..442: note = Human gut metagenome

SEQ ID NO: 16278 - protein, 456 aa, unidentified; identical to SEQ ID NO: 13627
  REGION 1..456: note = Human gut metagenome

SEQ ID NO: 16279 - protein, 442 aa, unidentified; identical to SEQ ID NO: 8963
  REGION 1..442: note = Human gut metagenome

SEQ ID NO: 16280 - protein, 413 aa, Clostridium sp.; identical to SEQ ID NO: 4134

SEQ ID NO: 16281 - protein, 460 aa, unidentified
  REGION 1..460: note = Sediment metagenome
VAVFVLDRNGKPVMPCTEKRARLLLERGRARVQRVLPLVIRLVDRTVDSCTFQPLRLKLDPGSKVTGLALVREFSVGIAVLNLFDLMHRGRQISEALTARASMRRGRRGRNTRYRAPRFLNRRKPKGWLAPSLQHRVDTTMAWVNRICRWAPVTALSTELVRFDMQAMENPEVSGIEYQQGTLAGYELREYLLEKWGRQCMYCDKEGVPLQVEHIHARASGGSNRPSNLGISCQPCNQKKAARDVRELLKKDPARLARILAQAKRPLKDAAAVNSTRWALLNSLKTTELAVEASSGGRTKYNRCRLDVPKTHALDAVCVGEVEAVTDWRRPTLAIKATGRGSYQRTRMDKYGFPRGYLMREKSVEGFQTGDMVRATVTKGGKVGKYVGRVAVRASGNFNIQMSKEVVQGINHRYCTMVQRADGYGYSFNMDSNISAGAGHASRAALSLPGINAGISRAKA

SEQ ID NO: 16282 - protein, 277 aa, unidentified
  REGION 1..277: note = Human gut metagenome
MPNKVYVINKHGRPLMPCSPAKARHLLDEGKAKVKKRTPFTIQLVYGSSGYTQEVILGVDAGSKTIGMSASTTKEELLSAEVKPRNDVVDLLSARREFRRARRNRKTRYRKPRFDNRVRSKHKGWLAPSVEVKIQEHITSIKRVCRILPVSKVVIETAEFDLQMLKTIADGKPVPQGEDYQKGEMYGHYNVRQYVLWRDNYTCQCCGAHATKKKEVRLHVHHLESRKTGGDAPDNLITLCESCHEKLHKGVIAEGDCKSVSVVPHGMPHSWASCGRL

SEQ ID NO: 16283 - protein, 512 aa, unidentified
  REGION 1..512: note = Human gut metagenome
MSTVYVLNKDGKPLMPTTRCGHVRYLLKEKKARVVASKPFTIQLLYETDDVVQPLYLGIDPGRSNIGVAVVKTDGMAVFTAHLETRNKEIPKLMKKRKDSRRARRTNGRRCRRQRRAKANGTISKKCVKQTTAQNGSVSKRAKEIGVIKRHLPGCEKDVLCIGIKNKEAKFNNRTRPTGWLTPTTNQLLQTHINLVKKIQKFLPISDVVLEVNKFTFMQLDNPNIQKWQYQKGPLYQKESLKSAVSEMQEHHCLFCKKKIDHYHHVVPQHKNGSNTIDNIVGLCTQHHDLVHKDATWQKRLAKKKTGLNKKYGALSVLNQIIPALTKELSSLFPKHFFVTNGKSTYDYRAAHGVSKDHWLDAYCIACSVLPNDTCDKTINSCVPYELKQFRRHDRRALNNENMSRVYTFNGKMVATNRHKATEQTTDSLEEFRQRQPNDVCNLKVKEHHPTYRNMSRNYPGSIFLVEKQVHIMQGIAGSKDGKATTYKDTNANSIAAGKCKFVAKNSGILFV

SEQ ID NO: 16284 - protein, 465 aa, unidentified
  REGION 1..465: note = Human gut metagenome
MSTCVCVLSNSGERLMPTIRLGKVRRLLKDGKAKIVKHHPFTIQLLYDSKTNTQPIEICEDVGYNYIGISVKSESHEYVSAQYDTLQDEKKHHDDCRKYRRTRRNRLRYRKPRFDNRKRSEGWLAPPLEHKKQLNIRLIERYVSVIPITHATVEVGSFDTMLLQAIQKGKSKPEGVDYQKGPRYNLATLREAVFYRDNYTCQVCGRKIADGVILHMHHMFYWKGRHGYQLDELVTACEKCHTPANHQKGGKLYGFGEDIKFANLSGAAFMNTVRWQIVNVLYAAFGKPFVTFTYGAMTKEKRIALHLEKSHNNDAYAMGSFHPVNRCAFEHYEKVKRNNHILEKFYDSQYIDTRTGELTNGKSLFNGRISRSHKKDSENLHKYRGKRICKGHRALRRKTLALNPGDLVSLNGEILVVHGTHTKKNGSVNVEFKTPSRGGKKSASLKKLKIVKTSNSMHSAWKKVS

SEQ ID NO: 16285 - protein, 415 aa, unidentified; identical to SEQ ID NO: 2674
  REGION 1..415: note = Human gut metagenome

SEQ ID NO: 16286 - protein, 418 aa, unidentified; identical to SEQ ID NO: 13450
  REGION 1..418: note = Human gut metagenome

SEQ ID NO: 16287 - protein, 506 aa, unidentified
  REGION 1..506: note = Human gut metagenome
MVAVLSNVGKPMMPTTEYKARKLIEKGRAIPYQYKPMFTIMILDRSGGYTQPIELKEDTGYEHIGISVCSQKHEYERKEIITLLDEPEKHHDARMHRRTRRNRLGYRPPRFDNRKRENGWIPPSLQHKIDIHLYWFNQYAEVLPITDAVFEIGTFDTKRLNAIEKGEKLPYGEDYQKGEQADFYTLRDAVFARDDYTCVVCGKGIQDGAVLRTHHVGYRHGDRSNRMSNLVTVCDHCHTTKNHQEGGALYDLKAPTKKKANAAFMNVARQRIIDCAKKSHPEINISCAFGSETKMSRKNLQIEKSHTNDAYAMGEFHPKHRCRETIYQKVRRNNRILSRFYDAKYIDRRDGLTKTGKQLSSGRTNRNHKLDSENFRVYRGKKIQKGRTATRQQVYEFKTKDIVLYQGKRYVVKGTNNKGQNVQLYLNMTADLKDLTIKTKNKRKTADPNRIEVGDKVFTEFNGKKKVFTVKNIDPTTNQVSLQADLSTKPSELKLVKYSNGYKQIK

SEQ ID NO: 16288 - protein, 456 aa, Halomonas sp.; identical to SEQ ID NO: 10060

SEQ ID NO: 16289 - protein, 489 aa, unidentified
  REGION 1..489: note = Human gut metagenome
MAMVYVQNKDGKPLMPTTRYCYVRLLLKEKKARVVCTTPFTIQLNYDTPDITQDLILGIDPGRTNIGVAVVKEDGQCVFSAHLETRNKDIPLLMKKRAGFRRQHRTLDRRRKRQRRARAAGTTIAEGSVERLLPGYEKPVVCHYIRNKAARFNNRSRPAGWLTPTANHLLQTHINLIAKVAKFLPITKVVVELNRFAFMAMDNPNIHRWEYQQGPLYGLGSVEDAVYAQQDGHCLFCKKPIDHYHHVIPRHKGGSETLANRCGLCAKHHDLVHKDKAWADKLVTRKEGMNKKYHALSVLNQIIPFLMEYLGSETLYDVYAIDGRSIKGFRIAKNVPKEHYTDAYCIACSILDTDNKVSAPVEPFELKQFRRHDRQACIRQMVDRKYLLHGKVVAANRHKAFEQKSDSLQEFREAYSDVAVSQLTVKPHPPQYKDMSRIMPGAVMDFDGIVGVMQSSIVGQFYKSTKGHKATPKRCVLLSQNAGMVFIPT

SEQ ID NO: 16290 - protein, 421 aa, unidentified; identical to SEQ ID NO: 4235
  REGION 1..421: note = Human gut metagenome

SEQ ID NO: 16291 - protein, 337 aa, unidentified
  REGION 1..337: note = Human gut metagenome
MPKVYVLNRHGRPLMPCTPAKARHLLDAGKAKVRHRTPFTIQLLYGSTGYTQEVILGVDAGSKTIGLSAATETEELFSAEVKPRNDVVELMSARRQFRRARRNRTTRYRKPRFDNRVRSKHKGWLAPSVEVKIQEHMTAIRRACAILPVSKVVVETAEFDLQLLKAVAEGKPVPQGEDYQKGEMYGHYNVRQYVLWRDSYTCCICGAHGSVRKGVPLHVHHLESRRVGGDAPDNLVTLCTACHDKLHKGIIMVADIKKRKRRSTRDTTFMGIMRMTLLRRLWEQLPVPVVETRGYITKATREKLLVLPKSHTNDALAIAQNICQISVRRTDFTPSAL

SEQ ID NO: 16292 - protein, 406 aa, unidentified; identical to SEQ ID NO: 2973
  REGION 1..406: note = Human gut metagenome

SEQ ID NO: 16293 - protein, 470 aa, unidentified; identical to SEQ ID NO: 2825
  REGION 1..470: note = Human gut metagenome

SEQ ID NO: 16294 - protein, 451 aa, unidentified
  REGION 1..451: note = Human gut metagenome
MSVAVMSKTGMQLMPTSEYRARKLLKSKKATVYGHNPFTIQLTERETGDVQPVELCMDTGYLHIGTSVKSEKHEYLGVQIDTLTDEKQKHDACRMYRRQRRGRKRYRQSRFNNRKRSDGWIAPSLEHKKDIHIQTISRICNAMPITNITLEMGNFDTQVLKALEKNRPLPQGTDYQHGERYGIATLREAVFARDKYTCQCCRRTIADSAILHVHHIIYRSRGGTNRMSNLATVCDGCHTPANHKPGGRLYNWKPKIASFKGATFMTAVRWKMYNEVKSKFSNIKIHITYGAKTKEQRRAFDITKSHVNDAFVMGQFHPKHRSRPICYKKKRRNNRCLEKFYDAKYIDSRDGKKRSGQELFNGRIDRNHKKDSENLHQYRQQKVSAGRRTIRKQHHSIQPHDIVVFNRQQFETSGCHCNGARAILLPQKKSVAIKKLSIHKYAGGYFKSDFT

SEQ ID NO: 16295 - protein, 466 aa, unidentified
  REGION 1..466: note = Human gut metagenome
MKVLVIGRNGLGLAPTTPRKARILLKEKRAEVAYRQPFTIRLKYKTGCAHPKMCLGEDTGSQHIGFAILTEKGQVLDKTEYELRSTMEKRSLLETRKEYRRGRRYRKVRYRHSKFHPTTKRLYVEKPIKYNKHTTHWKKQTNSFDSSRPEGWLPPSIQSKLDHHIRLTSRYKEALPPDTMIRIEVGRFDVAHMKDPTINGKMYQQGPMYESENVKAYVFARDSYTCKCCKAKAGSIRKDGTQVKLKAHHIDFRSKGATDNPERMVSVCDRCHTTAAHQLGGILYQWMIEGKKFSRGYRDPAFMNILRRRMWKAFPEAAFTYGNITAADRKGLLIEKSHANDAVAIAAHGMELIRNSTETTFYKQLRKQKRSLHEATPRKGRREPNRTAKRNRKNTCVVKGWYLNDKVTVFGKTGWISGFSGKSSVYIRDCENEYITVPGKNYKLVPISQIKMITHCNNWAVYTKIA

SEQ ID NO: 16296 - protein, 426 aa, unidentified
  REGION 1..426: note = Human gut metagenome
MVYVQDIDGKPLMPTTRHGKVRRLLKSNKAVVVNLCPFTIRLTYISDSYKQEIVLGVDAGTRHVGLSATTKSKELYSSEVILRNDIVDLLSTRRESRRTRRNRLRYRKPRFDNRVKNKRQGWVAPSVRHRIDAHIRVIDNVCSILPISRIVIEVAQFDTQKINNPEISGKEYQEGNKLGFWNVREYVLCRDGHKCQYCKGKSKDSILNVHHIESRKTGGNSPSNLITLCETCHKEYHKGNIDLKIKRGKSLRDAAVMGIMKWRLYEELKSKYDRVSMTFGYVTKYNRINHDIEKSHVSDAFVISKNFNAIRLGYYYKVKLVRRHNRQIHKQKIQKGGIKRLNQSPFEVFGFRLFDRVMFENSYYFIFGRRKTGSFDIRDIDGKRQKNITYKKLKLSRCKRFMIQMELNKKTRTCFENERNSDRDAA

SEQ ID NO: 16297 - protein, 408 aa, unidentified; identical to SEQ ID NO: 11651
  REGION 1..408: note = Human gut metagenome

SEQ ID NO: 16298 - protein, 459 aa, unidentified
  REGION 1..459: note = gut metagenome
LRQAIKSSEGKERCRLHQTPSNIDEGCLLPERAWRQNLRVFVINQRGKPLMPCSPAKARVLLREKKARVKRRTPFTIQLTTATGEARQDVSLGVDAGYRHVGLSASTEKAELYASEAVLRDDITDLLSARLALRRARRSRKTRYRAPRFLNRVHSKNKGWLAPSVEQRIASHLKLVENVCRLLPVTKITVETASFDMQAIKNPDIKGAEYQQGEQLGFWNVREYVLWRDGHQCQHCRGKSGDPILNVHHLESRRTGGDAPNNLVTLCETCHKAYHAGRIDLKLKRGRSMRAEAFMGIMRWTFFNRLKEIHSGKTVENTYGYLTKHTRITHGIEKSHCADAYCIAGNLRAERLPDYLWQKQVRKHNRQIHKLTIGKGGIRKRQQTPFEVKGFRLFDKVRLGDEEGFIFGRRSSGYFDVRRLDGQKLSAGVSFRKLHLLEKLTTYLTVLLPRLKTRVSAPE

SEQ ID NO: 16299 - protein, 369 aa, unidentified
  REGION 1..369: note = Human gut metagenome
KIGVIKRHLPGCEKEVLCIGIKNKEAKFNNRTRPAGWLTPTANQLLQTHINLIKKIQKLLPISDVVLEINKFAFMQLDNPNIQKWQYQQGPLYQKANLEEAVSEMQEHHCLFCKKKIDHYHHVVPQHKNGSNTIDNIVGLCTKHHDLVHKDTAWHEKLTKKKTGLNKKYGALSVLNQIIPALTKELSSIFPKHFFVTTGKSTYDYRAAHGVSKDHWLDAYCIACSVLPSNVCDSNINNHMPYVLKQFRRHDRRVLNNENMNRVYTLNNKAVAINRHKAKDQKTVSLEEFRKEHPDDVCKLKVKEHHPTYRNMNRNFPGSVFLVGKQIHVMQGIASSKDGKATKYNDTSATAIAAGKCKFVAKNTGILFV

SEQ ID NO: 16300 - protein, 431 aa, Ktedonobacter sp.; identical to SEQ ID NO: 3598

SEQ ID NO: 16301 - protein, 476 aa, unidentified; identical to SEQ ID NO: 11165
  REGION 1..476: note = Human gut metagenome

SEQ ID NO: 16302 - protein, 453 aa, Moorena sp.; identical to SEQ ID NO: 11894

SEQ ID NO: 16303 - protein, 420 aa, unidentified; identical to SEQ ID NO: 6836
  REGION 1..420: note = Human gut metagenome

SEQ ID NO: 16304 - protein, 431 aa, Moorena sp.; identical to SEQ ID NO: 2831

SEQ ID NO: 16305 - protein, 512 aa, unidentified; identical to SEQ ID NO: 10560
  REGION 1..512: note = Human gut metagenome

SEQ ID NO: 16306 - protein, 442 aa, unidentified
  REGION 1..442: note = Human gut metagenome
MSTSVFVLDKKHRPLMPCRPARARRLLRAGRARVVKRFPFVIRLVDRTVEQSEVQPVLIKLDPGSRETGAAVVRDDEKKRHHALAFFVIEHRGGAIRDALKARSAFRRRRRSQNLRCRSPRFLNRVKPKGWLPPSLRHRVETTLSFVRRMCRYLPVSGIATELVKFDSQKLQNPEVSGVKYQQGTLFEYEVREYLLEKFGRKCVYCGAEGVPLNIDHVVPRAKGGSNRVSNLVLACVSCNQKKGARSLEDFLKGKPEVLARVRRELKTPLRDAAAVNATRWVLFNELKATGLPVETGSGALTKLNRHAFGVEKEHWLDALCVGRLNGVVTRKGLNVLEIRCMGRGSRQRTRLTKYGFPRGYLMRQKCVHGFATGDMVEANVPKGKKAGLWRGRVAVRVSGSFNIQTPKGVIQGVGWKHCRLISHNDGYGYAWLGHAPHSSPA

SEQ ID NO: 16307 - protein, 414 aa, unidentified; identical to SEQ ID NO: 2588
  REGION 1..414: note = Human gut metagenome

SEQ ID NO: 16308 - protein, 537 aa, Planomonospora sp.; identical to SEQ ID NO: 3554

SEQ ID NO: 16309 - protein, 418 aa, unidentified
  REGION 1..418: note = Human oral metagenome
MLNNQKEYAFVLDAEGKKLDPTIIQNAWRLVRQKKATLIAKRPMTIQLKKVIDNPNDDEIRMGIDDGAKHIGLALVQKCKTKNKVIFIATMEQRNDVHKLMEQRKNYRRYRRYWKRYRKARFSNRVSVRRKGRIAPTILQKRQAVVRIFDRLNKYIRIDSIYLEDVAIDVRVLTDEKRLYSWQYQQSNRLDENLRKATILRDNCKCQLCGKRNCRLEVHHITPRRMSGANTIGNLITLCSECHSNVTGREMEFAEQLYSKIGKKKNNVSLQYASHVMVGKTWLREELSKRVPVFLTTGGDTANKRIDWNLEKSHEIDAVCITNLEPESVGVKSWNIKPLRHQRKTMKVKEILGFRHRDIVYYTFKNGEYHEGYVTALYPSEGKQKEGLNFLSPTKHCKRVNPKKCQRLDRPDKFLWLV

SEQ ID NO: 16310 - protein, 493 aa, unidentified; identical to SEQ ID NO: 2644
  REGION 1..493: note = Human gut metagenome

SEQ ID NO: 16311 - protein, 415 aa, Bacillus sp.
MRVFVKNLREKPLMPCSPRKARLLLKQRKAKIVKYTPFTIQLLYATGETVQPVTIGIDSGAKQIGIAITTEEKVLVKGIVELRQDIKENLTLRATLRRSRRQRKTRYRKARFLNRKKKEGWLPPSIQSRVDNQIHWIETFRSLLPSPKVIVEVGKFDAQKLKNLDIQGIEYQQGDAFGFWNIRYYVFARDQYTCQICKKKGGILHTHHIIERCNGGSDMADNLVTVHEECHQKFHQGIIKHVFKKPKQYKETAFMNILRLQIMKRLDCEITYGSYTTPRRKELGLAKTHANDALAITNPTKLQEYDQSGEFRIKQFRKKKRSLHEATARKGRKTKNASAKRNNKNTPHVDGIYLGDKVKVFGQVGFVTGFTGKMVYVQDINGQYIQNPSKSYKQVKISDMECIHHTNNWQFLQIS

SEQ ID NO: 16312 - protein, 455 aa, unidentified; identical to SEQ ID NO: 11536
  REGION 1..455: note = Human gut metagenome

SEQ ID NO: 16313 - protein, 406 aa, unidentified
  REGION 1..406: note = Human gut metagenome
MVYIKDIDGRPLMPTKRHGKVRWLLKENKAVVINLCPFTIQLTYKSTDHKQPVTLGIDAGAKHIGFSATAEKEELFACETTLRTDIVDLLSTRLQNRRTRRSRLRYRKPRFNNRGSSKKKGWVALSVKQRIDSHLNEVNEIHKILPITKIVIEVAQFDTQKMKNHDISGSDYQNGEQLGFWNVREYVLFRDGHKCSHCKGKSKDPVLNVHHLESRKTGGDSPSNLVTLCESCHKAFHKGEIELKKKRGKSLRDAAVMGIMKWKLYEELKSRYDNVSMTFGYITKYNRIKYGIEKSHTSDAFVISRNFNAKRIERQYLKRLVRRHKRQIHKMKILKGGKKKNNQAPFGVFRFRLFDKVLYNNEICFIYGRRKSGNFNIRDFNGENPKDVSYKKLKLIRGKMHPIILK

SEQ ID NO: 16314 - protein, 431 aa, unidentified; identical to SEQ ID NO: 4535
  REGION 1..431: note = Human gut metagenome

SEQ ID NO: 16315 - protein, 413 aa, unidentified
  REGION 1..413: note = Human gut metagenome
MTSYAFVLDANGKQLAPTKEQKAWFFIRKKRASLVSKYPIVIQLMKEIPEKEICQDEIRCGIDDGGLHVGIALVQKCKTKNKVVFKGTIEQRNDVKHLMEVRRNYRRYHRYHKRYRQARFDNRKSSKRKGRIAPSILQKRQATIRVINRLNKWINITNYWLEDVSIDIRVLTDGYKSYSWQYQKSNRLDENIRKATILRDGGKCMECGKSNCRLEVHHIKPKRRNGSNTLDNLITLCESCHQKTEGQEELYMDRYFSLLKSSDNKNLNYAQHVMIGKMWLRKQLSGLGVLYLTSGGDTANKRIDWNIEKSHANDAVCITDLRPDTCDVKEWTMKPMRRQSKAKTDHVLGIHHRDLVEYTFKNGETHRGYVTALYPDQKAINFQSQTKHCKKVNARKCKLLWNYSKIYWFENAS

SEQ ID NO: 16316 - protein, 431 aa, unidentified
  REGION 1..431: note = Human gut metagenome
MPNKVYVINKHGRPLMPCSPAKARHLLDEGKAKVKKRTPFTIQLVYGSSGYTQEVILGVDAGSKTIGMSASTTKEELLSAEVKPRNDVVDLLSTRREFRRARRNRKTRYRKPRFDNRVRSKHKGWLAPSVEVKIQEHITSIKRVCRILPVSKVVIETAEFDLQLLKAIADGKPVPQGEDYQKGEMYGHYNVRQYVLWRDDYTCQCCGAHATKKKEVRLHVHHLESRKVGGDAPDNQVTLCESCHEKLHKGLIAEKDFKKRKRRSTRDATFMGIMRKTLMQRLCSELPIPVVKTRGYITKATREKLLVLPKSHTNDALAIAQGKRGFNVGYLPEIAQIDKIYTIRPVRHHNRQLHKAAILTGGIRKSNQAEKYVFGYRLFDKVQFNGQDCFIWGRRTTGIFTIKTINGKMIKDGISFKKLKPVEKSTSYLIA

SEQ ID NO: 16317 - protein, 470 aa, unidentified; identical to SEQ ID NO: 2825
  REGION 1..470: note = Human gut metagenome

SEQ ID NO: 16318 - protein, 411 aa, unidentified; identical to SEQ ID NO: 3762
  REGION 1..411: note = Human gut metagenome

SEQ ID NO: 16319 - protein, 406 aa, unidentified
  REGION 1..406: note = Human gut metagenome
MVYVQDIDGKPLMPTTRHGKVRRLLKSNKAVVVNLCPFTIRLTYISDSYKQEIVLGVDAGTKHVGLSATTKSKELYSSEVILRNDIVDLLSTRRELRRTRRNRLRYRKPRFNNRVKNKRPGWIAPSVRYKVDAHIRVIDNVCSILPISRIVVEVAQFDTQKIKNPDISGKEYQEGDQLGFWNVREYVLARDGHKCQYCKGKSKDSILNVHHIESRKTGGNSPFNLITLCETCHKEYHKGNIKLKVKRGTSLRDAAAMGIMKWKLFDKLKSLYPNVSMTFGYITKHNRIKHEIKKSHISDAFVISKNFEAKRPGYYFKEKLVRRHNRQIHKMKILKGGKKKMNQAPFKVFGFRLFDKVEFQGNEYFIYARRLSGYFNIRDINSENKKDVTYKKLTHIGHGLISVETG

SEQ ID NO: 16320 - protein, 536 aa, Nocardiopsis sp.
MAEGRLYQHQPSPSKEVTLMATFRVGPKTHPGVLPQRQALESESADTPRIGHESGLRHRRQAVPGADHVRGETRPASPSGSGVTPNPVGKQGREAHTRQTDPYVFVLDKNHIPLQPCPPARARKLLTKKRAVVARHTPFTIRLTDRTAAESEIDGVEIGIDPGSKHTGIALFTHRAGERRGRYALQLDHRGAQIKKKLGQRAGYRRRRRSANLRHRSPRFSNRARPRGWLAPSLRHRVETTLGWVERLCRWVPVRAVHVERLAFDTHALSAGKPLEGAQYQQGTLAGYEVREYLLAKFNRACVYCGITNVPLNLDHVYPRSRTGSDRVSNLVLACVPCNQTKADRSVEEFAPKAAARILAQAKAPLRDAAAAQSTRWALWQALDQRLPTRVGSGGRTKFNRDRNQLPKTHTLDALAVGKVEAITQTVARVLVAGCAGRGRYARTTPDRYGFPRLRAARRKQYFSFATGDLVRAVVPSGKRAGTHTGRVLVRARGSFDITTGHGRQAGINHKHIRLLQRADGYAYTFRKEEGVSSRP

SEQ ID NO: 16321 - protein, 485 aa, unidentified
  REGION 1..485: note = Human gut metagenome
VRLRYGKFNREPFFGSLAYSKKEKIMRYVYVLDVDGNPLMPTRRYGWVRRMLKSGKADAVDSLPFTIRLKEKTGTRILQPVIVGQDPGRSSIGMAAVRNDGTVLYRVHCETRNKEIVGLMDNRRAFRRASRRGERLARKRLAKKLGTTAKNLNGRLLPGYEKPLAVKDIINTEARFNNRIRPEGWLTPTAVQLLRTHLNLFKKVSGILPATEAVIEINQFAFMQLDDPDAKKREIDFCHGPLYGTGGVKAAVQIQQKDVCLLCGKHGIEHYHHIVPRSKRGSNTVNNIAGLCMECHKKVHMSQEAAEKLEKRKAGLVKRYGGASVLNQIIPSLVEGLTGRYPGHTHVTNGWNTKEFREKYGLEKEHDIDAYCIAASILGNIQPKLETETYEIKQFRKHNRALIHHQTERTYKYEGKTVAKNRKKRMEQKTDSLEDWFISMTEKYGKEEAERMRSRLTVQKSKRYYNTPGRMMPGTVFEYAGKRYV

SEQ ID NO: 16322 - protein, 406 aa, unidentified; identical to SEQ ID NO: 6072
  REGION 1..406: note = Human gut metagenome

SEQ ID NO: 16323 - protein, 442 aa, unidentified
  REGION 1..442: note = Human gut metagenome
MSTSVFVLDKKHRPLMPCRPARARRLLRAGRARVVKRFPFVIRLVDRTVEQSEVQPVLIKLDPGSRETGAAVVRDDEKKRHHALAFFVIKHRGGAIRDALKARSAFRRRRRSQNLRCRSPRFLNRVKPKGWLPPSLRHRVETTLSFVRRMCRYLPVSGIAAELVKFDSQKLQTPEVSGIEYQQGTLFEYEVREYLLEKFGRKCVYCGAEGVPLNIDHVVPRAKGGSNRVSNLVLACVSCNQKKGARSLEDFLKGKPEVLARVRRELKTPLRDAAAVNATRWVLFNELKATGLPVETGSGALTKLNRHAFGVEKEHWLDALCVGRLNGVVTRKGLNVLEIRCMGRGSRQRTRLTKYGFPRGYLMRQKCVHGFATGDMVEANVPKGKKAGLWRGRVAVRVSGSFNIQTPKGVIQGVGWKHCRLISHNDGYGYAWLGHAPHSSPA

SEQ ID NO: 16324 - protein, 413 aa, unidentified
  REGION 1..413: note = Human gut metagenome
MTNYVFVLDANGKHLSPTKEQKAWFFIRKKRATLVSKYPMVIQLNKEIPDDKICKDEIRCGIDDGGLHTGIALVQKCQTKNKVLFKGVIEQRNDVKHLMDVRRGYRRYHRYHKRYRPARFNNRSSSKKEGKIAPSILQKRQATIRAVAQLNKWINITDYWLEDVAIDIRALTDGFKPYKWQYQKSNRLDENIRKAVILRDGCQCVECGRTNCKLEVHHIKPRRLNGSNALSNLITLCERCHQNTEGREELFMDKYFALLNSSDNKYLNYAQHVMIGKKWLREQFSSLGILHLTNGGDTANKRIDWNIEKFHSNDAICITNLQPDTCDVKEWTIKPMRRQSKAKADNVLGIKHRDLVEYTFKSGETHRGYVTALYPKQNAINFQSPTKHCKKVSAKKCRLLWKFNKIYWLDDVS

SEQ ID NO: 16325 - protein, 613 aa, Parasutterella sp.; identical to SEQ ID NO: 4681
  SITE 124: note = misc_feature - Xaa can be any naturally occurring amino acid
  REGION 398..449: note = misc_feature - Xaa can be any naturally occurring amino acid
  SITE 590: note = misc_feature - Xaa can be any naturally occurring amino acid

SEQ ID NO: 16326 - protein, 427 aa, Parasutterella sp.; identical to SEQ ID NO: 6030

SEQ ID NO: 16327 - protein, 540 aa, Streptomyces sp.; identical to SEQ ID NO: 3207

SEQ ID NO: 16328 - protein, 431 aa, unidentified
  REGION 1..431: note = metagenome
MPDKVYVISRLGHPLMPCSPAKARHLLDDKKAKVVKRMPFTIRLLYGSTKYIQPIILGVDAGSKTIGLSASTAKEEVFAAEVMPRNDVVENLSTRREFRRARRNRTTRYRKPRSDNRVRSNHERWLAPSVKVKIQEHITSIKRVRTILPISKVVIETAEFDLQLLKAIQEGKPIPEGEDYQKGEMYGSYNVCQYVLWRDNYTCICCGVRGTPKNPVRLHVHHFESRKYGGNAPDNHGTLCDDCHKKFHLGIITDVKLKTRRRQSTRDAAFMGIMRKTLMWRLRTELFIPVAETKGYITKATREKLLVLPNSHTRDALAIAQGRHGFGIKEYAYVEPANHIYTVRPVRHHNRQLHKASILKGGIRKRNQASKYIFGFRLYDKVLYQGKACFVWGRRTSGTFLLRTIDGIKVKDGVSYRNLTLLERSSNYLIA

SEQ ID NO: 16329 - protein, 431 aa, unidentified; identical to SEQ ID NO: 12300
  REGION 1..431: note = Human gut metagenome

SEQ ID NO: 16330 - protein, 442 aa, unidentified; identical to SEQ ID NO: 2903
  REGION 1..442: note = Human gut metagenome

SEQ ID NO: 16331 - protein, 458 aa, Rheinheimera sp.
VRVLVLDNQKQPLMPCRSARARQLLRDGKAAVFRRYPFTIILKDRAGGDTQPVSLNVDPGSKTTGVALAADYPRGRCAVWALHIGHRGPHIKSALDSRRAIRRSRRNRKTRYRAPRFLNRTRPKGWLAPSIMSRVHNVDTWTKRLTQFAPITSANVETVRFDMQLMVNPNIAGTDYQQGSLFGWELREYLLYRHGHTCAYCDGLAGDAVLEKEHIVPRALGGSNRLANHVISCRTCNEDKGSLHPNAWAQLCSQRGGKLNATRAKNMQRILAGYRPSLKDAAAVNATRYAVGGVIKRLIPDTQFWSGGRTKKNRSDQSYAKNHWIDAACVGEKGGAVSLLCDAVLVANAKGHGSRQMCRVDKYGFPRTSAKTGSVVHGFKTGDMVTASVPTGKKQGVHVGRVAVRSSGFFNIQTKTGVVQGVSHKHCRILQRNDGYNFNYGAAIPLCAKAQSLLAEKR

SEQ ID NO: 16332 - protein, 494 aa, unidentified; identical to SEQ ID NO: 8423
  REGION 1..494: note = Human gut metagenome

SEQ ID NO: 16333 - protein, 431 aa, unidentified; identical to SEQ ID NO: 5232
  REGION 1..431: note = Human gut metagenome

SEQ ID NO: 16334 - protein, 431 aa, Aphanizomenon sp.; identical to SEQ ID NO: 8468

SEQ ID NO: 16335 - protein, 451 aa, unidentified
  REGION 1..451: note = Human gut metagenome
MSVAVISKTGERLMPTSEYRTRKLLKSGKAIKYSYHPFTIQLTERKTGNIQPIELCMDTGYIHIGISVKSEKHEYLTEQIDTLTDERSRHNARRMYRSQRRNRKRYRQPRFNNRKKDKGWIAPSLEHKKNIHVQAISRINNVMPLTDITMEMGNFDTQVLKAKEEGRPLPQGVDYQHGERYSIATLREAVFARDGYKCQCCGRTIKDGAILHVHHIKYRSQGGTNSISNLATVCDKCHTPKNHKPGGKLYGWKPKLPSFKGATFMTTIRWQLYNEAKALFPDIDIHITYGAATKERRRELNIDKSHINDAFVMGQFHPRHRIKAVLYKKKRRNNRCLEKFYDAKYIDSRDGKKRSGQELFNGRINRNHKKDSENLHQYRLQKVTAGKRTVRKQHYSIQPHDIIVYESRKRETTGCHCSGTRVMLLPDKKSVSIKKIKIYRYAGGYFKSTFN

SEQ ID NO: 16336 - protein, 435 aa, unidentified
  REGION 1..435: note = Human gut metagenome
MPKVYVLNKHGHPLMPCTPAKARHLLDSGKAKVRKRTPFTIQLLYGSSGYKQPVTLGVDAGSKTIGLSASTEKQELFAAEVKPRNDVVKLLSTRREFRQARRNRKTRYRTPRFDNRVKSKHKGWLAPSVEVKIQEHITAIARVCALLPIANVIVETAEFDTHRLKAMLEGHPLPVGTDYQLGEMYDEYNVRQYVLKRDNYTCQCCGAHPSAKKGVKLHVHHLESRKTGGNSPNNLITLCEHCHKLLHKGKITLDKKKRGHSMRDAAFMGIMRETLILRLRSELTIPVVETYGYITKLVRETHHMDKSHTVDALCIAGHPLADASDVSYLIKPVRRHNRQLHKATILKGGVRKANQAPRSVFGFRLFDRVRYQGQECFIWGRRSSGSFLLKKLDGTKVKDGISYKKLTLLERETNYLIEERRRCSSPCLKVGVSAA

SEQ ID NO: 16337 - protein, 415 aa, Bacillus sp.; identical to SEQ ID NO: 2671

SEQ ID NO: 16338 - protein, 414 aa, unidentified
  REGION 1..414: note = Human gut metagenome
MPCSPAKARLLLKEKKAIVVRRTPFTIQLTIATGESKQPVSLGVDAGYKHVGLSASTEKAELYASEVELRKDITDLLSARRALRQSRRNRKTRYRAPRFNNRIRTKRKGWLAPSVENRINAHLSRIEAVLRLLPVTKITVETASFDMQRLKNPDISGKEYQEGEQLGFWNVREYVLFRDGHVCRHCHGRSKDPVLNVHHLESRRTGGDSPGNLITLCETCHEALHRGEIALKTKRGHSFRAEAFMGMMRWEVLNRLKASYPELKVHETYGYLTKHARIANGIVKSHGADAFCIAGNLGAERLGEFFFQKQTRRNNRQIHKLSILKGGIRKRNQAPFEAKGFRLFDKVACQGEEGFIFGRRSSGSFDVRKLDGTRISAGISCKKLRLLEKRRTYLTEIRKEEALPPLPEGRGLRA

SEQ ID NO: 16339 - protein, 465 aa, unidentified
  REGION 1..465: note = Human gut metagenome
MSTCVCVLSNSGERLMPTFCLGKVRHLLKDGKAKIVKHHPFTIQLLYSSKTNIQPIEICEDVGYNYIGISVKGESHEYVSAQYDTLQDEKEHHDDCRKMRRTRRNKLRYRKPRFDNRKRNKGWLAPSLEHKKQLNISLIERYVSVIPITHATVEVGSFDTMLLQAIQKGEAKPEGADYQEGPRYNLATLREAVFYRDNYTCHVCGHKITNGAVLHMHHMFYWKGRHGYQLDELVTVCEKCHTPANHQKNGKLYGFGENVKFADLSGAAFMNTVRWQIVNELYAAFGKPFVTITYGAMTKEKRIALRLEKSHNNDAYAMGEFHPNLRCTFEHYEKVRRNNRILEKFYDSRYIDIRTGEIATGKALFNGRINRNHKKDSENLHKYRGKRTYAGHRALLRKKVNLNPGDLVSLNGETLIVHSTHTNKKGAVNVEFKTPAKNGRKSASLKKLKIVKATSSMHSAWEKVS

SEQ ID NO: 16340 - protein, 443 aa, Anoxybacillus sp.; identical to SEQ ID NO: 12144

SEQ ID NO: 16341 - protein, 403 aa, unidentified
  REGION 1..403: note = Human gut metagenome
RCRRQRRAKANGTISKKCVKQDTAQSKNPSKRAKEIGVIKRHLPGCKKDVLCVGIKNKEAKYTNRARLEGWLTPTANQLLQTHINLVKKIQKFLPISDAVLEVNKFAFMRLDNPNIQKWQYQQGPLYQKGSLENAVSEMQEHHCLFCEKPIEHYHHVVPKSENGSNTIANIVGLCAEHHNLVHKDVAWQEKLVEEKTGLNKKYGALSVLNQIIPALTKELSFLFPKHSFMTNGKSTHDYRAAHGISKDHWLDAYCIACSVLPIDVCDSTINNCVPYELKQFRRHDRRALNNENMNRVYTLNDKVVATNRHKATEQEAASLEEFRKEHPNDVCKLKVKEHHPTYRNMNRNYPGSIFLVGKHVHIMQGIAGSKDGKATKYNDTRATTIAAGKCKFVAKNSGILFV

SEQ ID NO: 16342 - protein, 413 aa, unidentified; identical to SEQ ID NO: 3587
  REGION 1..413: note = Human gut metagenome

SEQ ID NO: 16343 - protein, 512 aa, unidentified
  REGION 1..512: note = Human gut metagenome
MSTVYVLNKDGKPLMPTTRGGHVRHLLKEQKARVVRAKPFTIQLLYETNDVVQPLYLGIDPGRTNIGVAVVKANGTAVFTAHLETRNKEVPKLMQDRKKARRARRTNGRRCRRQRRAKANGTISKKCVKQDTAQSKNPSKRAKEIGIIKRRLPGYKKDVLCIGIKNKEAKYTNRTRPEGWLTPTANQLLQTHINLVRKIQKFLPISDVVLEVNKFAFMRLDNPDIQKWQYQQGPLYQKGSLENAVSEMQEHHCLFCDKPIDHYHHVVPQSENGSNTIANIVGLCAEHHNLVHKDAAWQKKLAEEKVGLNKKYGALSVLNQIIPALTNKLSVLFPKHFFVTAGKSTHDYRATHGVSKDHWLDAYCIACSVLPSDVCDSNINNHMPYELKQFRRHARRALNNENMNRVYTLNDKAVAINRHKATEQEAASLEEFCKEHPNDVCKLKVKEHHPTYRNMNRNYPGSIFLVGKHVHIMQGIAGSKDGKATTYKDSNANSITASKCKFVAKNSGILFV

SEQ ID NO: 16344 - protein, 431 aa, unidentified
  REGION 1..431: note = Human gut metagenome
MPNKVYVINKHGRPLMPCSPAKARHLLDAGKAKVKKRTPFTIQLVYGSSGYTQEVILGVDAGSKTIGMSASTTKEELLSAEVKPRNDVVDLQSTRREFRRARRNRKTRYRKPRFDNRVRSKHKGWLAPSVEVKIQEHITSIKRVCRILPVSKVVIETAEFDLQLLKAIEEGKPVPQGEDYQQGEMYGHYNVRQYVLWRDGYTCQCCGAHATKKKEVRLHVHHLESRKVGGDAPDNQVTLCESCHEKLHKGLIAEKDFKKRKRRSTRDATFMGIMRKTLMQRLCSELPIPVIETRGYITKATREKLLVLPKSHTNDALAIAQGKQGFNVGYLPGIVQINKIYTIRPVRHHNRQLHKATILKGGIRKSNQTEKYVFGYCLFDKVQFNGQDCFIWGRRTTGIFTIKTINGKMIKDGISFKKLKPVEKSTGYLIA

SEQ ID NO: 16345 - protein, 453 aa, unidentified
  REGION 1..453: note = Human gut metagenome
MSVAVVSKTGMLLMPTSEYRARKLLKSKKAIIHGYHPFTIQLTERETGYIQPVELCMDTGYIHIGTSVKSEKHEYLGEQIDTLTDERRKHDACRMYRRQRRNRKRYRQPRFNNRERDDGWIAPSLEHKKTIHIQAISRICKVMPVTDITLEMGNFDTQVLKAREEGKPLPQGLDYQHGERYSVTTLREAVFLRDGYTCQCCGRTIKDGAILHAHHVVYRSQGGTNRISNLITVCDKCHTPANHKPGGKLYGWKPKVASFKGATYMTTIRWKLYNEIKALFPDIDIHITYGAETKERRRAFDITKSHVNDAFVMGQFHPKHRSKPVCYKKKRRNNRCLEKFYDAKYIDSRDGKKRTGQELFNGRISRNHKKDSENLHQYRQQKISTGKRTIRKQHYAIQPHDIVIFNGGKFETSGCHNNGTRAILLPQKKSVAIKKLNIYRYAGGYFKSAFNQK

SEQ ID NO: 16346 - protein, 476 aa, unidentified; identical to SEQ ID NO: 3164
  REGION 1..476: note = Human gut metagenome

SEQ ID NO: 16347 - protein, 442 aa, unidentified; identical to SEQ ID NO: 3234
  REGION 1..442: note = Human gut metagenome

SEQ ID NO: 16348 - protein, 427 aa, Moorena sp.; identical to SEQ ID NO: 5575

SEQ ID NO: 16349 - protein, 436 aa, unidentified
  REGION 1..436: note = Human oral metagenome
MLVYVLKQNGQPFMPTERFGKVRRLLKEGKAKVVRREPFTIKLLYEPETDVVQECYCGVDTGSKHIGVAVVGNDRVLYQSQTELRNDIKRKMNARRASRRSRRNRKTRYRKKRFLNRKNSIKKDRLPPSVKHKVQAHIDEIEFCKKILPVSDLILEVSQFDTALMKNPSLIDERVKHWGYQQGFNYGYSSRRSAILHRDNYTCQCCGKKNCRLEVHHIKFRRNGGTDDEENLVTLCENCHKGVHAGTVVLNKKHKKSKNLKYATHMSIIRSRLLREYPDAIETFGFVTAENRNHLKLEKDHYIDACIIASGGLDFEELDVIYKKRRVSIQDRILTKGICGEQKLPTGKLFGFKKFDKVKYLGEVCFIKGRRSSGGFVLMDINNNSIDFRDSGGKQNPSYKHLKRLSARRSVLCIEREVSSFLRKGKNTSAFLSKNL

SEQ ID NO: 16350 - protein, 512 aa, unidentified; identical to SEQ ID NO: 9400
  REGION 1..512: note = Human gut metagenome

SEQ ID NO: 16351 - protein, 431 aa, unidentified; identical to SEQ ID NO: 3235
  REGION 1..431: note = Human gut metagenome

SEQ ID NO: 16352 - protein, 413 aa, unidentified
  REGION 1..413: note = Human gut metagenome
MRGQPLMPCSPAKARHLLKANKAIVKRRTPFTIQLSIATGETKQNVTLGVDAGAKHVGLSAITDKAEVFASEVELRQDISGLLADRLAFRRGRLRRKTRYRASRFLNRVHSKRKGWLAPSVENRIQAHISRIDVVCKLLPVNKIVIETASFDIQKIKNPDVEGKGYQQGDQLGFWNVREYVLFRDGHVCQYCRGRSKDKVLNVHHLESRKTGGDAPNNLITLCETCHKAYHAGKIKLKVKRGQSFKAETFMGIMRWTLLEIVRQTHPHLLVENTFGYLTKHKRIALGLPKTHCTDAFCIAGNLKAQRSGVYLYQKQTRKHNRQIHKCSILKGGVRKLNQSPYLVKGFRLFDKVKCLEQVGFIFGRRALGYFDVRTLRGKKLSPAIHVKKLMLLEKRKTFLTELRMENCASSPV

SEQ ID NO: 16353 - protein, 420 aa, unidentified
  REGION 1..420: note = Human gut metagenome
MQYVYVLNKHGEPLMPCSPGKARILLKQQKACVVKRTPFTIKLLYGSAGYKQPITLGVDAGSKHVGLSASTEKRELYSEEFTPRNDVVELLSTRRQNRRSRRNRKTRYRAPRFNNRIHSKHKGWLAPSVEVKIQEHITVIKRICRILPITLVRVETAEFDTQRLKAMLAGKPLPVGTDYQLGEMYDEYNARQYVLKRDHYTCQCCGAHTTTMKSVKLHVHHLESRKVGGNAPSNLITLCTTCHDNLHKRKVTLDGKKRGKTLRDAAFMGIMRKALMARLKEELSIPVQETYGYITKMRREQNDIKKSHVNDARCISKHPLAEPCSVCYRTKAIRHHNRQIHKANFSKGGYRKRSQMSYIVEGYRLWDKVLYKGQACFISGRRASGRFALKKLDGTSISKSVTFKKLRLLEPATNYLIERM

SEQ ID NO: 16354 - protein, 544 aa, unidentified
  REGION 1..544: note = Human gut metagenome
MKQKKQKVMVYILNKKGKPLMPTTRCGHVRKLLDSKKAVVVNSNPFTIRLKYDTPNGIQDVFAGIDSGRENIGSGASNEDGDCLYLGELKTSNKSIKIKMTERTGFRRERRRHDRQSKQRKAKKDHTEIQNGNDDICRTTISCKSVQISYPAAEESVTHKIIRGKEGKFANRHRDEGWITPSARQLVQMHMNDLKSMCKILPISHVTLERVAFDFQKLENENIKTWEYGKGKLYGYDSPEEYIHDVQDGKCLVCGKPHIDYLHHIIPRSKGGSDKVSNIAGLCYDCHYGPMGVHNCRETQDRLPELKNEANKQYKVSLLNSVMPVLIEEMDKFCKANSIMFSICEGHDTAKVRDMYDLQKDHCLDGFAISLVGRNVKSVDVMPDRIYQKQRYKKKSKNIIQKRNCREYYDGKKLVAVNRHKGTDQKADSLEEYMNTYAETHTADECKKHFDSLTVKPARRTYTFHKEWRICPFHIGDKVRYEKKNKIKGNTKVDTFICEGIRFVKDENKAEVKHNKTKSKKMKFCRVLESGCTPYVDYRKLALM

SEQ ID NO: 16355 - protein, 432 aa, unidentified
  REGION 1..432: note = Freshwater metagenome
MISVCVLDPDRQPLDPCHPARARQLLDAGRAAVFRRFPFTIILHDRTRAASMVHAHRLKIDPGSKTSGLAIVQGPRVIWAAELTHRGQRIKAALETRRAIRRGRRQRQMRYRQPRFLNRTRPVGWLPPSLQSRVCNLMTWVERLARLCPITALSQELVRFDMQLMQHAEISGVQYQQGELAGYEVREYLLEKWHRTCAYCGATEVPLEVEHIVPKVRGGSNRVSNLALACVPCNQKKGARSAAEFGFPQVQAQARRPLHDAAAVNATRWGLSQALHATGLPVETGTGGRTKYNRTRLGIEKSHWADAACVGASTPDPLRVAGIRPLGIRAMGHGTRQMCRVDAHGFPKTHRARQKHYGGMQTGDIVQAVVPTGKYAGTWISRVVVKARGWFDLVIHGKKASVHQRHCTRLWAADGYTYALPAVAGTAVSSPR

SEQ ID NO: 16356 - protein, 447 aa, Sutterella sp.
LKGLSRTCGSLRFKEKTLKVFVINKRGKPLMPCKPAKARHLLRDGKARVVRRTPFTIQLTIATGENVQPIHLGVDAGSKHIGLSATTEKEELFSSEVELRKDITDLLSSRREMRRARRNRKTRYRAPRFDNRVHAKNKGWLAPTLENEISAHLSRIKAIRAILPVSRITIEVASFDIQKIKNPEIEGEQYQQGEQLGFWNVREYVLFRDGHKCCHCHGKSKDPILNVHHIESRKTGGDAPNNLITLCETCHKAYHAGKIQLTSKRGKKFTDATHMGIMRWELLKRAKEANLGIPVKATFGYITKARRIQFGIAKTHCADAFCIAGNLNAKRLGEYLYQKQTRKHNRQIHKMAILKGGYRKRNQAPFEVFNFRLFDKVRFGGNVGFVFGRRTSGSFAVRTLFGEKLSEGVSYKKLSLLERRTTFLTQLVKEGAIPPVSKDTGFLARFL

SEQ ID NO: 16357 - protein, 557 aa, unidentified; identical to SEQ ID NO: 3108
  REGION 1..557: note = Human gut metagenome

SEQ ID NO: 16358 - protein, 415 aa, Bacillus sp.; identical to SEQ ID NO: 2431

SEQ ID NO: 16359 - protein, 457 aa, unidentified
  REGION 1..457: note = Human gut metagenome
VWLYQAVYNLGEGFLPSSEERTAFYWLLIYRKEHGIMQYVYVLNKHGEPLMPCSPGKARLLLKQQKACVVKRTPFTIKLLYGSAGYKQPITLGVDAGSKHVGLSASTEKRELYREEFTPRNDVVDLLSTRRQNRRSRRNRKTRYRAPRFDNRVHSKHKGWLAPSVEVKIQEHITVIKRICRILPITLVRVETAEFDTQRLKAMLKGKPLPVGTDYQLGEMYDEYNVRQYVLKRDNYTCQCCGAHPTEKKPIRLHVHHIESRHVGGNAPNNLITLCVACHKALHEGKITLDKGKKRGKPLRDAAFMGIMRNTLLARLKDELNIPVKQTYGYITKLLREKNKIPKSHVNDARCIAKAPNAKPCDTMLYTRALRHHNRQIHKAKILKGGIRKKNQAPYLVKGFRLWDKVRYNGEECFITGRRSSGYFALKKYDGTVISNSASYKKLMLLEAATNYITERS

SEQ ID NO: 16360 - protein, 393 aa, unidentified
  REGION 1..393: note = Human gut metagenome
NGTISKKCVKQATAQNGSASKRAKEIGVIKRHLPGCEKEVLCIGIKNKEAKFNNRTRPAGWLTPTANQLLQTHINLIKKIQKLLPISDVVLEINKFAFMQLDNPNIQKWQYQQGPLYQKANLEEAVSEMQEHHCLFCKKKIDHYHHVVPQHKNGSNTIDNIVGLCTKHHDLVHKDTAWHEKLTKKKTGLNKKYGALSVLNQIIPALTKELSSIFPKHFFVTTGKSTYDYRAAHGVSKDHWLDAYCIACSVLPNDVCDSSINNRVPYELKQFRRHDRRALHKENMSRVYTLNGKKVATNRHKATEQTADSLEEFRQNHPDDVCKLKVKENHSEYRNPKRNFPGCVFLVGKRTHVMQGTSGSHNGKADGYYDTNGNSYSSGKCKFVAKNEGIIFA

SEQ ID NO: 16361 - protein, 427 aa, Calothrix sp.; identical to SEQ ID NO: 10384

SEQ ID NO: 16362 - protein, 408 aa, unidentified; identical to SEQ ID NO: 3192
  REGION 1..408: note = Human gut metagenome

SEQ ID NO: 16363 - protein, 456 aa, unidentified
  REGION 1..456: note = Human gut metagenome
MSTCVCVLSNSGERLMPTFRLGKVRRLLKDGKAKIVKHHPFTIQLLYDSKTNTQPIEICEDVGYNYIGISVKSQSHEYVSAQYNTLQDEKACHDSCRKLRRTRRNRLRYRKPRFDNRKCDKGWLAPSLEHKKQLNISLIERYVSVIPITHATVEVGSFDTMLLQAIQKGKAKPESADYQKGPHYNLATLREAVFYRDNYTCQVCKRKIADGAILHMHHMFYWKGRHGYQLDELATVCEKCHTPANHQKGGKLFGYGEGKEFADLSGAAFMNAVRWQIVDALYTTYDKEFVTITYGAMTKEKRIALQLEKTHNNDAYAMGDYHPACRCKFRHYQKRRRNNRVLEKFYDATYIDARTGNKAKGKELFNGRINRNHKKDSENLHKYRSKKVSKGRRSIRRRRYAIQSYDTVRLEGKTYITSGCHNKGTRLLIPVNGKSKSVAISKVQVVCHAGAWIQIS

SEQ ID NO: 16364 - protein, 428 aa, Enterococcus sp.; identical to SEQ ID NO: 4335

SEQ ID NO: 16365 - protein, 482 aa, unidentified
  REGION 1..482: note = Firmicutes bacterium UBA5766
MVYVLDKHKKPLMTCTEKRARLLLERGRAMVHKKAPFTIRLKDRLVEDSVLQPLGLKIDPGSKTTGGAVIREKETIGYYECQHRTDIKDKMDTRRSQRKSRRNHKTRYRKPRFNNRNPGKCTACGKNAKHGSRYCRPCAEAKNLTDNGHREVRLPVSLQSRVDQTMSWVNKLRALLPITSVSMELVRFDTQLMQNPNISGVEYQQGTLAGYEVREYLLQKFNHQCAYCKGESSDPVLNVEHVVPKNPECGPRGAGRISNLVIACKTCNDTKGNLQPDEWLNKLKTSKKKLNQDRAKNLPEALKQLKAPLKDAAMMNATRWALYRRLKATGLPLETGSGGLTKYNRTQILKLPKTHYYDAVCVCESLPDMVSVPFVENYTATGRGNRQMAGVDKYGFPYRWRERKKIRFGFQTGDIVTADIFKGKYKGRWQGRVAVRKTGFFDIKDSAGKRICQGIPAKHCRLLQRANGWQYERRCAALPPHA

SEQ ID NO: 16366 - protein, 417 aa, unidentified
  REGION 1..417: note = Human gut metagenome
LLIYRKEHDIMQYVYVLNRHGEPMMPCSPGKARLLLKQQKACVVKRTPFTIKLLYGSAGYKQPITLGVDAGSKHVGLSASTEKRELYREEFSPRNDVVKLLSTRKQNRRSRRYRKTRYRPPRFDNRVHSKHKGRLAPSVEVKIQEHITVIKHICKNLPITLVRVETAEFDTQRLKAMLAGKPLPVGTDYQLGEMYDEYNVRQYVLKRDHYTCQCCGAQNTAEKVVKLHVHHLESRKTGGNTPGNLITLCTTCHENLHKGKVTLDGKERGKPLRDAAFMGVMRKTLMARLKEELPIPVQGTYGYITKMRREKNDIKKSHTNDARCISKHPLAEPCSVCYRTKAIRHHNRQTHKANFSKKGIRKRSQMPYLVEGFRLWDKVLYKGQECFVSGRRSSGSFALKKLDGTSISKGVTFKKLR

SEQ ID NO: 16367 - protein, 465 aa, unidentified
  REGION 1..465: note = Human gut metagenome
MVTVQQSTHHLPFGRVFIRRNLFMVYVISQDGKPLMPCSDPIARLLLKQGKAKVKKREPFTIKLTYETTNYTQGLTLGVDTGSGTIGTAVSKDNGDIVYMSEVVVRNDITDKMTQRAKYRRNRRNRKTRYRKARWLNRASSIKKDRFSPTMQSKLHSHVREIEYIQSILPVTEMVFETGQFDMHLMKNPSLANPKVRPWGYQKGANYGFENTKAMVLNRDNYTCQCCKGKHKDSKLEVHHIVFRSQGGSDEESNLLTLCHTCHKDLHSGKINPKLSGKVKGNLKYATQMNSIRKQLFRCYPNAIETFGYVTKVNRLHLGVAKEHYYDACTIATQGNAFNVKSNLYKKKCVSDGDFQKTKGIHSEQPIVTDKICGFRKFDKVRYFGNDYFIKGRMSTGYAILMDIDGNQIDFSTMPRGYKTPKKSNCKRITARKMVLFSILTVAAGMQAGLISVLPIRLVLIMLKP

SEQ ID NO: 16368 - protein, 415 aa, unidentified; identical to SEQ ID NO: 3582
  REGION 1..415: note = Human gut metagenome

SEQ ID NO: 16369 - protein, 453 aa, unidentified
  REGION 1..453: note = Human gut metagenome
MSVAVVSKTGMLLMPTSEYRARKLLKSKKAIILGYHPFTIQLTEREAGYIQPVELCMDTGYIHIGTSVKSEKHEYLGEQIDTLTDERQKHDACRMYRRQRRNRKRYRQPRFNNRERDDGWIAPSLEHKKTIHIQAISRICKVMPVTDITLEMGNFDTQVLKAREEGRSLPQGLDYQHGERYGIATLREAVFTRDGYTCQCCGRAIKDGAILHVHHIVYRSQGGTNRMSNLITVCDKCHTPANHKPGGKLYGWKPKVASFKGATYMTTIQWKLYNEVKVLFPDIDIHITYGAETKERRRAFDITKSHVNDAFVMGQFHPKHRSKPVCYKKKRRNNRCLEKFYDAKYIDSRNGKTRTGQELFNGRISHNHKKDSENLHQYRRQKISTGKRAIRKQHYAIQPHDIVIFNGEKFETSGCHNNGTRVILLPQKKSVAIKKLNIYRYAGGYFKSAFNQK

SEQ ID NO: 16370 - protein, 415 aa, unidentified
  REGION 1..415: note = Human gut metagenome
MVYVLDKNGQPLMPTDRHRKVRLMLQSGQAKVIKRCPFTIQLNYDSGHQTQEISLGIDAGSKHIGVSTTTKIKVLYEVDVELRNDIVDLLSSRRELRRGRRNRKTRYRQAKFNNRRRGNGWLAPSIRQKIGTHLTVVENICKILPISRIMVETASFDIQKIKNPDIQGAEYQQGDQLEFWNVREYVLFHDNNTCQCCKGKSKDKILNVHHIESRKTGGNAPNNLITLCEICHTGYHKGAVQLPKTVKRGMRFKDAAFMGIMRWAFYEALKQQYEPVALVHNTYGYITKHTRIEHNLPKEHYVDARCISGNPDAFPSGEYYYQKKVRCHNRQIHKLTILKGGIRKQNQATYLVKGYRLFDKVSYQGKGYFVFGRRQSGFFDIRTLSGEKVNKGSLSCKKLKFIATRTYYLTERRAV

SEQ ID NO: 16371 - protein, 443 aa, Anoxybacillus sp.; identical to SEQ ID NO: 2702

SEQ ID NO: 16372 - protein, 427 aa, unidentified; identical to SEQ ID NO: 4946
  REGION 1..427: note = Human gut metagenome

SEQ ID NO: 16373 - protein, 447 aa, Halolactibacillus sp.
LRVFVKSMRGSNLDPCKNQKARKLLKEKKAKIISYKPFTIQMLVPTGETTHESHVGIDLGAKYTGVAITQEDRVLAKGNIECRQDVKGLLETKKIYRRSRRSRKTRYRKCKFKHKTTRVYSNKKGKWVKKKTSFTSPRPKSWLPPSLESRTQNLFFWIDTFTSLLPKVKLHIEVGKFDVQKMKNPDIQGKGYQEGDTFGYHDVRYFVLARDSYTCQVCKKKGKILNTHHIIYRSHGGSDAPSNLISVCTDCHTSDNHKRGRILWHWMEKRKKVPTYKEPPFMNALRIRTFRRYPDASIIYGSETTPRRKALHLEKTHYNDAIAISGIQHIKENPHRIFYIKQFRKKKRSLHEATARKGRKNKNLTQKRNKKNTKEMKGIHLNDTVRIFGKIGFVSGFTTTGLYIKDIHNAYITKPGKTYKQVGFKDVTVKNHNNNWQFISHLAPDGA

SEQ ID NO: 16374 - protein, 460 aa, unidentified; identical to SEQ ID NO: 8636
  REGION 1..460: note = Human gut metagenome

SEQ ID NO: 16375 - protein, 423 aa, Arthrospira sp.; identical to SEQ ID NO: 3469

SEQ ID NO: 16376 - protein, 442 aa, Sutterella sp.; identical to SEQ ID NO: 4522

SEQ ID NO: 16377 - protein, 412 aa, unidentified; identical to SEQ ID NO: 3155
  REGION 1..412: note = Human gut metagenome

SEQ ID NO: 16378 - protein, 413 aa, unidentified; identical to SEQ ID NO: 8063
  REGION 1..413: note = Human gut metagenome

SEQ ID NO: 16379 - protein, 420 aa, unidentified
  REGION 1..420: note = Human gut metagenome
MQYVYVLNRHGEPLMPCSPGKARLLLKQQKACVVKRTPFTIKLLYGSAGYKQPITLGVDAGSKHVGLSASTEKRELYREEFTPRNDVAELLSTRKQNRRSRRCRKTRYRAPRFDNRVHSKHKGWLAPSVEVKIQEHITIIKRICKILPISLVRVETAEFDTQRLKAMLAGKPLPVGTDYQLGEMYDEYNVRQYVLKRDHYTCQCCGAQNTAEKVVKLHVHHLESRKTGGNTPSNLVTLCTTCHKNLHKGKVTLDGKERGKPLRDAAFMGVMRKTLMARLKEELPIPVQGTYGYITKMRREKNDIKKSHTNDARCISKHPLAEPCSVCYRTKAIRHHNRQTHKANFSKKGIRKRSQMPYLVEGFRLWDKVLYKGQECFVSGRRSSGSFALKKLDGTSISKGVTFKKLRLLEPATNYLIERM

SEQ ID NO: 16380 - protein, 442 aa, unidentified; identical to SEQ ID NO: 3161
  REGION 1..442: note = Human gut metagenome

SEQ ID NO: 16381 - protein, 426 aa, unidentified
  REGION 1..426: note = Human gut metagenome
MPKVYVLNRHGRPLMPCTPAKARHLLDAGKAKVRHRTPFTIQLLYGSTGYTQEVILGVDAGSKTIGLSAATETEELFSAEVKPRNDVVELMSARRQFRRARRNRTTRYRKPRFDNRVRSKHKGWLAPSVEVKIQEHMTAIRRACAILPVSKVVVETAEFDLQLLKAVAEGKPVPQGEDYQKGEMYGHYNVRQYVLWRDSYTCCICGVRGSVRKGVPLHVHHLESRRVGGDAPDNLVTLCTACHDKLHKGIIMAADIKKRKRRSTRDATFMGIMRMTLLRRLREQLPVPVVETRGYITKATRENLLVLPKSHTNDALAIAHGPQGFRAEYLPNIRQADRLYTICPVRHHNRQLHKATILKGGVRKANQAEKYICGFRLYDKVLYNGIECFVWGRRTSGSFLLRQLNGEKVKDGVSYKHLKLLERSQS

SEQ ID NO: 16382 - protein, 424 aa, unidentified; identical to SEQ ID NO: 3351
  REGION 1..424: note = Human gut metagenome

SEQ ID NO: 16383 - protein, 552 aa, Streptomyces sp.
MTTFPVGEQTHQAVLPQQPALESAGADTPGSRDETAHGHPATVRGTGREYGRGETDGHSTTARRRHAKGAAPAAKAAENGSGDAPPNDLPYDGGVGVSRVFVLSKDGQPLMPCHPARARELLTKGRAVVARQVPFAIRLKDRTRAESAVDGVQLRIDPGSKGTGLALTDEKKETDGQGATVTVRRGLVSIELQHRGDQIHSCMQQRAGYRHRRRSANCRYRKPRSRNRARSAGWLSPSLRHRVDTSFSMANRLCRYAPVTEIHVEQVSFDTHSMSAGRALRGSEYMHGPLAGTTTRDYLRDRWDNACAYCGATGVPLNIEHLRPRSRGGSNRTANLVLACIPCNTAKGSESVEVFLADRPDRLAHILRQITSSLRDAAAMNSTRRLLMAALGDLGLPVHAWTGQTTMENRNIMGLAKTHTLDALSVGQLDHEAGDVIVRYPEQVLVAKATGRGSYARTTPDRFGFPRLRRTRAKQHFGYITGDLVRATIPTGKWAGTWTGHISVRARGQHSLRIHTGRLNVSHWNLELLQRGDGYGYSVRPELPPSTSRKIG

SEQ ID NO: 16384 - protein, 414 aa, unidentified; identical to SEQ ID NO: 3441
  REGION 1..414: note = Human gut metagenome

SEQ ID NO: 16385 - protein, 395 aa, Moorena sp.; identical to SEQ ID NO: 14042

SEQ ID NO: 16386 - protein, 509 aa, unidentified; identical to SEQ ID NO: 7892
  REGION 1..509: note = Human gut metagenome

SEQ ID NO: 16387 - protein, 406 aa, unidentified
  REGION 1..406: note = Human gut metagenome
MVYVQDIDGKPMMPTTRHGKVRRLLKANKATVVNLCPFTIQLTYKSTDHKQPVTLGIDAGAKHIGFSATTEKEELFACETTLRTDIVDLLSMRLQNRRTRRSRLRYRKSRFNNRGSSKKKGWVAPSVKQRIDSHLNEVNEIHKILPITKIVIEVAQFDTQKMKNHDISGADYQNGEQLGFWNVREYVLFRDGHKCSHCKGKSKDPVLNVHHLESRKTGGDSPSNLITLCESCHKAFHKGEIELKKKRGKSLRDAAVMGIMKWKLYEELKSRYDNVSMTFGYITKHNRIKYGIEKNHTSDAFVISKNFNAKRIEYQYLKRLVRRHNRQIHKMKILKGGKKKNNQAPFEVFGFRLFDKVLYNNEINFIYGRRKSGNFNIRDFNGENPKDVSHKKFKLIRGKRHPIILK

SEQ ID NO: 16388 - protein, 450 aa, Moorena sp.; identical to SEQ ID NO: 2935

SEQ ID NO: 16389 - protein, 415 aa, unidentified
  REGION 1..415: note = Human gut metagenome
MENKIGYCFVVDKNNRPLAPTKVNKGWYLVRKGRAKIKSRYPMVIQLEKEVEPDEDDESHMVCGIDDGSIHVGLAIVQKCPTKNKVVFKGTMEQRRDVKHLIDIRRGYRRYHRCHKRYRQVRFNNRSSSKRSNRLAPSIKQKKDAVLRVLYQLNKWCNIQEYFLEDVCIDIRAMADGYKPCGWQYQKSNRLDENLRKAAILRDNYKCQECGKSNCMLEVHHIRARKYGGADTIGNLITLCKKCHDKTKGRERDFENRYFDMIKSRPKRFDYAMHVMQGKTYLREKISELGILHLTNGGDTANKRINWNIEKSHSNDAICIADSIPDTCDVKEWIVKPMRRKSKAKTDNVLGIKHRDLVSYTYKNGKTYTGYVTALYPEQLVLNFQSKTKHCKKANARKCRLLWRFNNIYWLEQCV

SEQ ID NO: 16390 - protein, 336 aa, Clostridium sp.
MVYVIDINGNPLMPTNEAKARKLLKNKKSIVKELKPFTIQLNYKTSNYTQRITLGIDSGYLNIGFSAITDKKELIVGEVKLLQGVKDRIQEKAMYRRQRRSRLRYRKARWNNRTKSKHKGWLAPSLQHKLDNHIKFVDSLYNILPITKCVVEIANFDIQKIKNPDISGEEYQQGEMMGFWNLREYILHRDNHKCQNPNCKNKSKEQILEIHHIKYRSEGGSDSPNNLITLCSKCHTSPNHKKGKFLYDWCINGKKVRGFKDATFMSMIRWYLINTLKEKHSNISITYGYITKNHRITHKIKKTHYNDAFAIAKGINQIRNNDIFNVSQAKEGIIGL

SEQ ID NO: 16391 - protein, 512 aa, unidentified; identical to SEQ ID NO: 4350
  REGION 1..512: note = Human gut metagenome

SEQ ID NO: 16392 - protein, 373 aa, Moorena sp.; identical to SEQ ID NO: 3006

SEQ ID NO: 16393 - protein, 458 aa, Moorena sp.; identical to SEQ ID NO: 4474

SEQ ID NO: 16394 - protein, 427 aa, Calothrix sp.; identical to SEQ ID NO: 11551

SEQ ID NO: 16395 - protein, 345 aa, unidentified
  REGION 1..345: note = Human gut metagenome
KAKVLYESDVELRDDIVKLLATRRQLRRRRRSRKTRYRPARFDNRRRKEGWLTPSIRQKIESHLTVVANVCKILPVSQIIVETASFDIQKIKNPDIQGIEYQQGEQMDFWNIREYVLFRDGHTCQCCKGKSKDKVLNVHHIESRKTGGNAPNNLITLCETCHKGYHNGTVTLPKNIKRGMKFKDAAFMGIMRWTFYNTLKEQYEPDIPVSMTYGYLTKNTRIEHGLPKEHYIDARCISGNPDAVSDGTYYYQKKVRCHNRQIHKQTILKGGIRKSNQAEYLVKGYRLFDKVRYQGREYFIFGRRKSGFFDIRTLSGEKVNKGSINVKRLTFVDTRKNYLTERRTV

SEQ ID NO: 16396 - protein, 443 aa, Anoxybacillus sp.; identical to SEQ ID NO: 2800

SEQ ID NO: 16397 - protein, 512 aa, unidentified; identical to SEQ ID NO: 5621
  REGION 1..512: note = Human gut metagenome

SEQ ID NO: 16398 - protein, 442 aa, unidentified; identical to SEQ ID NO: 2903
  REGION 1..442: note = Human gut metagenome

SEQ ID NO: 16399 - protein, 504 aa, Eubacterium hallii; identical to SEQ ID NO: 3854

SEQ ID NO: 16400 - protein, 414 aa, unidentified; identical to SEQ ID NO: 8369
  REGION 1..414: note = metagenome

SEQ ID NO: 16401 - protein, 302 aa, unidentified
  REGION 1..302: note = Human gut metagenome
VEVKIQEHMTAIRRACAILPVSKVVVETAEFDLQLLKAVAEGKPVPQGEDYQKGEMYGHYNVRQYVLWRDSYTCRICGVHGSVRKGVPLHVHHLESRRVGGDAPDNLVTLCTACHDKLHKGIIMAADIKKRKRRSTRDATFMGIMRMTLLRRLREQLPVPVVETRGYITKATRENLLVLPKSHTNDALAIAHGPQGFRAEYLPNIRQADQLYTICPVRHHNRQLHKATILKGGVRKANQAEKYICGFRLYDKVLYNGIECFVWGRRTSGSFLLRQLNGEKVKDGVSYKHLKLLERSQSYLVA

SEQ ID NO: 16402 - protein, 462 aa, unidentified; identical to SEQ ID NO: 10791
  REGION 1..462: note = Human gut metagenome

SEQ ID NO: 16403 - protein, 421 aa, unidentified
  REGION 1..421: note = Human oral metagenome
MLVYVLNQNGRPLMPISRCGKVRRLLKDKQAKVVRRCPFTIKLLYEPSTDMVQECYCGVDTGSKYIGTAVIGNDRVLYQSQTELRNDIKKKMDRKRVFRRNRRNRKTRYRKCRFLNRRNSIREDRLPPSVKHKVQAHIDEIEFCKKILPISDLILEVSQFDTALMKTPSLIDEKVRHWGYQQGFNYGYSSRREAVLHRDNYTCQCCGKKNCRLEVHHIRFRSNGGTDDEGNLITLCEDCHKGVHAGTVVLSKKPKKSKNLKYATHMSIIRSQLLKKYPDAVETFGFVTSENRNHLKLKKDHYIDACVIASGGLEFKELDVILYKQRVSKGDYQLCKGIRGEIKIPTGKICGFRKFDKVRYLGKECFIRGRMSSGFTILMNIFGEKIDFSNLLRGLKTPKLSNCNRISARRSCLCIKQIRKV

SEQ ID NO: 16404 - protein, 477 aa, unidentified; identical to SEQ ID NO: 12969
  REGION 1..477: note = Human gut metagenome

SEQ ID NO: 16405 - protein, 518 aa, unidentified
  REGION 1..518: note = Human gut metagenome
LANLKLIDELLEKTEYIYVLGTDGKPQMPTNRKVRVRSLFKSGLAKIVDTVPFTIRLLYENDAVLQPITIAEDPGRTNIGAAVLTQLGNLVFSAVVETRNKSIKKLMSDRKAYRQASRRGERKARQRLAKRHGSMIKAGMIMRKLPQYAADKFVTCKIIKNTEARFCNRKRMPDWLTPTVNHLVQTHINLIKKVEKYLPITDVAIEVNRFAFMQMENPDASGVDFQNGPLKGFDDVKAAICEQQHGKCLMCKNDIEHFHHIVPRSKGGSDTIQNQAGLCKKCHTKVHTDAEFQAKFKDKKEGLIKKYGALSALNQSIPFICKELLEIYSVEHVHFCTGKDTSLIRSSLGYEKTKDNQMHEVDAYCIGLAAIGADKAKRPDFNNVFKIKQFRRQDRQLVHYQKERTYYLDGKKIATNRNPRFEQKGDALSDWYKEQIKIYGQYEAEKMRSRLTVKKSKRSYNTTKRLMPGCVFYYDGQRHVMTGQSSYGRYLRAYNCRTKDFPASKCQVIQFNAGLVFV

SEQ ID NO: 16406 - protein, 493 aa, unidentified; identical to SEQ ID NO: 3781
  REGION 1..493: note = Human gut metagenome

SEQ ID NO: 16407 - protein, 446 aa, Pseudomonas sp.; identical to SEQ ID NO: 12637

SEQ ID NO: 16408 - protein, 417 aa, unidentified
  REGION 1..417: note = Human gut metagenome
MPCSPAKARLLLKEKKAIVKRRTPFTIQLTIATGEAKQPIALGVDSGYKHIGLSATTEKAEFYASEVELRQDITDLLSARLALRRSRRSLKTRYRAPRFDNRVASKREGRLAPSVENRIAAHMSRVEAVMRVLPVTAITVETAAFDTQLLKNPDIAGAAYQQGEQLGFWNVREYVLFRDGHVCPHCRGKYKDPILNVHHIESRRTGGDAPNNLITLCETCHKAFHRGEIKLKVKRGKSFKAETFMGIMRWTLFERLKKAHPELSVRNTYGYLTKHKRISHGIAKSHCADAYCIADNLGAKRLEGFFFQKQTRKHNRQIHKLSILKGGLRKKNQAPYEVKGFRLFDKVIYKGEEAFIFGRRTSGSFDVRRLDGTRISAGINYKKLRLLEPRTTYLTEFRMEAALPPLHECRGFRAEFL

SEQ ID NO: 16409 - protein, 264 aa, unidentified
  REGION 1..264: note = Human gut metagenome
MVYVQDINGKPLMPTTRHGKVRRLLKDKKAVVVNLCPFTIKLTYVTSDYKQEIVLGVDAGTKHVGLSATTKSKELYSSEVILRSDIVDLLSTRRELRRTRRNRLRYRKPRFDNRIKSKRPGWVAPSVKYKIDAHIRVVENVCSILPISRIVIEVAQFDTQKIKNPNISGKEYQEGDQLGFWNVREYVLARDGHKCQYCKGKSKDSILNVHHIESRKTGGSSPSNLITLCETCHKEYHKGNIDLKIKRGKSLRDAAVMGIMKWRL

SEQ ID NO: 16410 - protein, 430 aa, Moorena sp.; identical to SEQ ID NO: 4002

SEQ ID NO: 16411 - protein, 408 aa, unidentified
  REGION 1..408: note = Fermentation metagenome
MPCSQKKARLLLKQNKAKITNYNPFTIQLLVPTGETIQECNLGIDSGAKNVGFAITSQDKVLIKGEIELRQDVSKLLTTKRTFRKSRRNRKTRYRKARWENRTRKEGWLPPSIQSRIDNQINWINKFMSLLPNCNLIVEVGKFDTAKLINPDIQGEEYQQGNLYEYENIKSYLIVRENNKCQFCGKEYDGNGWHIHHIKQRKDGGTNKVDNLALVHEQCHKDYHLGLLKVKLKEPKDYKETAFMNILRQQIFKRVNCKITYGSYTKVDRNSLNLDKTHYNDAIAISGIKKVKENPEQLLKIKQFRKKKRSLHEAIPRKGRKEKNITQKRNSKNTKCSNGFYLNDKVKVLDKVGWISGFCNGGCYIKDIEDNYITLEGKTYKQVGFKNLELICHNNNWQYGMLCVSSHE

SEQ ID NO: 16412 - protein, 418 aa, unidentified
  REGION 1..418: note = Human oral metagenome
MVYVINKDGQALMPTERFGKVRRLLKNGLAHVVCRIPFTIRLDYETTHFVQPISLGVDAGSKHIGISATTSKKELYAADVELRNDIVEKLSTRREQRRTRRNRLRYRKARFNNRVSSKHKGWLAPSVENKIQTHLTVVEKIHKFLPITKIIVETASFDIQKINNPSISSEEYQQGEQLDFFNVREYVLFRDNHTCQHCKGKSKDHILNVHHIESRKTGGNSPSNLITLCESCHKAYHNGKIDIKVKCGASFRDATFMGIARWAIYERLKNIYPNVSMTFGYITKNTRITNGLPKEHHVDARCISGNPKSKPLGYYFYQKKVRCQNRQIHKANFLKGGRKKLNQSPFLVKGYRLFDLVEYQKELYYIFGRRDSGFFDIRRLDGTKVNKGSISCKRIRLVDIRRNIITERRNSCSIPPTN

SEQ ID NO: 16413 - protein, 442 aa, unidentified; identical to SEQ ID NO: 4418
  REGION 1..442: note = Human gut metagenome

SEQ ID NO: 16414 - protein, 419 aa, unidentified; identical to SEQ ID NO: 6355
  REGION 1..419: note = Human gut metagenome

SEQ ID NO: 16415 - protein, 411 aa, unidentified; identical to SEQ ID NO: 6901
  REGION 1..411: note = Human gut metagenome

SEQ ID NO: 16416 - protein, 456 aa, unidentified; identical to SEQ ID NO: 5716
  REGION 1..456: note = Human gut metagenome

SEQ ID NO: 16417 - protein, 429 aa, Parasutterella sp.; identical to SEQ ID NO: 11579

SEQ ID NO: 16418 - protein, 460 aa, unidentified; identical to SEQ ID NO: 8636
  REGION 1..460: note = Human gut metagenome

SEQ ID NO: 16419 - protein, 415 aa, unidentified; identical to SEQ ID NO: 3548
  REGION 1..415: note = Human gut metagenome

SEQ ID NO: 16420 - protein, 536 aa, unidentified; identical to SEQ ID NO: 4526
  REGION 1..536: note = Human gut metagenome

SEQ ID NO: 16421 - protein, 443 aa, unidentified
  REGION 1..443: note = Human oral metagenome
MTKTATQKVIQVCVLDQNGQPLMPTQRLGKVYRLLKTKKAHIVNYEPFTIKLNYEPKTHIIQPLTLGVDSGAIHSGYSLANEHREYYNAEVIARDNISKNISDKRMYRRNRRSRKTRYRKPRFNNRKNKGEGWIPPSLEQKVSVQIKEIEHLHQYFPIKDIIIEVAEFDIQKIKNPDISGKEYQQGTLQGYNIRNYLLEKYHHKCFYCDKEVSTFEVEHMIPRARNGSNRIDNLTLSCHDCNQKKGTLTAEEFITQTLSPQKAAQKLRQLPKTKQLLKYMAHMNTTRWVLYNTIKETYDSVSLTYGYITKHNRINAGLPKAHHIDAKCITGFSTVPSFDITVVKTKMRRHNRQLHRATFSKGHIRKAATLPRFVHGFQLYDIVLFNNHQYYIKGRRSSGSFALVSLEGLKDENRNYKKITFLAHTNAYLTNHYVNDTANRANG

SEQ ID NO: 16422 - protein, 419 aa, Moorena sp.; identical to SEQ ID NO: 2658

SEQ ID NO: 16423 - protein, 473 aa, unidentified; identical to SEQ ID NO: 3562
  REGION 1..473: note = uncultured beta proteobacterium

SEQ ID NO: 16424 - protein, 428 aa, Moorena sp.; identical to SEQ ID NO: 12217

SEQ ID NO: 16425 - protein, 535 aa, unidentified; identical to SEQ ID NO: 6116
  REGION 1..535: note = Human gut metagenome

SEQ ID NO: 16426 - protein, 420 aa, unidentified
  REGION 1..420: note = Human gut metagenome
LQFYRKEHGIMQYVYVLSKHGEPMMPCSPGKARLLLKQQKACVVRRTPFTIKLLYGSVGYKQPITLGVDAGSKHVGLSASTEKRELYREEFTPRNDVVELLSTRRQNRRSRRNRKTRYRAPRFDNRVHSKHKGWLAPSVEVKIQEHITIIKRICKILPISLVRVETAEFDTQRLKAMLAGKPLPVGTDYQLGEMYDEYNVRQYVLKRDNYTCQCCGAHTTAKKLVKLHVHHLESRKTGGNAPSNLVTLCTTCHKNLHKGNVTLDGKERGKPLRDAAFMGIMRKTLMARLKEELPIPVQGTYGYITKMRREQNDIKKGHTNDARCISKHPLAEPCSVCYRTKAIRHHNRQTHKANFSKKGIRKRSQMPYLVEGYRLWDKVLYKEQECFVSGRRSSGSFTLKKLDGTSVSKGVTFKKLRLLE

SEQ ID NO: 16427 - protein, 416 aa, unidentified; identical to SEQ ID NO: 3007
  REGION 1..416: note = Human gut metagenome

SEQ ID NO: 16428 - protein, 442 aa, unidentified; identical to SEQ ID NO: 7396
  REGION 1..442: note = Human gut metagenome

SEQ ID NO: 16429 - protein, 502 aa, unidentified
  REGION 1..502: note = Human gut metagenome
MSIIYVQDRHGKPLAPTTRGGHVRRLLDSKQARVVCGNPFTIRLMYGVDPCTQGFILGIDPGRTNIGVTVAAADGTCVFSAKAETNNKDVPKRMKERKAHRQASRQGERKRRQRRARKNGTCFGERKRILPGCKEPITNHYITNTEARFMNRARTKGWLTPTANQLLQSTISLVRKVCKFLPVTDVVLELNEFAFMAMDDPGIQRWEYQKGPLYGYGSVEAAVYTQQDGHCIFCEQAIAHCHHVIPASEGGSDTLENRAGLCGGHHDLVHKEQSWTDKLAELKAGMNKRYAALSVVNQIIPRLADELGKMFPGHAFATNGWSTKQFRDAHGIPKDHNTDADCIACSILENPTIKLPEKVYELRKFRRHDRAQISRMEDRNYYLPGADPKTGKPKKVLAAKNRHKRTEQKTDSLEEFRAAHPNDVGRLMVARGGPKHKDPNRVLPGAIFQVETSSGNVEQLVLQGSHGRDKNGQPLYLEFIGQGNFRPNRCKYVARGRGWQFV

SEQ ID NO: 16430 - protein, 418 aa, Moorena sp.
MQNYVLVIDTNKRPLNPIYPKKARRLLDKGKAAVFRMYPFTIILKTAIYNPVVLPCHIKIDPGSKTTGFALVQNNQVIWGMELEHRGELIKKKLESRKAVRRGRRNRHTRYRKPRFLNRRRKDGWLPPSLEHRILTIQTWVKRLIKFCPVNEIWVERVKFDTQKMQNPEINGIQYQQGELAGYEVREYLLEKWGRECTYCGKQSIPLQIEHIHPKSKGGSNRVSNLCLACEKCNQRKGNKSIEDFLKKKPNLLQKIKTKAKQPLPDAAAVNTTRNKLVKVLRSIKLVVTGTGAQTKYNRTKLGLPKQHWIDAACVGDIETLVLRTSQPLLVTCKGQGGRQKAALNKYGYPIRHNPLKPIKGWVTGDIAKHKKLGIGKVTPRSKGSFGFTPLGTKGYKSCKSQDISAIHRKDGYTYRFC

SEQ ID NO: 16431 - protein, 468 aa, Moorena sp.
LAVFVLDKVGRPLMPCSEKRARLLLARGRARVHRLMPFAIRLVDRELHSSALQPLRIKLDPGSKATGLALVRDAEHVDTSTGEIHRGAVVLNLFELIHRGRQISEALTARRTMRRHRRSTLRYRAPRFLNRTRPAGWLPPSLQHRVDTTLAWVERLRCWAPIAAVSTELVRFDMQALDNPEVTGIEYQHGTLFGYELREYLLQKWTHKCCYCDAQNVPLNIEHLVPRARGGSKRVSNLAIACVACNVSKGARRLDVFVKDEARLARIIAQALRPLKDASAVNTTRWALVNALRATGVPVETASGGRTKHNRSQLGIPKTHALDAVCVGDVSTVLGWRKPTLQVKCTGRGSYQRTRRNKYGFPVGYLMRAKRVQGFGTGDVVRADVPTGKKAGTYHGRVAVRAKGNFNIQTHDRVVQGVAHRYCRLLQRADGYGYSRMATNKGEAGVGAVMRPAPSLPGPAAEVSRDEG

SEQ ID NO: 16432 - protein, 472 aa, unidentified; identical to SEQ ID NO: 7536
  REGION 1..472: note = Human gut metagenome

SEQ ID NO: 16433 - protein, 417 aa, unidentified; identical to SEQ ID NO: 9081
  REGION 1..417: note = Human gut metagenome

SEQ ID NO: 16434 - protein, 267 aa, unidentified
  REGION 1..267: note = Human gut metagenome
MVYVLDKNGQPLMPTDRHRKVRLMLQSGQAKVIKRCPFTIQLNYDSGHQTQEISLGIDAGSKHIGVSATTKIKVLYEVDVELRNDIVDLLSSRRELRRGRRNRKTRYRQAKFNNRRRGNGWLAPSIRQKIGTHLTVVENICKILPISRIMFETASFDIQKIKNPDIQGAEYQQGDQLGFWNVREYVLFRDGHTCQCCKGKSKDKILNVHHIGSRKTGGNAPNNLITLCETCHTGYHKGTVQLPKAIKRGMRFKDAAFMGIMRWAFYE

SEQ ID NO: 16435 - protein, 444 aa, Halanaerobium sp.; identical to SEQ ID NO: 15066

SEQ ID NO: 16436 - protein, 419 aa, unidentified; identical to SEQ ID NO: 3670
  REGION 1..419: note = Human gut metagenome

SEQ ID NO: 16437 - protein, 507 aa, unidentified
  REGION 1..507: note = Human gut metagenome
MSEYIYVLGVDGDPQMPTKRKRHVEKLLQAGRARVFRQIPFTIQLTYENKPVLQPITIAEDPGRSNIGMAVVSLSGELLSAAVVQTRNKEIVKLMDKRKQHRRASRNGERKARQRLAKKCHTMIKAGFLMRKLPMYGKDKRVKCLVIKNTESRFCNRKREDGWLTPSAEHLVQTHINLIHKMQKFLPITDVAIEINRFAFLSLEDPSISGVDFQNGPLKGYDDLNAAIEDLQDGHCLMCNSPIEHRHHIVPRSMQGSNTIGNIAGLCCKCHEKVHKDSAFEDSLKKKKAGLNKRYAAVSVLNQAIPFICKRLEQEFGKEHVHYCSGRDTSMVRRSFGYHKTKEEQLHEVDAWCIAVLSLQHVPEKAPEFDHVHEILQFRRQDRSRIKAQTSRAYYYKGKKIAKNRKKAEGQREDSLQEWRKRQVERYGEEQTRKMISQLKVKKSIRRYNRLDRLMPGAVFYYQGIRYVMRGQHCEGTYLQAVGMGSKDFPAKKCKIVAQNEGLVFVS

SEQ ID NO: 16438 - protein, 424 aa, Enterococcus sp.; identical to SEQ ID NO: 4410

SEQ ID NO: 16439 - protein, 418 aa, unidentified; identical to SEQ ID NO: 8661
  REGION 1..418: note = Human oral metagenome

SEQ ID NO: 16440 - protein, 422 aa, unidentified; identical to SEQ ID NO: 9722
  REGION 1..422: note = Human gut metagenome

SEQ ID NO: 16441 - protein, 413 aa, unidentified
  REGION 1..413: note = Human gut metagenome
LKVFVLNMRGKPLMPCSPAKARHMLKAGKAFVVRRTPFTIKLTIATGETKQDVTLGVDAGARHVGISATTEKEEVFASEVALRQDITGLLADRLAFRRARRNRKTRYRAPRFNNRVRSKHKGWLAPSVENRIQAHMSRIEAVCRLLPVTKIVIETASFDIQKIRNPEVEGTGYQQGDQLGFWNVREYVLFRDGHICQHCRGRSKDPILNVHHLESRKTGGDAPNNLITLCETCHKAYHAGKIKLKVKRGQSFRAEAFMGIMRWTLLDRVRKTHPKLPVENTYGYLTKHKRIALGLPKTHCADAFCIAGNLKALRRGDFLFQQQTRKHNRQIHKCSILKGGVRKLNQAPFLVKGFRLFDKVRIGGQIGFVFGRRVRGTFNIRRLDKTVIGTDINCKKLSLLETRKTFLTELRKE

SEQ ID NO: 16442 - protein, 414 aa, unidentified
  REGION 1..414: note = Human gut metagenome
MPCSPAKARLLLKEKKAIVVRRTPFTIQLTIATGEAKQPVSLGVDAGYKHVGLSASTEKAELYASEVELRQDITDLLSARRALRQSRRNRKTRYRAPRFDNRIRTKRKGWLAPSVENRINAHLSRIKAVLRLLPVTKITVETASFDLQLLKNPDISGKEYQEGEQLGFWNIREYVLCRDGHVCQHCYGRSKDPVLNVHHLESRRTGGDSPGNLITLCETCHKALHRGEITLKAKRGQSFRAEAFMGIMRWEVLNRLKASHPELEVNNTYGYRTKHARIANDIAKSHCADAFCIAGNLGAERLGEFFFQKQTRRNNRQIHKLSILKGGIRKRNQAPFEVNGFRLFDKVACKGEEGFIFGRRSSGFFDVRKLDGTRISAGISYKKLHLLEKRRTYLTEIRKEEALPPLPEGRGLRA

SEQ ID NO: 16443 - protein, 254 aa, unidentified; identical to SEQ ID NO: 9597
  REGION 1..254: note = Human gut metagenome

SEQ ID NO: 16444 - protein, 512 aa, unidentified
  REGION 1..512: note = Human gut metagenome
MSTVYVLNKDGKPLMPTTRCGHVRHLLKEQKARVVTSKPFTIQLLYETNDVVQPLYLGIDPGRTNIGVAVVKMDGTAVFTAHLETRNKEIPKLMKRRKESRRARRTNGRRCRRQRRAKANGTISKKCVKQATAQNGSASKRAKEIGVIKRHLPGCDKEVLCIGIKNKEAKFSNRTRPEGWFTPTANQLLQTHINLVKKIRKFLPISDVVLEVNKFAFMQLDNPNIQKRQYQQGPLYQKESLESAVSEMQEHHCLFCKKPIDHYHHVVPQHKNGSNTIDNIVGLCTKHHDLVHKDTTWQKRLAKKKTGLNKKYGALSVLNQIIPALTKELSSLFPKHFFVTNGKSTYDYRATHAVSKDHWLDAYCIACSVLPNDVCDSDINNRVPYELKQFRRHDRRALHKENMNRVYTLNDKKVATNRHKAVEQTTDSLEEFRQRQPNDVCKLKVKEHHPEYRNPKRNFPGCVFLVGKRTHVMQGTSGSHNGKADGYYDTNGSSYSSGKCKLVAKNKGIVFT

SEQ ID NO: 16445 - protein, 442 aa, unidentified; identical to SEQ ID NO: 3791
  REGION 1..442: note = Human gut metagenome

SEQ ID NO: 16446 - protein, 396 aa, unidentified
  REGION 1..396: note = Human gut metagenome
VKRRTPFTIQLTIATGETKQPVGLGVDAGYKHVGLSASTDKAELYASQVELRQDITDLLSARRALRRARRNRKTRYRAPRFNNRIRTKRKGWLAPSVENRINAHLSRIEAVLRLLPVTKITVETASFDMLLLKNPDIAGKEYQEGEQLGFWNVREYVLFRDGHVCQHCYGRSKDPVLNVHHLESRRTGGDSPGNLITLCETCHEALHRGEIALKTKRGHSFRAEAFMGMMRWEVLNRLKASHSELEVNNTYGYRTKHARIVNGIDKSHCADAFCIAGNLGAERLCEFFFQKQTRRNNRQIHKLSILKGGIRKRNQAPIEIKGFRLFDKVACKGEESFIFGRRSSGYFDVRKLDGTRISAGISYKKLRLLEKRRTYLTEIRKEEALPPLPEGRGLRA

SEQ ID NO: 16447 - protein, 416 aa, unidentified
  REGION 1..416: note = Firmicutes bacterium CAG:227
MRGEPLMPCTQRKARLLLKTGKAKIYKYNPFTIQLKYVTGENKQECHVGIDTGSKYIGLAVTSENKVLFKGEVELRQDVKSKIDTKRIYRRSRRNRKTRYRRCRFLNRKRFGKWLPPSLQNRINHTFKWIDKLCSFIPESILHIEVGKFDIAKMINPEVHSVDYSQGQTYGYQGERYFIFARDNYTCQVCGERNKPLQTHHIIYVSNGGTNRVDNQITVCKECHTSTNHKNGGIFYKWQKEHKKVKQYKAPPFMNVLRQQILNQYPQALITYGFETTIKRKNIGLEKTHYNDAIVISGVSTISENLHEWLLIRQFRKKKRSLHEGVPRKGRKEPNRIQKRNSKNTPYYRGFYLNDKVSVFGKSGYITGFTNSGAYVKGVDGEYIVLPNKSYKRVNIASLKFICHNNNWQYITKNAV

SEQ ID NO: 16448 - protein, 473 aa, Actinoplanes sp.; identical to SEQ ID NO: 10707

SEQ ID NO: 16449 - protein, 427 aa, unidentified
  REGION 1..427: note = Human gut metagenome
LRVFVLNKRGKPLMPCSPAKARLLLKEKKAIVVRRTPFTIQLTIATGESKQPVSLGVDAGYKHVGLSASTEKAELYASEVELRKDITDLLSARRALRQSRRNRKTRYRAPRFDNRIRTKRKGWLAPSVENRINAHLSRIEAVLRLLPITKITVETASFDMQRLKNPDISGKEYQEGEQLGFWNVREYVLFRDGHVCRHCHGRSKDPVLNVHHLESRRTGSDSPDNLITLCETCHKALHRGEITLKAKRGQSFRAQAFMGIMRREVLNRLKASYPELKVHETYGYLTKHARIANGIVKSHGADAFCIAGNLGAERLGEFFFQKQTRRNNRQIHKLSILKGGIRKRNQAPFEAKGFRLFDKVACQGEEGFIFGRRSSGSFDVRKLDGTRISAGISCKKLRLLEKRRTYLTEIRKEEALPPLPEGRGLRA

SEQ ID NO: 16450 - protein, 430 aa, unidentified
  REGION 1..430: note = Human gut metagenome
MPKVYVLNRHGRPLMPCTPAKARHLLDAGKAKVRHRTPFTIQLLYGSTGYTQEVILGVDAGSKTIGLSAATETEELFSAEVKPRNDVVELMSARRQFRRARRNRTTRYRKPRFDNRVRSKHKGWLAPSVEVKIQEHMTAIRRACAILPVSKVVVETAEFDLQLLKAVAEGKPVPQGEDYQKGEMYGHYNVRQYVLWRDSYTCCICGVHGSVRKGVPLHVHHLESRRVGGDAPDNLVTLCTACHDKLHKGIIMAADIKKRKRRSTRDATFMGIMRMTLLRRLWEQLPVPVVETRGYITKATRENLLVLPKSHTNDALAIAHGPQGFRAEYLPNIRQADRLYTIRPVRHHNRQLHKATILKGGVRKANQAEKYICGFRLYDKVLYNGIECFVWGRRTSGSFLLRQLNGEKVKDGVSHKQLKLLERSQSYLVA

SEQ ID NO: 16451 - protein, 416 aa, unidentified; identical to SEQ ID NO: 4039
  REGION 1..416: note = Human gut metagenome

SEQ ID NO: 16452 - protein, 398 aa, unidentified
  REGION 1..398: note = Human gut metagenome
MVRLGDCLKTKKAVVVNLCPFTIRLTYVTSDYKQEIVLGVDAGTKHVGLSATTKSKELYSSEVILRNDIVDLLSTRRELRRSRRNRLRYRKPRFDNRVKSKRPGWIAPSVKYKVDAHIRVIDNVCSILPISRIVIEVAQFDTQKIKNPNISGKEYQEGDQLGFWNVREYVLARDGHKCQYCKGKSKDKILNVHHIESRKTGGDSPSNLITLCETCHKEYHKGNIDLKIKRGSSLRDAAVMGIMKWRLYEELKSKYNNVSITFGYITKYNRIHNSIEKSHVSDAFVISKNFNAIRLGYYYKIRLVRRHNRQIHKQKIQKGGTKRPNQSPFEVFGFRLFDRVMFENSYYFIFGRRKTGRFSIRDIDDKSQKDITYKKLKLSRCKRFMIQKEMDLLIRIKI

SEQ ID NO: 16453 - protein, 431 aa, unidentified; identical to SEQ ID NO: 8901
  REGION 1..431: note = Human gut metagenome

SEQ ID NO: 16454 - protein, 446 aa, Lactobacillus sp.; identical to SEQ ID NO: 12236

SEQ ID NO: 16455 - protein, 452 aa, Moorena sp.; identical to SEQ ID NO: 13319

SEQ ID NO: 16456 - protein, 242 aa, unidentified
  REGION 1..242: note = Human gut metagenome
MPNKVYVINKHGRPLMPCSPAKARHLLDAGKAKVKKRTPFTIQLVYGSSGYTQEVILGVDAGSKTIGMSVSTTKEELLSAEVKPRNDVVDLLSTRREFRRARRNRKTRYRKPRFDNRVRSKHKGWLAPSVEVKIQEHITSIKMVCRILPVSKVVVETAEFDLQLLKAIEEGKPVPQGEDYQQGEMYGHYNVRQYVLWRDNYTCQCCGAHPTKKKEVRLHVHHLESRKVGGNAPGNLVTLWRC

SEQ ID NO: 16457 - protein, 434 aa, Marinobacter sp.; identical to SEQ ID NO: 10302

SEQ ID NO: 16458 - protein, 448 aa, unidentified
  REGION 1..448: note = metagenome
VTLGKDFDSSLEENSFFLAVNLLGKERDIMYVYVINKHGEPLMPCSSHKARTLLNNKKACVVKRTPFTIKLLHGSAGYKQPITLGVDAGSKHVGLSASTETHELYREEFAPRNDVVDLLSTRREFRRARRNRKTRYRAPRFNNRVHSKHKGWLAPSVDVKIQEHITIIKHACQIIPVSLVRVETAEFDTQRLKAMLEDKPLPVGTDYQLGEMYDEYNVRQYVLKRDNYTCQCCGAHATKTKQVKLHVHHLESRKTGGNAPNNLITLCPTCHKAIHEGKKTLSNKKRGKPFRDAAFMGIMRKTLLARLREELPIPVQQTYGYITKMLREKNNLPKSHMNDALCIAKHPKAEPCDNCYRSKAVRHHNRQIHKASILKGGIRKNNQAPYIVKGFRLWDKVRYDGQECFISGRRVTGYFALKKLDGTVVTNSGSYKKLRLLETTKNYLRERM

SEQ ID NO: 16459 - protein, 516 aa, unidentified; identical to SEQ ID NO: 7332
  REGION 1..516: note = Human gut metagenome

SEQ ID NO: 16460 - protein, 408 aa, unidentified; identical to SEQ ID NO: 5694
  REGION 1..408: note = Human gut metagenome

SEQ ID NO: 16461 - protein, 308 aa, unidentified; identical to SEQ ID NO: 10888
  REGION 1..308: note = Cyanobacteria bacterium UBA11368

SEQ ID NO: 16462 - protein, 476 aa, Moorena sp.; identical to SEQ ID NO: 11248

SEQ ID NO: 16463 - protein, 408 aa, unidentified; identical to SEQ ID NO: 6548
  REGION 1..408: note = Human gut metagenome

SEQ ID NO: 16464 - protein, 439 aa, unidentified; identical to SEQ ID NO: 3280
  REGION 1..439: note = Wastewater metagenome

SEQ ID NO: 16465 - protein, 417 aa, unidentified
  REGION 1..417: note = Human gut metagenome
MPCSPAKARLLLKERKAIVKRRTPFTIQLTIATGEAKQPVALGVDSGYKHIGLSATTEKAELYASEVELRQDITDLLSARLALRRSRRSRKTRYRAPRFNNRVASKHKGWLAPSVENRIAAHLSRVEAVMRVLPVTAITVETAAFDTQLLKNPDIAGAAYQQGEQLGFWNVREYVLFRDGHVCQYCRGKSKDPILNVHHIESRRTGGDAPNNLITLCETCHKAFHRGEIKLKVRRGKSFKAETFMGIMRRTLFERLKKAHPELNVRNTYGYLTKHKRISYGIAKSHCADAYCIADNLGAKRLEGFFFQKQTRKHNRQIHKLLILKGGLKKKNQAPYEVKGFRLFDKVICKGEEAFIFGRRTSGSFDVRRLDGTRISAGINYKKLRLLEPRTTYLTEFRKEAALPPLHECRGFRAEFL

SEQ ID NO: 16466 - protein, 429 aa, unidentified
  REGION 1..429: note = Human oral metagenome
MLVYVLKQNGQPFMPTKRFGKVRRLLKAKKAKVVRREPFTIKLLYEPETDVIQECYCGVDTGSRHIGVAVVSNDKVLYQSQTELRSDIKRKMDARRMHRRNRRSRKTRYRKPRFLNRGNSTKNDRLPPSVKHKVQAHIDEIEFCKKILPVSDLIIEVSQFDTTLMKDPGLISEKVRHWGYQQGFNYGYSSRREAILHRDNYTCQCCGKKSCRLEVHHVKFKSNGGTDDEENLLTLCEDCHKGVHAGTVTLNKKPKKSKNLKYATQMSIIRSYLLKKYPNAIETFGFVTSENRNHLNLEKDHYIDACVVASGGLEFKELDVIYRKRRVPKQDRVLTKGVRGEQKLPTRKIFGFKKFDKVEYLGETCFIKARRSNGAFILMDIDNNSIDFRDRGGKQNPSYMSIKRITARKNVLCISKRIEREVRLIPIPS

SEQ ID NO: 16467 - protein, 498 aa, unidentified; identical to SEQ ID NO: 2448
  REGION 1..498: note = Human gut metagenome

SEQ ID NO: 16468 - protein, 428 aa, Enterococcus sp.; identical to SEQ ID NO: 4335

SEQ ID NO: 16469 - protein, 464 aa, unidentified
  REGION 1..464: note = metagenome
MNVFVIGQNGTRLMPCKPQKARKLIKEKKAKIVRKLPFTIQLTYKTGSTTQPVTVGIDTGSQHIGIAVVTEKAVLYHGEVELRSTMEKRTLMETRSSYRRGRRYRKTRYRKPKFRFQTKRIYSAEPVKRKSTGNMTHWVKVSNQVTSNRPEGWLPPSVQSKVEHHIRWIRRFLNVLPEETNLRLETARFDMARMQNPEIHGELYQRGPQYDAENVKAYVFDRDRYTCAICKRKLGSKQKDGTTLKGKVHHILYRSKGATDNPKYLITVCMDCHTPEAHRESGTLYQMMQDAKPTTRGLRDATMMNVARKRLIQAFPEAEITYGNITKADREAILLPKSHANDAIAVATKENPVILTDPAVQIRQVRKKKRSLHEATPRKGRKEPNRLAVRSQKNTKNVGKYHLYDTVQYRTQTGYITGFTGKAAYVQTFEGVYIKPEGKIYKQISLSELKLLRHNNNWIQRAGA

SEQ ID NO: 16470 - protein, 453 aa, Moorena sp.; identical to SEQ ID NO: 2687

SEQ ID NO: 16471 - protein, 427 aa, Enterococcus sp.; identical to SEQ ID NO: 2410

SEQ ID NO: 16472 - protein, 517 aa, Nocardiopsis sp.; identical to SEQ ID NO: 6685

SEQ ID NO: 16473 - protein, 451 aa, unidentified; identical to SEQ ID NO: 3061
  REGION 1..451: note = Human gut metagenome

SEQ ID NO: 16474 - protein, 404 aa, unidentified
  REGION 1..404: note = metagenome
LLKEKKAIVVRRTPFTIQLTIATGEAKQPVSLGVDAGYKHVGLSASTEKAELYASEVELRQDVSDLLSARRALRQSRRSRNTRYRAPRFDNRIRTKRKGWLAPTVENRINVHLSRIETVLRLLPVTKITVETASFDTQLLKNPDIAGKEYQEGEQLGFWNVREYVLFRDGHVCQHCHGRSKDPVLNVHHLESRRTGGDSPGNLITLCETCHKALHRGEIKLKAKRGRSFRAETFMGIMRWGVLNRLKASHPKLEVHNTYGYRTKHARIANGIAKSHCADAFCIAGNFGAKRLGEFFFQKQTRRNNRQIHKLSILKGGIRKRNQAPFEVKGFRLFDKVACQGEEGFIFGRRSTGYFDVRKLDGTCISAGISYKKLHLLEKRRTYLTEIRKEEALPPPPEGRGLRA

SEQ ID NO: 16475 - protein, 434 aa, Lactobacillus sp.; identical to SEQ ID NO: 2383

SEQ ID NO: 16476 - protein, 420 aa, unidentified
  REGION 1..420: note = Human gut metagenome
MQYVYVLNKHGEPLMPCSPGKARLLLKQQKACVVKRTPFTIKLLFGSAGYKQPITLGVDAGSKHVGLSASTEKRELYSEEFTPRSDVVELLSTRRQNRRSRRNRKTRYRVPRFDNRVHSKHKGWLAPSVEVKIQEHITVIKHICKILPISLVRVETAEFDTQRLKAMLAGKPLPVGTDYQLGEMYDEYNVRQYVLKRDHYTCQCCGTHNTAKKVVKLHVHHLESRKVGGNAPSNLITLCTTCHDALHKGKVSLDGKERGKPLRDAAFMGIMRKALMARLREELPIPVQGTYGYITKMRREQNDIKKSHVNDARCISKHPLAEPCSVCYRTKAIRHHNRQTHKVNFSKKGIRKRSQMPYLVEGFRLWDKVLYKGQECFVSGRRASGSFTLKKLDGTRISKGVTFKKLRLLEPATNYLIERM

SEQ ID NO: 16477 - protein, 420 aa, unidentified
  REGION 1..420: note = Human gut metagenome
MQYVYVLNKHGEPLMPCSPGKARLLLKRQKACVVKRTPFTIKLLHESAGYKQPITLGVDAGSKHVGLSASTETHELYCEEFTPRNDVVELLSTRRQNRRSRRYRKTRYRAPRFNNRVHSKHKGWLAPSVEVKIQEHITVIKRICRILPITLVRVETAEFDTQRLKAMLAGKPLPVGTDYQLGEMYDEYNVRQYVLKRDNYTCQCCGAHTTAKKAIKLHVHHLESRKVGGNAPSNLITLCTACHDNLHKGKVTLDGKKRGKTLRDAAFMGIMRNTLLIRLRNELNIPVQNTYGYITKLLREQNDIKKSHINDARCISKHPLAEPCSVCYRTKAIRHHNRQIHKAKILKGGIRKANQAPYIVKGFRLWDKVLYNGQECFISGRRSSGYFALKKLDGTAITNSISFRKLRLLEPAINYLIERM

SEQ ID NO: 16478 - protein, 470 aa, unidentified; identical to SEQ ID NO: 2825
  REGION 1..470: note = Human gut metagenome

SEQ ID NO: 16479 - protein, 408 aa, unidentified; identical to SEQ ID NO: 5302
  REGION 1..408: note = Human gut metagenome

SEQ ID NO: 16480 - protein, 417 aa, unidentified; identical to SEQ ID NO: 6596
  REGION 1..417: note = Human gut metagenome

SEQ ID NO: 16481 - protein, 470 aa, unidentified; identical to SEQ ID NO: 2825
  REGION 1..470: note = Human gut metagenome

SEQ ID NO: 16482 - protein, 408 aa, unidentified; identical to SEQ ID NO: 6729
  REGION 1..408: note = Human gut metagenome

SEQ ID NO: 16483 - protein, 442 aa, unidentified; identical to SEQ ID NO: 2903
  REGION 1..442: note = Human gut metagenome

SEQ ID NO: 16484 - protein, 431 aa, unidentified
  REGION 1..431: note = Human gut metagenome
MDAWDIIVVLNKRGKPLMPCSPAKARLLLKEKKAIVVRRTPFTIQLTIATGESKQPVSLGVDAGYKHVGLSASTEKAELYASEVELRQDITDLLSARRALRQSRRNRKTRYRAPRFDNRISTKRKGWLAPSVENRINAHLSRIEAVLRLLPVTKITVETASFDMQLLKNPDIAGKEYQEGEQLGFWNVREYVLFRDGHVCQHCHGRSKDPVLNVHHLESRRTGGDSPGNLITLCETCHKALHRGEITLKAKRGQSFRAETFMGIMRWEVLDRLKASHPKLEVHNTYGYRTKHARIANDIAKSHCADAFCIAGNLGAERLGEFFFQKQTRRNNRQIHKLSILKGGIRKRNQAPFEVKGFRLFDKVACQGEEGFIFGRRSSGFFDVRKLDGTRISAGISYKKLHLLEKRRTYLTEIRKEEALPPLPEGRGLRA

SEQ ID NO: 16485 - protein, 373 aa, Moorena sp.
MSNFVFVLDTTKKPLNPVHPAQARRLLKQGKAAVFRRYPFTIILFEEITETPKNITLKLDPGSQTTGIALVQNNQVIWGAELQHRGQQIQDALTSRRQLRRGRRGRKTRYRQPRFLNRKRSEGWLPPSLQHRVDTTLTWVKRLTRYCPINSLAVELVKFDLQKQENPEISGVEYRQGTLYGWEVREYLLAKFNRTCQYCGATDRPFEIDHIHPRSKGGSDRVSNLTLACHNCNQSKGNQDIKDFLKEKPNLVNHILRQAKTSLKDAAAVNSTRLKLFLSLRELGLPIETGSGGLTKFNRKRLKVPKTHWQDASCLGKIPDDLIFKTNQPLLIQATGHGKRQRCRPNKFGFRISHASRAKLFQGFQTGDLVSAS

SEQ ID NO: 16486 - protein, 475 aa, unidentified
  REGION 1..475: note = Human gut metagenome
HPFGGLRLSHGHKISDALRGRNGDADKKPFPTLTKDENRPSGRTTGLRAEQAEPAGIRKGDTLKVFVLNMRGKPLMPCSPAKARHMLKAGKAVVVRRTPFTIKLTIATGETKQDVTLGVDAGARHVGISATTEKEEVFASEVALRQDITGLLADRLAFRRARRNRKTRYRAPRFNNRVRSKHKGWLAPSVENRIQAHMSRIEAVCRLLPVTKIVIETASFDIQKIRNPEVEGTGYQQGDQLGFWNVREYVLFRDGHICQHCRGRSKDPILNVHHLESRKTGGDAPNNLITLCETCHKAYHAGKIKLKVKRGQSFRAEAFMGIMRWTLLDRVRKTYPKLPVENTYGYLTKHKRIALGLPKTHCADAFCIAGNLKALRRGDFLFQQQTRKHNRQIHKCSILKGGVRKLNQAPFLVKGFRLFDKVRIGGQIGFVFGRRVRGTFNIRRLDKTVIGTDINCKKLSLLETRKTFLTELRKE

SEQ ID NO: 16487 - protein, 424 aa, unidentified
  REGION 1..424: note = Human gut metagenome
MVYVLSKEGTPLMPTNRRGRVRHLLDAGEAKAVKRCPFTIQLLYQSTTYTQEITLGVDAGSKTIGLSASTEKKELYASETRLRMDITDLLSVRRQFRRTRRNRKTRYRKARFNNRVHAKHKGWLAPGIEAKIGTHFRAVRDVCRILPVTEIIVETASFDIQKIKALENGEPVPEGTDYQEGDQLGFWNVREYVLWRDGYKCRCCNGKSKDQVLNVHHIESRKTGGDAPNNLATLCGYCHKQYHKGTILLPKSVRRGNSFRDAAFMGIMRRTFYNRLKEQYPRVAMTYGYITKNTRIRNSLPKTHYADARCIAGHPQAEPLEVYYFQKKVRCHNRQIHKSNILKGGKKKRNQAEYLVKGYRLYDRVRYQNREYYVFGRRASGFFDIRTLGGNKGNKGSVSCKKLRFLEPRKTMLTERRMQEREAV

SEQ ID NO: 16488 - protein, 450 aa, Moorena sp.; identical to SEQ ID NO: 2935

SEQ ID NO: 16489 - protein, 429 aa, Parasutterella sp.; identical to SEQ ID NO: 3656

SEQ ID NO: 16490 - protein, 397 aa, unidentified
  REGION 1..397: note = Human gut metagenome
MVYVQDINGKPLIPTTRYGKVRRLLKANKAVVVNICPFTIKLTYVTSDYKQEIVLGVDAGTRHIGLSATTKSKELYSSEVILRNDIVDLLSTRRELRRTRRSRLRYRKPRFNNRIKSKKQEWIAPSVKYKIDAHIRVVEKVYSILPVSHIIIEVAQFDTQKIKNPDISGKEYQEGDQLGFWNVREYVLARDGHKCQHCKGKSKDAILNVHHIESRKTGGNSPSNLITLCETCHKEYHKGNIKLKVKRGTSLRDAAAMGMMKWKLLDKLKSLFPNVSMTFGYITKHNRINNNIEKSHISDAFVISKNFNAKRLNLQHKIKLVRRHNRQIHKMKIQKGGIKRPNQSPFEVFGFRLFDRVKFNDKFYFIYGRRKSGSFNIRDINGENSKDIMYKKLNLLR

SEQ ID NO: 16491 - protein, 414 aa, unidentified
  REGION 1..414: note = Human gut metagenome
MPCSPAKARLLLKEKKAIVKRRTPFTIQLTIATGESKQPVTLGVDAGYKHVGLSASTEKAELYASEVELRQDVSDLLSARRALRQSRRNRKTRYRAPRFNNRLRTKRKGWLAPSVENRINAHLSRIEAVLRLLPVTKITVETASFDMQLLKNPDIAGKEYQEGEQLGFWNVREYVLFRDRHVCQHCYGRSKDPVLNVHHLESRRTGGDSPDNLITLCETCHKALHRGDITLKAKRGKSFRAEAFMGIMRWEVHNRLRALHPGIEVSNTYGYRTKHARIANGIAKSHCADAFCIAGNLGAERLCEFFFQKQTRRNNRQIHKLSILKGGIRKRNQAPFEVKGFRLFDRVACQGEESFIFGRRSSGFFDVRKLDGTRISAGISCKKLHLLEKRRTYLTEIRKEEALPPLPEGRGLRA

SEQ ID NO: 16492 - protein, 531 aa, Acidithiobacillus sp.; identical to SEQ ID NO: 15629

SEQ ID NO: 16493 - protein, 443 aa, Anoxybacillus sp.; identical to SEQ ID NO: 2800

SEQ ID NO: 16494 - protein, 406 aa, unidentified
  REGION 1..406: note = Human gut metagenome
MRGKPLMPCSPAKARHMLKAGKAVVVRRTPFTIKLTIATGETKQDVTLGVDAGARHVGISATTEKEEVFASEVALRQDITGLLADRLAFRRARRNRKTRYRAPRFNNRVRSKHKGWLAPSVENRIQAHISRIEAVCRLLPVTKIVIETASFDIQKIRNPEVEGTGYQQGDQLGFWNVREYVLFRDGHVCQHCHGRSRDKILNVHHLESRKTGGDAPNNLITLCETCHKAYHAGKIKLKVKRGQSFRAEAFMGIMRWTLLDRVRKTHPKLPVENTYGYLTKHKRIALGLPKTHCADAFCIAGNLKALRRGDFLFQQQTRKHNRQIHKCSILKGGVRKLNQAPFLVKGFRLFDKVRIGGQIGFVFGRRVRGIFNIRRLDKTVIGTDINCKKLSLLETRKTFLTELRKE

SEQ ID NO: 16495 - protein, 413 aa, unidentified
  REGION 1..413: note = Human gut metagenome
LKVFVLNMRGKPLMPCSPAKARHMLKAGKAFVVRRTPFTIKLTIATGETKQDVTLGVDAGARHVGISATTEKEEVFASEVALRQDITGLLADRLAFRRARRNRKTRYRAPRFNNRVRSKHKGWLAPSVENRIQAHISRIEAVCRLLPVTKIVIETASFDIQKIRNPEVEGTGYQQGDQLGFWNVREYVLFRDGHICQHCRGRSKDPILNVHHLESRKTGGDAPNNLITLCETCHKAYHAGKIKLKVKRGQSFRAEAFMGIMRWTLLDRVRKTHPKLPVENTYGYLTKHKRIALGLPKTHCADAFCIAGNLKALRRGDFLFQQQTRKHNRQIHRCSILKGGVRKLNQAPFLVKGFRLFDKVRIGGQIGFVFGRRVRGTFNIRRLDKTVIGTDINCKKLSLLETRKTFLTELRKE

SEQ ID NO: 16496 - protein, 432 aa, Moorena sp.; identical to SEQ ID NO: 5479

SEQ ID NO: 16497 - protein, 423 aa, unidentified
  REGION 1..423: note = Human gut metagenome
MVYVLNFDGQPLMPTDKHGKVRHLLKDGRAEVVKRCPFTIRLLYDSTHYTQDIVLGVDAGSKHIGLSATTETKELYASDVELRNDIVDLISTRRQNRRSRRNRKIRYRKARFQNRVSGKKNWLAPSIRQKVDTHMTVVSRVCMILPVTKIIVETASFDIQKIKDPDISGTGYQQGEQLDFWNVREYVLFRDGHTCQCCKGKSKDLVLNVHHIESRKTGGDAPNNLITLCETCHKGYHSGAVQLPKAIHRGMRFKDAAFMGVMRWNFYNKLKEIYELQGIEIRMTFGYLTKNSRIRHHLPKEHYIDARCISGHPEAIPNNEVFYQKKVRCHNRQIHKNTILKGGIRKRNQTGYLVKGFRLFDKVAYEGREYFIFGRRQSGFFDLRDLSGCKVNKGSLSYRKIRFLEPRQYYLCERRVMDTQGCA

SEQ ID NO: 16498 - protein, 303 aa, unidentified
  REGION 1..303: note = Human gut metagenome
MYRHRSDVHPNPPLCDNASLEAEVKPKDAADSNRLRPWGRMHYSPSGERTACFGIAVIPKKGETAMQYVYVVGSNGKPLMPCSPAKARKLLKTKSAAVLQRTPFTIKLLHHAGGYKQPITLGVDAGSKHIGLSACTETKELYKEELTPRNDVVKLLSKRRECRRGRRHRKTRYRTPRFNNRVRSKHKGWLAPSVEVKIQEHITAIHHICRRLPVTKIVVETAEFDTQRLKAMLEGKPLPVGTDYQRGEMYDEYNVRQYILKRDNYTCQHCGKRGSAEKGVKLHVHHLETRQTGGNTKHYTKAK

SEQ ID NO: 16499 - protein, 501 aa, Moorena sp.; identical to SEQ ID NO: 9337

SEQ ID NO: 16500 - protein, 431 aa, unidentified; identical to SEQ ID NO: 4463
  REGION 1..431: note = Human gut metagenome

SEQ ID NO: 16501 - protein, 418 aa, unidentified
  REGION 1..418: note = Human gut metagenome
MVYVLSQNGQPLMPTGNHAKVRVLLNQRKAKVIKRCPFTIQLQYESTTHTQKINLGIDAGSKTIGVSATTESKVLYESEVVLRNDIVELLSGRRALRRSRRNRKTRYRKPRLDNRRRPDGWLAPSIRQKIKTHVTVVENVMKILPVTKIIVETASFDIQKIKNPEIEGTEYQYGEQLDFWNVREYVLFRDGHTCQCCKGKSKDNILNVHHIESRKTGGNAPNNLITLCETCHKAYHKGVITLPKEIHRGMRFRDAAFMGIMRWAFYDRLKELYTPFGVEVINTYGYITKNTRIEHGLPKEHYVDARCISGNPAAKPLGHYYFQKKVRCHNRQIHKNTILKGGIRKRNQAAYLVKGYRLFDKVKYQNQEYFIFGRRSSGFFDIRTLDGTKVNKGSISCKKLQLVEKSKHYLTEQRKVAA

SEQ ID NO: 16502 - protein, 419 aa, unidentified; identical to SEQ ID NO: 4877
  REGION 1..419: note = Human gut metagenome

SEQ ID NO: 16503 - protein, 490 aa, unidentified; identical to SEQ ID NO: 6170
  REGION 1..490: note = Human gut metagenome

SEQ ID NO: 16504 - protein, 412 aa, unidentified; identical to SEQ ID NO: 4932
  REGION 1..412: note = Human gut metagenome

SEQ ID NO: 16505 - protein, 518 aa, Moorena sp.; identical to SEQ ID NO: 7410

SEQ ID NO: 16506 - protein, 430 aa, unidentified; identical to SEQ ID NO: 5683
  REGION 1..430: note = Human gut metagenome

SEQ ID NO: 16507 - protein, 380 aa, unidentified
  REGION 1..380: note = Freshwater metagenome
KPLMPCTSSKARKLLQNRKAKVVKLYPFTIRLNFDCENQTQDISMGIDAGYANIGFSCITTKSELVSGTIILDNKTSERLTERRMYRRGRRNKLWYREPRFDNRKRKEGSLPPSVQRRYDTNLKIINLMKSLMPITKVTVEVANFDIQKIENEAIEGVGYQQGEMLGYQNMRSYLMAREKGVCQLCGKEFEKGNPSHIHHIIERANGGTDRAKNLAILHEKCHDKLHKKGLKLKPNKTYKPNTFMSIIRNRFWNDIPNINVTYGYETFVKRIELRLEKTHYTDAFVIAGGEYQQRCKPIGIKQKHQHNRVLQVNRKGFAPAIRKQRYKIQPKDLVWINGKREVAVGVHCKGAAVIIERNKKSFLIKKVEKIYNFGTFAYS

SEQ ID NO: 16508 - protein, 426 aa, unidentified
  REGION 1..426: note = Human gut metagenome
YWHEEKFSERKVSEMTNYAFVLDANNKQLTPTKEQKAWFLIRKKRATLVSKYPMVIQLKKKIPDKEICKDEVRCGIDDGGLHVGVALVQKCQTRNKVVFKGVIEQRNDVKHLIDVRCGYRRYHRYHKRYRSARFNNRNSSKREERIAPSILQKRQATIRVINQLNKWINITNYWLEDVAIDIRALTDGYKPYRWQYQKSNRLDENIRKAVILRDGCKCMECGKSNCRLEVHHIKSRRLKGSSTLDNLITLCTKCHQKTESVEELYMDRYFALLNSSDNKNLNYAQHVMIGKKWLREQLSNLGMLYLTNGGDTANKRIDWDIAKSHSNDAICITDLRPDTCEIKEWVIKPMRKQSKAKTDNVLGIKHRDLVEYTFRNETHRGYVTALYPEQNAINFRSPTKHCKKVNAKKCKVLWKYSKIYWLDNVG

SEQ ID NO: 16509 - protein, 478 aa, Lactobacillus sp.
MDNIVDGQQRKSKLGLLIWTSGRNHCFLHYEKGEKNMKHENANRVFLLNRDGKPLMPCRPRKARLLLKSGKAFVAKKYPFTIQLKYGSYGYKQKVSLGVDTGQRHIGFAVVSQEKVLCQSEVELRQDVHKNLYTRKIYRRSRRNRKTRYRQARFLNRVHGKRDGLWLPPSVKGKVNHNIAWIKQYLAVLPNPDLHIEVGKFDMAKMLNPTISGKQYQEGSLKDWKNYEYYVLARDEYTCQLCHKHGEGVKLVVHHIVYRSQGGTNRVDNLITLCTDCHTTKNHQPGGKLYKWMKAKKKVTKQLKGATFMNILRKRIMTAFPEASFQYGSQTYVDRKNLLLPKGHFMDAIAISGIKSVGQMPDTVTLISQFRKKKRSLHEATARKGRKQPNTSSKRNEKNTNHARGLWLNDYVRVIGNHAKGYVKGFKSKGYYVYLTDGLGNYVLNNGKNYINGQQCRLIMHNGNWQKAEQKLSLYEFK

SEQ ID NO: 16510 - protein, 451 aa, unidentified
  REGION 1..451: note = Human gut metagenome
VLSAWNPFQHWRRITTGRKTEETNLRVLVWNKRGKPLMPCSPAKARLLLKEKKAIVVRRTPFTIQLTIATGESKQPVSLGVDAGYKHVGLSASTEKAELYASEVELRQDITDLLSARRALRQSRRNRKTRYRAPRFDNRIRTKRKGWLAPSVENRINAHLSRIETVIRLLPVTKISVETTSFDMQLLKNSDIAGKEYQESEQLGFWNVREYVLFRDGHVCQHCHGRSKDPVLNVHHLESRRTGGDSPGNLITLCETCHKELHRGEITLKAKRGQSFRAETFMGIMRWEVLDRLKASHPKLEVQNTYGYRTKHARIVNGIAKSHCADAFCIAGNLGAERLGEFLFQKQTRRNNRQIHKLSILKGGIRKRNQVPFEVKGFRLFDKVACKGEEGFVFGRRSSGYFDVRKLDGTRISAGISYKKLRLLEKRQTYLTEIRKEEALPPLPEGRGLRA

SEQ ID NO: 16511 - protein, 453 aa, Moorena sp.; identical to SEQ ID NO: 4050

SEQ ID NO: 16512 - protein, 406 aa, unidentified; identical to SEQ ID NO: 4082
  REGION 1..406: note = Human gut metagenome

SEQ ID NO: 16513 - protein, 348 aa, Enterococcus sp.; identical to SEQ ID NO: 9214

SEQ ID NO: 16514 - protein, 436 aa, unidentified
  REGION 1..436: note = Human metagenome
MAKTLTRQTTQVCVLDQNGKPLMPTTRLGKVYRLLKTQKAHIVSYEPFTIQLDYEPDTHIIQPLTLGVDSGAIHSGYSVANEHREYYSAEVIARDNISKKLSNKRMYRKQRRSRKTRYRKPRFKNRKNKKKGWLPPSLEQKVAVQLNEIDHLHHYFPIENIIVEVAEFDIQKIKDPNISGIEYQQGTLYGYNIRNYLLEKHGRKCFYCGKTVSDFEVEHMIPKIRGGSDRIDNLTLSCHDCNQKKDTLTAEEFIKQTLPAKKAATKLKQLPNEKHLFKYMTYMNATRWSLYNAIDEKYPNVTMTYGYITKYNRIKAGLPKTHHIDAKCITGFATVPSMGQTVVKIKMRRHNRQLHQATFSKGHVRKIGNLPTVVFGFQLYDIVLFNNHHYYIKGRRSSGYFALVSLEGLKDENRSYKKLTKLAHTNAYLTNRYIET

SEQ ID NO: 16515 - protein, 456 aa, unidentified
  REGION 1..456: note = Human gut metagenome
MSTCVCVLSNNGERLMPTIRLGKVRHLLKDGKAKIIKHHPFTIQLLYDSKTNTQPIEICEDVGYNYIGISVKSESHEYVSAQYDTLQDEKEHHDDCRKYRRTRRNRLRYRKPRFDNRKRSEGWLAPSLEHKKQLNIRLIERYVSVIPITHATVEVGSFDTMLLQAIQKGKSKPEGVDYQKGPRYNLATLREAVFYRDDYTCQVCGRKITDGAILHMHHMFYWKGRHGYQLDELVTACEKCHTPANHQKGGKLFGFGEDKEFANLSGAAFMNAVRWQIVDALHATYGKEFVTITYGAMTKEKRIILGIEKTHNNDAYAMGDYHPAHRCVFRHYQKRRRNNRVLEKFYDATYIDARTGNKAKGKELFNGRINRNHKKDSEDLHKYRSKKVSKGRRSIRRQRYAIQPYDTVRLESKTYITSGCHNKGTRLLIPVNGKSKSVAISKVQVVCHAGAWIQII

SEQ ID NO: 16516 - protein, 412 aa, unidentified
  REGION 1..412: note = Human gut metagenome
MIYVLNQNGQPLMPTKNHAKVRILLKSKKAKVIRRCPFTIQLMYSSTNYTQSINLGVDAGSKHIGISATTKNKVLFESDVELRNDIVNLLSTRRQNRRTRRNRKTRYRKPRFDNRKRKDGWLAPSVQNKVDTHLTVIRKVHEILPVSKIIVEAASFDIQKIKNPTIGGTEYQQGSQLDFWNVREYVLFRDNHTCQCCKGKSKDKILNVHHIESRKTGGDAPNNLITLCGTCHTGYHKGTVNLPKRIKRGMSFKDASFMGIMRWAFYNKLKEIYPNVSLTYGYITKNTRIENKLPKDHYIDARCISGNPKAVSDWGVYYQKKVRCHNRKIHKNTILKDGYRKRNQAPYEVMGFRLYDKVRWKQQNCFIFGRRSTGRMDLRLLDGTKVNASVGYKNLKMLEMCKNILIELRMEV

SEQ ID NO: 16517 - protein, 459 aa, unidentified; identical to SEQ ID NO: 3944
  REGION 1..459: note = metagenome

SEQ ID NO: 16518 - protein, 465 aa, unidentified; identical to SEQ ID NO: 10727
  REGION 1..465: note = Human gut metagenome

SEQ ID NO: 16519 - protein, 315 aa, unidentified
  REGION 1..315: note = Human gut metagenome
LRVFVLNKRGKPLMPCSPAKARLLLKEKKAIVVRRTPFTIQLTIATGEAKQPVSLGIDAGYKHVGLSASTEKAELYASEVELRQDITDLLSARRALRQSRRNRKTRYRAPRFNNRLCTKRKGWLAPSVENRINAHLSRIKAVLRLLPVTKITVETASFDLQLLKNPDISGKEYQEGEQLGFWNIREYVLCRDRHVCQHCYGRSKDPVLNVHHLESRRTGGDSPGNLITLCETCHKALHRGEITLKAKRGQSFRAEAFMGIMRWEVLNRLKASHPELEVNNTYGYRTKHARIANDIAKSHCADAFCIAGNLGAERL

SEQ ID NO: 16520 - protein, 465 aa, unidentified; identical to SEQ ID NO: 10277
  REGION 1..465: note = Human gut metagenome

SEQ ID NO: 16521 - protein, 415 aa, unidentified; identical to SEQ ID NO: 8474
  REGION 1..415: note = Human gut metagenome

SEQ ID NO: 16522 - protein, 430 aa, unidentified; identical to SEQ ID NO: 4817
  REGION 1..430: note = Human gut metagenome

SEQ ID NO: 16523 - protein, 531 aa, unidentified
  REGION 1..531: note = Human gut metagenome
MPMLWKLNRSRQDRISTGPELAVTGLQQKRRTMRYVYVLDMNGEPLMPTCRYGKVRRMLKSGQAKAVDTLPFTIQLLKPTKTRILQPVIVGQDPGRTNIGMAAVRSDGMELYRAHIETRNKEIVSLMNDRRSFRQASRRGERLARKRLAKKLHTTAKHLNGRILPGCKEPLAVKDIINTEARFNNRLRPEGWLTPTATQLLRTHLEAFRKLSRILPVTEVVLEINRFAFMQLDNPDMEKRDIDFCRGPLHGTGGVKAAVSLQQNELCLLCREREIEHYHHIVPRSRRGSNTISNIAGLCEKCHERVHKDQAAAEKLQSRKDGLSKKYGGTSVLNQIIPSLTEELGIRYPGHTHVTNGWNTKEFREKHELEKDHDIDAYCIAASILKDVQPVMQTKPYEVKQFRRHNRARIHHQTERTYRYDGKIIAKNRKKRMDQKTDSLEDWVADMTKQYGQGTASRMLSKVTVQKSTRHYNTKGRIMPGTVFIYRGKRFVMTGLLTGGAYYRAYGQDKKNFPAKAVRVVQKNKGLVYVA

SEQ ID NO: 16524 - protein, 504 aa, unidentified
  REGION 1..504: note = Human gut metagenome
MAWEAIQTRRIKPHDIGEGTLRRHAAGTVSFPVLCKNRKETLMSVLVIGRNGRALMPTNPRKARLLLKKKTASVVCRHPFTIQLLYKTGCATQEGCIGIDTGSQHIGVGITCGDRVILKDEHALRSSMEKRSLLATRAVMRRGRRYRKVRYRKPKWRHHTKRMYFEKANRRGQHWRKVKTTTQSPRPKGWLPPSLQSKCDHHFRIIDRYLKYLPDPITRNLVIEAGRFDMARMNDPTIHGEMYQRGPMYDAENLRAYIFARDNYQCACCKAKAGTTRKADGTTVKLVAHHILFRSRGATDNPKYIISVCDHCHTTKAHQPGGILYSWMENNKKVARGLRDAVFMNILRKRLFARYPQSAFTYGNITATDRKQLRLPKSHANDAVAISLFGKEASTVKNICQTMHYKQIRKSKRSLHEAIPRKGRKNPNTKAVRNKKNTTQVNGFKLWDSVLADGKKLFICSFTGTSAYLIDKNGCYISQPGKTYKQWPLSKLKRLHPNGNWLMA

SEQ ID NO: 16525 - protein, 413 aa, unidentified
  REGION 1..413: note = Human gut metagenome
MRGQPLMPCSPAKARHLLKAGKAAVRRRTPFTIQLRIATGETKQSVTLGVDAGAKHVGLSAATEKEEVFASEVELRQDITGLLAARLSLRRERRQRKTRYRAPRFLNRVRSKHKGWLAPTVENRIQAHMSRIDAICGLLPVTKIVIETASFDIQKIKHPDVEGTNYQQGDQLGFWNVREYVLFRDGHVCQHCHGHAKDKILNVHHLESRQTGGDAPNNLITLCKTCHKACHAGKIKLKVKRGQSFRAEAFMGIMRWTLLDRVRKAHSGLPVENTYGYLTKNTRIALGLPKTHCADAFCIAGNLKAQRSGVYLYQKQTRKHNRQIHKCSILKGGIRKLNQSPYLVKGFRLFDKVKCLGQVGFIFGKRSSGYFDVRTLGGKKLSPAIHAKKLTLLEKRKTFLTELRKESGASSPV

SEQ ID NO: 16526 - protein, 499 aa, unidentified
  REGION 1..499: note = Human gut metagenome
MRYVYVLDVDGKPLMPTCRFGKVRRMLKSRQAKAVDTLPFTIQLTYKPRTRILQPVTLGQDPGRTNIGMAAVRFDGKELGRFHCITRNKEIPKLMADRMAARKASRRGERLARKRLARKLHTTAKHLNGRILPGCSEPMAVKDIINTESRFNNRLRPEGWLTPTATQLLRTHINLFRKLSGILPVTDVAVELNKFAFMQLDNPEMKKREIDFCHGPLYGTGGLEATVKEQQNGKCLLCGKEPISHYHHIVPRSRRGSNTIANIAGLCPKCHELVHKDADTAERLTEMKTGLTKKYGGTSVLNQIIPKLVETLADLFPGHFHVTNGWNTKEFREKHHLEKDHDVDAYCIACSHLKPEETLVETEPFEILQFRKHNRAIIHHQTERTYKLDGVTVAKNRKKRMEQKTDSLEDWYVDMAKEHGKTQADAMRSRLTVIKSTRYYNTPGRMMPGTVFLYEGKRYVMTGQITNGKYYRAYGQEKRNFPAVKVRILTKNTGLVFVA

SEQ ID NO: 16527 - protein, 433 aa, Lactobacillus sp.
MQNRVFVINRQGEPLMPCKQQKCRKLLQSGKAKVIKKEPFTIQLLFGSTGYKQLVSIGVDSGQHHIGLAVTSQDKVLFQGEVSLRQDVKKLLDTRRIYRRGRRNRNTRYRPPRFLNRAKPAGWLPPSVVSKVQHNINWIRRLRAVLPKAELHIEVGKFDMAKMKQPDITALGYQQGDLYGYETAKQYVLDRDNYTCQICHGKTKDPKLKIHHIIYRSTGGTNQVSNLLTVCATCHTQANHQPGGKLYALQAKKFQSHRSLKGATFMNILRRRLFTAFPEAKFQYGAQTTLDRAKLDLPKAHYNDAVTISGIQKIAQQPTAIVMFHQFRKKKRSLHEATARKGRKTPNRASKRNAKNTKAINGFHLNDYVQLPNGRRGSISGFSGQYKCYVKAGNHYLTINPKYKQVNLCKLKVIRHQNNWNVLEINTSDYMMA

SEQ ID NO: 16528 - protein, 477 aa, unidentified
  REGION 1..477: note = Human gut metagenome
MIIALDKYKRPLGFLTERRCRILMERKRAVLYRVFPTVVILMDVDARTIPDLPSFRIKIDPGSKYTGIAIIRNDTDEFVYAMQIEHRGDTVRAALNKRKNARRNRRSRETGYRRAKWGNRCLSEKDKRSYDSSREDGWLPPSIRSAADNVISWVRRLGRWINLTECSFEAVRFDTQLMEDPDIEGEEYQHGTLFGLEIKEYLMEKFGHTCQYCGGKSGDPVLEWEHMRPKSRGGSDRVKNALLSCSSCNKDKGNRTPEEWLEQIKARLPREKGKRKELDEERVKLIQKVIDGKPQGSALRYAAWVSSSRRYLEKALFGIFGDVECSSGGRTKYNRTELGYPKEHHYDALCVGTVPEKGYHDRTNGYYLYAKAAGRGTRLRGHLNKCGVIVTKWTDRKKGFFGFQTGDIVVAEVPHKTPKPYKYEGRFVGRVMVRATGSFDIKTTDGKLVTVKEQYCRLLQANSGYHYTMKRAISLGH

SEQ ID NO: 16529 - protein, 554 aa, Actinomadura sp.
VVGRQAGSTRPSHRRKEVTLMATLDARQQTHRRVLPQPAALESMSADNPGAGTKRGVDAAPAAPGVQHGRGEIPGGSPAARGVTHESGERGREAAPRVFVLAKDGTPLDPCHPARARKLLASGRAVVVRHTPLVIRLKRRTADESRVRGVEIGIDPGSKHTGLAVFRDDAGTRTGLFALRLDHRGSRIRDKLTARARYRRRRRAANLRYRPPRFNNRTRSEGWLAPSLRHRVETTVSWVERLSRWAPVQTLHVERVAFDTHALSAGRPLEGIEYQRGTLCGFEVREYLLAKWGRRCAYCGTTGVPVNIDHIHPRGRGGSDRITNLTLACVPCNQAKGAQPVEEFLARRPKVLAQIQARAEAPLRDAAAVNTTRRALWRALEATGRPVRAASGGRTKWNRGRTGAPKSHTLDALHVGHLDTVAAWPGQILTAAATGRGVYSRTRIDRFGFPRLRLPHVKRVHGYATGDLVRADVPVGKHSGTHIGRVAVRATGSFNITTAHGVRQGIHHRHIRLLQRADGYGYTRTKETTMHVPGPGEAPFPPGPEGPGLPGELR

SEQ ID NO: 16530 - protein, 438 aa, Clostridium sp.; identical to SEQ ID NO: 4933

SEQ ID NO: 16531 - protein, 446 aa, unidentified
  REGION 1..446: note = Human gut metagenome
VAFSLATIQKKEEGIMPNKVYVINKHGRPLMPCSPAKARHLLDEGKAKVKKRTPFTIQLVYGSSGYTQEVILGVDAGSKTIGVSASTKKEELFAANVIPRNDVVDLLSTRRESRRARRNRKTRYRKPRFDNRVRSKHKGWLAPSVEVKIQEHITSIKRACRILPVSKVVIETAEFDLQLLKAIADGKPVPQGEDYQKGEMYGHYNVRQYVLWRDNYTCQCCGAHATKKKEVRLHVHHLESRKTGGDAPGNLVTLCDSCHEKLHKGLIAEKDFKKRKRRSTRDATFMGIMRKTLMQRLCSELPIPVIETRGYITKATREKLLVLPKSHTNDALAIAQGKQGFNVGYLPGIVQINKIYTIRPVRHHNRQLHKATILKGGIRKSNQTEKYVFGYCLFDKVQFNGQDCFIWGRRTTGIFTIKTINGKMIKDGISFKKLKPVEKSTGYLIA

SEQ ID NO: 16532 - protein, 419 aa, unidentified; identical to SEQ ID NO: 3867
  REGION 1..419: note = Human gut metagenome

SEQ ID NO: 16533 - protein, 452 aa, unidentified
  REGION 1..452: note = Mouse gut metagenome
MGTLHLLASWCPWRHSWQVSGFILAAILMGRRASWMPYVLNQHGHPLMPCSPAKARHLLKDGKAKLMKRAPFTIQLLYGSSGYRQDVTLGVDAGSKHIGLSAVAADGQEVFAAEVTPRNDIVGNLSTRREFRRARRNRKTRYRKPKFNNRVRSKHKGWLAPSVEVKIQEHITVICRVCRLLPVTKVVDETAEFDLQLLKTIADGKSVPQGEDYQKGEMLGSYNVRQYVLWRDGYTCQCCGKHGHGVKLHVHHKESRKTGGDAPDNQTTLCDSCHEKFHKGVITLDKLKKRGRQSTRDAAFMGIMRKTLMLRLRQQLDIPVCETRGYITKYTRGERLHLPKSHINDALAIAIGPNGARADQRYTIKPVRHHNRQLHKATTLKGGIRKSNQAPKYVKGFRLFDKVLFEGMECFIWGRRSSGSMLLRRLDGSKVKDGAGFRKLTLLERSSYYLVS

SEQ ID NO: 16534 - protein, 463 aa, Moorena sp.
MAVFVLDRSGRPLMPCTEKRARLLLARGRARVHKVMPFTIRVVDRLAEDNEFQALRVKLDPGSKTTGMALVRETAENGVAVINLFELMHRGKQISEALTARRGHRSLRRSRLRYRPARRLNRGNKKSGWLAPSLQHRVDTTLAWVNRIQRYAPVSAISTELVRFDMQALENPEIEGAQYQQGTLAGYEVREYLLEKWHRTCAYCGAKNVPLQIEHIHPKSKSGSDRISNLTLACQCCNAKKAALPVEVFLAKQPERLKRIQAQAKRPLKDAAAVNATRWALINALKTTGLVVETASGGRTKFNRIELGIPKTHALDAACVGPMNSMTGWRKPTLCIKAMGRGSYQRTRLDKFGCVRGYLTRSKNIQGFQTGDRVKAIVTKGKKAGCHIGRVAVRASGSFNIQTSNGLVQGVSHRYCTVVQRGDGYGYQLVAKTEATGTQPKQGDALHTALYLPGLKAGISRAN

SEQ ID NO: 16535 - protein, 306 aa, unidentified
  REGION 1..306: note = Human gut metagenome
MSVAVISKTGIVLMPTSEYRARKLLDSGKAIIYGYRPFTIQLTERETGDVQPVELCVDTGYIHIGVSVKSEKHEYLGLQVDTLTDEKAKHDDRRMYRRQRRNRKRYRKSRFDNRKRKSGWLAPSLEHKKEINLQIITAICGVYPIADITLEMGNFDTQVLKAKEEGKQIPQGTDYQHGERYGIATLREAVFTRDGYKCQCCDRGIKDGAILHAHHIQYRSQGGTNRMSNLITVCEKCHTPANHKPGGKLYGWKPKIASFKDATYMTAVRWQLYRKVKEMFPGIHVKITMEQKPRNAVESWISKNPM

SEQ ID NO: 16536 - protein, 407 aa, unidentified
  REGION 1..407: note = Human gut metagenome
LKTSGAEGVSHPGLPGKYKHKGGQLMSVAVISKTGERLMPTSEYRARKLLKLGKAIKHSYHPFTIQLTERETGDIQPIELCMDTGYIHIGISAKSEKHEYLAEQIDTLTDERGRHDACRMYRRQRRSKKRYRQARFNNRKRDQGWIAPSLEHKKKIHIQAISRINNVMPLTDIALEMGNFDTQVLKAKEEGKPLPQGADYQHGERYGIATLREAVFSRDGYKCQCCGRTIKDGAILHIHHIKYRSQGGTNSMSNLSTVCDKCHTPKNHKPGGKLYSWKPKLPSFKGATFMTTIRWQLYNEVKSLFPDINVHITYGAATKERRRELDIDKSHANDAFVMGQFHPRHRIKAVFYKRNEEIIDALKSSMMQSILTAATERNETVRNYLMAELAVIIRRILKIYINIGYKK

SEQ ID NO: 16537 - protein, 509 aa, unidentified
  REGION 1..509: note = Human gut metagenome
VYVLNKDGKPLMPTTRCGHVRYLLKEKKARVVKTKPFTIQLLYETNDVVQPLYLGIDPGRTNIGVAVVKADGTAVFTAHLETRNKEIPKLMKKRKDSRRARRTNGRRCRRQRRAKANGTISKKCVKQTTAQNGSVSKRAKKIGVIKRHLPGCEKEVLCIGIKNKEAKFNNRTRPAGWLTPTANQLLQTHINLIKKIQKLLPISDVVLEINKFAFMQLDNPNIQKWQYQQGPLYQKANLEEAVSEMQEHHCLFCKKKIDHYHHVVPQHKNGSNTIDNIVGLCTKHHDLVHKDTAWHEKLTKKKTGLNKKYGALSVLNQIIPALTKELSSIFPKHFFVTTGKSTYDYRAAHGVSKDHWLDAYCIACSVLPNDVCDSSINNRVPYELKQFRRHDRRALHKENMSRVYTLNGKKVATNRHKATEQTADSLEEFRQNHPDDVCKLKVKEHHSEYRNPKRNFPGCVFLVGKRTHVMQGTSGSHNGKADGYYDTNGNSYSSGKCKFVAKNEGIIFA

SEQ ID NO: 16538 - protein, 451 aa, unidentified; identical to SEQ ID NO: 5203
  REGION 1..451: note = Human gut metagenome

SEQ ID NO: 16539 - protein, 431 aa, unidentified; identical to SEQ ID NO: 2746
  REGION 1..431: note = Human gut metagenome

SEQ ID NO: 16540 - protein, 427 aa, Moorena sp.
MQNYVFVIDASKQPLNPIHPKKARRLLDIGKAAVFRMYPFTIILKTAINNPTISPCQIKIDPGSKTTGFAIVQNDQVIWGMELEHRGGLIKKKLESRRAVRHRRRNRNTRYRKPRFLNRKRPEGWLPPSLEHRILTTETWVKRLIKFCPVNEIWVERVKFDTQKMQNPEINGTEYQQGEIAGYEVREYLLEKWGRQCTYCGKQNTPLQIEHIHPKSKGGSNRVSNLCLACDKCNQRKGNKPVEDFLRKKPSLLQKIKTKAKQPLSDAAAVNTTRNKIVKVLKGIKPVVTGTGAQTKYNRINFGLPKQHWIDAACVGDVEALVLKTSQPLLVTCIGPGGRQKAALNKYGYPIRHNPLKPIKGWITGDIAKHQKLGIGKVTPRSKGSFGFTPLGEKGYKSCRPQDISAVHRKDGYIYRFCQSLPGTAWK

SEQ ID NO: 16541 - protein, 451 aa, unidentified
  REGION 1..451: note = Human gut metagenome
MSVAVISKTGMLLMPTSEYRARKLLKSKKAIIHGHNPFTIQLTEREIGCVQQIELCMDTGYIHIGISVKSEKHEYLGLQIDTLTDEKPRHNACRMYRRQRRSRKRYRQPRFNNRKRNNGWIAPSLEHKKNIHIQAVSRICKVMPITDITLEMGNFDTQVLKAREEGRPLPQGVDYQHGERYGIATLREAVFTRDGYTCQCCGRTIEDDAILHVHHIVYRSHGGTNRMSNLITVCDKCHTPANHKPGGKLYNWKPKIVSFKGATYMTAIRWKLYNEVKALFPDVNIRITYGAETKERRRAFNIAKSHINDAFVMGQFHPKHRIKAVLYKKKRRNNRCLEKFYDAKYIDSRDGKKRSGQELFNGRISRNHKKDSENLHRYRQQKISAGRRTIRKQHYAIQPHDIVTFNREKLETSGCHNNGTRAILLPQKKSVAVKKLNIYRYAGGYFKSAFN

SEQ ID NO: 16542 - protein, 415 aa, unidentified
  REGION 1..415: note = Human gut metagenome
MENKIEYCFVVDKNNRPLAPTKVNKGWYLIRKGRAKLKSKYPMVIQLEKEVEPDDEDESHMVCGIDDGSSHIGIAIVQKCPSKNKVVFKGTIEQRQDVKHLMDVRRGYRQYRRYHKRYRKPRFNNRASSKKTNRLAPSIKQKKDSILRVLYQLNKWINIKEYYLEDVAIDIRAMTDGYKPYNWQYQKNNRLDENLRKATILRDSCKCQECGKTNTVLEVHHIRAKRFGGANTIGNLITLCSSCHQKTEGKEREFEERYFTKIKSKPKRFDYAMHVMQGKNYLRENIKQLGILHLTTGGDTANKRIEWNIEKSHSNDAICITNCFPDTCNIKEWMIKPMRRKSKAKTDNVLGIKHRDLVEYTYRNGETHKGYVTALYPHLNALNFQSPTKHCKKVNVRKCRLLWKYNKIYWLDSVI

SEQ ID NO: 16543 - protein, 413 aa, unidentified
  REGION 1..413: note = Lachnospiraceae bacterium UBA2888
MTNYSFVLDANDKPLSPTKETKAWYMIRKGKAKLVSKYPMTIQLKRVIPVEEVCKDEIRCGIDDGGLHTGIALVQKCQTKNKVLFKGTIEQRNDVKHLMDVRRGYREYHRFHKRYRKARFNNRKSSKREDRIAPSILQKRQATMRVIYHLNKWINITNYWLEDVSIDIRALTDGYKPYNWQYQKSNRLDENIRKAVILRDGCKCMECGKSNTVLEVHHIKPRRLNGSNTLDNLITLCSKYHQKTEDNEEQYMQHYFDMLGSSDNKNLNYASHVMIGKKWLREQLSELGILHLTNGGDTSNKRIDWNINKSHSNDAVCITNLKPDTTDIKEWIIKPMRRQSKAKTDNVLGIKHRDLVEYTFKNGETHRGYVTALYPELNALNFKSPTKHCKKVNAKKCKLLWKYSKIYWLDNVA

SEQ ID NO: 16544 - protein, 442 aa, Anaerostipes sp.; identical to SEQ ID NO: 2903

SEQ ID NO: 16545 - protein, 414 aa, unidentified
  REGION 1..414: note = Human gut metagenome
MPCSPAKARLLLKEKKAIVVRRTPFTIQLTIATGESKQPVSLGVDAGYKHVGLSASTEKAELYASEVELRQDITDLLSARRALRQSRRNRKTRYRAPRFDNRIRTKRKGWLAPSVENRINAHLSRIEAVLRLLPITKITVETASFDMQRLKNPDISGKEYQEGEQLGFWNVREYVLFRDGHVCRHCHGRSKDPVLNVHHLESRRTGSDSPDNLITLCETCHKALHRGEITLKAKRGQSFRAQAFMGIMRREVLNRLKASHSELEVNNTYGYRTKHARIVNGIDKSHCADAFCIAGNLGAERLCEFFFQKQTRRNNRQIHKLSILKGGIRKRNQAPFEIKGFRLFDKVACKGEESFIFGRRSSGYFDVRKLDGTRISAGISCKKLRLLEKRRTYLTEIRKEEALPPLPEGRGLRA

SEQ ID NO: 16546 - protein, 415 aa, unidentified
  REGION 1..415: note = Human gut metagenome
MENKIEYCFVVDKNNRPLAPTKVNKGWYLIRKGRAKLRSKYPMVIQLEKEVESDEGDKSYMVCGIDDGSVHVGLAIVQKCLTKNKVVFKGIIEQRQDVKHLMDVRRGCRRYRRYHKRYRQARFNNRSSSKRICRLAPSIKQKKDAILRVLYQLNKWIDIQGYYLEDVCIDVRAMTDGYKPYRWQYQKSNRLDENLRKATILRDGCKCQECGKSNCRLEAHHIRARRYGGADTIGNLITLCKKCHDKTKSREKDFEERYFNMIKSKPKRFDYAMHVMRGKSYLRKKISELGILHLTNGGETANKRIEWNIVKTHSNDAICIADGIPDTCDIKEWIIKPMRRKSKAKTDNVLGIKHRDLVSYTYKNGETYTGYVTALYPKQLALNFQSKTKHCKKVNARKCRLLWKFNKIYWLEQCV

SEQ ID NO: 16547 - protein, 408 aa, unidentified; identical to SEQ ID NO: 12490
  REGION 1..408: note = Human gut metagenome

SEQ ID NO: 16548 - protein, 442 aa, unidentified
  REGION 1..442: note = IscB polypeptide
VFKQSCDGRDSDASIVLAGNNSDVDQQSGKTEHNLSVYVINLQKEPVMPCSPCKARHLLEQNEAVVVSRKPFTIQLLKTKGTAKQPITLGVDAGYKYVGVSATSNKKELFSAEVTLRTDIPKKLQNKASYRRNRRSRLWYREPRFNNRSKDKGWLAPSIQHKLDSHIRIVEKIKKLLPITETIVEVASFDIQKIKNPDIESKKYQQGEQFGFWNIREYVLHRDNHTCQHCHGKKKAPVLQTHHINGKKEGATDRPEELLTVCKTCHDEHHRGIDIIPKKKIKNFKPETFMTVVRWKIVNALECKHTYGYITKTNRIKQGLSKSHINDAFVIANGSNQDRCKSYYIKQTKKNSRSIQISRKKFGISVRKQRYPLQPSDIVKYQNKEYIVVGVHCKGSCVCIKESSETKKDVSVNIKKVELICYGKGIQFLPRLKPLSILGEIL

SEQ ID NO: 16549 - protein, 412 aa, unidentified
  REGION 1..412: note = Human gut metagenome
MTNYVFVLDAAGKQLALTKETKAWFFIRKEHATLVSKYPMVIQLNKEVSDDEICKDEIRCGIDDGGLHVGIALVQKCQTKNKVVFKGTIEQRNDVKHLMDVRRGCRHYHRYHKRYRQSRFNNRSSSKRGRIAPSILQKRQATVRVINQLNRWIHITNYWLEDVSIDIRALTDGYKSYSWQYQKSNRLDENIRKAVILRDECKCMECGKSNCRLEVHHIRPRRLNGSNTLSNLITLCEKCHQKTEGSEELFMDKYFSLLKSSDNKNLNYAQHVMIGKKWLREQLSNLGLLYLTNGGDTANKRIDWNIEKSHSNDAICITDLQPDTCDVKEWTIKPMRRQSKAKTDNVLGIKHRDLVEYTFKNGETHKGYVTALYPKQNAINFQSPTKHCKKVNAKKCRLLWKFNKIYWLDNVS

SEQ ID NO: 16550 - protein, 440 aa, unidentified
  REGION 1..440: note = metagenome
MKGVQIMQNRVFVINKHGKALMPCKPRKARILLRDGKAKVLKKEPFTIQLLYGSTGYKQDISIGIDSGQRHIGLAVTSQDKVLFQGEVELRQDVKKLIDTRRIYRRSRRNRKTRYRKAKFLNRIAKKKDNWLPSSVLSKVNHNINWIKRLLSVLPKADLHIEVGKFDIQKMKNPEINGEGYQQGDLYGYQTVKQFVLARDNYTCQVCKKKGGKLKIHHIIYRSLGGTNTVNNLITVCSNCHTTKNHQTEILAKWCKDKKKVNKSYKGATFMNILRRRLFLAFPQAKFQYGAWTTLQRADLELTKSHYNDAVAISGIRKIKAKPTSIMMFKQFRKKKRSLHEVTARKGRKTPNITSKRNSKNTKYARGFWLNDYAKIKNSNKKGYISGFTAKGAGTRLRDIFGEYVSNSDKSYTSTKNISLINHSNNWQEQVITEKQYIMG

SEQ ID NO: 16551 - protein, 475 aa, Blautia sp.; identical to SEQ ID NO: 4128

SEQ ID NO: 16552 - protein, 415 aa, unidentified; identical to SEQ ID NO: 12104
  REGION 1..415: note = gut metagenome

SEQ ID NO: 16553 - protein, 504 aa, unidentified; identical to SEQ ID NO: 5865
  REGION 1..504: note = Human gut metagenome

SEQ ID NO: 16554 - protein, 456 aa, unidentified; identical to SEQ ID NO: 12153
  REGION 1..456: note = Competibacteraceae bacterium UBA4410

SEQ ID NO: 16555 - protein, 420 aa, Moorena sp.; identical to SEQ ID NO: 7078

SEQ ID NO: 16556 - protein, 396 aa, unidentified; identical to SEQ ID NO: 4508
  REGION 1..396: note = Human gut metagenome

SEQ ID NO: 16557 - protein, 417 aa, unidentified
  REGION 1..417: note = Human gut metagenome
MPCSPAKARLLLKEKKAIVKRRTPFTIQLTIATGEAKQPVSLGVDSGYKHIGLSATTEKAELYASQVELRQDITDLLSARLALRRSRRSRKTRYRAPRFNNRVANKREGWLAPSVENRIAAHVSRVETVIRLLPVTAITVETAAFDTQLLKNPDIAGVAYQQGDQIGFWNVREYVLFRDGHVCQHCRGKSKDPILNVHHIESRRTGGDAPNNLITLCETCHRAFHRGEIELKVKRGKSFKAETFMGIMRRTLLERLKKAHPELNVRNTYGYLTKHKRISHGIAKSHCADAYCIADNLGAKRLEGFFFQKQTRKHNRQIHKLSILKGGLRKKNQAPYEVKGFRLFDKVICKGEEAFIFGRRTSGSFDVRRLDGTRISAGINYKKLRLLEPRTTYLAEFRKEAAHPPLHECRGFRAEFL

SEQ ID NO: 16558 - protein, 431 aa, unidentified
  REGION 1..431: note = Human gut metagenome
MPNKVYVINKHGRPLMPCSPAKARHLLDDGKAKVKKRTPFTIQLVYGSSGYTQEVILGVDAGSKTIGMSASTTKEELLSAEVKPRNDVVDLLSTRREFRRARRNRKTRYRKPRFDNRVRSKHKGWLAPSVEVKIQEHITSIKRVCRILPVSKVVIETAEFDLQLLKAIEEGKPVPQGEDYQQGEMYGHYNVRQYVLWRDGYTCQCCGAHATKKKEVRLHVHHLESRKVGGDAPDNQVTLCESCHEKLHKGLIAEKDFKKRKRRSTRDATFMGIMRKTLMQRLCSELPIPVIETRGYITKATREKLLVLPKSHTNDALAIAQGKRGFNVGYLPEIAQIDKIYTIRPVRHHNRQLHKATILKGGIRKSNQTEKYVFGYRLFDKVQFNGQDCFIWGRRTTGIFTIKTINGKMIKDGISFKKLKPVEKSTGYLIA

SEQ ID NO: 16559 - protein, 426 aa, unidentified; identical to SEQ ID NO: 9916
  REGION 1..426: note = Human gut metagenome

SEQ ID NO: 16560 - protein, 351 aa, unidentified
  REGION 1..351: note = Human gut metagenome
ASEVELRQDVSDLLSARRALRQSRRSRNTRYRAPRFDNRIRTKRKGWLAPTVENRINVHLSRIETVLRLLPVTKITVETASFDTQLLKNPDIAGKEYQEGEQLGFWNVREYVLFRDGHVCQHCHGRSKDPALNVHHLESRRTGGDSPGNLITLCETCHKALHHGEITLKTKRGQSFRAEAFMGIMRWEVLNRLKVSHPELEVNNTYGYRTKHVRIANGIAKSHCADAFCIAGNLGAKRLGEFFFQKQTRRNNRQIHKLSILKGGIRKRNQAPFEIKGFRLFDKVACKGEEGFIFGRRSSGSFDVRRLDGTRISAGISYKKLRLLQKRQTYLTEIRKEEALPPLPEGRDLRA

SEQ ID NO: 16561 - protein, 427 aa, Enterococcus sp.; identical to SEQ ID NO: 2410

SEQ ID NO: 16562 - protein, 423 aa, unidentified; identical to SEQ ID NO: 3951
  REGION 1..423: note = Human gut metagenome

SEQ ID NO: 16563 - protein, 269 aa, Eubacterium hallii; identical to SEQ ID NO: 5660

SEQ ID NO: 16564 - protein, 434 aa, Microcoleus sp.; identical to SEQ ID NO: 8083

SEQ ID NO: 16565 - protein, 469 aa, Moorena sp.; identical to SEQ ID NO: 3785

SEQ ID NO: 16566 - protein, 411 aa, unidentified; identical to SEQ ID NO: 2663
  REGION 1..411: note = Human gut metagenome

SEQ ID NO: 16567 - protein, 443 aa, Anoxybacillus sp.; identical to SEQ ID NO: 2800

SEQ ID NO: 16568 - protein, 439 aa, Lactobacillus sp.
MKGVQIMQNRVFVINKHGKALMPCKPRKARILLRDDKAKVVKKEPFTIQLLYGSTGYKQDISLGVDSGQRHIGLAVTSQDKVLFQGEVELRQDVKKLLDTRRAYRQSRRNRKTRYRKARFLNRIAKKKDNWLPPSVASKVNHNINWIKRLLSVLPKADLHIEVGKFDMQKMKNPAINGEGYQQGDLYGYQTVKQFVLARDNYTCQVCKKQGGKLKTHHIIYRSFGGTNTVDNLITVCANCHTTRNHQTGILAKWCKDKKKVSKSYKGATFMNILRRRLFLAFPQAKFQYGAWTTLQRADLNLAKSHYNDAVAISGIEQIKEKPNSVVMFKQFRKKKRSLHEATARKGRKTPNAMSKRNAKNTKYVRGFRLNDYVKIKNSNKKGYICGFSNNNCYIKDIFGDYLTISDRYKQVALSKLDRLSHHNNWNKQEINENVYQMN

SEQ ID NO: 16569 - protein, 466 aa, unidentified
  REGION 1..466: note = Human gut metagenome
MSTCACVLGKSGERLMPTIRLGKVRHLLKDGKAKIIKHHPFTIQLLYDSETNIQPIEICEDVGYNYIGISVKSESHEYVSVQYDTLQDEKDCHDSCRKMRRIRRNRLRYRKPRFDNRKRNKDWLAPSLEHKKELNVNVIKIYCEVVPITHVTVEVGSFDTMLVKAIQEGKAIPEGADYQKGPRYNLATLREAVFYRDNYTCKVCGRKAKNDSAILHVHHMFYWKGRHGNSLNELLTVCEKCHTPANHQKGSKLYGFGENIKFANLSGAAFMNTVRWQIVNELYATFGKLFVTFTYGAMTKEKRIALHLEKCHNNDAYAMGNFHPVDRCAFEHYKKVKRNNRILEKFHDSQYIDIRTGKVANGRSLFNGRINRSHKKDSENLHKYRGKRTRKGYRALRRKKVALNPGDLVSLNGEILVVHSTHAGKNGYVGVEFKTPSKSGKKSASLKKLKIVKTSNSMHSAWTKVS

SEQ ID NO: 16570 - protein, 416 aa, unidentified
  REGION 1..416: note = Human gut metagenome
MIYVKSKDGKVIMPSERRGRIGYLLRHGKAHLVSRVPFVVQLDYDSTTYTQEVSLGIDAGSKHIGVSASSEKKELFAAQVELRSDIVKLLSTRRELRRNRRNRKTRYRKARFNNRKKKDGWIAPSVEQKVKSHLKVIRLVRDLLPIAKTTIEVAQFDAQKIKNPDINGEDYQQGEQMGFWNVREYVLTRDGHRCVHCKGKSKDPILNVHHLESRKTGGNSPSNLVTLCETCHKAYHRGEFALKIKRGSSLRDAAVMNIMRLAVYDRAKLEFGNVHLTYGYVTKHTRIENGIAKTHAADAFCIAKNVHARRSRTFFKCRCVPRHTRSLHVCNPKRGGVRRSCIASHKIGKSRFQRYDMVRWKGRECFISGSTGGRPVLRNIEGYKMHENISVNIKTIKFLKRLRNNILVEEKGLPKV

SEQ ID NO: 16571 - protein, 418 aa, unidentified; identical to SEQ ID NO: 4327
  REGION 1..418: note = Human gut metagenome

SEQ ID NO: 16572 - protein, 454 aa, unidentified; identical to SEQ ID NO: 12421
  REGION 1..454: note = Human gut metagenome

SEQ ID NO: 16573 - protein, 417 aa, unidentified
  REGION 1..417: note = Human gut metagenome
MIYVRSKEGMVLMPTERCGKIGYLLRHGKAHVVSRVPFVVQLDYDSTTYTQDVSLGIDAGSKHIGVSASSEKKEMLAAQVELRSDIVKLLSTRRELRRNRRNRKTRYRKARFDNRKKKDGWLAPSVEQKIESHLKVIRLVHKLLPVTKTTIEVAQFDAQKIKNPDIKGDEYQQGEQMGFWNVREYVLARDGHKCVHCKGKSKDPILNVHHLESRKTGGNSPSNLVTLCETCHKAYHRGEFDLKIKRGSSLRDAAVMNIMRWAIYERAKLEFGNVHLTYGYVTKRTRIENGIAKTHAADAFCIAKNVHAMRLSSFFMCRCVPRHTRALHVANPKKGGIRRNTIASHKIGKSNFQRFDMVRWMGKECFIFGSTRGRPVLRDIEGVKMHENASVNIKTIKFLKRLKNNILMEEKNFRRLN

SEQ ID NO: 16574 - protein, 413 aa, Moorena sp.
MTSYSFVLDANGKPLAPTKEQKAWFFIRKKRATLVSKYPMVIQLKKEIPEKEICQDEIRCGIDDGGLHVGIALVQKCKTKNKVVFKGTIEQRNDVKHLMEVRRGYRRYHRYHKRYRQARFDNRKSSKREGRIAPSILQKRQATIRVNHWLNKWINITNYWLEDVSIDIRALTDGYKPYRWQYQKSNRLDENIRKAAILRDGGKCMECGKLNCRLEVHHIKPRRRNGSDTLDNLITLCKSCHQKTEGQEELYMDRYFSLLKSSDHKNLNYAQHVMIGKEWLRKQLSSLGVLYLTNGGDTANKRIDWNIEKSHANDAVCITNLQPDTYDMKEWTVKPMRRQSKAKTDNVLGIKHRDLVEYTLKNGETHRGYVTALYPEQKAINFQSPTKHCKKVNARKCKLLWKYSKIYWFENAS

SEQ ID NO: 16575 - protein, 427 aa, Enterococcus sp.; identical to SEQ ID NO: 5630

SEQ ID NO: 16576 - protein, 473 aa, unidentified
  REGION 1..473: note = Human gut metagenome
VFRQVPFTIQLTYKNQPVLQPVTIAEDPGRSNIGMAVVSLSGELLSAAVVQTRNKEIVKLMEKRKQHRRASRNGERKARQRLAKKCHTMIKAGFLMRKLPMYGKDKRVQCNVIRNTEARFCNRKREDGWLTPSAEHLVRTHINLIHKMQKFLPITDVAIEINRFAFLSLEDPSISGVDFQNGPLKGYDDLNAAVEDLQDGHCLMCNSPIEHRHHIVPRSMQGSNTIGNIAGLCCKCHERIHKDARFEDHLKKKKAGLNKRYAAVSVLNQAIPFICKRLEQEFGKEHVHYCSGRDSSMVRRSLGYHKTKEEQLHEVDAWCIAVLSLQHVPEKAPEFDHVHEILQFRRQDRSRIKAQTSRAYYYKGKKIAKNRKKAEGQREDSLQEWRKRQVERYGEEQTRKMISQLKVKKSIRRYNRLDRLMPGAVFYYQGVRYVMRGQHCEGTYLQAVGMGSKDFPAKKCKIVAQNEGLVFVS

SEQ ID NO: 16577 - protein, 456 aa, unidentified
  REGION 1..456: note = Marine metagenome
MAVFVLDKKKQPLMPCSEKRARLLLARGRAVVHKRYPFTIRLKNRVGGEAQPLRLGIDPGSKTTGLALMHEPDSQQRHVLCLFELIHRGFQIKKALQQRAAFRRRRRSANLRYRAPRFNNRIKPKGWLAPSLQHRVDTVMAWVNRLSKSAPITGISQELVRFDTQKLESPEISGVEYQQGTLLGYEVREYLLEKWGRECAYCGTTDTPLEIEHVVPRSRGGSNRVSNLTLSCHPCNAEKDSQTLTDFFATNKGLKKRLKANGLSADAQLERVQRQLKQPMRDASAVNATRWALFSALKTTDLPVAVSSGGRTKYNRQRLNIPKTHALDAACVGAFGKLYDWTVPTLTIKAMGRGSYQRTRLTKHGFPRGFLMRQKQVHGFQTGDMVRAIVPTGKKAGTHTGRVAIRKTGSFNIQAEYGAVQGISHKYCTLIQRSDGYGYYVTLFSNLTGEAGRAVA

SEQ ID NO: 16578 - protein, 427 aa, Enterococcus sp.; identical to SEQ ID NO: 2410

SEQ ID NO: 16579 - protein, 407 aa, Bacillus sp.
MTVYAFVVDINEKPLSPTRENNAWYLIRKKKAVLKSKYPMVIQLNKEVSNEKQDISTFVCGIDDGSKHVGIGIVQNGKKAVFTGEIEQRQDVKSLMDLRRIYRKYRRRHKRYRKTRFNNRASSKRKDRISPSVKQKREAVLRVVNQLQKWIPIHKIVLEDVQIDVRKLTEGRQLYQWQYQQSNRLDENLRKATLIRDDFMCQQCSKKNCKLEVHHITPRRFRGADTLKNLITLCSVCHESLGTDELNYAEHFYTLIEGKHIRFDYAQHVMQGKHYLRNELAKISPLELTTGCDTANKRIDYDIEKSHTNDALVIAGLKNSNVFIQPYKIRPMRRKLKAKVEGLNGFQHRDFIKYTKKNGEEYIGWITALSQKRKTLNITTIDGKVLKRYGIGRCTLLWRFQYIYWMI

SEQ ID NO: 16580 - protein, 512 aa, unidentified
  REGION 1..512: note = Human gut metagenome
MSTVYVLNKDGKPLMPTTRGGHVRHLLKEQKARVVRTKPFTIQLLYETNDVVQPLYLGIDPGRTNIGVAVVKTDGTAVFTAHLETRNKEIPKLMKKRKESRRARRTNGRRCRRQRRAKANDTISKKCVKQPTAQNGSISKRAKEIGIIKRRLPGCEKDVLCIGIKNKEARFNNRTRPEGWLTPTANQLLQTHINLVKKIQKFLPISDVVLEVNKFAFMQLDNPNIQKWQYQQGPLYKKESLERAVSEMQEHHCLFCDKPIDHYHHVVPQSENGSNTIANIVGLCAEHHNLVHKDAAWQKKLAEEKVGLNKKYGALSVLNQIIPALTKELSFLFPEHSFVTNGKSTYDYRATHGVSKDHWLDAYCIAYSVLPSNVCDSNINNHVPYELKQFRRHDRRVLHKANTSRVYTLNGKKVATNRHKAAKQTADSLEEFRQSHPDDVCKLKVKEHHPAYRNLSRNYPGSVFLADGQVHVMQGISGSHNGKADGYYDTNGNAYPYYKCKFVAKNEGIVFA

SEQ ID NO: 16581 - protein, 413 aa, unidentified
  REGION 1..413: note = metagenome
LKVFVLNMRGKPLMPCSPAKARHMLKAGKAVVVRRTPFTIKLTIATGETKQDVTLGVDAGARHVGISATTEKEEVFASEVALRQDITGLLADRLAFRRARRNRKTRYRAPRFNNRVRSKHKGWLAPSVENRIQAHMSRIEAVCRLLPVTKIVIETASFDIQKIRNPEVEGTGYQQGDQLGFWNVREYVLFRDGHVCQHCHGRSRDKILNVHHLESRKTGGDAPNNLITLCETCHKAYHAGKIKLKVKRGQSFRAEAFMGIMRWTLLDRVRKTHPKLPVENTYGYLTKHKRIALGLPKTHCADAFCIAGNLKALRRGDFLFQQQTRKHNRQIHKCSILKGGVRKLNQAPFLVKGFRLFDKVRIGGQIGFVFGRRVRGIFNIRRLDKTVIGTDINCKKLSLLETRKTFLTELRKE

SEQ ID NO: 16582 - protein, 425 aa, unidentified
  REGION 1..425: note = Human gut metagenome
MVYVVANDGQPLMPTERHGKVCRMLRSGMAKVIKKCPFTIQLQYESERNVQPVALGIDAGSKHIGISATTKTKVLYESDVELRDDIVKLLATRRQLRRSRRSRKTRYRPARFDNRKRKEGWLAPSIQQKIGSHLTVVANVCKILPINQIIVETASFDIQKIKNPEIQGIEYQQGEQMDFWNVREYVFFRDGHTCQCCKGRSKDKILNVHHIESRKIGGNAPNNLITLCETCHKGYHNGTVILPKNIKRGMQFKDAAFMGIMRWAFYNALKEQYEPAIPVSMTYGYLTKNTRIEHGLLKEHYIDARCISGNPDAVSDGTYYYQKKVRCHNRQIHKQTILKGGIRKSNQAEYLVKGYRLFDKVRYHGREYFIFGRRKTGFFDIRTLSGEKVKKGSISVKKLTFADTRKNYLIERRTVLKMVANSSPA

SEQ ID NO: 16583 - protein, 432 aa, Moorena sp.
MRVFVIDKNLKPLDPCRPARARLLLRRGRAKVYRKYPFTIIILDLEEENCVTHKHQLKIDPGAKTTGFAILALWGRLREQNNVVIWGAELTHRGFQIRDALSSRRQLRRGRRNRKTRYRKSRFLNRTRPDGWLPPSLMHRVLTTITWVKKLIRFCPISGLSQELVRFDMQKIENPQINGYEYQQGKLHGYEVREYLLEKSGRKCGYCGAIDTPLEVDHITPKSKGGSNRVSNLTIACHDCNQTKGNQEIEQFLSGKPEVLKRVLSQVKKPLADAAAVNSTRCSLYEELKLTGLPVEKGSGGLTKYNRCRFNLPKTHWLDAACVGVVDSLYVEVKKPLLIAAKGHGTRQSCRTNKYGFPTRHCSRTKIHKGFQTGDIVKAIVTKGKKIGTYVGRVATRKTGSFNISTVNGLIQGISHKYCSTVHRKDGYSYNF

SEQ ID NO: 16584 - protein, 456 aa, unidentified; identical to SEQ ID NO: 3342
  REGION 1..456: note = IscB polypeptide

SEQ ID NO: 16585 - protein, 423 aa, unidentified; identical to SEQ ID NO: 3951
  REGION 1..423: note = Human gut metagenome

SEQ ID NO: 16586 - protein, 460 aa, unidentified; identical to SEQ ID NO: 7438
  REGION 1..460: note = Human gut metagenome

SEQ ID NO: 16587 - protein, 420 aa, unidentified
  REGION 1..420: note = Human oral metagenome
LVYVISKTGQPIMPTENHAKVRMLLKSGKAEVVKRTPFTIQLTGTSKTFTQEVTLGVDAGSKHVGLSASTTKKELFSAELRPRNDVVDLMSSRRELRRSRRNRTTRYRQARFNNRVQSKHKGWLAPSVEVKIWNHIQGIRLVTKLLPVKTIRVETAEFDLQRLKALEAGEPVPVGTDYQLGEMYGQYNVRQYVLHRDGYTCQCCGAYGTNKKPVKLHVHHLESRKTGGDAPDNLITLCEDCHTGYHAGIVALPITKRRRKSMRDATFMGIMRKTLLERLRNMFPETNICSTYGYITKYWRERKNIAKTHTSDAFVIAKNLDAEWLDKSLLIIPKRQHNRQIHKCKINKGGTRKLNQTPKFVFGYQLFDRVMCMGQEGFVFARRSSGGFDIRKLSGEKIKPNINYKKLKRLESRNTLLVSY

SEQ ID NO: 16588 - protein, 444 aa, unidentified; identical to SEQ ID NO: 3399
  REGION 1..444: note = uncultured cyanobacterium

SEQ ID NO: 16589 - protein, 532 aa, unidentified; identical to SEQ ID NO: 3169
  REGION 1..532: note = Human gut metagenome

SEQ ID NO: 16590 - protein, 430 aa, unidentified; identical to SEQ ID NO: 6405
  REGION 1..430: note = Human gut metagenome

SEQ ID NO: 16591 - protein, 470 aa, unidentified
  REGION 1..470: note = Human gut metagenome
MSVFVVGLNGCRLMPTSERKARLLLKQGKAFVEQKVPFTIRLNYKTGSTTQLGYLGIDTGSQHIGVSVVREDGTVLHKEEIGLRDSMSKRKLLEAKASLRRGRRYRKTRYRHPKWRPKTKRVYCEVPDRKGRHWQKKKITFTSKRPKGWLPPSLQSKTDHHIRWIKKLQDLLPEGYHLSIELGRFDPARMKNPEIHGDLYQKGPQYDYENVRAYVLDRDRYTCQICKKKGGKLHVHHILYRSHGATDDPQYMVTVCSDCHSAQNHLPGGILYQWMQEQKRFSRGLRDATFMNILRKRLIRAFPEAVFTYGNVTKVDREKLKLPKSHGNDATAIALVKTGITAVKDKESVICIQQVRRKKRSLHEETPRKGRKEPNRTAARNNKNTKAVTVTKRQNKKKVSMTGCLFDRVELNGKKGWISGFTGKSCYVKDADDQYLSTSPKYKQVSLSKLRILHHCGNWIIGAKKTLGKG

SEQ ID NO: 16592 - protein, 431 aa, unidentified
  REGION 1..431: note = Human gut metagenome
MPNKVYVINKHGRPLMPCSPAKARHLLDEGKAKIKKRTPFTIQLVYGSSGYTQEVILGVDAGSKTIGMSASTKKEEVFAADVTPRNDVVDLMSTRREFRRARRNRKIRYRKPRFDNRVRSKHKGWLAPSVEVKIQEHITSIKRACRILPVSKVVVETAEFDLQLLKAIADGKPVPQGEDYQKGEMYGHYNVRQYVLWRDDYTCQCCGAHATKKKEVRLHVHHLESRKVGGDAPDNQVTLCESCHEKFHKGLITEDDFKKRKRKSTRDATFMGIMRATLLQRLHSELSIPVVETRGYITKATREKLLVLPKSHTNDALAIAQGKQGFNVGYLPGILQIDKIYTIRPVRHHNRQLHKAAILKGGIRKSNQAEKYVFGYRLFDKVQFNGQDCFIWGRRTTGIFTIKTINGKMIKDGISFKKLKLVEKSTSYLIA

SEQ ID NO: 16593 - protein, 461 aa, unidentified; identical to SEQ ID NO: 4910
  REGION 1..461: note = Human gut metagenome

SEQ ID NO: 16594 - protein, 428 aa, unidentified; identical to SEQ ID NO: 5055
  REGION 1..428: note = Human gut metagenome

SEQ ID NO: 16595 - protein, 480 aa, unidentified
  REGION 1..480: note = Human gut metagenome
MKGENMVITLDKNKRPLGFITERRCRILMEKKRAVLYRYFPTVVILKDVDARKISGLASYRIKIDPGAKYTGIAIVRNDINEFVYAMQIEHHGEQVKKNLDTRRGARRNRRSRETGYRRPKWGNQCTAKEQYQSYDSRRDENWLPPSVKSIADNIVSWIRRLSRWINITNCSFESVRFDTQLMENPEIEGIEYQQGTLFGYEVKEYLLEKYGHTCQYCGGKSKDTILEWEHMVPKSRGGSDRIKNATLACHSCNQDKGNHTLEEWHTILQDRISKERGKQKELDQVRQKLVQQVQEGKAPLKGLRYAAWVNSSRRYLLRHLYLRFPKLECSSGGRTKYNRNALGYPKEHHYDALCIGRIPEEGFIDRTHGYYLYAKATGRGTRLRGQLNRCGVIINKWKDRSKTAFGFQTGDLVVANVPKDTKYKYKGRFVGRVMIRKSGSFDIRTLSGALVTVNAKFCKLLQNNSGYQMMVKRAIPFGN

SEQ ID NO: 16596 - protein, 364 aa, Oscillatoria sp.; identical to SEQ ID NO: 15589

SEQ ID NO: 16597 - protein, 443 aa, Ectothiorhodospira sp.
MAVLVLDKRKKPLMPCSEKRARLLLERGRAVVHRMRPFTIRLKDRTVEESVLQPIQIKIDPGSKTTGVTVIREDDADPEQQQVLMLMEIEHRGQQIKDTLTQRRAFRRRRRGQLRYRAPRFHNRTRPQGRLAPSLQHRVDTTMAWVNRLCRLAPVTEITMERVRFDMQAMDNPEISGIEYQQGTLHGYEVREYLLEKWQRCCAYCGARNVPLEIDHIHPKSRGGSDRVSNLTLACRDCNQTKGNQPVAVFLADDPRRLQRIKAQAKAPLKDAAAVNSTRWALFRQLQATGLPVITSSGGRTKYNRQRLGIPKTHALDAACVGPVTAITHWNVPTLTARATGRGSYQRTRLNRFGFPRGYLMRQKQVKGFQTGDLVQANVPTGKKAGTYQGRVAIRASGSFNIQTREGVVQGISHRHCRLLQRADGYGYALQPKPIQEDATKAA

SEQ ID NO: 16598 - protein, 424 aa, unidentified; identical to SEQ ID NO: 11297
  REGION 1..424: note = Human gut metagenome

SEQ ID NO: 16599 - protein, 439 aa, unidentified
  REGION 1..439: note = Human gut metagenome
MGEGLQPTERSRRQNLRVFVLNKRGQPLMPCSPAKARLLLKEKKAVVRHRTPFTIQLTQATGETVQPVTLGVDAGSKFIGLSASTEKAEHYASEAELRTEVVDLLSSRREMRRARRNRKTRYRAPRFDNRIHSKNKGWLAPSVENKINTHLSCVDNVRKCLPVTKIVVETAAFDIQKIKNPDIEGTDYQQGDQLGFWNVREYVLCRDGHQCCHCHGKSKDPILNVHHLESRKTGGNASNNLITLCETCHKAYHDGKITLKQKRGQVFRDAAFMGIMRWTFFNRLKAQCPEIEVRNTYGYLTKNTRIRHGLEKSHHTDAFCIAGNLEAKRYFFQKQTRKHNRQIHKMSILKGGVRKLQQAPYEVKGFRLFDKVRYDGREAFIFGRRSSGYFDIRLLTGEKVSAGVSYKKLVLLEKRKTFLTQLIKENAIPPATEVAGFLA

SEQ ID NO: 16600 - protein, 512 aa, unidentified
  REGION 1..512: note = metagenome
MSTIYVLNKDGKPLMPTTRGGHVRHLLKEQKARVVRAKPFTIQLLYETNDAVQPLYLGIDPGRTNIGVAVVKADGTAVFTAHLESRNKEILKLMQDRKKARRARRTNGRRHRRQRRAKANGTISKKCVKQDTAQSKNPSKRAKEIGVIKRRLPGHKKDLLCIGIKNKEAKYTNRARPEGWLTPTAIQLLQTHINLVKKIQKFLPISDVVLEVNKFAFMRLDNPDIQKWQYQQGPLYQKGSLENAVSEMQEHHCLFCDKPIDHYHHVVPQSENGSNTIANIVGLCAEHHNLVHKDAAWQKKLAEEKVGLNKKYGALSVLNQIIPALTNKLSVLFPKHFFVTAGKSTHDYRATHGVSKDHWLDAYCIACSVLPSNVCDSNINNHMPYELKQFRRHDRRVLNNENMNRVYTLNNKAVAINRHKAKDQKTVSLEEFRKEHPDDVCKLKVKEHHPTYRNMNRNFPGSVFLVGKQIHVMQGIASSKDGKATKYNDTSATAIAAGKCKFVAKNTGILFV

SEQ ID NO: 16601 - protein, 421 aa, unidentified
  REGION 1..421: note = Human gut metagenome
MTPMVYVLSKTGQPLMPTENHAKVRVLLKQQKAKVVHRCPFTIQLLYDSTDYTQPVSLGIDAGSRHIGVSATTETKVLYEADVTLRNDIVDLLSTRREARRTRRSRKTRYRKPRFNNRIRKDGWLAPSIQQKVDTHLTTVRKVTEILPVNSITVETASFDIQKIKNPDIAGTGYQQGKQLDFWNVREYVLFRDGHKCQCCKGKSKDPVLNVHHIESRKTGGNSPNNLITLCETCHKGYHNGTVSLPKNIRRGMKFNDAAFMGIMRWTFFNRVKETYEPLGIMVNMTYGYITKNTRIEHNLPKDHFIDARCISGHPDAVSDGTVFYQKKVRCHNRQIHKQKILKGGIRKRNQAPYLVKGFRLFEKVKYHGKQYFIFGRRSSGFFDIRTLDGTKVNKGSVSCKKIRSLDMPRSYLTEERKAIV

SEQ ID NO: 16602 - protein, 413 aa, unidentified
  REGION 1..413: note = Human gut metagenome
MPCSPAKARLLLKEKKAIVKRRTPFTIQLTIATGETKQPVSLGVDAGYKHVGLSASTEKAELYASEVELRQDITDLLSARRALRQSRRNCKTRYRAPRFDNRIRTKRKGWLAPSVENRINAHLSRIEAVLRLLPVTKITVETASFDLQLLKNPDISGKEYQEGEQLGFWNIREYVLCRDGHVCQHCYGRSKDPVLNVHHLESRRTGGDSPGNLITLCETCHKALHRGEITLKAKRGQSFRAEAFMGIMRWEVLGRLKASHPELEVNNTYGYRTKHARIANDIAKSHCADAFCIAGNLGAERLGEFFFQKQTRRNNRQIHKLSILKGGRRKRNQASFEVKGFRLFDKVACKGEESFIFSRRSSGYFDVRKLDGTRISAGISYKKLRLLEKRRTYLTEIRKEAFPPLPEGRSLRA

SEQ ID NO: 16603 - protein, 420 aa, unidentified
  REGION 1..420: note = Human gut metagenome
MQYVYVLNKHGEPLMPCSPRKARLLLKQKKAYVIKRTPFTVKLLYGSAGYKQPVTLGVDAGSKHIGISATTEKHELYREEATPRNDVVDLLSARRAFRRSRRNRKTRYRAPRFNNRVHSKHKGWLAPSVEVKIQEHITLIKHACRILPVTLVRVETAEFDTQRLKAMLEGKPLPVGTDYQLGEMYDEYNVRQYVLKRDNYTCQCCGAHSTKTKGVKLHVHHIETRRTGGNAPNNLITLCKACHKALHAEKVTLDGKKRGKPLKDAAFMGIMRKTLMERLRKELKIPVQGTYGYITKCLREKNGIPKSHTNDARCISKNPLAIPCDTCYYTKAVRHHNRQLHKATILKGGIRKANQAPYIIKGYRLWDKVAYNGTECFITGRRTSGYFALKKLDGTVASNSISYKKLRLLEAATNYIIERK

SEQ ID NO: 16604 - protein, 420 aa, unidentified
  REGION 1..420: note = Human gut metagenome
MQYVYVLSKHGEPLMPCSPGKARLLLKEKKARVVKRTPFTIKLLYGSAGYKQPITLGVDAGSKHVGLSASTEKRELYCEEFTPRNDVVDLLSTRRQNRRSRRNRKTRYRAPRFDNRVHSKHKGWLAPSVEVKIQEHITVIKRICRIIPISLVRVETAEFDTQRLKAMLEGKSLPVGTDYQLGEMYDEYNVRQYVLKRDNYTCQCCGAHTTKKKTVKLHVHHLEGRQVGGNAPNNLITLCVDCHKALHAGKVKLDGKKRGKSFKDAAFMGIMRKTLMARLRDELPIPVQGTYGYITKMRREQNDIKKSHVNDARCISKHPLAEPCSVCYRTKAIRHHNRQTHKANFSKGGTRQRSQMPYVVEGYRLWDKVLYKGQECFVSGRRASGSFTLKKLDGTCISKGVTFKKLRLLEPATNYLIERM

SEQ ID NO: 16605 - protein, 465 aa, unidentified
  REGION 1..465: note = Human gut metagenome
MSTCVCVLSNSGERLMPTFRLGKVRRLLKDGKAKIVKHHPFTIQLLHDSKTNTQPIEICEDVGYNYIGISVKSESHEYVSAQYDTLQDEKEHHDDCRKYRRTRRNRLRYRKPRFDNRKRDDGWLAPSLEHKKELNVNVIKMYCEVMPITHAIVEVGSFDTMLVKAIEEGKATPESADYQKGPRYKLATLREAVFYQDNYTCQVCGRKANEGAILHVHHMFYWKGRHGNSLSELITVCEKCHTPANHQKGGKLYGFGENVKFADLSGAAFMNTVRWQIVNELYAAFGKGFVTITYGAMTKEKRIALHLEKSHNNDAYAMGSFHPVNRCAFEHYEKVKRNNRILEKFYDSQYIDTRTGELTNGKSLFNGRISRSHKKDSENLHKYRGKRICKGHYALRRKKLALNPGDLVSLNGEILVVHGTHTKKNGSVNVEFKTPSRGGKKSASLKKLKIVKTSNLMHSAWTKVA

SEQ ID NO: 16606 - protein, 456 aa, unidentified
  REGION 1..456: note = gut metagenome
MLTYVLAADGSPLMPTYNIKKVRHMLKDGRAVIAGHKPGFTIRLTYALPDQKVSHTQQVELCEDTGYQHIGVSVKSAKHEFAHLQVDTLTDEKNHHDAQRRYRRTRRGRLRYRAPRFDNRTHSKKPGWIAPSLQHKADIHVRLVSTFQKVLPIRDVSLEVGTFDTQILEAKEKGLPIPEGSDYQHGIRYGIATLREAVFYRDGYQCQCCGKGIKDGRILRVHHTGYWKTPSDHTDRMGNLITVCTKCHTAANHKKGGKLFGWQPKIKPLTGAAFMNTVRWKIVQAVKDLDSNLTVHTTYGAYTKLSRRERSIAKTHANDAYCMGMFQPEHRAAEQLLKKKRRNNRVLSKFYDAKYIDSRDGTKHSGSELSCGRTNRSEPRNGEKNLRIFHGKKVSKGRISVRRQRYPIQPGTVVLYNKRKIAVLGTHGNGTKVLLPTKKDVLSKKVTIVYHAGAFV

SEQ ID NO: 16607 - protein, 473 aa, unidentified; identical to SEQ ID NO: 3562
  REGION 1..473: note = uncultured beta proteobacterium

SEQ ID NO: 16608 - protein, 473 aa, unidentified; identical to SEQ ID NO: 3510
  REGION 1..473: note = Synthetic metagenome

SEQ ID NO: 16609 - protein, 415 aa, unidentified
  REGION 1..415: note = Human gut metagenome
MVYVLANDGQPLMPTERHGKVCRMLKSGIAKVVKKCPFTIQLQYESERNVQPVALGIDAGSKHVGVSATTKAKVLYESDVELRDDIVKLLATRRQLRRRRRSRKTRYRPARFDNRRRKEGWLAPSIRQKIESHLTVVANVCKILPVSQIIVETASFDIQKIKNPDIQGIEYQQGEQMDFWNIREYVLFRDGHTCQCCKGKSKDKVLNVHHIESRKTEGNAPNNLITLCETCHKGYHNGTVTLPKNIKRGMQFKDAAFMGIMRWTFYNTLKEQYEPDIPVHYTYGYITKNTRINHNLPKGHCIDARCISGNPDAVSDGTYYYQKKVRCHNRQIHKQTILKGGIRKSNQAEYLVRGFRLFDKVRYQGREYFIFGRRKSGFFDIRTLSGEKVNKGSINVKRLTFVDTRKNYLTERRTV

SEQ ID NO: 16610 - protein, 411 aa, Virgibacillus sp.; identical to SEQ ID NO: 14618

SEQ ID NO: 16611 - protein, 430 aa, unidentified
  REGION 1..430: note = gut metagenome
MVYVLDLDGQPLMPTNRHGKIRHLLKDGLAEVVMRCPFTIRLLYDSTCYTQEVVLGVDTGSKHIGLSATTETKELYASDVELRNDIVDLLSTRRQSRRFRRNRKTRYRKARFKNRVSSKKEGWIAPSVQQKIDTHLTVVSKVCRMLPVTRIVVETAAFDIQKIKNPDIQRAEYQQGDQLGFWNVREYVLFRDEHTCQCCKGKSKDKILNVHHIESRKTGGNAPNNLITLCETCHTGYHKGTVQLPKTIKRGMTFRDATFMGIMRWVFYNKLKEVYRSHGVEVQMTFGYITKNTRIAHHLPKGHCVDARCISGHPDVEPIGEIFYQKKVRCHNRQIHNLTILKNGVRKRNQADYLVKGYRLFDKVSYGNKEYFVFGRRQSGFFDLRDLSGNKVNKGSLSYKKIRFLEPRQSYLCERRRMDTQRMRLIAILP

SEQ ID NO: 16612 - protein, 278 aa, unidentified
  REGION 1..278: note = Human gut metagenome
LTHQFKKRVPVMVYVLDKNGQPLMPTDRHRKVRLMLQSGQAKVIKRCPFTIQLNYDSGHQTQEISLGIDAGSKHIGVSTTTKIKVLYEVDVELRNDIVDLLSSRRELRRGRRNRKTRYRQAKFNNRRRGNGWLAPSIRQKIGTHLTVVENICKMLPISRIMVETASFDIQKIKNPDIQGAEYQQGDQLEFWNVREYVLFRDGHTCQCCKGKSKDKILNVHHIESRKTGGNAPNNLITLCETCHTGYHKGTVQLPKAIKRGMRFKDAAFMGIMRWAFYE

SEQ ID NO: 16613 - protein, 444 aa, unidentified
  REGION 1..444: note = Human gut metagenome
LAKDHNRLQGRGEQNLRVFVLNKRRKPLMPCSSGKARILLKEKKTVVVRRTPFTIQLTIATGETKQPVSLGVDAGYKHVGLSASTEKAELYASEVELRQDITDLLSTRLALRRSRRNRKTRYRAPRFDNRVRSKHKGWLAPSVENRINAHLSRIAAVLRILPLTKITVETAAFDTQLLRNPDVSGETYQQGEQLGFWNVREYVLFRDGHVCQHCHGKSKDPVLNVHHLESRRTGGDSPSNLLTLCETCHKALHRGEIKLKTQRGKSFRAETFMGIMRWTVLNRLKSAYPELDVRNTYGYLTKHARITHGIAKSHCADAFCIAGNFGAKRLGYYYFQKQTRRHNRQIHKLSILKGGLRKRNQAPYEVKRFRLFDKVACKGEDAFIFGRRSSGSFDVRKLDGTRISAGISFKKLRLLEKRRTYLTEIRKEAALPPLPKRRGLRVDF

SEQ ID NO: 16614 - protein, 469 aa, unidentified; identical to SEQ ID NO: 14573
  REGION 1..469: note = SAR202 cluster bacterium bin87

SEQ ID NO: 16615 - protein, 423 aa, unidentified; identical to SEQ ID NO: 13653
  REGION 1..423: note = Human gut metagenome

SEQ ID NO: 16616 - protein, 430 aa, Eubacterium sp.; identical to SEQ ID NO: 2393

SEQ ID NO: 16617 - protein, 512 aa, unidentified
  REGION 1..512: note = Human gut metagenome
MSTVYVLNKDGKPLMPTTRCGHVRHLLKEQKARVVASKPFTIQLLYKTNDVVQPLYLGIDPGRTNIGVAVVKANGTAVFTAHLETRNKEIPKLMKKRKDSRRARRTNGRRCRRQRRAKANGTISKKCVKHDTAQNGSVSKRAKEIGVIKRHLPGCKKDVLCIGIKNKEAKFSNRTRPEGWLTPTANQLLQTHINLVKKIRKFLPISDAVLEINKFAFMQLDNPNIQKWQYQQGPLYQKANLEEAVSEMQEHHCLFCKKPIAHYHHVVPQSENGSDTIGNIVGLCTKHHDLVHKDTAWQKKLAKKKTGLNKKYGALSVLNQIIPALTKELSSLFPKHFFATNGKSTYDYRSAHGVSKDHWLDAYCIACSVLPNDVCDSGINNRVPYELKQFRRHDRRALNNENMSRVYTLNDNVVATNRHKATKQTTDSLEEFRQNHPDDVCKLKVKEHHPTYRNMNRNYPGSVFLIGKQVHVMQGIAGSKDGEATTYKDTNANSIAAGKCKFVAKNSGILFV

SEQ ID NO: 16618 - protein, 431 aa, unidentified; identical to SEQ ID NO: 10549
  REGION 1..431: note = Human gut metagenome

SEQ ID NO: 16619 - protein, 386 aa, unidentified
  REGION 1..386: note = Human gut metagenome
LTIATGESKQAVNLGVDAGYKHVGLSASTEKAELYASEVELRQDITDLLSARRALRRARRNRKTRYRAPRLDNRIRTKRKGWLAPSVENRINAHLSRIETVLRLLPVTKITVETASFDMQLLKNPDISGKEYQEGEQLGFWNVREYVFFRDGHVCQHCHGRSKDPVLNVHHLESRRTGGDSPGNLITLCETCHKALHRGEITLKAKRGQSFRAEAFMGIMRWEVLNRLKASHPELEVNNTYGYRTKHARISNGIAKSHCADAFCIAGNLGAKRLGEFFFQKQTRRNNRQIHKLSILKHGLRKRNQAPFEIKGFCLFDKVVCKGEEGFIFGRRSSGYFDVRKLDGTRISAGISYKKLRLLEKRRTYLTEIRKEEALPPLPEGRGLRA

SEQ ID NO: 16620 - protein, 458 aa, Lactobacillus sp.; identical to SEQ ID NO: 5912

SEQ ID NO: 16621 - protein, 408 aa, unidentified; identical to SEQ ID NO: 6744
  REGION 1..408: note = Human gut metagenome

SEQ ID NO: 16622 - protein, 415 aa, unidentified
  REGION 1..415: note = Human gut metagenome
MVYVLDKNGQTLMPTDRHRKVRLMLQSGQAKVIKRCPFTIQLNYDSGHQTQEISLGIDAGSKHIGVSATTKIKVLYEADVELRNDIVDLLSSRRELRRGRRNRKTRYRQAKFNNRRLGNGWLPPSIRQKIGTHLTVVENICKILPISRITVETASFDIQKIKNPDIQGAEYQQGDQLEFWNVREYVLFRDGHTCQCCKGKSKDKILNVHHIGSRKTGGNAPNNLITLCETCHTGYHKGTVQLPKAIKRGMRFKDAAFMGIMRWAFYEALKQQYEPVALVHNTYGYITKHTRIAYNLPKEHYVDARCISGNPEASSNGEYYYQKKVRCHNRQIHKLTVLKGGIRKQNQATYLVKGYRLFDKVSYQGKGYFVFGRRQSGFFDIRTLSGEKVNKGSLSCKKLKFIATRTYYLTERRAV

SEQ ID NO: 16623 - protein, 420 aa, unidentified; identical to SEQ ID NO: 4671
  REGION 1..420: note = Human gut metagenome

SEQ ID NO: 16624 - protein, 418 aa, unidentified
  REGION 1..418: note = Human metagenome
MVYVINKEGQALMPTERFGKVRRLLKNGLAHVVCRIPFTIRLDYETTHFVQPISLGVDAGSKHIGISATTSEKELYAADVELRNDIVEKLSTRREQRRTRRNRLRYRKARFNNRVSSKHKGWLAPSVENKIQTHLTVVEKIHKFLPITKIIVETASFDIQKIKNPSISSKEYQQGEQLDFFNVREYVLFRDNHTCQHCKGKSKDHILNVHHIESRKTGGNSPSNLITLCESCHKAYHNGKIDIKIKRGASFRDATFMGIARWTTYERLKNIYPNVSMTFGYITKNTRITNGLPKEHYVDARCISGNPKSKPLGYYFYQKKVRCQNRQIHKANFLKGGRKKLNQSPFLVKGYRLFDLVEYQKKLYYIFGRRDSGFFDIRRLDGTKVNKGSISCKRIRLVDIRRNIITERRNSCSIPPTN

SEQ ID NO: 16625 - protein, 465 aa, unidentified; identical to SEQ ID NO: 10277
  REGION 1..465: note = Human gut metagenome

SEQ ID NO: 16626 - protein, 475 aa, Petrotoga sp.; identical to SEQ ID NO: 14951

SEQ ID NO: 16627 - protein, 396 aa, unidentified; identical to SEQ ID NO: 4508
  REGION 1..396: note = Human gut metagenome

SEQ ID NO: 16628 - protein, 412 aa, unidentified; identical to SEQ ID NO: 6751
  REGION 1..412: note = Human gut metagenome

SEQ ID NO: 16629 - protein, 420 aa, unidentified
  REGION 1..420: note = Human gut metagenome
MQYVYVLNKHGEPLMPCSPRKARLLLKQKKACVVKRTPFTIKLLYGSTGYKQPITLGVDAGSKHIGISATTEKYEFYREEATPRNDVVDLLSARRAFRRSRRNRKTRYRAPRFNNRVHSKHKGWLAPSVEVKIQEHITLIKRVCRILPVTFVRVETAEFDTQRLKAMLEGKPLPVGTDYQLGEMYDEYNVRQYVLKRDNYTCQCCGAHPTKTKAVKLHVHHIETRRTGGNAPNNLITLCTACHKALHAGKVTLDGKKRGRSLKDAAFMGVMRKTLMERLLKELKIPVQGTYGYITKYLREKHSIPKSHTNDARCISKNPLAIPCDTCYYTKAIRHHNRQLHKATILKGGIRKANQAPYTVKGYRLWDKVSYNGSECFITGRRTSGYFALKKLDGTVVSNSASYKKMRLLEVATNYITERR

SEQ ID NO: 16630 - protein, 414 aa, unidentified; identical to SEQ ID NO: 4822
  REGION 1..414: note = Human gut metagenome

SEQ ID NO: 16631 - protein, 375 aa, unidentified; identical to SEQ ID NO: 5779
  REGION 1..375: note = Human gut metagenome

SEQ ID NO: 16632 - protein, 470 aa, Thermoanaerobacterium sp.; identical to SEQ ID NO: 15617

SEQ ID NO: 16633 - protein, 539 aa, Streptomyces sp.; identical to SEQ ID NO: 15425

SEQ ID NO: 16634 - protein, 328 aa, Parasutterella sp.
RRNRKTRYRAPRFDNRIRTKRKGWLAPSVENRIDAHLSRIEAVLRLLPVTKITVETASFDLQLLKNPDISGKEYQEGEQLGFWNIREYVLCRDGHVCQHCYGRSKDPVLNVHHLESRRTGGDSPGNLITLCETCHKALHRGEITLKAKRGQSFRAEAFVGIMRWEVHNRLRALHPGIEVSNTYGYRTKHARIANGIAKSHCADAFCIAGNLGAERLCEFFFQKQTRRNNRQIHKLSILKGGIRKRNQAPFEVKGFRLFDKVACQGEEGFIFGRRSSGFFDVRKLDGTRISAGISCKKLHLLEKRRTYLTEIRKEEALPPLPEGRGLRA

SEQ ID NO: 16635 - protein, 444 aa, unidentified
  REGION 1..444: note = Human oral metagenome
MTKTATQKVTQVCVLDQNGQPLMPTQRLGKVYRLLETKKAHIVAYEPFTIKLDYEPKTHIIQPLTLGVDSGAIHSGYSIANEHREYYSAEVIARDDISKNISDKRMYRRNRRSRKTRYRKPRFNNRKNKGKGWIPPSLEQKVDVQVNEIEHLHKYFPINNIIIEVAEFDIQKIENPDISGKEYQQGTLQGYNIRNYLLEKYNHKCFYCDKEVVTFEVEHMIPKARNGSNRVDNLTLSCHDCNQKKGTLTAEEFIKQTLSPQKAAQKLRQLPKTKKLLKYMAHMNATRWVLYNTIKEIYNSVSLTYGYITKHNRINTGLPKAHHIDAKCITGFSTVPSFDVIVVKTKMRRHNRQLHRATFSKGHVRRAATLPRIVHDFQLYDIVLFNNHRYYIKSRRSSGSFTIVSLEGLKDEKRSYKKLTFLGHTNAYLTNHHVNDEKDYMASK

SEQ ID NO: 16636 - protein, 427 aa, Moorena sp.; identical to SEQ ID NO: 3577

SEQ ID NO: 16637 - protein, 430 aa, unidentified
  REGION 1..430: note = Human gut metagenome
LETRNKEVPKLMQDRKKARRARRTNGRRCRRQRRAKANGTISKKCVKQDTAQSKNPSKRAKEIGIIKRRLPGYKKDVLCIGIKNKEAKYTNRTRPEGWLTPTANQLLQTHINLVRKMQKFLPISDVVLEVNKFAFMRLDNPDIQKWQYQQGPLYQKGSLENAVSEMQEHHCLFCDKPIDHYHHVVPQSENGSNTIANIVGLCAEHHNLVHKDAAWQKKLAEEKVGLNKKYGALSVLNQIIPALTNKLSVLFPKHFFVTAGKSTHDYRAAHGVSKDHWLDAYCIACSVLPSNVCDSNINNHMPYELKQFRRHDRRVLNNENMNRVYTLDNKAVAINRHKATEQEAASLEEFRKEHPNDVCKLKVKEHHPTYRNMNRNYPGSIFLVGKHVHIMQGIAGSKDGKATTYKDSNANSITASKCKFVAKNSGILFV

SEQ ID NO: 16638 - protein, 437 aa, Clostridium sp.; identical to SEQ ID NO: 14047

SEQ ID NO: 16639 - protein, 443 aa, Anoxybacillus sp.; identical to SEQ ID NO: 7148

SEQ ID NO: 16640 - protein, 445 aa, unidentified
  REGION 1..445: note = Marine metagenome
MPCRPARARQLLCDGKAAVFRRYPFTIVLKERQGGETQPVALNVDPGSKTTGIALVALFQRDQVAVYGQHIVHRGQQIRDALESRRTTRRSRRHRKTRYRKPRFLNRTRPAGWLPPSLMSRVYNVETWTKRLSRFVPITSANVETVRFDTQLIENPDIAGKEYQQGSLFGWELREYLLYRHQHICAYCHGLTKDLVLEKEHVTPKALGGSNRLANHVISCRECNVDKGSLHPNAWMSLCKQRGDKLNLTRARNMQRIMDGYRPSLRDAAAVNATRYAVGNSIKYIIPNTQFWSGGLTKKNRSEQGYTKDHWIDAACIGQNGSAVVLECHHILVASAKGHGSRQMCRVDKYGFPRTSAKTSSVVYGFRTGDLVTANVPTGKKQGLHIGRVAVRKNGYFNIQSESGAVQGISHKHCRIIQRSDGYNFNYGAAIPPGTKVPGFLALTR

SEQ ID NO: 16641 - protein, 471 aa, Streptomyces sp.; identical to SEQ ID NO: 14708

SEQ ID NO: 16642 - protein, 438 aa, Petrotoga sp.; identical to SEQ ID NO: 8698

SEQ ID NO: 16643 - protein, 480 aa, unidentified
  REGION 1..480: note = Human gut metagenome
LYTKPLDNIGEGSLLPSGEINLKGMTFMVYVKSIDGKALMPTSNAKARKLLKQKKAKVVSLRPFVVKLTYKTKTEYTQKLNLGVDSGYSNIGFSVIDAKQEYIAGEVKLLEGMKKRLLEKASYRRIRRSRLRYRKARWNNRVKSKKKGWLAPSLKHKLDTHIKFIDYLKNILPIGKITIEVANFDIQKMKDDLISGVDYQNGDMFGFWNVREFVLHRDGHKCQNPNCKHKDKKEQILKIHHIRYRSKGGSDRPENLITLCSKCHTPANHKKGKFLYDWCVNGKKVRGFKDATFMSMIRWYLVNDLKSKHNNVSITYGYITKNHRIQNGIEKSHLNDAFAIAKGTNQARTKDRFLVIQDRLKNRSLEKFYDSKIIDIRTGKKVSGGDLSCGRSTRNKNLNTENLRKYRGAKISKGQRRIRKQKYFYQPNDLVKYDGKVYTVKGTQNEGKYIALKEIKKVPKVELLIPYVFKKGLNWSYGLC

SEQ ID NO: 16644 - protein, 471 aa, Acidiferrobacter sp.
MAVLVLDRRKRPLMPCSERRARVLLARGRARIHRIVPFTIRLVDRLQEDSTLQPLRLQADLGSKGTGLALVREQETVDEVTGAMIRTIVVVMLLEIAHRGQTLHEVLTQRRAFRRRRRGNLRHRPARFDNRTRPEGWLAPSLQHRVDTTASWVDRLCRWAPVTSLSQELVRFDTQQMQDPEIAGVMYQQGTLAGYEVREYLLEKWGRKCVYCGQEGVPIEIDHIHPKSRGGSDRVSNLTLACHDCNQAKGNSPLEQFLAKQPEVLRRIQAQAKTPLKDAAAVNSTRWALVQRLKATGLEVEVASGGRTKWNRHRLHLPKTHSLDAACVGHVDAIHCWQQPVLTIKATGRGSYQRTRLTRHGFPRGYLTRNKSAFGFQTGDLVRAFVTSGKKAGRYLGRVAIRASGSFNIQTATGLVQGIPHRFCTLIQRADGYGYALTQRAFDVGEAGTGAAYAAALSLPGLNPRVSRVIG

SEQ ID NO: 16645 - protein, 346 aa, Arthrospira sp.; identical to SEQ ID NO: 2872

SEQ ID NO: 16646 - protein, 415 aa, unidentified
  REGION 1..415: note = Human gut metagenome
MVYVLDKNGQPLMPTDRHRKVRLMLQSGQAKVIKRCPFTIQLNYDSGHQTQEISLGIDAGSKHIGVSTTTKIKVLYEVDVELRNDIVDLLSSRRELRRGRRNRKTRYRQAKFNNRRRGNGWLAPSIRQKIGTHLTVVENICKILPISRIMVETASFDIQKIKNPDIQGAEYQQGDQLGFWNNREYVLFRDNHTCQCCKGKSKDKILNVHHIESRKTGGNAPNNLITLCEICHTGYHKGAVQLPKTVKRGMRFKDAAFMGIMRWAFYEALKQQYEPVALVHNTYGYITKHTRIEHNLPKEHYVDARCISGNPDAFPSGEYYYQKKVRCHNRQIHKLTILKGGIRKQNQATYLVKGYRLFDKVSYQGKGYFVFGRRQSGFFDIRTLSGEKVNKGSLSCKKLKFIATRTYYLTERRAV

SEQ ID NO: 16647 - protein, 266 aa, unidentified
  REGION 1..266: note = Human gut metagenome
MQYVYVLNKHGEPLMPCSPRKARLLLKQKKACVVKRTPFTIKLLFGSAGYKQPITLGVDAGSKHVGLSASTEKRELYSEEFTPRSDVVELLSTRRQNRRSRRNRKTRYRVPRFDNRVHSKHKGWLAPSVEVKIQEHITVIKHICKILPISLVRVETAEFDTQRLKAMLAGKPLPVGTDYQLGEMYDEYNVRQYVLKRDHYTCQCCGTHNTAKKVVKLHVHHLESRKTGGNAPSNLVTLCTTCHKNLHKGRVTLDVTIRYTCYLDRF

SEQ ID NO: 16648 - protein, 406 aa, unidentified; identical to SEQ ID NO: 3157
  REGION 1..406: note = Human gut metagenome

SEQ ID NO: 16649 - protein, 412 aa, unidentified
  REGION 1..412: note = Human gut metagenome
MVYVLNQNGQPLMPTKNYAKVRVLLKQGKAKVVNKCPFTIQLLYSSTNYTQKVTLGVDSGSKHIGVSATIKDKVLFEADVELRNDIVDLLSTRRELRRSRRNRKTRYRKPRFNNRRRKDGWLAPSVKQKIDSHLTMVSKVCKILPISNIVVEVASFDIQKIKNPTISGTDYQQGEQLDFWNVREYVLFRDGHICQCCKGKSKDKILNVHHIESRKTGSDAPNNLITLCETCHKGYHKGTVKLPKTIHRGMSFRDATFMGVMRWAFYNKLKKTYPNVSLTYGYITKNTRIENGLPKDHYIDARCIGGNPNAVSNGEVFYYKKVRCHNRQIHKCKVLSGGIRKRNQATYYVMDYRMYDKVSYQGKPYIVFGRRNSGFFDIRTLDGTKVNKGSISYKKIRLIEPQSNYIVEKRTA

SEQ ID NO: 16650 - protein, 419 aa, Moorena sp.; identical to SEQ ID NO: 2658

SEQ ID NO: 16651 - protein, 431 aa, unidentified
  REGION 1..431: note = Human gut metagenome
MPDKVYVISRLGHPLMPCSPAKARHLLDDKKAKVVKRMPFTIRLLYGSTKYIQPIILGVDAGSKTIGLSASTAKEEVFAAEVMPRNDVVENLSTRREFRRARRNRTTRYRKPRSDNRVRSNHERWLAPSVKVKIQEHITSIKRVCTILPISKVVIETAEFDLQLLKAIQEGKPIPEGEDYQKGEMYGSYNVCQYVLWRDNYTCICCGVRGTPKNPVRLHVHHFESRKYGGNAPDNHGTLCDDCHKKFHLGIIADVKLKTRRRQSTRDAAFMGIMRKTLMWRLRTELFIPVAETKGYITKATREKLLVLPKSHTRDALAIAQGRHGFSIKEYAYVEPANHIYTVRPVRHHNRQLHKASILKGGIRKRNQASKYVFGFRLYDKVLYQGKACFVWGRRTSGTFLLRTIDGIKVKDGVSYRNLTLLERSSNYLIA

SEQ ID NO: 16652 - protein, 428 aa, unidentified
  REGION 1..428: note = metagenome
MQRVFVLDKNKKPLMPCHPARARQLLRKGRAAVFRHYPFTIILKDRETGNTQDVRIKIDPGSKYTGVALVAEFKRGKRVVWGAVIEHRGDKIHRALEKRRAVRRSRRTRKTRYREPRFLNRRRSEGWLPPSLESRVLNISTWVRRLLKLCPITAISMELVRFDIQKLQNPEISGVEYQRGELFGYEVREYLLEKWGHKCAYCGATNVPLEIEHIIPKSRGGTDRISNLTLACRKCNLAKGNKTAAEFGYPEIQEQAKKPLRDAAAINSTRWKLYDKLKKFNLPIECGSGGRTKYNRVKQGHPKEHWIDAACVGKSGENIFIIRDGVIYTPDLTSALAGITRDTIFTLASDLGYKIIEKRITRDEVYCADEAFFTGTAAEVTPIRELDNRPIGNGTRGPITEQLQTLYFDCVYGRNDKYKKWIAKGVCQ

SEQ ID NO: 16653 - protein, 515 aa, unidentified
  REGION 1..515: note = Human gut metagenome
MATVYVLNKDGKPLMPTTRCGHIRHLLKEKKARVVRTNPFTIKLVYETDDVVQPLYLGIDPGRTNIGVAVVKVDGTAVFTAHLETRNKEIPKLMAKRKEHRQGRRHYRRCKRQRRAAAHGTLSKKCKKQDTAQGGNISKRAQTIGVFERNLPGCENSVLCIGIKNKEARFNNRVRPARWLTPTANQLLLTHVNFVKKICKFLPISDVVLEINKFALMALDNPNIQKWQYQQGPLYQKGSLENAVSEQQDHHCLFCEKTIEHYHHVILRSENGSDTIANIVGLCAEHHDLIHKDDKLKEELAKKKQGLNKKYGALSVLNQIIPALTYELGSRFQGHFYVTTGKSTYDYRAAHSVSKDHWLDAYCIACSVLPDGCFDNTINSRVPYELKQFRRHDRQVCQQQNVKRKYYLDKKLVATNRHKAIKQETDSLEEYRNNGGTTDKLVVKEHKPTNKRLNRILPGALMAANGKLNVMVASRGLHNGIPDNYVFDNNSKAKPSKCTLINKNKGIVFVSNSVS

SEQ ID NO: 16654 - protein, 420 aa, unidentified; identical to SEQ ID NO: 10448
  REGION 1..420: note = Human gut metagenome

SEQ ID NO: 16655 - protein, 427 aa, Enterococcus sp.; identical to SEQ ID NO: 5630

SEQ ID NO: 16656 - protein, 422 aa, unidentified; identical to SEQ ID NO: 11478
  REGION 1..422: note = Human gut metagenome

SEQ ID NO: 16657 - protein, 405 aa, unidentified
  REGION 1..405: note = Syntrophaceae bacterium UBA2280
MVYVLNKNGRPLMPCSSRKARMLLSAGKAAVVKRTPFVVRLIHGSSGYVQPVALGVDSGFTHVGLSAVTNTAEVYAADVELRKDLVDLNSERRMFRRNRRNRKTWYRQPRFDNRRKPEGWLAPSIQHKLDSHKKLIAGIKSILPVSRVIIEVAAFNIQKIKNPSIEGCGYQNGDQAGFWNVREYVLYRDGHRCQAPKCSRKDKILNVHHIEGRKTGGNRPDNLITLCESCHDKHHKGLLDLIIKRSNGFKAETFVSMVRWRLVNETGADHTYGYITKTNRIALGLAKSHINDAYAIAGGTSQKRVDPFRIKQVRKCNRKLFKGERSHIRNTAPRFVKGFQRYDKVSFQGKECFVFGRRSTGYFDLRLLDGTKVHASANVKEINRLERGNTFLIERKSARTERIAA

SEQ ID NO: 16658 - protein, 430 aa, unidentified
  REGION 1..430: note = Human gut metagenome
MPKVYVLNRHGRPLMPCTPAKARHLLDAGKAKVRHRTPFTIQLLYGSTGYTQEVILGVDAGSKTIGLSAATETEELFSAEVKPRNDVVELMSARRQFRRARRNRTTRYRKPRFDNRVRSKHKGWLAPSVEVKIQEHMTAIRRACAILPVSKVVVETAEFDLQLLKAVAEGKPVPQGEDYQKGEMYGHYNVRQYVLWRDSYTCRICGVNGSVRKGVPLHVHHLESRRVGGDAPDNLVTLCTACHDKLHKGIIMAADIKKRKRRSTRDATFMGIMRMTLLRRLREQLPVPVVETRGYITKATRENLLVLPKSHTNDALAIAHGPQGFRAEYLPNIRQADRLYTIRPVRHHNRQLHKATILKGGVRKANQAEKYICGFRLYDKVLYNGIECFVWGRRTSGSFLLRQLNGEKVKDGVSYKHLKLLERSQSYLVA

SEQ ID NO: 16659 - protein, 424 aa, unidentified; identical to SEQ ID NO: 3232
  REGION 1..424: note = Human gut metagenome

SEQ ID NO: 16660 - protein, 435 aa, unidentified
  REGION 1..435: note = Human gut metagenome
LGRTTGLRAEQAEPAGIRKGDTLKVFVLNMRGKPLMPCSPAKARHMLKAGKAFVVRRTPFTIKLTIATGETKQDVTLGVDAGARHVGISATTEKEEVFASEVALRQDITGLLADRLAFRRARRNRKTRYRAPRFNNRVRSKHKGWLAPSVENRIQAHISRIEAVCRLLPVTKIVIETASFDIQKIRNPEVEGTGYQQGDQLGFWNVREYVLFRDGHICQHCRGRSKDPILNVHHLESRKTGGDAPNNLITLCETCHKAYHAGKIKLKVKRGQSFRAEAFMGIMRWTLLDRVRKTHPKLPVENTYGYLTKHKRIALGLPKTHCADAFCIAGNLKALRRGDFLFQQQTRKHNRQIHKCSILKGGVRKLNQAPFLVKGFRLFDKVRIGGQIGFVFGRRVRGIFNIRRLDKTVIGTDINCKKLSLLETRKTFLTELRKE

SEQ ID NO: 16661 - protein, 512 aa, unidentified
  REGION 1..512: note = Human gut metagenome
MSTVYVLNKDGKPLMPTTRCGHVRRLLKEQKAQVVTSKPFTIQLLYETDDVVQPLYLGIDPGRTNIGVAVVKIDGTAVFTAHLETRNKEIPKLMQGRKKARRARRTNGRRCRRQRRAKANGTISKKCVKQATAQNGSASKRAKKIGVIKRHLPGCEKEVLCIGIKNKEAKFNNRTRPAGWLTPTANQLLQTHINLIKKIQKLLPISDVVLEINKFAFMQLDNPNIQKWQYQQGPLYQKANLEEAVSEMQEHHCLFCKKKIDHYHHVVPQHKNGSNTIGNIVGLCAKHHDLVHKDTSWQEKLAKKKTGLNKRYGALSVLNQIIPALTKELSSLFPKHFFATNGKSTYDYRAAHGVSKDHWLDAYCIAGSVLPNDACDNNINSHVPYELKQFRRHDRRALHKENMSRVYTLNGKKVATNRHKATEQTADSLEEFRQNHPDDVCKLKVKEHHSEYRNPKRNFPGCVFLVGKRTHVMQGTSGSHNGKADGYYDTNGNSYSSGKCKFVAKNEGIVFA

SEQ ID NO: 16662 - protein, 512 aa, unidentified; identical to SEQ ID NO: 3769
  REGION 1..512: note = Human gut metagenome

SEQ ID NO: 16663 - protein, 426 aa, unidentified
  REGION 1..426: note = Human gut metagenome
MVYVQNHLGQPLMPTQDHRKVRLLLKAGAAVVVRRTPFTIRLTTRTKTYVQPVILGVDTGSKTVGMSAATHEEEVFAAELTPRNDVVKNLADRRKFRSSRRGRTTRYRQPRFNNRVHSKHKGWLAPSVEVKIQEHITSIKRACELLPISKVVVETAEFDLQLLKSIADGMPVPQGEDYQKGEMYGFYNVRQYVFFRDGYTCQCCGAHGKGIKFHTHHLESRKTGGNAPDDLVTVCDKCHKAFHAGLITDAKLKKRRRKSTRDAAFMGIMRKTLLQRLRAELPIPVVETRGYITKATRERLLKLPKSHTNDALAIAMGRHGFGIEEVTYMPQSDRIYQIKPVRHHNRQLHKAIPKKGGRRQRNQGPKYVQGFRRFDKVLYRGQECFIWGLRTRGYFQLKLLDGTKVHESAKVSELILLEHSSGYLIA

SEQ ID NO: 16664 - protein, 422 aa, unidentified; identical to SEQ ID NO: 5333
  REGION 1..422: note = Human gut metagenome

SEQ ID NO: 16665 - protein, 480 aa, unidentified
  REGION 1..480: note = Human gut metagenome
LYTKPLDNIGEGSLPPSGEINLKGMTFMVYVKSIDGKALMPTSNAKARKLLKQKKAKVVSLRPFVVKLTYKTKTEYTQKLNLGVDSGYSNIGFSVIDAKQEYIAGEVKLLEGMKKRLLEKASYRRIRRSRLRYRKARWNNRVKSKKKGWLAPSLKHKLDTHIKFIDYLKNILPIGKITIEVANFDTQKMKDDLISGIDYQNGDMFGFWNVREFVLHRDGHKCQNPNCKHKDKKEQILKVHHIRYRSEGGSDRPENLITLCSKCHTPANHKKGKFLYDWCVNGKKVRGFKDATFMSMIRWYLVNELKSKHNNVSITYGYITKNHRIQNGIEKSHLNDAFAIAKGTNQARTKDRFLVIQDRLKNRSLEKFYDSKIIDIRTEKKVSGGDLNCGRSTRNKNLNTENLRKYRGVKISKGQRRIRKQKYFYQPNDLVKYDGKVYTVKGTQNEGKYIALKEIKKVPKVELLISYVFKKGLNWSYGLC

SEQ ID NO: 16666 - protein, 442 aa, unidentified; identical to SEQ ID NO: 7529
  REGION 1..442: note = Human gut metagenome

SEQ ID NO: 16667 - protein, 416 aa, unidentified
  REGION 1..416: note = Human gut metagenome
MPCSPAKARLLLKEKKAIVKRRTPFTIQLTIATGEAKQPVSLGIDAGYKHVGLSASTEKAELYASEVELRQDITDLLSARRALRQSRRNRKTRYRAPRFDNRISTKRKGWLAPSVENRINAHLSRIEAVLRLLPVTKITVETASFDLQLLKNPDISGKEYQEGEQLGFWNIREYVLCRDGHVCQHCYGRSKDPVLNVHHLESRRTGGDSPSNLITLCETCHKALHRGEITLKAKRGQSFRAEAFMGIMRWEVHNRLRALHPGIEVSNTYGYRTKHARIANGIAKSHCADAFCIAGNLGAERLCEFFFQKQTRRNNRQIHKLSILKGGIRKRNQAPFEVKGFRLFDKVACQGEEGFIFGRRSSGFFDVRKLDGTRISAGISCKKLHLLEKRRTYLTEIRKEEALPPLPEGRGLRAKM

SEQ ID NO: 16668 - protein, 395 aa, Succinivibrio sp.; identical to SEQ ID NO: 11057

SEQ ID NO: 16669 - protein, 465 aa, unidentified
  REGION 1..465: note = gut metagenome
MSTCVCVLSNSGERLMPTFRLGKVRHLLKDGKAKIVKHHPFTIQLLYDSKTNTQPIEICEDVGYNYIGISVKSQSHEYVSAQYDTLQDEKACHDSCRKLRRTRRNRLRYRKPRFDNRKRGEGWLAPSLRHKKELNVNVVKMYCAVMPITHATVEVGSFDTMLVKAIQEGKAIPEGADYQKGPRYNLATLREAVFYRDNYTCQVCGRKVADGAILHMHHMFYWKGRHGDSLNELLTVCEKCHTPANHQRGGKLYGFGENVKFADLSGAAFMNTVRWQIVNELYAAFGKDFVTVTYGAMTKEKRIALRLEKSHNNDAYAMGEFHPNCRCTFEHYEKVRRNNRILEKFYDSRYIDIRTGEIATGKELFNGRINRNHKKDSENLHRYRGKRTYAGHRALLRKKVNLNPGDLVSLNGEVLVVHSTHTNKKGAVNVEFKTPGKSGQKSASLKKLKIVKAADSMHSAWEKIS

SEQ ID NO: 16670 - protein, 515 aa, unidentified
  REGION 1..515: note = Human gut metagenome
MTALEERLSKTEYIYVLGFDGKPQMPTRRKRHVLKLLKTGRARIAEDIPFTIRLTYRNAPVLQPVTLAEDPGRTNIGAAVLSPLGGLLFAAVIETRNKEIKKLMTDRQKSRQASRRGERKARQRLAKRYGSMVKSGMVMRKLPMYAADRFVICKFIRNTQAWFCNRKRCPDWITPTVHHLVQTHLNIIRKISRYLPVTDIAFEVNRFAFMHMENPEAMGVDFQNGPLKGYDDVKEAICTQQHGKCLMCKKPIAHFHHIVPRSRGGSDTIQNLAGLCPECHTKVHTDTAFRKDFDEKKSGQLKKYGALSALNQAVPFICKKLLEEYGKEHVHFCRGLDTSLIRTALGFEKTKKNQMHEVDAYCIGLAALEVNEVETPAFDHTFQIRQFRRQDRSIIHHQTGRSYYQGKEKVAQNRKPGFEQKTTALSQWYEEQVRIHGEKEAEKLRSQLRVEKSCRHYNDVDRFLPGAVFLYEGKRYVLSGRITNGKYLRACGQGMKNFPAAECTFIRHNAGLVFI

SEQ ID NO: 16671 - protein, 241 aa, unidentified
  REGION 1..241: note = Human gut metagenome
VRSKTTTHHVKLRQSRQVWLYQAVYNLGEGFLPSSEERTAFYWLLIYRKEHGIMQYVYVLNKHGEPLMPCSSGKARLLLKQQKACVVKRTPFTIKLLFGSTGYKQPITLGVDAGSKHVGLSASTEKRELYCEEFTPRNDVVDLLSTRNQNRRSRRNRKTRYRAPRFDNRVHSKHKGWLAPSVEVKIQEHITVIKRICRILPITLVRVETAEFDTQRLKAMLEGKPLPVGTDYQRGEMYDEY

SEQ ID NO: 16672 - protein, 512 aa, unidentified
  REGION 1..512: note = Human gut metagenome
MSTVYVLNKDGKPLMPTTRGGHVRHLLKEQKARVVRAKPFTIQLLYETNDVVQPLYLGIDPGRTNIGVAVVKANGTAVFTAHLETRNKEIPKLMQDRKKARRARRTNGRRHRRQRRAKANGTISKKCVKQTTAQNGSVSKRAKDIGVIKRRLPGCEKDVLCIGIKNKETKFTNRTRPEGWLTPTANQLLQTHINLVKKIQKFLPISDVVLEVNKFAFMRLDNPNIQKWQYQQGPLYKKESLESAVSEIQEHHCLFCKKPIDHYHHVVPQHKNGSNTIGNIVGLCAKHHDLVHKDSAWEKKLAKKSTGLYKKYGALGVLNQIIPTLTNELSSLFPKHSFVTNGKSTYDYRAAHGVSKDHWLDAYCIACSVLPSNVCDSNINNHMPYELKQFRRHDRRVLNNENMNRVYTLNNKAVAINRHKAKDQKTVSLEEFRKEHPDDVCKLKVKEHHPTYRNMNRNFPGSVFLVGKQIHVMQGIASSKDGKATKYNDTSATAIAAGKCKFVAKNTGILFV

SEQ ID NO: 16673 - protein, 443 aa, Anoxybacillus sp.; identical to SEQ ID NO: 4769

SEQ ID NO: 16674 - protein, 416 aa, unidentified
  REGION 1..416: note = Human gut metagenome
MVYVLSQNGQPLMPTENHAKVRVFLKQGKAKVVQRCPFTIQLLYESTTHTQKINLGIDAGSKTIGVSATTDSKVLYESEVVLRNDIVELLSGRRALRNSRRSRKTRYRKPRFDNRKKPDGWLAPSIRQKIETHVTVVGNVMKILPVTKIIVETASFDIQKIKNPEIEGVGYQHGEQLDFWNVREYVLFRDGHTCQCCKGKSKDNILNVHHIESRKTGGNAPNNLITLCETCHKAYHKGIITLPKEIHRGMRFRDAAFMGVMRWAFYDRLKELYNPLGVEVINTYGYITKNTRIEHGLPKEHYVDARCISDNPAAKPLDHYYFQKKVRCHNRQIHKNTILKGGIRKRNQASYEVKGFRLYDQVLWKGQKCFIFGRRSTGRMDLRLLDGTHINASVGHKNLKLLSMRKNYLIEQRKAG

SEQ ID NO: 16675 - protein, 427 aa, unidentified; identical to SEQ ID NO: 4977
  REGION 1..427: note = Human gut metagenome

SEQ ID NO: 16676 - protein, 437 aa, Moorena sp.
MSKTNYVFVLDTNRQPLAPCHPARARELLAKGKAAVFRRYPFAIVLNRAVGDVPPESQLKIDPGSQTTGLAVVNGDKLVWGAELQHRGDRIQAKLETRRVCRRNRRNRQTRYRKPRFLNRTRPKGWLPPSLNHRVETTLTWVNRLRKLCPIASISQELVRFDTQKLQNPEISGASYQQGELFGYEVREFLLEKWGRKCAYCRAENVPLEVEHIVPKSKGGSDRVSNLTLSCRPCNQSKGNRDVREFLSGKPSVLERILRQAKTPLKNAAAVNATRWKLYQRLKETGLPVEVGTGGQTKFNRTRLEFPKAHWLDAACVGKTPSLHLATETPMAIASKGHSTRFRTLIDRYGFPRAVRKTKAQVNGLQAGDIVRAIVPNGKYRGQWTGAIAGVRKKRPPALRPFGKKQIDLTAKTQIQIVHKQDGYEYNINPCGHSSRR

SEQ ID NO: 16677 - protein, 421 aa, unidentified
  REGION 1..421: note = Human gut metagenome
MLVYVLSKNGQPLMPTHRCGFVRRLLNSQKAKVVRRCPFTIQLQYDTDCKTQPVTLGIDAGSKHIGVSATTESKVLYEADIELRNDIVDLLATRRQMRRARRSRKTRYRKARFDNRKRNDKWLAPSIQHKVNCHLEAVRFVHKLLPISKIIVEVASFDIQKIKNPLITSTDYQNGELLDWKNVREYVLFRDSHICQCCKGKSKDPVLQVHLIESRKTGGNAPNNLITLCKTCHNGYHHGTVKLPAKIKRGMKFNDATFMGIMRWGFYNQLKSLYPDVSLTYGYITKDIRISNGLAKTHFIDARCISGNPLATSDNTVYFLKKRRRHNRQIHKFNILKGGRKKRNQAAYLVKGYRLFDKVNYNRKEYFIFGRRASGFFDIRTLSGEKVNKGSISCKKLKLLEASKGYLTERRNAFLSPLNSV

SEQ ID NO: 16678 - protein, 431 aa, unidentified; identical to SEQ ID NO: 6117
  REGION 1..431: note = Human gut metagenome

SEQ ID NO: 16679 - protein, 514 aa, unidentified; identical to SEQ ID NO: 11607
  REGION 1..514: note = Human gut metagenome

SEQ ID NO: 16680 - protein, 425 aa, unidentified; identical to SEQ ID NO: 3148
  REGION 1..425: note = Human gut metagenome

SEQ ID NO: 16681 - protein, 424 aa, unidentified; identical to SEQ ID NO: 3434
  REGION 1..424: note = Human gut metagenome

SEQ ID NO: 16682 - protein, 250 aa, unidentified
  REGION 1..250: note = Human gut metagenome
MPNKVYVINKHGRPLMPCSPAKARHLLDAGKAKVKKRTPFTIQLVYGSSGYTQEVILGVDAGSKTIGMSASTTKEELLSAEVKPRNDVVDLQSTRREFRRARRNRKTRYRKPRFDNRVRSKHKGWLAPSVEVKIQEHITSIKMVCRILPVSKVVIETAEFDLQLLKAIADGKPVPQGEDYQKGEMYGHYNVRQYVLWRDDYTCQCCGAHATKKKEVWLHVHHLESRKVGGDAPDNQVTLCESCHEKLHKG

SEQ ID NO: 16683 - protein, 416 aa, Moorena sp.; identical to SEQ ID NO: 11196

SEQ ID NO: 16684 - protein, 443 aa, unidentified
  REGION 1..443: note = Human gut metagenome
LTKDENRPSGRTTGLRAEQAEPAGIRKGDTLKVFVLNMRGKPLMPCSPAKARHMLKAGKAVVVSRTPFTIKLTIATGETKQDVTLGVDAGARHVGISATTEKEEVFASEVALRQDITGLLADRLAFRRARRNRKTRYRAPRFNNRVRSKHKGWLAPSVENRIQAHMSRIDAVCRLLPVTKIVITTASFDVQKIKNPTIEGTDYQQGDQLGFWNVREYVLFRDGHVCQHCHGRSRDRILNVHHLESRKTGGDAPNNLITLCETCHKAYHAGKIKLKVKRGQSFRAEAFMGIMRWTLLDRVRKTHPELPVENTYGYLTKHKRIALGLPKTHCADAFCIAGNLKALRRGDFLFQQQTRKHNRQIHKCSILKGGVRKLNQAPFLVKGFRLFDKVRIGGQIGFVFGRRVRGIFNIRRLDKTVIGTDINCKKLSLLETRKTFLTELRKE

SEQ ID NO: 16685 - protein, 416 aa, Parasutterella sp.; identical to SEQ ID NO: 10114

SEQ ID NO: 16686 - protein, 406 aa, unidentified; identical to SEQ ID NO: 6079
  REGION 1..406: note = Human gut metagenome

SEQ ID NO: 16687 - protein, 264 aa, unidentified; identical to SEQ ID NO: 12077
  REGION 1..264: note = Mouse gut metagenome

SEQ ID NO: 16688 - protein, 428 aa, unidentified
  REGION 1..428: note = Wastewater metagenome
MVFVKSINNTSLMPCSARKARLLLNSNRAKIIDYKNFTIQLNYNTTNFCQKTIIAVDTGAKFLGIILRNGKNILLARQVKLRTDISSLLTTRRILRRARRNKLRYRQPRFLNRTKSKQSGWLPPSIQSRVNNTINMIDNLISKLPVYKLIIEVGNFDVQKMKNPAINGKEYQQGEMAGFNEIKEFVLTRDNYTCKHKQCDHTDKKLQVHHIQFRSNGGSDKPDNLITLCKTCHSNLHSGLIDDKFKKVANYKEPPFMNSLKTRLQKHYINATFCFGYQTKTTRQEMQLPKSHINDAIAISCYQNKISNLKYLEVNEYVIQVRIKKRSLHEQTSRKGIKEKNITQKRNCKNVFQVNQFKIGTKVSFVNQVGFISGFTGKSAYIKDINDNYITEDNKSYKQISLIKLNLICYNNGWIKFYDNLSHQLVKP

SEQ ID NO: 16689 - protein, 430 aa, unidentified
  REGION 1..430: note = Human oral metagenome
MLVYVLKQTGQPFMPTERFGKVRRLLKEGKAKVVRREPFTIRLLYESETDVVQECYCGVDTGSKHIGVAVIGNDKVLYQSQTELRDDIKKKMDRRRQFRKIRRNKLCYRPMRFNNRNASKRKERYSPTLISKFQGHKREIEFIKSILPISDVILEVGEFDLQLLQDPILAYHKWDYAKGELYQQENFKQATKARDGYQCQCCGKKNCRLEVHHLLPRSRGGSDKLANLITLCTDCHHLAHSSEEQLLAFQKKFGNRVKGTLNYATQMNVLRSMLQKEYPDAELTYGFITKEMRRVFGLEKSHTIDACCIASRGSEFYNENSNKYKKKCVPKGSYPRTGVKGGKFVVLPKGKISGLKRYDKVLYNGKEYFVVGRRTTGYIYLIDVDNNRVQTERTKRTTGEKYMSKAIIKVALVRKVASAKSCVCVRECED

SEQ ID NO: 16690 - protein, 414 aa, unidentified
  REGION 1..414: note = Human gut metagenome
MPCSPAKARLLLKEKRAIVVRRTPFTIQLTIATGESKQPVSLGVDAGYKHVGLSASTEKAELYASEVELRQDVSDLLSARRALRQSRRSRNTRYRAPRFDNRIRTKRKGWLAPTVENRINVHLSRIETVLRLLPVTKITVETASFDTQLLKNPDIAGKEYQEGEQLGFWNVREYVLFRDGHVCQHCHGRSKDPVLNVHHLESRRTGGDSPGNLITLCETCHKALHRGEIKLKAKRGRSFRAETFMRIMRWGVLNRLKASHPKLEVHNTYGYRTKHARIANGIAKSHCADAFCIAGNFGAKRLGEFFFQKQTRRNNRQIHKLSILKGGIRKRNQAPFEVKGFRLFDKVACQGEEGFIFGRRSTGYFDVRKLDGTCISAGISYKKLHLLEKRRTYLTEIRKEEALPPPPEGRGLRA

SEQ ID NO: 16691 - protein, 428 aa, Microcoleus sp.
VSKVFVLDTDKKPLNPIHPGRARMLLSQGKAAVLRAHPFTIILKEAVFNPDVEPLRIKIDPGAQTSGLALVNDSTGEVVWIGELQHRGFQIRDALTSRRQLRRSRRNRKTRYRKPRFLNRTRNTGWLPPSLTSRVANILTWVKRLSALCQITAISQELVRFDTQQMENSEISGVGYQQGTLAGYEIREFLLSKWNRTCAYCGVKDTRLEIEHIQPRSKGGSNRVSNLCLACVPCNQKKGNQDIKDFLKGKPDLLKRILAQGKKPLADTAAVNATRWNLYENLKKTGLPVEVGTGGRTKYNRTIRGLDKTHYWDAACVGASTPERLITNGVKPLLIAAKGHGTRQQCRTDKFGFPVRYCSRTKCHKGFQTGDIVKANVTSGKKVGTYVGRVATRATGSFNISTTDGLVQGISHKYCIHIHKKDGYAYVA

SEQ ID NO: 16692 - protein, 442 aa, unidentified; identical to SEQ ID NO: 3234
  REGION 1..442: note = Human gut metagenome

SEQ ID NO: 16693 - protein, 457 aa, unidentified
  REGION 1..457: note = Human gut metagenome
MGDGYFTAKRLSGLIFSRNLEKEEGIMQNKVYVINKHGRPLMPCSPAKARHLLDDGKAKVKKRTPFTIQLLFGSTGYTQEVILGVDAGSKTIGLSASTETEELFSAEVKPRNDVVDLLSTRREFRRARRNRKTRYRKPRFDNRVRSKHKGWLAPSVEVKIQEHMTAIRRICRILPVSKVVVETAEFDLQLIKAVEEGKPVPQGEDYQKGEMYGHYNVRQYVLWRDGYTCQCCGAHATQKKEVRLHVHHLESRKIGGDAPSNLIALCESCHEKFHKGIITTADFKKRKRKSTRDATFMGIMRKTLIQRLRAELTIPVIETRGYITKATREKLLVLPKSHTNDALAIAQGPQGFHTGYLPGIRQATHIYTIRSVRHHNRQLHRATILKGGVRKANQAEKYVYGFRLYDKVLYNGTECFVWGRRASGSFLLRKLDRAKVKDGVSYKHLKLLERSQNYLIA

SEQ ID NO: 16694 - protein, 444 aa, Moorena sp.
MLVFVLNHHGKPLMPCKPRKARLLLKEGKAKVIRKDPFTIKLYYGSSGYKQEVTASIDTGSKKIGCAATANNKVIYQSEIELRDDVSRKMQQRKMYRRTRRGRKTRYRKPRFNNRGKEGKLAPSIKSKIDSHFREKRFVESILPVTKWKVELTSFDIHKITNPKVEGEGYQEGNQKGFYNVKAYVLHRDNYTCQNCKGKSHERKVSEALTPRKKLCVHHIRFRSEKGTDTPSNLITLCKKCHADVHDGRIEFKSKSSKTKPATEMGIIKSQLKKSNAEGLQMETHCAPHGTAWEFEETFGYETKFKREQVLQLPKTHYYDAVAICCDDGEIVKPNDTVYFKKHVSKGDYKQTRGKRSEVRIPTGKLFGLRKFDLVKTSKGTGFVKGKRTSGFFCISNISADVLSASVNVKKNCVRLQARTTTLTERFVLSRRSRIERKATSSPD

SEQ ID NO: 16695 - protein, 447 aa, unidentified
  REGION 1..447: note = Human gut metagenome
MYWLIALNISKKEVSCMVYVLDIDGQPLMPTTRHGKVRRLLNSHLAKVVKRCSFTIQLLYQSTKETQPVSLGVDAGSKHIGLAATTDKKVVYQEELVSHNDVVKLISARRILRRSRRNRKTRYRKARFNNRVHSKHKGWLAPSVEVKIQEHITAIKRICQILPISDIHVETAEFDLQRLKAMEEGRPLPVGTDYQLGEQYDFYNTRQYVLHRDEYTCQCCGTHDNNVKLHVHHIESRQTGGDAPNNLITLCEHCHKLLHAGKTILPKGKKRGKSYRDATFMGIMRKTLLERLKKEIDVPVEGTYGYITKYWRERAGLEKSHINDAICISKHPYARPLETYYLTKAVRHHNRQIHKTKFSKGGIRKRNQAPYLVKGFRLFDKVLYQGESYFIFGRRITGYFDIRTLDGTKVNKGSTSYKKLRIQDTAEAYLTEVRAIPHMNEFTCVLA

SEQ ID NO: 16696 - protein, 416 aa, unidentified
  REGION 1..416: note = Human gut metagenome
MVYVLSQNGQPLMPTENHVKVRVLLKQGKAKVVQKCPFTIQLLYESTTHTQEINLGIDSGSKTIGVSATTESRVLYESEVVLRNDIVELLSGRRTLRRSRRNRKTRYRQPRFDNRKRPDGWLAPSIRQKIETHVTVVENVMKILPVTKIIVETASFDIQKIKNPDVAGVGYQQGEQLDFWNVREYVLFRDGHQCQCCKGKSKDNILNVHHIESRQTGGNAPNNLITLCETCHKAYHKGLITLPKEIHRGMRFSDAAFMGIMRWAFYDRLKELYTPLDVEVINTYGYITKNTRIEHGLPKEHYVDARCISGNPAAKPLGYYYFQKKVRCHNRQIHKCKIGKGGIRKRNQAVYEVKGFRLYDKVQWKGQKCFIFGRRSTGYMDLRLLNGTKINASACYKNLKLLNMRKNYLIEQRKVG

SEQ ID NO: 16697 - protein, 512 aa, unidentified; identical to SEQ ID NO: 3776
  REGION 1..512: note = Human gut metagenome

SEQ ID NO: 16698 - protein, 421 aa, unidentified
  REGION 1..421: note = metagenome
MVYVVNVNGKPLMPCKEAKARRLLKNNKAKIRKKEPFTIQLLFECENQVQDITLGIDAGSKHIGLSATSEQKELYAADVELRNDIVELLSTRRQYRQARRNRLRYRAPRFFNRVHSKNRGQLVPSIEQKIGTHLRVVSDVCGILPISKIIVETASFDIQKIKNPDINGEEYQQGSQLGFWNVREYVLWRDNHECQYCHGKSKDKILNVHHIESRKTGGDSPENLTVLCEYCHGRYHMGKIKLDLKYGKSLRDAAFMGIMRWSFYNRLKETYPNVLMTYGFVTKNTRIQHDLPKEHYTDARCISGNPQAEPLGYYFYQKKVRCHNRQIHKANILKGGIRKRNQAEYKVKGFRLFDKVRYDNQMGFIFGRRASGYFDIGKLNGEVIHRSVSYMKLELLDTRKTLLTERRQAVPLMAKVMSIPA

SEQ ID NO: 16699 - protein, 415 aa, Bacillus sp.; identical to SEQ ID NO: 5843

SEQ ID NO: 16700 - protein, 456 aa, Halomonas sp.; identical to SEQ ID NO: 16097

SEQ ID NO: 16701 - protein, 417 aa, unidentified
  REGION 1..417: note = Human oral metagenome
MFVYVISKDGQPLMPTTRFGKVRRLLKNKKAKVIRSCPFTIKLLYEPENLIVQEVVLGQNTGSKHVGTACVTNDKVLYQSEVALRDDIKKKMDSRRAFRKNRRQRKARYRKPRFLNRANSTKKDRLPPSVRSKVQSHIDEIEFCKKILPVSKIVFEVSQFDTALMKSPSLISKKVKHWGYQKGFDYEYSSRREAVLHRDNYTCQCCGKKHVRLEVHHIIFRSMGGTDDERNLITLCEKCHKAIHDGMLILTKKPKKLNLKYATQMSIIRSQLLKIYPDAIETFGFVTKENRNNLNLPKEHFIDACVIASGGEIFKQSSWLFKKRRVAKQNRQLCKGVRGEKQIPTGKVFGFRRFDKVKYLKEICFIKGRRSKGAFTLMDIDNNTIDFRDRGGRGTPSYKLLERLNTRRNTLCISQRI

SEQ ID NO: 16702 - protein, 465 aa, unidentified
  REGION 1..465: note = Human gut metagenome
MSTCVCVLSNSGERLMPTIRLGKVRRLLKDGKAKIIKHHPFTIQLLYDSKANTQPIEICEDVGYNYIGISVKSQSHEYVSAQYDTLQDEKACHDSCRKLRRTRRNRLRYRKPRFDNRKRGEGWLAPSLEHKKQLNIRLIERYVSVIPITHATVEVGSFDTMLVKAIEEGKATPESADYQKGPRYNLATLREAVFYRDNYICKVCGRKATEGAILHMHHMFYWKGRHGNSLSELITVCEKCHTPANHQKSGKLYGFGENVKFADLSGAAFMNTVRWQIVNELYAAFGKDFVTVTYGAMTKEKRIALHLEKSHNNDAYAMGSFHPVNRCAFEHYEKVKRNNRILEKFYDSQYIDTRTGELTNGKSLFNGRISRGHKKDSENLHKYRGKRICKGHRALRRKKLALNPGDLVSLNGEILVVHGTHTKKNGSVNVEFKTPSRGGKKSASLKKLKIVKTSNLMHSAWTKVS

SEQ ID NO: 16703 - protein, 515 aa, unidentified; identical to SEQ ID NO: 3339
  REGION 1..515: note = Human gut metagenome

SEQ ID NO: 16704 - protein, 405 aa, unidentified
  REGION 1..405: note = IscB polypeptide
VGQRKQVSGLKVTVPVLSINGSPLMPCSLTKARHLLERRKAKIINLNPFAIRLTFECENKVQEVSLGVDSGYNHIGFSAITKTKEITSGEISLDDKTSKRLTERRMYRRNRRNRLRYRKPRFNNRKTPEGWLPPSVQRKLDTHINMVNKLKELTPVKKVTVEIGEFDIQKLMNPDIYGKEYQQGDLYGYNNLKAFLFSREHGRCQFCGKNIVKGEKAHTHHIKPRSETGTDSPSNMALLHEDCHDELHKRGLYRKLKAPKEYKAEIFMSIIAARLKKALNCGVTYGYETATKRNLLGIEKSHVNDAFIIAGGINQERCLPYKVEQKRINNRTLQTNRKGFVPSIRTQRYVIQNRDFIWISDKKYLCGGVANRGIMIYYFDDTKKKLIYYKKVNKFYSTGSLTWIN

SEQ ID NO: 16705 - protein, 413 aa, Petrotoga sp.
LMPCHSARARELLKKGKAAVFRYHPFTIILKEREGGDTQPIQVKIDPGSKTTGVALVADFKRGKKIIWASVIYHRGHIIKKDLDVRRAVRRFRRNRKTRYRKPRFLNRKRKEGWLPPSLISRAENILTWVKRIRRFSPVTSISMELVRFDTQKLQNPEIKGVEYQRGTLYGYEVKEYLLEKWGRKCAYCGNENVPLEIEHIVPKSKGGSNRVSNLTLACHECNQKKNNQSIDEFLANNPKKLNQIKARAKGPLKDVAAVNITRWYLFNQLKKEKLPIEVGTGGQTKYNRETQGYPKEHWIDATCVGESGYNVQLEPDMQVLEITANGHGMRRMCFVDKYGFPKSYRPKERTYMGYKTGDIVLANVPKGKNKGIHIGRIAIRHRPSFLLNGVGDVHPKYLTLLQKNDGYGYQMS

SEQ ID NO: 16706 - protein, 396 aa, unidentified; identical to SEQ ID NO: 4508
  REGION 1..396: note = Human gut metagenome

SEQ ID NO: 16707 - protein, 420 aa, Moorena sp.; identical to SEQ ID NO: 14851

SEQ ID NO: 16708 - protein, 502 aa, unidentified; identical to SEQ ID NO: 11560
  REGION 1..502: note = Human gut metagenome

SEQ ID NO: 16709 - protein, 470 aa, unidentified; identical to SEQ ID NO: 2825
  REGION 1..470: note = Human gut metagenome

SEQ ID NO: 16710 - protein, 416 aa, unidentified; identical to SEQ ID NO: 7823
  REGION 1..416: note = Human gut metagenome

SEQ ID NO: 16711 - protein, 460 aa, unidentified; identical to SEQ ID NO: 7734
  REGION 1..460: note = Mouse gut metagenome

SEQ ID NO: 16712 - protein, 444 aa, unidentified
  REGION 1..444: note = Mouse gut metagenome
MKIKNIKYIYVLDSNGKPLMPTKRLGMVRRWLTTGQAHWYKNSRNIIQFDRPTTHHLQKITQGCDLGDHLGISAITNKQEVYSSESYCDGNQVHKRMQARKMYRRTRRNCLRYRAIRFANRKHAKYAPSIKRKLAFQIKEIARISKFLPINNYIFEGSIFDINKLTCHMQQQKGYHNVLDFLYARDNGCDALDGIRYPKSDLVVHHLVHRANGGTNNPDNLVLLTRWHHNQANHNNGILDNLAKTRQQTFKNIDTRGAYFMNILNVELPKYFDYLPTFGYITAQRRKQYGINKTHHDDAFVIAGGTNHTLRLDYTIYREKLRCNNRSLEKFYDATYCDLRDSKIKKGAVLSSGRTSRSKELPYNNQRTYRANKIKKGRRTIRKQHYRLRPHDLVKYQNQIWQVKGVQNKGKYIKLTKKSAKDVVTNIKNVAILLHVNGCLISLD

SEQ ID NO: 16713 - protein, 370 aa, Lactobacillus sp.
MKHENANRVFLLNKDGKPLMPCRPRKARLLLKSGKAFVVKKYPFTIQLKYGSYGYKQKVSLGVDTGQRHIGFAVVSQDKVLHQSEVELRQDVHTNLYTRKIYRRGRRNRKTRYRQARFLNRVHGKRDGLWLPPSVKSKVSHNIAWIKRYLAVLPNPDLHIEVGKFDMAKMVNPDISGKQYQEGSLKDWKNYEYYVLARDEYTCQLCYKHGEGVKLVVHHIVYRSQGGTDRVDNLITLCTNCHTTKNHQPGGKLYKWMKAKKKVTKQLKGATFMNILRKRIMTTFPEASFQYGSQTYVERKNLLLPKGHFMDAIAISGIKPVGQMPETVTMISQFRKKKRSLHEATARKGRKQPNMSSKRNEKNTKYACGL

SEQ ID NO: 16714 - protein, 442 aa, Selenomonas sp.; identical to SEQ ID NO: 4776

SEQ ID NO: 16715 - protein, 431 aa, unidentified
  REGION 1..431: note = Human gut metagenome
MPNKVYVINKHGRPLMPCSPAKARHLLDEGKAKVKKRTPFTIQLVYGSSGYTQEVILGVDAGSKTIGMSASTTKEELLSAEVKPRNDVVDLLSTRREFRRARRNRKTRYRKPRFDNRVRSKHKGWLAPSVEVKIQEHITSIKRVCRILPVSKVVIETAEFDLQLLKAIADGKPVPQGEDYQQGEMYGHYNVRQYVLWRDGYTCQCCGAHATKKKEVRLHVHHLESRKVGGDAPDNQVTLCESCHEKLHKGLIAEKDFKKRKRRSTRDATFMGIMRKTLMQRLCSELPIPVVKTRGYITKATREKLLVLPKSHTNDALAIAQGKQGFNVGYLPGIVQINKIYTIRPVRHHNRQLHKATILKGGIRKSNQTEKYVFGYRLFDKVQFNGQDCFIWGRRTTGIFTIKTINGKMIKDGISFKKLKLVEKSTSYLIA

SEQ ID NO: 16716 - protein, 430 aa, unidentified; identical to SEQ ID NO: 4817
  REGION 1..430: note = Human gut metagenome

SEQ ID NO: 16717 - protein, 415 aa, unidentified; identical to SEQ ID NO: 5047
  REGION 1..415: note = Human gut metagenome

SEQ ID NO: 16718 - protein, 415 aa, unidentified
  REGION 1..415: note = Human gut metagenome
MVYVVANDGQPLMPTERHGKVCRMLKSGMAKVIKKCPFTIQLQYESKRNVQPVSLGVDAGSKHIGISATTKTKVLYESDVELRDDIVKLLATRRQLRRSRRNRKTRYRPAKFDNRKRKEGWLAPSIRQKMESHLTVVANVCKILPVSRIIVETASFDIQKIKNPDIQGVEYQQGEQMDFWNIREYVFFRDGHTCQCCKGRSKDKILNVHHIESRKTGGNAPNNLITLCETCHKGYHNGTVILPKNIKRGMKFKDAAFMGIMRWAFYNALKEQYEPAIPVSMTYGYLTKNTRIRHNLPKEHHIDARCISGNPDAVSDGTYYYQKKVRCHNRQIYKQTILKGGIRKSNQAEYLVKGYRLFDKVRYHGREYFIFGRRKTGFFDIRTLSGEKVNKGSISVKKLTFADTRKNYLTERRTV

SEQ ID NO: 16719 - protein, 475 aa, unidentified
  REGION 1..475: note = Human gut metagenome
MVAVVTSTGKPLIPTSAYRARKLLKKGRAVIFKYRPYFTIQLVDRADGEVQEVEYKSDTGSVHVGISVCTEKKELLSEQRDLLENEPEHHNDRKKNRRTRRNRKRYRKPRFDNRKKKPQEGHEKWLPPTLLHKMEVQVRLFREFCRVVPVTSACFEMGKFDTQALKAVSKGEPVPEGEGYQKGERYGTDTLRAAVFLRDGHTCRFCGRSVKDGAILHVHHVGYWKGDRTNRPANLASACEQCHTPANHGKNGILYGKEPEFKTLKDASYMTSVRWIMLDEIKKAAPGVQVSVTYGVTTKRKRQELHLPKSHVNDAFSMASFHPKKRSDTEYWKKIPRHDRVLQKFYDAIYLDTRDGSEKKGSELSNGRISRNHKKDSENLHQYRGHKVSKGHNSIRRGASSLKPGSIVMYKGEKMTVHGTHTRYVKGKDGKTAKKVNVQFTCPASDGKKSASLEKCTPVSRVYNTGWKRYWPDKK

SEQ ID NO: 16720 - protein, 427 aa, Moorena sp.; identical to SEQ ID NO: 7162

SEQ ID NO: 16721 - protein, 420 aa, unidentified
  REGION 1..420: note = Human gut metagenome
MQYVYVLNKHGEPLMPCSPGKARLLLKQQKAHVVKRTPFTIKLLYGSTGYKQPITLGVDAGNKHVGLSASTEKREFYCEEFTPRNDVVDLLSTRKQSRRSRRNRKTRYRAPRFDNRVHSKHKEWLAPSVEVKIQEHITIIKRICRILPITLVRVETAEFDTQRLKAMLEGKPLPVGTDYQLGEMYDEYNVRQYVLKRDHYTCQCCGAHTTTKKTVKLHVHHLESRKVGGNAPSNLITLCTTCHDALHKGKVSLDGKERGKPLRDAAFMGIMRKALMARLREELPIPVQGTYGYITKMRREQNDIKKSHVNDARCISKHPLAEPCSVCYRTKAIRHHNRQTHKANFSKGGIRKRSQMPYVVEGYRLWDKVLYKGQECFVSGRRASGSFTLKKLDGTRISKGVTFKKLRLLEPATNYLIERM

SEQ ID NO: 16722 - protein, 457 aa, unidentified
  REGION 1..457: note = Human gut metagenome
VWLYQAVYNLGEGFLPSSEERTAFYWLLIYRKEHGIMQYVYVLNKHGEPLMPCSPGKARLLLKQQKACVVKRTPFTIKLLYGSAGYKQPITLGVDAGSKHVGLSASTEKRELYREEFTPRNDVVDLLSTRRQNRRSRRNRKTRYRAPRFDNRVHSKHKGWLAPSVEVKIQEHITVIKRICRILPVTLVRVETAEFDTQRLKAMLKGKSLPVGTDYQLGEMYDEYNVRQYVLKRDNYTCQCCGAHPTEKKPVRLHVHHLESRHVGGNAPNNLITLCVACHKALHEGKITLDKGKKRGKPLRDAAFMGIMRNTLLARLKDELNIPVKQTYGYITKLLREKNKIPKSHVNDARCIAKAPNAKPCDTMLYTRALRHHNRQIHKAKILNGGIRKKNQAPYLVKGFRLWDKVRYNGEECFITGRRSSGYFALKKYDGTVISNSASYKKLMLLEAATNYITERS

SEQ ID NO: 16723 - protein, 403 aa, unidentified
  REGION 1..403: note = Human gut metagenome
LRVFVLNKRGKPLMPCSPAKARLLLKEKKAIVKRRTPFTIQLTIATGETKQPVGLGVDAGYKHVGLSASTDKAELYASQVELRQDITDLLSARRALRRARRNRKTRYRAPRFNNRIRTKRKGWLAPSVENRINAHLSRIEAVLRLLPVTKITVETASFDMLLLKNPDIAGKEYQEGEQLGFWNVREYVLFRDGHVCQHCYGRSKDPVLNVHHLESRRTGGDSPGNLITLCETCHEALHRGEIALKTKRGHSFRAEAFMGMMRWEVLNRLKASHSELEVNNTYGYRTKHARIVNGIDKSHCADAFCIAGNLGAERLCEFFFQKQTRRNNRQIHKLSILKGGIRKRNQAPFEIKGFRLFDKVACKGEESFIFGRRSSGYFDVRKLDGTRISAGISYKKLRLLEKR

SEQ ID NO: 16724 - protein, 481 aa, unidentified
  REGION 1..481: note = Human gut metagenome
MWTTVLRDEKPYGRSSALPVRECVSITKKRGHRMVAVLSKTGIRLMPTSSYRARKLLAKKKAVICGYRPFTIRLTERETGDVQPVELAVDTGYFHVGNSLKTAKHELAAVEIRTLMDEKQRYDDRRRYRRMRRSRLRYRAPRFDNRRRPEGWLAPSIQGRMEQNLAFLRRVLSVVPVTRIVMEMGQFDTQVLKAVEEGRPLPEGADYQQGERYGIATLREAVFTRDNYTCQCCEKTVHDGVILHVHHIVYRSQGGTNRMGNLITVCEKCHTPKNHKPGGKLYKWKPTVKSFKGATFMTAVRWIVYRSVKESFPDVDVRITYGAKTKLQRRALDITKSHVNDAYVMGNFHPKHRARPVILQKKRRNNRILEKFYDAKYIDTRDGSKKTGQQLFNGRTNRNHNTDTENLRPYRGIKLSKGKRAIRTTRYKIQPHDILVYQGQEMEASGCHNKGTRVMTTAKKSLPIGKVHVRQYSGGYYAVAE

SEQ ID NO: 16725 - protein, 421 aa, Moorena sp.; identical to SEQ ID NO: 2738

SEQ ID NO: 16726 - protein, 415 aa, unidentified; identical to SEQ ID NO: 12104
  REGION 1..415: note = gut metagenome

SEQ ID NO: 16727 - protein, 414 aa, unidentified
  REGION 1..414: note = Human gut metagenome
MPCSPAKARLLLKEKKAIVVRRTPFTIQLTIATGEAKQPVSLGVDAGYKHVGLSASTEKAELYASEVELRQDVSDLLSARRTLRQSRRNRKTRYRAPRFDNRIRTKRKGWLAPSVENRINAHLSRIGAILRLLPVTKITVETASFDTQLLKNPDISGKEYQEGEQLGFWNVREYVLFRDGHACQHCHGRSKDPVLNVHHLESRRTGGDSPGNLLTLCETCHKALHRREIKLKTKRGQSFRAEAFMGIMRWEVLNRLKASHPELEVHNTYGYRTKHTRIVNGIDKSHCADAFCIAGNLGAKRLGEFFFQKQTRRNNRQIHKLSILKHGLRKRNQAPFEVKGFRLFDKVVCQGEEGFIFGRRSSGSFDVRKLDGTRISAGISYKKLRLLEKRRTYLKEIRKEEALPPLPEGRSLRA

SEQ ID NO: 16728 - protein, 449 aa, Moorena sp.
LTKRTNPSNRSIHIMRVFVLDKNRKPLDPCHPAKARKLLKSGRAKVLRRYPFTIIIKDLEVENCSTHDHQLKIDPGAKTTGLAIVQGDRVIWGAELTHRGFQIKEALTSRRQLRRSRRNRKTRYRKPRFLNRTRPKGWLPPSLMSRVHNILTWVKKLIKFCPVTGISQELVRFDTQKMLNPEISGIEYQQGTLYGYELREYLLEKWNITCAYCGANNTRLEIEHIKPKSKGGSDRVSNLAIACHNCNQAKGNLEIEEFLSSKPNILKRILSQAKKPLADAAAVNATRWKLHDELKLIGLPVEVGSGGLTKYNRCRQNLPKTHWLDAANVGKVETLYIEDYQPLLITAKGHGTRQICRTDKFGFPRLHCSPKKIHKGFQTGDIVRAVVTKGKKIGTYMGRIATRKTGSFDITTHLAGFQELAINIAKLSIAKMDIVINLRRINPPSQLHP

SEQ ID NO: 16729 - protein, 489 aa, unidentified; identical to SEQ ID NO: 12744
  REGION 1..489: note = Human gut metagenome

SEQ ID NO: 16730 - protein, 455 aa, unidentified
  REGION 1..455: note = Human gut metagenome
MNTCVCVLSNSGERLMPTFRLGKVRRLLKDGKAKIIKHHPFTIQLLYDSKTNTQPIEICEDVGYNYIGISVKSQSHEYVSAQYDTLQDEKACHDSCRKLRRTRRNRLRYRKPRFDNRKRGEGWLAPSLKHKKELNVNIVKMYCTVMPITHATVEVGSFDTMLVKAIQEGKAVPEGADYQKGPRYNLATLREAVFYRDNYVCKICGRKATEGAILHMHHMFYWKGRHGNSLNELLTVCEKCHTPANHQKSGKLYGFGEKIKFADLSGAAFMNTVRWQIVNELYVAFGKPFVTITYGAMTKEKRIALQLEKSHNNDAYAMGEFHPNLRCMFEHYEKARRNNRILEKFYDSRYIDIRTGEIATGKELFNGRINRNHKKDSENLHKYRGKRTYAGHRALLRKKVNLNPGDLVSLNGENLIVHSTHTKKNGAVNVEFETPAKSGQKSASLKKLKIVKSAN

SEQ ID NO: 16731 - protein, 418 aa, unidentified
  REGION 1..418: note = Human oral metagenome
MLVYVLKQNGQPFMPTSRFGKVRRLLKEGKAKVVRREPFTIRLLYESETDVVQECYCGVDTGSKHIGVAVVSDDKVLYQSQTELRDDIKQKMDNRRMYRHNRRSRKTRYRKQRFLNRRNSIREDRLPPSVRHKVQAHIDEIEFCKKILPVSDLILEVSQFDTALMKNPSLMNEKIRHWGYQQGFNYGYSSRREAVLHRDNYTCQCCGKKNCRLEVHHIKFKSNGGTDDEENLITLCKECHDRVHAGTVVLDKKPKKMRLKHATHMSIIRSWLLKIYPDTIETFGFVTSENRNHLNLSKDHYIDACVIASGGLEFKPLDVVFYKRRMSKGNYRLTRKSFGKEIICKGKILGFKSFDKVEYFGVECFIGSRRNSGIATLVDIFRNTLDFSHLQKGFKLPKMRLLKRISSRKTTAISIINV

SEQ ID NO: 16732 - protein, 410 aa, Bacillus sp.
MTKIKEYCFVLDSEGRKLAPTDVNNAWHLIRKKKAKLISKYPMVIQLNRAVESEDIDYKIKLGIDDGSLHGGVGLVQECKTKNKPVFKATIEHRKDVSKLMEQRRDYRRYKRSHKRYCQARFNNRASSKRERRIAPSILQKRQTIIRFVEKISKWIDIANIYLEDVAIDIRALTDDKKLYRWQYQKSNRLDENIRKAVIIRDKCKCMECGKSNCILEVHHIIPRRLKGSNTLGNLITLCSKCHQKTEGKEEGFIDRYQKMINGKSLRLDFAKHVMQGKTWLQNQLNQYAELFLTSGGDTSNRRIDWNIEKSHSNDALVICGLEINDTNIKEWIIKPIRKKTKAIHSETYGFKHRDIAQYTDTKGATHVGYVTGMYPDRLQINIQTKEKHLKRVNARKSILKWRFRGLYFL

SEQ ID NO: 16733 - protein, 406 aa, unidentified
  REGION 1..406: note = Human gut metagenome
VVYIQDIDGNPLMPTTRHGKVRRLLKSNKAIVINLCPFTIQLTYATSGYKQEVVLGVDAGTKHVGLSATTKSKELYASEIILRSDIVELLSSRRESRRRRRNRLRYRKPRFMNRIKTKKEEWVAPSVRQKIDSHLKIIGFVYSILPISKLIIEVAQFDTQKIKNPEISGKEYQEGEQLGFWNVREYVLARDGHKCQHCKGKSKDPILNVHHIESRKTGGNSPSNLITLCETCHKEFHKGKIKLKVKRSASIRDAAVMGIMKWRLYNKLKSLYPNVKMTFGYITKHDRINHGIEKSHVSDAFVISRNFNSCRLGYYYKRKLVRRHNRKIHKMKILKGGIRKRNQAPFKVFGFRLFDKVMFQGEEYFIYARRLSGQFNIRDINGENKKDVSCKKLRYIIHGLISIETG

SEQ ID NO: 16734 - protein, 416 aa, unidentified; identical to SEQ ID NO: 11239
  REGION 1..416: note = Human gut metagenome

SEQ ID NO: 16735 - protein, 416 aa, unidentified
  REGION 1..416: note = metagenome
MVYVLDIDGNPLMPTERHGKVRRLLKDGKAKVVKRCPFTIQLLYDSTRYTQEVNLGIDAGSKHIGVSATTEEKVLYEADVELRNDIVDLISTRKEARKRRRYRNTRYRKARFNNRVSTKKAGWLAPSIKQKIQTHLTVVANVYEILPVKNLIVETASFDIQKIKNPNLSSEEYKQGKQLGFWNVREYVLFRDNHICQCCKGKSKDKILNVHHIESRKTGGDAPNNLITLCETCHRGYHNGFVKLPKTIHRGMSFRDATFMGIMRKSLLFELRKICPNVKETYGYITKNTRITHSLPKDHYIDARCITGNPDAKPLRYYFYQKKVRCHNRQIHKMNFSSGRVRKNNQAEYLVKGFRLFDKVGYNNKEYFVFGRRQRGCFAVRNLLGGKPNKSGDVDYKKLKFLDTKHNILTEICKGW

SEQ ID NO: 16736 - protein, 443 aa, unidentified
  REGION 1..443: note = bioreactor sludge metagenome
MSVFVLDKRKKPLMPCTEKRARLLLERKKAVIHRTVPFTIRLKERVGGEVQPVAVKLDPGSKVTGIALTREVGTETTHPMFLAELHHRGASIKKSLEQRSGYRRRRRSANLRYRAHRFSNRTKPKGWLAPSLLHRVETTLSWVNRFRRLVPVSRISMELVRFDLQKHLNPEISGIEYQQGELQGYEVREYLLEKWGRKCAYCGVEGVPLQVEHIVPKASGGSNRVSNLTLSCHTCNQKKGSRSVKTFLAKKPEVLKRVLVGAKAPLRDAAAVNSTRCVLYDTLKATELPVETASGGQTKWNRSRFSIPKTHALDALCVGILKGIKNWLQPTLAIYSTGRGVYQRTRVTLCGFPRGYLMRKKSAFGFQTGDLVQAVVLKGKNVGTHTGRVAIRVTGSFNIQTSHGLIQGISYRYCRMVQRGDGYRYEIGLFPTFKDGVFAPKNQ

SEQ ID NO: 16737 - protein, 502 aa, unidentified
  REGION 1..502: note = Human gut metagenome
MSIIYVQDRHGKPLAPTTRGGHVRRLLDSKQARVVCGNPFTIRLMYGVDPCTQGFILGIDPGRTNIGVTVAAADGTCVFSAKAETNNKDVPKRMKERKAHRQASRQGERKRRQRRARKNGTCFGERKRILPGCKEPITNHYITNTEARFMNRARTKGWLTPTANQLLQSTISLVRKVCKFLPVTDVVLELNEFAFMAMDDPGIQRWEYQKGPLYGYGSVEAAAYTQQDGHCIFCEQAIAHCHHVIPASKGGSDTLENRAGLCGGHHDLVHKEQSWTDKLAELKAGMNKRYAALSVVNQIIPRLADELGKMFPGHAFATNGWSTKQFRDAHGIPKDHNTDADCIACSILENPTIKLPEKVYELRKFRRHDRAQISRMEDRNYYLPGADPKTGKPKKVLAAKNRHKRTEQKTDSLEEFRAAHPNDVGRLMVARGGPKHKDPNRVLPGAIFQVETRSGNVEQLVLQGSHGRDKNGQPLYLEFVGQGNFRPNRCKYVARGRGWQFV

SEQ ID NO: 16738 - protein, 413 aa, unidentified; identical to SEQ ID NO: 10655
  REGION 1..413: note = Human gut metagenome

SEQ ID NO: 16739 - protein, 431 aa, unidentified; identical to SEQ ID NO: 4463
  REGION 1..431: note = Human gut metagenome

SEQ ID NO: 16740 - protein, 408 aa, unidentified; identical to SEQ ID NO: 4826
  REGION 1..408: note = Human gut metagenome

SEQ ID NO: 16741 - protein, 512 aa, unidentified
  REGION 1..512: note = Human gut metagenome
LMLLQIKAGTETFWTAPCGSGPKAEGVSPERKAMNTVAVVTNTNKPLMPTSPYRARKLLSSGKAKIVKHRPFTILLVNRSDGNVQEIEYKSDTGYLHVGISVCSEKREFVREQRDLLPDKREKHNDRRKYRRTRRKRKRYRKARFDNRIGKIRKAEKNKHVWLPPSLDHKVDAQVQLFLRLYQVMPIKRAVFEMGQFDPALMKALEKGEAAPQGIDYQMGERYQIATRRAAAFTRDRYACVFCGRSIKDHAILHVHHIGFWKQDRSNRLDNLATCCEQCHTSENHRPGGILYGVEPKLESLASATYMNVVRFELLQRLKEAAPDVEFHISYGAKTSVIRKQRSISKSHTNDAYCLGQYFPKLRAEEIGFQKIRRNDRILQKFYDAEYLDSRDGTTKKGKELTNGRISRNHMKDHKNLHQYRGKKLSKGRVTIRRGRSSLKTGSLVRFDGEVLTVHGTHRSRRKNKAGHIKVSVNVEFERPSKTGRKSAALSKCQIISQSYNTGWKKFSYERR

SEQ ID NO: 16742 - protein, 422 aa, unidentified
  REGION 1..422: note = Human gut metagenome
LNKRGKPLMPCSPAKARLLLKEKKAIVVRRTPFTIQLTIATGESKQPVSLGVDAGYKHVGLSASIEKAELYASEVELRKDITDLLSARRALRQSRRNRKTRYRAPRFDNRIRTKRKGWLAPSVENRINAHLSRIEAVLRLLPITKITVETASFDMQRLKNPDISGKEYQEGEQLGFWNVREYVLFRDGHVCRHCHGRSKDPVLNVHHLESRRTGSDSPDNLITLCETCHKALHRGEITLKAKRGQSFRAQAFMGIMRREVLNRLKASYPELKVHETYGYLTKHARIANGIVKSHGADAFCIAGNLGAERLGEFFFQKQTRRNNRQIHKLSILKGGIRKRNQAPFEAKGFRLFDKVACQGEEGFIFGRRSSGSFDVRKLDGTRISAGISYKKLRLLEKRRTYLTEIRKEEALPPLPEGRGLRA

SEQ ID NO: 16743 - protein, 462 aa, Moorena sp.; identical to SEQ ID NO: 8000

SEQ ID NO: 16744 - protein, 408 aa, unidentified
  REGION 1..408: note = Human gut metagenome
MVYVQDINGKPMMPTTRHGKVRRLLKDKKAVVVNLCPFTIRLTYVTSDYKQEIVLGVDAGTKHVGLSATTKSKELYSSEVILRSDIVDLLSTRRELRKTRRNRLRYRKPRFDNRVKSKRSGWIAPSVKYKIDAHIRIVDNVCSILPISRIVIEVAQFDTQKIKNPNISGKEYQEGDQLGFWNVREYVLARDGHKCQYCKEKSKDKILNVHHIESRKTGGDSPYNLITLCETCHKEYHKGNIDLKIRRGKSLRDAAVMGIMKWRLYEELKSKYDNISMTFGYVTKYNRIKHGIEKSHVSDAFVISKNFNAIRLGYYYKVRLVRRHNRQIHKQKIPKGGVKRLNQSPFEVFGFRLFDRVMFENSYYFIFGRRKTGRFNIRDIDGKNQRDITYKKLKLSRCKCFMVQNEMN

SEQ ID NO: 16745 - protein, 430 aa, unidentified; identical to SEQ ID NO: 3681
  REGION 1..430: note = Human gut metagenome

SEQ ID NO: 16746 - protein, 348 aa, Enterococcus sp.; identical to SEQ ID NO: 9214

SEQ ID NO: 16747 - protein, 415 aa, unidentified
  REGION 1..415: note = metagenome
MENRIEYCFVVDKNNRPLTPTKVNKGWYLVRKSRAKLKSKYPMVIQLEKEVKSDEDDESHIVCGIDDGSAHVGLAIVQKCHTKNKVVFKGTIEQRQDVKHLMDVRRGHRRYHRYHKRYRQARFNNRSSSKRTCRLAPSIKQKKDAILRVLYQLNKWVNIQEYHLEDVCIDIRALTDDYKPYRWQYQKSNRLDENLRKATILRDECRCQECGKSNCVLEVHHIRARKYGGADTIGNLITLCSGCHQKTEGRERDFEDRYFNMIKSKPKRFDYAMHVMQGKTYLREKISELGSLHLTNGGETANKRIEWNMEKSHGNDAICVTDCIPDNCDVKEWIIKPMRRKSKAKTNNLLGIRHRDLVSYTYKNGETHTGYVTALYPEQLVLNFQSKTKHCKKVNARKCRLLWKFNKIYWLEQCV

SEQ ID NO: 16748 - protein, 431 aa, unidentified
  REGION 1..431: note = Human gut metagenome
MPNKVYIINKHGRPLMPCSPAKARHLLDEGKAKVKKRTPFTIQLVYGSSGYTQEVILGVDAGSKTIGLSASAETEELLSAEVKPRNDVVDLLSTRREFRRARRNRKTRYRKPRFDNRVRSKHKGWLAPSVEVKIQEHITSIKRVCRILPVSKVVIETAEFDLQLLKAIADGKPVPQGEDYQKGEMYGHYNVRQYVLWRDDYTCQCCGAHATKKKEVRLHVHHLESRKVGGDAPDNQVTLCESCHEKLHKRLITAKDFKKRKRRSTRDATFMGIMRKTLMQMLCSELPIPVVKTRGYITKATREKLLVLPKSHTNDALAIAQGKHGFNVGYLPGILQIDKIYTIRPVRHHNRQLHKATILKGGIRKSNQTEKYVFGYRLFDKVQFNGQDCFIWGRRTSGYFVVKTIDGKVIHNSASFKKLNLVERASNYLIA

SEQ ID NO: 16749 - protein, 396 aa, unidentified
  REGION 1..396: note = Lachnospiraceae bacterium UBA7730
NHAKVRILLKQGKAKVANKCPFTIQLMYSSTNYTQKVTLGVDSGSKHIGLSATTKDKVLFESDVELRNDIVDLLSTRRELRRSRRNRKLRYRKPRFDNRRRSDRWLAPSVKQKVDSHITMIAKVHKILPITNIIVEVASFDIQKIKNPTISGVDYQQGEQLGFWNVREYVLFRDGHECQCCHGKSGDKILNVHHIESRKTGGNAPNNLITLCETCHTGYHKGTVKLPKTIHRGMSFKDATFMGIMRWALYGKLKAIYSDVKLTYGYITKNTRIKNSLPKDHYIDARCISGNPNAASNGDIYYYKKVRCHNRQIHKNTILKGGYRKRNQAPYEVMGFRLFDKVQWKGCKCFIFGRRSTGRMDLRLLDGTHINASVGYKNLKLLKMRSSYLIEQRKVG

SEQ ID NO: 16750 - protein, 443 aa, Moorena sp.
MQRVLVVSHTRQQLMPCTPARARMLLTDNKAAVLRKYPFTIILKDRADGDVQPIELKADPGSKVTGVALVADYAKPGKTVVWAGEIQHRGQVIKDALDSRRGIRRSRRSRKTRYRAPRFDNRTRHEGWLPPSLMSRVHNVTIWALRLQRVAPLASIAVETVRFDMQKMVSPEISGVEYQQGTLAGYELKEYLFEKWGRKCAYCNKKNLPLQVEHIIPKTRGGTDRVSNLTLSCEGCNHKKDNLTAAEFGHPEVQNHALAPLKDAAAVNTTRYAIGNALKSLGLPVSFWSGGRAKFNRTHQGYPKAHWIDAACVGESGEHVKLDSSMQEIQVKATGHGSHQMCRMDRFGFPRTSAKTTRVVNGFRTGDIVRAVLPYVKKTGTYDDKVAVRASGSFNVSTATGVVQGISYKYCSVVHRADGYSYLTKTGAPLGNELPSIRAQELS

SEQ ID NO: 16751 - protein, 465 aa, unidentified; identical to SEQ ID NO: 7042
  REGION 1..465: note = Human gut metagenome

SEQ ID NO: 16752 - protein, 451 aa, unidentified; identical to SEQ ID NO: 5203
  REGION 1..451: note = Human gut metagenome

SEQ ID NO: 16753 - protein, 495 aa, Nonomuraea sp.; identical to SEQ ID NO: 11981

SEQ ID NO: 16754 - protein, 374 aa, unidentified
  REGION 1..374: note = Human gut metagenome
LNYDSGHQTQEISLGIDAGSKHIGVSATTKIKVLYEADVELRNDIVDLLSSRRELRRGRRNRKTRYRQAKFNNRRLGNGWLPPSIRQKIGTHLTVVENICKILPISRIMVETASFDIQKIKNTDIQGAEYQQGDQLGFWNIREYVLFRDNHTCQYCKGKSKDKILNVHHIESRKTGGNAPNNLITLCEICHTGYHKGAVQLPKTVKRGMRFKDAAFMGIMRWAFYEALKQQYEPVALVHNTYGYITKHTRIEHNLPKEHYVDARCISGNPDAFPSGEYYYQKKVRCHNRQIHKLTILKGGIRKQNQATYLVKGYRLFDKVSYQGKGYFVFGRRQSGFFDIRTLSGEKVNKGSLSCKKLKFIATRTYYLTERRAV

SEQ ID NO: 16755 - protein, 512 aa, unidentified
  REGION 1..512: note = Human gut metagenome
MSTIYVLNKDGKPLMPTTRGGHVRHLLKEQKARVVQSNPFTIQLLYETNDVVQPLYLGIDPGRTNIGVAVVKADGTAVFAAHLETRNKKIPKLMQDRKKARRARRTNGRRCRRQRRAKANGTISKKCVKQDTAQSKNPSKRAKEIGVIKRHLPGCKKDVLCVGIKNKEAKYTNRARLEGWLTPTANQLLQTHINLVKKIQKFLPISDVVLEVNKFAFMRLDNPNMQQWQYQRGPLYQKGSLENAVSEMQEHHCLFCEKPIEHYHHVVPKSENGSNTIANIVGLCAEHHNLVHKDVAWQEKLVEEKTGLNKKYGALSVLNQIIPALTKELSFLFPKHSFMTNGKSTHDYRAAHGISKDHWLDAYCIACSVLPIDVCDSTINNCVPYELKQFRRHDRRALNNENMNRVYTLNDKVVATNRHKATEQEAASLEEFRKEHPNDVCKLKVKEHHPTYRNMNRNYPGSVFLVGKQIHVMQGIASSKDGKATKYNDTRATTIAAGKCKFVAKNSGILFV

SEQ ID NO: 16756 - protein, 356 aa, Arthrospira sp.; identical to SEQ ID NO: 13293
  SITE 169: note = misc_feature - Xaa can be any naturally occurring amino acid
  SITE 350: note = misc_feature - Xaa can be any naturally occurring amino acid
  SITE 356: note = misc_feature - Xaa can be any naturally occurring amino acid

SEQ ID NO: 16757 - protein, 420 aa, unidentified
  REGION 1..420: note = Human gut metagenome
MQYAYVLNKRGEPLMPCSPGKARILLKQQKACVIKRTPFTIKLLHGSAGYKQPITLGVDAGSKHVGLSASTEKRELYSEEFTPRNDVVELLSTRRQNRRSRRYRKTRYRAPRFNNRVHSKHNGWLAPSVEVKIQEHITVIKRICRILPITLVRVETAEFDTQRLKAMLAGKLLPVGTDYQLGEMYDEYNVRQYVLKRDNYTCQCCGAHTTAKKTVKLHVHHLESRKVGGNAPSNLITLCTTCHNNLHKGKITLDGKKRGKTLRDAAFMGIMRNTLLTRLRNELNIPVQNTYGYITKLLREQNDIKKSHVNDARCISKHPLAKPCSVCYRTKAIRHHNRQIHKAKILKGGIRKANQAPYIVKGFRLWDKVLYNEQECFISGRRSSGYFALRKFDGTTITNSISFKKLRLLEPATNYLIERK

SEQ ID NO: 16758 - protein, 634 aa, Nocardiopsis sp.
MTRAPSRARSSLGGASSTFPMGTPASVRVPVPPLVPAPPSTTVIPVLSRYGWLVTPSETWFRGPSAKDNHLRPQPTSRGNAFPARRRGFRPPGRGPGVTSTSQHQGGDQLATFHTGEKTHQAVLPQRPALESASADIPRNGNETGRGSHVRVAPGVEHVRGETTGGSPTAGGVTPVPSGAGEQAREGRPPKTTPRKGHPYVFVLDRHGTPLQPTHPARARRLLAKGRAIVARHTPFVIRLKDRTTAESEVDGVETGIDPGSKRTGIAVFTDRHGERRGRYAIRLDHRGGQIAKRMRQRAAYRKGRRSRNLRYRTARFDNRTRPRGWLPPSLRHRVDTTLAWAGRLARWAPVRAVHVERVAFDVHALSAGRPVEGVEYQHGTLHGYEVREYLLAKWGQACAYCGATGAPLNIDHVRPRSRGGSDRVANLALACVPCNRAKADQPVEEFVTNPRALAGISAQTKAPLRDAAAVNATRWALWRSLDGCLPTRVGSGGRTKWNRTRNHLPKSHTLDALAVGRVEAITTAVSTVLVVGAAGRGSYARTRADRHGFPRLRLPRRKRFFGFQTGDLARAAVPSGMNAGTHTGRVAVRSSGSHTLQTSYGPIKTSWKNLCLLQRADGYGYTTQKEAGAPSTA

SEQ ID NO: 16759 - protein, 409 aa, unidentified
  REGION 1..409: note = Candidatus Thiomargarita nelsonii
MLVYVINKNGKPLMPCKPAKARKLLRDGKAKIVNRCPFTIQLQWDCEENVQAVTLGIDKGSHHTGLCNVGNGKILLSGIINHRTDITDKMKARRGNRRQRRDQIWYRPKRFLNRASSNRSGRLPPSIFANANEVVRVVDKIPLPISRIVAEDVQVDIARLNKQNLTGTEYQQSNRLDENLRIATLMRDKYQCVSCGKKKVQLQAHHIVPQCQGGKDTIKNLITLCQQCHKKVHSGQITLDVDGVSGLKDQIAQRTMQGKSLIYKRLETVAPVFKVFGYQTASFRKSLDLPKDHDVDALCVATLDRRTVVPYHRENFYTIKFRPRQTRRRYHSLPQKGKGRVPYQVNAELDGFRKGSIVRVKDKWTKQINSIYSNGRLAFARVKGEPGSAKPDDCQLLLRGQTVVWNYSV

SEQ ID NO: 16760 - protein, 457 aa, unidentified
  REGION 1..457: note = Human gut metagenome
MDAVAVISASGKPLMPTNPMRARKLIKKGKAVIYKYRPLFTIRLTERTDGDIQTIEYCCDTGYQHIGLSIKSRKHEYVNEQRDLLPNETERHNDSRKYRKARRRRKLRHRACRRDNRHDNQICKDGYAPSIRNKRDQHISLYRSYTEILPVERAVFEMGQFDTQVLKAIEKGEPLPQGKDYQHGERYGYATLREAVFARDDYTCICCGKNSFKDKRILCVHHLGFRIGDRTNRLANLATVCTKCHTPKNHQPKGKLYNLKPELKDFKGATFMTMVRWDMLDKLKVVSKDIQVDVTYGAATKEARRDLKIKKSHANDAYCMGSFHPSHRTDLKRYEKCRRNNRVLSKFYDATYIDIRDGKKKKANALGCNRTKRRESRRSEKNERIYRGEKVSKGRIVLRTKRAVIRPGDIVYVGKKKYIVASSKNLGAQLKLADGSLLTTSKVTKIIHCGGWKTVTM

SEQ ID NO: 16761 - protein, 420 aa, unidentified; identical to SEQ ID NO: 4588
  REGION 1..420: note = Human gut metagenome

SEQ ID NO: 16762 - protein, 431 aa, unidentified
  REGION 1..431: note = Human gut metagenome
MPNKVYVINKHGRPLMPCSPAKARHLLDEGKAKVKKRTPFTIQLVYGSSGYIQEVILGVDAGSKTIGISASTKKEEVFAADVTPRNDVVDLLSTRREFRRARRNRKTRYRKPRFNNRVRSKHKGWLAPSVEVKIQEHITSIKMVCRILPVSKVVVETAEFDLQLLKAIEEGKPVPQGEDYQQGEMYGHYNVRQYVLWRDNYTCQCCGAHLTKKKEVRLHVHHLESRKVGGNAPGNLVTLCDRCHEKLHKGLITEKDLKKRKHRSTRDATFMGIMRKTLMQRLCSELPIPVAETRGYITKATREKLLVLPKSHTNDALAIAQGKHGFNVGYLPGIEQIDKIYTIRPVRHHNRQLHKAIILKGGIRKSNQAEKYVFGYRLFDKVQFNGQDCFIWGRRTSGYFVVKTIDGKVIHNSASFKKLRLVERASNYLIA

SEQ ID NO: 16763 - protein, 409 aa, Microcoleus sp.; identical to SEQ ID NO: 3702

SEQ ID NO: 16764 - protein, 424 aa, Mastigocoleus sp.; identical to SEQ ID NO: 6040

SEQ ID NO: 16765 - protein, 286 aa, unidentified
  REGION 1..286: note = Human gut metagenome
LNKEKEKVVIETAEFDLQLLKAIQEGKPIPEGEDYQKGEMYGSYNVRQYVLWRDNYTCICCGVRGTPKNPVRLHVHHFESRKHGGNAPDNHGTLCDDCHKKFHLGIITDVKLKTRRRQSTRDAAFMGIMRKTLMWRLRTELFIPVAETKGYITKATREKLLVLPKSHTRDALAIAQGRHGFGIKEYAYVEPANHIYTVRPVRHHNRQLHKASILKGGIRKRNQASKYVFGFRLYDKVLYQGKECFMWGRRTSGSFLLRTIDGIKVKDGVSYRNLTLLERSSNYLIA

SEQ ID NO: 16766 - protein, 432 aa, Microcoleus sp.
MQPTKQQNWVFQINGDKQPLDMIHPGRCRELQNRGKLASFRRFPYVAIQQQTIESIKTKEYILKIDPGSQWTGFAIQCGNDILFRAELNHRGEAIKLDLVKRAGFRRGRRSRNLRYRKKRLNRAKPEGWLAPSIRHRVLTVETWIKRFMRYCPIAWIEIEQVRFDTQKLANPEIDGVEYQQGELQGYEVREYLLQKWGRKCAYCGTENVPLEVEHIQPTSKGGSSRVGNLTLACHVCNVKKGNLDVRDFLAKSPDILNQVLENSTKPLKDAAAVNSTRYAIVKMAKSICQNVKCSSGARTKMNRARQGIEKTHSLDAACVGESGASIQVRTDRPLLITCKGHGSRQSIRVNASGFPAVKNAKTVFTHIAAGDVVRFTIDKNRKKVKAGTYTARVKTPTPKGFEVLIDGARISLSTMSNVVFVHRSDGYGYEL

SEQ ID NO: 16767 - protein, 465 aa, unidentified; identical to SEQ ID NO: 3306
  REGION 1..465: note = Human gut metagenome

SEQ ID NO: 16768 - protein, 408 aa, unidentified; identical to SEQ ID NO: 6548
  REGION 1..408: note = gut metagenome

SEQ ID NO: 16769 - protein, 418 aa, unidentified
  REGION 1..418: note = Human gut metagenome
MPCSPAKARLLLKEEKAIVKRRTPFTIQLTIATGETKQPVSLGVDAGYEHVGLPASTEKAELYASEVELRQDITDLLSARRALRQSRRNRKTRYRAPRFDNRIRTKRKGWLALSLENRINAHLSRIEAVLRLLPVTKITVETASFDLQLLKNPDISGKEYQEGEQLGFWNIREYVLCRDGHVCQHCYGRSKDPVLNVHHLESRRTGGDSPGNLITLCETCHKALHRGEITLKAKRGQSFRAEAFMGIMRWEVHSRLRALHPGIEVSNTYGYRTKHARIANGIAKSHCADAFCIASNLGAERLCEFFFQKQTRRNNRQIHKLSILKGGIRKRNQAPFEVKGFRLFDKVACQGEEGFIFGRRSSGFFDVRKLDGTRISAGISCKKLHLLEKRRTYLTEIRKEEALPPLPEGRGSAPKCDE

SEQ ID NO: 16770 - protein, 462 aa, unidentified; identical to SEQ ID NO: 15460
  REGION 1..462: note = Human gut metagenome

SEQ ID NO: 16771 - protein, 406 aa, unidentified
  REGION 1..406: note = Human gut metagenome
MVYVQDIDGRPLMPTTRHGKVRRLLKSKKATVVNLCPFTIRLLYDTTGYKQEITLGVDTGTKHVGLSATTKSKELYASEVILRSDVVDLLSTRRELRKIRRYRLRYRKPRFMNRIKSKKRGWIAPSIRQKIDSHIRIIGFVYSILPVSKLIIEVAQFDTQKIKNPEISGKEYQEGEQLGFWNVREYVLARDEHKCQHCKGKSKDSILNVHHIESRKTGGDSPSNLITLCKTCHKEFHKGNIKLKVNRGESLRDAAVMGIMKWELYDELKSLYPNVKMTFGYITKYNRINHGIEKSHVSDAFVISRNFDSERLGYYYKRKLVRRHNRQIHKMKAPKGGNKRMNQSPFKVFGFRLFDKVMFQGKERFIYARRLRGIFNIRDINGENKKDISYKKLEYVSHGLISIVAG

SEQ ID NO: 16772 - protein, 434 aa, unidentified
  REGION 1..434: note = Human metagenome
MTKTLTKQTRQACVLDQQGKPLMPTTRLGKVYRLLKTQKAHIVSYEPFTIQLNYEPDTHIIQPMTLGVDSGAIHSGYSVANEHREYYSAEVIARDDISKRLSNRRMYRQNRRSRKTRYRKPRFKNRKNKKKGWLPPSLEQKIAVQVNEIDHLHRYFPIETIIVEVAEFDIQKIKNPDISGIEYQQGTLQGYNIRNYLLEKHGRKCFYCGKSVSKFEVEHMLPKSRGGSNRIDNLTLSCHECNQKKDTLTEEEFIKQTLPAKKAVTKLKQLPNKKRLFKYMAHMNATRWALYNAIDKKYPNVKMTYGYVTKYNRIKAGLPKAHHIECITGFSTVPSMKQTVVKVKMRRHNRQLHRATFSKGHIRKAACLPTIVFGFQLYDFVLFDNHYYYIKGRRSSGKFALVSIEGLKDTDRNYKKLTLLAHTNAYLINRYISV

SEQ ID NO: 16773 - protein, 430 aa, Vibrio sp.; identical to SEQ ID NO: 8414

SEQ ID NO: 16774 - protein, 444 aa, unidentified
  REGION 1..444: note = Chlamydiae bacterium
MLVFVLNKLKKPLMPCSPAKARRLLKKGLAKVISKKPFTIKLLFGSSRYKQEVIAGMDTGSKTIGIAAIANGKVLYQAETKLRGEEIKKKMDQRRMYRRSRRSRKLRYRKPRFLNRRASIATDRLAPSVKHKVFAHLREKKFIESILPVSVWIVETASFDIHKITNPKGVSKALGKGWTYQKGRMLDFYNVKQYVLNRDKYQCQVCKKKNGLKLHVHHIQFRSNGGTNSPDNLTSLCETCHDKLHKLKKEEAEKSSKKLQKSAQKQTKHATEISILRSQLCKHFRNLGSSQVFEETFGYITKFNRESANLLKSHHIDAICIASRGERIEVQNQNNPSDLFLRRCVSKGDYQQTRGIRSELKIPTGKLFGLKKFDLVKTSKGVGFVKGKRSSGFFAISDINGTIISDSVNIKKNISRTQARKSILIWRSQFVSDLKDKVSLREKR

SEQ ID NO: 16775 - protein, 352 aa, unidentified
  REGION 1..352: note = Human gut metagenome
MVYIKDIDGRPLMPTKRYGKVRWLLKENKAVVINLCPFTIQLTYKSTDHKQPVTLGIDAGAKHIGFSATAEKEELFACETTLRTDIVDLLSTRLQNRRTRRSRLRYRKPRFNNRGSSKKKGWVAPSVKQRIDSHLNEVNEIHKILPITKIVIEVAQFDTQKMKNHDISGSDYQNGEQLGFWNVREYVLFRDGHKCSHCKGKSKDPVLNVHHLESRKTGGDSPSNLVTLCESCHKAFHKGEIELKKKRGKSLRDAAVMGIMKWKLYEELKSRYDNVSMTFGYITKYNRIKYGIEKSHTSDAFVISRNFNAKRIERQYLKRLVRRHNRQIHKMKILKGGKKKNNQAPFGVFRFR

SEQ ID NO: 16776 - protein, 501 aa, Moorena sp.; identical to SEQ ID NO: 9337

SEQ ID NO: 16777 - protein, 420 aa, unidentified; identical to SEQ ID NO: 5136
  REGION 1..420: note = Human gut metagenome

SEQ ID NO: 16778 - protein, 408 aa, Bacillus sp.; identical to SEQ ID NO: 4228

SEQ ID NO: 16779 - protein, 413 aa, unidentified; identical to SEQ ID NO: 3587
  REGION 1..413: note = Human gut metagenome

SEQ ID NO: 16780 - protein, 413 aa, unidentified; identical to SEQ ID NO: 2636
  REGION 1..413: note = Human gut metagenome

SEQ ID NO: 16781 - protein, 418 aa, unidentified
  REGION 1..418: note = Bioreactor metagenome
MVYVTNRQGKALMPTDRHGKVRRLLKSGLAHVVRRIPFTIQLDYDTTEITQPITLGIDAGSKFIGVCATTDKKELYAANVELRNDIVDKLSTRREQRRTRRSRLRYRKARFNNRVSSKHKGWIAPSIDNKIQTHLTVVGNAYKILPISKIVVETASFDIQKIKNPNVDGEDYQHGEQMGFWNIREYVLWRDRHTCQHCHGKNGDKILNVHHLESRKTGGNSPSNLITLCETCHKAYHRGKFELKVKRGPSFRDASFMGIMRWGFLERLKQIYPNVSMTFGYITKSTRIANGLPKEHYVDARCISGNPQAKPLGYYFYQKKVRCQNRQLHKANILKGGKKKLNQAPFTVKGFRLFDLVEYQKELFYVFGRRKSGYFDIRRLNGIKVNKGSINCKELRLVGIRRTLLIERRNSGSIPPRS

SEQ ID NO: 16782 - protein, 424 aa, Enterococcus sp.; identical to SEQ ID NO: 12747

SEQ ID NO: 16783 - protein, 378 aa, Moorena sp.; identical to SEQ ID NO: 11223

SEQ ID NO: 16784 - protein, 432 aa, unidentified
  REGION 1..432: note = Human gut metagenome
MLTGLLAEQVDPAGIRKGDTLKVFVLNMRGKPLMPCSPAKARHMLKAGKAVVARRTPFTIKLTIATGETKQDVTLGVDAGAKHVGISATTEKEEVFASEVELRQDITGLLADRLAFRRSRRNRKTRYRAPRFNNRVRSKHKGWLAPSVENRIQAHISRIEAVCRVLPITKIVIETASFDIQKIKNPEVEGTDYQQGDQLGFWNVREYVLFRDGHVCQHCRGRSKDPILNVHHLESRKTGGDAPNNLITLCETSHKAYHAGKIKLKTRRGTSFRAEAFMGIMRRTLLDRVRKAHPELSVENTYGYLTKHKRIALGLPKTHCADAFCIAGNLNALRRGDFLYQRQTRKHNRQIHKCSILKGGVRKLHQAPFLVKGFRLFDKVKCTGRIGIIFGRRSTGSFDVRTLDGTRLSAGISSKKLTLLEKRTTFLTQLRK

SEQ ID NO: 16785 - protein, 435 aa, unidentified
  REGION 1..435: note = Human gut metagenome
MICAGLQHKTYQKGVPVMVYVLDKNGHPLMPTNRHGKVRRILKSGNAKVIRRCPFTIQLLYDSTDYTQLISLGIDAGSRHIGVSATTETKVLYEADVTLRNDIVDLLSTRREARRARRNRKTRYRKPRFNNRTRKDGWLAPSVQQKVDTHLTVVHKTTEILPVSSITVETASFDIQKIKNPDISGTGYQQGEQLNFWNVREYVLFRDGHKCQCCKGKSKDPVLNVHHIESRKTGGNAPNNLITLCETCHKGYHKGTVTLPKAIHRGMKFKDAAFMGIMRWAFYDRVKEIYEPLGFRVNMTYGYITKNTRITHGLPKEHFIDARCISGHPDAVSDGTVFYQKKVRCHNRQIHKQKILKGGIHKRNQAPYRVKGFRLFEKVKYRGKQYFIFGRRNSGFFDIRTLNGNKVNKGSVSCRKIRSLDAPHSFLTEQRKVMA

SEQ ID NO: 16786 - protein, 470 aa, unidentified; identical to SEQ ID NO: 2825
  REGION 1..470: note = Human gut metagenome

SEQ ID NO: 16787 - protein, 431 aa, Nostoc sp.
MEGLMSKIFVIDTQKRPLDPIHSAQARQLLRNKKAAIFRRFPFTIILKESHPDSTVQPLRLKLDPGAKNTGIALVNDATGEVVFAAELKHRGFAIRDALTSRRQLRRSRRNRKTRYRKPRFLNRTRPEGWLAPSLQSRVENIKTWVNKLCKLAPTEAISQELVRFDMQLMRNPEIQGEEYQQGTLAGYETREYLLEKWNRQCAYCGVKDVPFQVEHIHPRAKGGSNSITNLTLSCEKCNTKKGTKEIKEFLKKDPSKLTKILAQAKRPLADAAAVNTTRWALFKALRETGLPVETGSGGLTKFNRSQQKLEKTHWLDAACVGKSTPKLIIKCVKPLLIISNGHGSRQSCRTDKFGFPNRHVPREKIHFNFQTGDIVKAVVTTGKKLGNYVGKVAIRSSGSFNISTKKGLIQGISHKFCKRIHAKDGYSYAQ

SEQ ID NO: 16788 - protein, 425 aa, unidentified; identical to SEQ ID NO: 13021
  REGION 1..425: note = Human gut metagenome

SEQ ID NO: 16789 - protein, 477 aa, unidentified; identical to SEQ ID NO: 2707
  REGION 1..477: note = Human gut metagenome

SEQ ID NO: 16790 - protein, 447 aa, unidentified
  REGION 1..447: note = Human gut metagenome
MVAVLSKTGIRLMPTSSYRARKLLARKKAVIAGYRPFTIRLTERESGEIQPIEYTIDTGYYHIGNSVKTVKHELAAVEVRTLMDEKLRQEDRHRYRRQRRSRLRYRAARFDNRRRREGWLAPSVRHRMEQNLSVLNRIARVVPVSRIVMEMGQFDTQVLKAVASGIPLPQGADYQQGDRYGIATLREAVFTRDNYTCQCCGKKGTYGVILHVHHIRYRSQGGTDAMSNLATVCYKCHTPKNHKPGGILYGWKLKLPSFKGATFMTSVRWMLYHQVKELYPELEIQLTYGAATKEQRRILDVPKSHVNDAYTMGDFHPSHRVRPVIYQKKRRNNRVLEKFYDAKYIDLRDGKKHSGQELFNGRTNRNHNRDTENLHKYRGKKVSKGRRSIRRRRYPFQPHDLVVYRGKSLETAGCHNKGTRLLIGKRSIAVKEVKIRQYCGWYFAVEI

SEQ ID NO: 16791 - protein, 281 aa, unidentified
  REGION 1..281: note = Human gut metagenome
LKVFVLNMRGQPLMPCSPARARHLLKAGKAVVRRRTPFTIQLRIATGETKQSVTLGVDAGAKHVGLSAATEKEEVFASEVELRQDITGLLAARLSLRRDRRHRKTRYRAPRFLNRVRSKHKGWLAPSVENRIQAHMSRIDAVCRLLPVTKIVIETASFDIQKIRNPEVEGTGYQQGDQLGFWNVREYVLFRDGHICQHCRGRSKDPILNVHHLESRKTGGDAPNNLITLCETCHKAYHAGKIKLKVKRGQSFRAEAFMGIMRWTLLDRVRKAHPGLPVENT

SEQ ID NO: 16792 - protein, 446 aa, Moorena sp.
VRVFVKNIRGEPLMPCSPRKSRMLLKEKKAKIIQHRPFTIQLTMATGETIQENHLGIDVGSKHVGVAITSEEKVFAKGEIELRQDVKSLLETRKIYRRSRRSRKTRYRRCKFTYKSKRIYDIKKKKWIKKKVQFESTRPKGWLPPSIQSRVNNTFYWIDQYSSLLPDCQLHIEVGKFDVQKMMNPDIKGKEYQEGDVFGYYDVRYFVLARDKYTCQVCKKKNKIFHTHHIIYRSHGGSDRADNFITVCTDCHTPENHQKGEIFWEWMRKKKKTKQYKEPPFMNSLRIRIFNRYPDAAVTYGSVTTPHRKELKLEKTHYNDAIAITGIEKIKTNPTELFLIKQIRKKKRSLHEAIARKGRKEKNTTQKRNEKNTITSKGFFLNDEVKTACGNRGFISGFTGKTACYVKSMEGEYIVIKGKSHKQQLLKSLSAIRHNGNWQYQIKRKA

SEQ ID NO: 16793 - protein, 418 aa, unidentified; identical to SEQ ID NO: 15678
  REGION 1..418: note = Human gut metagenome

SEQ ID NO: 16794 - protein, 368 aa, Geobacillus sp.; identical to SEQ ID NO: 9251

SEQ ID NO: 16795 - protein, 389 aa, Moorena sp.
LELKVDPGSKTTGIALVIHGKNKRKVVVGINLQHRGQSIKNRLLQRRGVRRSRRNRHTRHRESRFLNRHRRDGWLPPSLMSRVHNIETWAKRIQRLSPLSFCAVETVRFDMQKMQDPEMSGVEYQQGELLGYEVREYLLEKWGRKCAYCGKENVPIEVEHIQPKSKGGTNRISNLTLACRECNEKKRDQNVREFLKRKPGALERILRDAKAPLKDAAAVNATRLVCGNAVQSIGLPSTFWSGGRTKKNRISQGHPKDHWIDAACVGETGEKIHLPSLRVKSVKATGHGDRQLCLVDKHGFQRSKAMPIRVVNGFKTGDIVVAHVTTGKKIGIYRGKVAVRTSGFFNVSTENGVVQGISHRFCRKQHNADGYSYLCCRDGAGSGQLGVGM

SEQ ID NO: 16796 - protein, 431 aa, unidentified; identical to SEQ ID NO: 6299
  REGION 1..431: note = Human gut metagenome

SEQ ID NO: 16797 - protein, 331 aa, Anoxybacillus sp.
VVGSASVLHITSIYNMVEENMTCFMQRKGENPMVFVLDTNKRPLAPCHGAVARKLLKQGKAAIYKRFPFTIILKKSVDESENETTYRLKIDYGSRHTGLAILRGQEVVWLGQLDHRTDIKERIDKRRAFRRARRNRKTRYRKPRFLNRKRKEGWLPSSLESRVQNIQTWVNRLKKLCPIGYISYENAKFDTQLMRNPEINGVEYQQGTLQGYEVREYLLEKFGRKCCYCGKENVPLEVEHIIPKSRGGTDRVDNLCLACHDCNQRKGSKTAEEFGYPHIQKQVKESLKDASAINSTRWKAYEVLKQTGLDVECGTGARTKMNRIRLDLPKT

SEQ ID NO: 16798 - protein, 420 aa, unidentified; identical to SEQ ID NO: 3884
  REGION 1..420: note = Human gut metagenome

SEQ ID NO: 16799 - protein, 433 aa, Lactobacillus sp.; identical to SEQ ID NO: 16527

SEQ ID NO: 16800 - protein, 338 aa, unidentified; identical to SEQ ID NO: 10776
  REGION 1..338: note = Human gut metagenome

SEQ ID NO: 16801 - protein, 402 aa, unidentified
  REGION 1..402: note = Human gut metagenome
CRRQRRAKANGTISKKCVKQTTAQNGSVSKRAKDIGVIKRRLPGCEKDVLCIGIKNKETKFTNRTRPEGWLTPTANQLLQTHINLVKKIQKFLPISDVVLEVNKFAFMRLDNPNIQKWQYQQGPLYKKESLESAVSEIQEHHCLFCKKPIDHYHHVVPQHKNGSNTIGNIVGLCAKHHDLVHKDSAWEKKLAQKSTGLNKKYGALGVLNQIIPTLTNELSSLFPKHSFVTNGKSTYDYRAAHGVSKDHWLDAYCIACSVLPSNVCDSNINNHMPYELKQFRRHDRRVLNNENMNRVYTLNNKAVAINRHKAKDQKTVSLEKFRKEHPDDVCKLKVKEHHPTYRNMNRNFPGSVFLVGKQIHVMQGIASSKDGKATKYNDTSATAIAAGKCKFVAKNTGILFV

SEQ ID NO: 16802 - protein, 518 aa, unidentified; identical to SEQ ID NO: 10514
  REGION 1..518: note = Human gut metagenome

SEQ ID NO: 16803 - protein, 431 aa, unidentified
  REGION 1..431: note = Human gut metagenome
MDAWDIIVVLNKRGKPLMPCSPAKARLLLKEKKAIVKRRTPFTIQLTIATGESKQPVTLGVDAGYKHVGLSASTEKAELYASEVELRQDITDLLSARRALRQSRRNRKTRYRAPRFDNRIRTKRKGWLAPSVENRINAHLSRIEAVLRLLPVTKITVETASFDMQLLKNPDISGKEYQEGEQLGFWNVREYVLFRDRHVCQHCYGRSKDPVLNVHHLESRRTGGDSPGNLITLCETCHKALHRGEITLKTKRGQSFRAEAFMGIMRWEVQNRLKASHPELEVNNTYGYRTKHARIANGIAKSHCADAFCIAGNLGAERLGEFFFQKQTRRNNRQIHKLSILKGGIRKRNQAPFEVNGFRLFDKVACQGEEGFIFGRRSSGYFDVRKLDGTRISAGISYKKLHLLEKRRTYLTEIRKEEALPPLPEGRGLRA

SEQ ID NO: 16804 - protein, 426 aa, unidentified
  REGION 1..426: note = Mouse gut metagenome
MQVYVLNKHGQPLMPCSPAKTRRLLEAGKAKVIKRTPFTIQLLYGSTGYKQTIIHGVDAGSKTIGMSASTKSAELFAGEVTPRNDVVKNMSTRREFRRARRNRKTRYRKPRFNNRVRSKHKGWLAPSVEVKIQEHITAIQKVCSILPISKVVVETAEFDLQLLKAIADGKPVPEGEDYQKGEMLGQYNVRQYVLWRDGYTCQCCGAHGDGVKLHVHHKESRKVGGNAPDNLVTLCDKCHKGFHEGIISLGQLGKRDRKATRDAAFMGIMRKTLMERLRAALPVPVVETKGYITKGTRVELLKLPKSHINDALAIVQGKHGFGITEPTTITRADRQYTVKPVRHHNRQLHKAAILKGGIRKSNQAAKYVKGFRLFDKVLYQAQECFIWGRRTSGSFLLRTLDGAKVKDGVGAKYLKLLERSSNYLIA

SEQ ID NO: 16805 - protein, 434 aa, Anoxybacillus sp.; identical to SEQ ID NO: 3421

SEQ ID NO: 16806 - protein, 470 aa, unidentified; identical to SEQ ID NO: 15353
  REGION 1..470: note = Human gut metagenome

SEQ ID NO: 16807 - protein, 420 aa, unidentified; identical to SEQ ID NO: 15458
  REGION 1..420: note = Human gut metagenome

SEQ ID NO: 16808 - protein, 296 aa, unidentified
  REGION 1..296: note = Human gut metagenome
MPKVYVLNRHGRPLMPCTPAKARHLLDAGKAKVRHRTPFTIQLLYGSTGYTQEVILGVDAGSKTIGLSAATETEELFSAEVKPRNDVVELMSARRQFRRARRNRTTRYRKPRFDNRVRSKHKGWLAPSVEVKIQEHMTAIRRACAILPVSKVVVETAEFDLQLLKAVAEGKPVPQGEDYQKGEMYGHYNVRQYVLWRDSYTCRICGAHGSVRKGVPLHVHHLESRRVGGDAPDNLVTLCTACHDKLHKGIIMVADIKKRKRRSTRDTTFMGIMRMTLLRRLWEQLPVPVVETRGYI

SEQ ID NO: 16809 - protein, 472 aa, unidentified; identical to SEQ ID NO: 8142
  REGION 1..472: note = Human gut metagenome

SEQ ID NO: 16810 - protein, 442 aa, unidentified
  REGION 1..442: note = Human gut metagenome
MVTVQQNTHHLPFGRVFIRRNLFMVYVISQDSKPLMPCSNPIARLLLKQGKAKVKRREPFTIKLIYETTDYTQDLTLGVDTGSGTIGAAVSKDNGDIVYMSEVVVRNDITDKMTQRAKYRRNRRNRKTRYRKARWLNRSNSIKKDRFSPTMQSKLHSHVKEIEYIQSILPITEMVFETGQFDMHLMKNPSLANPKVRPWGYQKGTNYGFENTKAMVLNRDNYTCQCCKGKHKDSKLEVHHIVFRSQGGSDEESNLITLCHTCHKDLHSGKINLKLSGKVKGNLKYATQMNSIRKQLFRLYPNAIETFGYVTKANRLHLGVDKEHYYDACTIATQGNAFNVKSDLYKKKCVSDGDFQKTKGIRSEQPIVTDKICGFRKFDKVRYFGKDYFIKGRMSTGYAILMDIDGNKIDFSTMPRGYKTPKLSNCKRITARSTVMTQVKVV

SEQ ID NO: 16811 - protein, 441 aa, unidentified
  REGION 1..441: note = Human gut metagenome
KANGTAVFTAHLETRNKEVPKLMQDRKKARRARRTNGRRCRRQRRAKANGTISKKCVKQDTAQSKNPSKRAKEIGVIKRHLPGCKKDVLCVGIKNKEAKYTNRARLEGWLTPTANQLLQTHINLVKKIQKFLPISDAVLEVNKFAFMRLDNPNIQKWQYQQGPLYQKGSLENAVSEMQEHHCLFCEKPIEHYHHVVPKSENGSNTIANIVGLCAEHHNLVHKDVAWQEKLVEEKTGLNKKYGALSVLNQIIPALTKELSFLFPKHSFMTNGKSTHDYRAAHGISKDHWLDAYCIACSVLPIDVCDSTINNCVPYELKQFRRHDRRALNNENMNRVYTLNDKVVATNRHKATEQEAASLEEFRKEHPNDVCKLKVKEHHPTYRNMNRNYPGSVFLVGKQIHVMQGIASSKDGKATKYNDTRATTIAAGKCKFVAKNSGILFV

SEQ ID NO: 16812 - protein, 340 aa, Anoxybacillus sp.
MVFVLDTNKCPLAPCHEAVARKLLKQGKAAIYKRFPFTIILKKSVDESENETTYRLKIDYGSRHTGLAILRGQEVVWLGQLDHRTDIKERIDKRRAFRRARRNRKTRYRKPRFLNRKRKEGWLPPSLESRVQNIQTWVSRLKKLCPIGHISYENAKFDTQLMRNPEISGIEYQQGTLQGYEVREYLLEKFGRKCCYCGKENVPLEVEHIIPKSRGGTDRIDNLCLACRDCNQRKGNQTAEEFGCPHIQKQVKESLKDTSIINATRWKVYEVLKQARLDVECGTGARTKMNRIRLGLPKTHYFDACCVGESTPNHLYFKTKEVLFINAKGRGSRSRTNLDR

SEQ ID NO: 16813 - protein, 431 aa, unidentified
  REGION 1..431: note = Human gut metagenome
MPDKVYVISRLGHPLMPCSPAKARHLLDDKKAKVVKRMPFTIRLLYGSTKYIQPIILGVDAGSKTIGLSASTAKEEVFAAEVMPRNDVVENLSTRREFRRARRNRTTRYRKPRSDNRVRSNHERWLAPSVKVKIQEHITSIKRVCTILPISKVVIETAEFDLQLLKAIQEGKTIPEGEDYQKGEMYGSYNVCQYVLWRDNYTCICCGVRGTPKNPVRLHVHHFESRKYGGNAPDNHGTLCDDCHKKFHLGIITDVKLKTRRRQSTRDAAFMGIMRKTLMWRLRTELFIPVAETKGYITKATREKLLVLPKSHTRDALAIAQGRHGFGIKEYAYVEPANHIYTVRPVRHHNRQLHKASILKGGIRKRNQASKYVFGFRLYDKVLYQGKACFVWGRRTSGTFLLRTIDGIKVKDGVSYRNLTLLERSSNYLIA

SEQ ID NO: 16814 - protein, 518 aa, unidentified; identical to SEQ ID NO: 2751
  REGION 1..518: note = Human gut metagenome

SEQ ID NO: 16815 - protein, 423 aa, Moorena sp.
MRVFVLNKNRQPLDPCKPARARIILSKGKAKVYRRYPFTIILTEEIEEPITHGSQLKIDPGSKTSGLAIIQNNRVVWGCELTHRGFQIRDALTSRRQLRRARRHRKTRYRQPRFLNRTRPKGWLAPSLMSRVHNILTWVKKLTRLCPITGLYQELVRFDTQKLQNPEISGIEYQQGTLYGYELREYLLEKWNRKCAYCGAKGTHLEIEHIKPLSKGGSNRVSNLAIACHSCNHAKSNQEIEQFLSGKPEILKRILSQAKRPLSDAAAVNTTRWKLYHELKLFGLPVEVGSGGLTKFNRCRQNLPKTHWLDAANVGKVDTLIVEDYKPLLVAAKGHGTRQICRINKYGFPIRYCSRVKIHKGFQTGDIVRAVVTKGKKIGTYVGRVATRKSGYFNISTKSGMVQGISHKYCQFIHRKDGYAYTD

SEQ ID NO: 16816 - protein, 520 aa, unidentified; identical to SEQ ID NO: 9945
  REGION 1..520: note = Human gut metagenome

SEQ ID NO: 16817 - protein, 442 aa, unidentified; identical to SEQ ID NO: 2903
  REGION 1..442: note = Human gut metagenome

SEQ ID NO: 16818 - protein, 423 aa, Arthrospira sp.; identical to SEQ ID NO: 3521

SEQ ID NO: 16819 - protein, 334 aa, unidentified
  REGION 1..334: note = Human gut metagenome
LRVISFFKTKGCRPSRVAAFFFCLVGVVAHMLEINKFAFMRLDNPNVQKWQYQQGPLYQKASLEEAVSEMQEHHCLFCKKPIAHYHHVVPQSENGSDTIGNIVGLCTKHHDLVHKNTAWQKKLAKKKTGLNKRYGALSVLNQIIPALTKELSFLFPKHFFATNGKSTYDYRAAHGVSKDHWLDAYCIAGSVLPNDACDNNINSHVPYELKQFRRHDRRALHKENMGRVYTLNGKSVATNRHKAIKQTTDSLEEFRQRQPNDVCKLKVKEHHPEYRNPKRNFPGCVFLVGKHTHVMQGTSGSHNGKADGYYDTNGNSYSSGKCKFVAKNKGIVFA

SEQ ID NO: 16820 - protein, 431 aa, unidentified; identical to SEQ ID NO: 2915
  REGION 1..431: note = Human oral metagenome

SEQ ID NO: 16821 - protein, 239 aa, unidentified
  REGION 1..239: note = Human metagenome
MTDDYKPYKWQYQKSNRLDENLRKAAIIRDNYKCQECGKSNCKLEIHHIRARKYSGADTIGNLITLCSKCHQKTEGKEQDFEDKYFKIIDSKPKRFDYAMHVMQGKNYLRNKISELGLLHLTNGGETANKRIEWNIEKSHSNDAICIADGIPDTCNIKEWIIKPMRRKSKAKTDNVLGIKHRDLVSYTYKNGETHAGYVTALYPKQLALNFQSRIKHCKKVNARKCRLLWQFNKIYWLE

SEQ ID NO: 16822 - protein, 428 aa, unidentified
  REGION 1..428: note = Human metagenome
MLVYVLKQNGQPFMPTERFGRVRRLLKEGKAKVVRREPFTIRLLYEPETNVVQECYCGVDTGSKHIGVAVVGNDKVLYQSQTELRNDIKKKMDRRRAFRQNKRFRKTRYRKCRFLNRRNSIKEGRLPPSVKHKVQAHIDEIEFCKKILPVLDENIILEVSQFDTSLMKSPSLINEKVRHWGYQQGFNYGYSSRRSAILHRDNYTCQCCGKKNCRLEVHHIKFKSNGGTDDEENLITLCKECHDGVHAGTVVLNKKPKKNKNLKYATHMSIIRSRLLREYPNAIETFGFVTSENRNHLQLPKDHYIDACVIASGGLEFKPSDVIYYKRRVAKGSYKLCRGARGEIPLTTGKIHGFRRFDKVKYFGKEYFIESRRSIGTVELMDVYGTKIDFSFMPRGYKTPKLVNCKRISSRVSCLCMKKCLKTYNTME

SEQ ID NO: 16823 - protein, 442 aa, unidentified; identical to SEQ ID NO: 3161
  REGION 1..442: note = Human gut metagenome

SEQ ID NO: 16824 - protein, 431 aa, unidentified
  REGION 1..431: note = metagenome
MPNKVYVINKHGRPLMPCSPAKARHLLDAGKAKVKKRTPFTIQLVYGSSGYTQEVILGVDAGSKTIGMSASTTKEELLSAEVKPRNDVVDLLSTRREFRRARRNRKTRYRKPRFDNRVRSKHKGWLAPSVEVKIQEHITAIRRVCGILPVSKVVVETAEFDLQLLKAIADGKPVPQGEDYQQGEMYGHYNVRQYVLWRDNYTCQCCGAHATKKKEVRLHVHHLESRKVGGDAPDNQVTLCESCHEKLHKGLITEKDFKKRKRRSTRDATFMGIMRKTLMQRLCSELPIPVIETRGYITKATREKLLVLPKSHTNDALAIAQGKHGFNVGYLPGILQIDKIYTIRPVRHHNRQLHKATILKGGIRKSNQAEKYVFGYRLFDKVQFNGQDCFIWGRRTTGIFTIKTINGKMIKDGISFKKLKPVEKSTSYLIA

SEQ ID NO: 16825 - protein, 529 aa, unidentified; identical to SEQ ID NO: 10867
  REGION 1..529: note = Human gut metagenome

SEQ ID NO: 16826 - protein, 420 aa, unidentified; identical to SEQ ID NO: 6017
  REGION 1..420: note = Human gut metagenome

SEQ ID NO: 16827 - protein, 569 aa, unidentified
  REGION 1..569: note = Human gut metagenome
MVYVVANDGQPLMPTERHGKVCRMLKSGMAKVVKKCPFTIQLQYESERNVQPVALGIDAGSKHVGVSATTKAKVLYESDVELRDDIVKLLATRRQLRRRRRSRKTRYRPARFDNRRRKEGWLAPSIRQKIESHLTVVANVCKILPVSQIIVETASFDIQKIKNPDIQGIEYQQGEQMDFWNIREYVLFRDGHTCQCCKGKSKDKVLNVHHIESRKTGGNAPNNLITLCETCHKGYHNGTVTLPKNIKRGMKFKDAAFMGIMRWTFYNTLKEQYEPDIPVHYTYGYITKNTRINHNLLKGHCIDARCISGNPDAVSDGTYYYQKKVRCHNRQIHKQTILKGGIRKSNQAEYLVRGFRLFDKVRYQGREYFIFGRRKSGFFDIRTLSGEKISSVVCSDDVHLDKFMEEKTVLFVNSKKIDVSSKTTDLSGLLYHQMCSIAENNAINHIPFTYRVTLLIDDITCYEDIPYFVYWIEYGKGYGISITATLQSLEQLNCAYEETCLAILEHIDKLVFLSDDFLLCFDKQLSKYLEFKYGNGFLSELEDMTKEEIMVCITDKAYKILQRKENLWQ

SEQ ID NO: 16828 - protein, 339 aa, unidentified
  REGION 1..339: note = Human gut metagenome
LLSARRALRQSRRNRKTRHRAPRFNNRLRTKRKGWLAPSVENRINAHLSRIEAVLRLLPVTKITVETASFDLQLLKNPDISGKEYQEGEQLGFGNIREYVLCRDGHVCQHCYGGSKDPVLNVHHLESRRTGGDSPDNLLTLCETCHKALHRGEITLKTKRGQSFRAETFMGIMRWEVLNRLKASHSELKVHNTYGYWTKHARIANGIAKSHCADAFCIAGNLGAERLGEFFFQKQTRRNNRQIHKLSILKGGIRKRNQAPFEVKGFRLFDKVAYKGEEGFIFGRRSSGFFDVRKLDGTRISAGISYKKLHLLEKRQTYLMEIRKEEAFPPLPEGRGLRA

SEQ ID NO: 16829 - protein, 387 aa, unidentified
  REGION 1..387: note = metagenome
LKVFVLNMRGRPLMPCSPAKARHLLKAGKAVVRRRTPFTIQLRIATGETKQSVTLGVDAGAKHVGLSAATEKEEVFASEVELRQDITGLLAARLSLRRERRQRKTRYRAPRFLNRVRSKHKGWLAPSVENRIQAHMSRIDAICGLLPVTKIVIETASFDIQKIKHPDVEGTDYQQGDQLGFWNVREYVLFRDGHVCQHCHGHAKDKILNVHHLESRQTGGDAPNNLITLCETCHKAYHAGKIKLKVKRAQSFRAEAFMGIMRWTLLDRMRKAHSGLPVENTYGYLTKNTRITLGLPKTHCVDAYCIAGNLKAVRRGVCLHQRQVRKHNRQIHKCTVLSKTLKDGTKIGYRKLNQTPHLVKNFRLFDKVRCLGQTGFIFGRRSSGYFD

SEQ ID NO: 16830 - protein, 428 aa, unidentified; identical to SEQ ID NO: 5055
  REGION 1..428: note = Human gut metagenome

SEQ ID NO: 16831 - protein, 424 aa, Coprobacillus sp.; identical to SEQ ID NO: 13009

SEQ ID NO: 16832 - protein, 443 aa, unidentified
  REGION 1..443: note = Human gut metagenome
LTKDENRPSGRTTGLRAEQAEPAGIRKGDTLKVFVLNMRGKPLMPCSPAKARHMLKAGKAVVVRRTPFTIKLTIATGETKQDVTLGVDAGARHVGISATTEKEEVFASEVALRQDITGLLADRLAFRRARRNRKTRYRSPRFNNRVRSKHKGWLAPSVENRIQAHMSRIEAVCRLLPVTKIVIETASFDIQKIRNPEVEGTGYQQGDQLGFWNVREYVLFRDSHICQHCRGRSKDPILNVHHLESRKTGGDAPNNLITLCETCHKAYHAGKIKLKVKRGQSFRAEAFMGIMRWTLLDRVRKTHPKLPVENTYGYLTKHKRIALGLPKTHCADAFCIAGNLKALRRGDFLFQQQTRKHNRQIHRCSILKGGVRKLNQAPFLVKGFRLFDKVRIGGQIGFVFGRRVRGTFNIRRLDKTVIGTDINCKKLSLLETRKTFLTELRKE

SEQ ID NO: 16833 - protein, 471 aa, Moorena sp.
  SITE 471: note = misc_feature - Xaa can be any naturally occurring amino acid
MQKLKERNTYTPTVIPQDCSNCGLSLNSPFEVRDSVASLKTSFNSSDAALTAREQAGQNLRVSVVNVLNKRGVPLMPCKPQKARRLLKEGKAKVLKRTPFTIQLLYTTGESKQNLTLGVDAGYSNVGLSVVSADKELYSAELKLRTDMVKLNSERATYRRTRRSRKTWYRKARFLNRKKPQGWLAPSIQNKLDTHLKIIERIRGILPISNVVIEVAAFDTQKIQNPEITGVEYQQGELVGYKIREYLLEKWKRKCAYCGEKDIPLEIEHIIPKSRGGSSRISNLTISCNKCNLKKGNKTAEEFGHQEIQKQAKESLRATVFMNNVRWKLVNLLGCKWTYGYITKHNRIKLGLKKSHSNDAFIIAGGSTQKRNDQIFWIKQVRKCNRKLFKGKRSHLKNTAPRFVKEFQRFDKVLWKNIECFIFGRRSTGYFDIRMLNGHKLSSSAKAKDLKLLETFKTLLTEKMRFLPYLX

SEQ ID NO: 16834 - protein, 512 aa, unidentified
  REGION 1..512: note = Human gut metagenome
MSTVYVLNSDGKPLMPTTRCGHVRYLLKKQKARVVTSNPFTIQLLYETDDVVQPLYLGIDPGRTNIGVAVVKADGTAVFTAHLETRNKEIPKLMKKRKDSRRARRTNGRRCRRQRRAKANDTLSTKRVKQTTAQNGSASKRAKEIGVIRRRLPGCEKDVLCIGIKNKEAKFNNRTRPEGWLTPTANQLLQTHINLVKKIQKFLPISDVVLETNKFAFMQLDNPNIQKWQYQQGPLYKKESLESAVSEMQEHHCLFCKKQIDHFHHVVPQHKNGSNTIGNIVGLCAKHHDLVHKETAWQEKLAKKKTGLNKKYGALGVLNQIIPALTKELGVLFPKHFFVTTGKSTYDYRAAHGVCKDHWLDACCIACSVLPNDVCDSSINNRVPYELKQFRRHDRRVLHKENMNRVYTLNSKKAATNRHKATEQESASLEEFRKEHPDDVCKLKVKEHHPTYRNMNRNYPGSVFFVDKQVHVMQGIARSKDGKATTYKDTNANLITAEGCKFVAKNSGILFV

SEQ ID NO: 16835 - protein, 435 aa, Moorena sp.
MQNYVFVIDTKNQPLNPISPKKARRLLDKGKAAVFRMYPFTIILKTAIDNPTISPCQIKIDPGSKVTGFALVQNNQVIWGMELEHRGGLIKKKLESRKAVRHRRRNRNTRYRKPRFLNRRRKEGWLAPSLEHRVLTIETWVKRLIKFCPINQVWVERVKFDTQKMQNPEINGVEYQQGELAGYEVKEYLLEKWGRECTYCGKQSVPLQIEHIHPKSLGGSNSAKPTLRERVSNLCLACEKCNQRKGNKPIEEFLKKKPNLLQKIKTKTKQPLPDAAAVNTTRNKLVKVLRSIKFVVTGTGAQTKYNRTRLGLPKQHWIDAACVGNIETLVLKTSQPLLVTCKGQGGRQKAALNKYGYPIRHNPLKPIKGWLTGDIAKHQKLGIGKVTPRSKGSFGFTPLGMKGYKSCFPQDISAIHRKDGYTYSFCQHMPEFTWK

SEQ ID NO: 16836 - protein, 269 aa, Aphanothece sp.; identical to SEQ ID NO: 3170

SEQ ID NO: 16837 - protein, 443 aa, Shewanella sp.
MAVFVLSKNKKPLMPCSEKRARLLLSKKQAVVHKTYPFTIRLKKQTGNATQPLQLKIDPGSRYTGVALVMDLPTLMRALCLFELQHRGHQISEALTQRRAFRRRRRNQLRYRPARFDNRTRKDGWLPPSVQHRLDTTLALVQKLKRLCPVSAIVFERVKFDMQKMLNPDIQGVEYQQGTLFQYEVREYLLERHQRTCAYCAGESLDPILEVEHKHPRAQGGTNSIHNLVIACRTCNQAKGSLTLSEFLSTLKNTKLDKVRKVKITQILAGKVFRLKDAGAVNACRNQLGRDLASQQLPVSTGTGAQTKYNRMRYQLPKTHALDALMTGELTKPVEGWSRPTLVVKAMGRGCYQRTRLDQYGFPRGYLQRKKTYFGFQTGDLVISTVTKGKKQGIHVGRVAVRDSGYFNVQTKTGGVQGVSYKTCQIIQRNTGYHYYFNSKVAH

SEQ ID NO: 16838 - protein, 459 aa, Petrotoga sp.; identical to SEQ ID NO: 12917

SEQ ID NO: 16839 - protein, 396 aa, unidentified; identical to SEQ ID NO: 4508
  REGION 1..396: note = Human gut metagenome

SEQ ID NO: 16840 - protein, 424 aa, unidentified; identical to SEQ ID NO: 6292
  REGION 1..424: note = Human gut metagenome

SEQ ID NO: 16841 - protein, 408 aa, unidentified; identical to SEQ ID NO: 5302
  REGION 1..408: note = Human gut metagenome

SEQ ID NO: 16842 - protein, 442 aa, unidentified
  REGION 1..442: note = Human gut metagenome
MVTVQQSTHHLPFGRVFIRRNLFMVYVISQDGKPLMPCSDPIARLLLKQGKAKVKKREPFTIKLTYETTNHTQGLTLGVDTGSGTIGTAVSKDNGDIVYMSEVVVRNDITDKMTQRAKYRRNRRNRKTRYRKARWLNRASSIKKDRFSPTMQSKLHSHVREIEYIQSILPVTEMVFETGQFDMHLMKNPSLANPKVRPWGYQKGANYGFENTKAMVLNRDNYTCQCCKGKHKDSKLEVHHIVFRSQGGSDEESNLLTLCHTCHKDLHSGKINPKLSGKVKGNLKYATQMNSIRKQLFRFYPNAIETFGYVTKANRLHLGVDKEHYYDACTIATQGNAFNVKSNLYKKKCVSDGDFQKTKGIRSEQPIVTDKICGFRKFDKVRYFGNDYFIKGRMSTGYAILMDIDGNKIDFSTMPRGYKTPKLSNCKRITARTSQMLQIMAI

SEQ ID NO: 16843 - protein, 461 aa, Parasutterella sp.; identical to SEQ ID NO: 3646

SEQ ID NO: 16844 - protein, 422 aa, Petrotoga sp.; identical to SEQ ID NO: 5403

SEQ ID NO: 16845 - protein, 420 aa, unidentified
  REGION 1..420: note = Human gut metagenome
MQYVYVLNKHGEPLMPCSPRKARLLLKQKKACVIKRTPFTVKLLHGSAGYKQPVTLGVDAGSKHIGISATTEKHELYREEATPRNDVVDLLSARRAFRRSRRNRKTRYRAPRFNNRVHSKHKGWLAPSVEVKIQEHITLIKHVFRILPVTLVRVETAEFDTQRLKAMLEGKPLPVGTDYQLGEMYDEYNVRQYVLKRDNYTCQCCGAHSTKTKGVKLHVHHIETRRTGGNAPNNLITLCKACHKALHAEKVTLDGKKRGKPLKDAAFMGIMRKTLMERLRKELKIPVQGTYGYITKYLREKNGIPKSHTNDARCISKNPLAIPCDTCYYTKVVRHHNRQLHKATILKGGIRKANQAPYIVKGYRLWDKVAYNGTECFITGRRTSGYFALKELDGTVVSNSISYKKLRLLEAATNYITERK

SEQ ID NO: 16846 - protein, 422 aa, unidentified; identical to SEQ ID NO: 5333
  REGION 1..422: note = Human gut metagenome

SEQ ID NO: 16847 - protein, 414 aa, unidentified
  REGION 1..414: note = Human gut metagenome
MPCSPAKARLLLKEKKAIVVRRTPFTIQLTIATGETKQPVSLGVDAGYKHVGLSASTEKAELYASEVELRQDVSDLLSARRALRQSRRNRKTRYRAPRFDNRIRTKRKGWLAPSVENRINAHLSRIEAILRLLPVTKITVETASFDMQLLKNPDISGKEYQEGEQLGFWNVREYVLFRDGHVCQHCHGRSKDPVLNVHHLESRRTGGDSPGNLITLCETCHKALHRGEITLKAKRGQSFRAEAFMGIMSWEVLNRLKASHSELEVNNTYGYRTKHARIVNGIDKSHCADAFCIAGNLGAERLCEFFFQKQTRRNNRQIHKLSILKGGIRKRNQAPFEIKGFRLFDKVACKGEESFIFGRRSSGYFDVRKLDGTRISAGISYKKLRLLEKRRTYLTEIRKEEALPPLPEGRGLRA

SEQ ID NO: 16848 - protein, 447 aa, unidentified; identical to SEQ ID NO: 8397
  REGION 1..447: note = Human gut metagenome

SEQ ID NO: 16849 - protein, 431 aa, unidentified
  REGION 1..431: note = Human gut metagenome
MPNKVYVINKHGRPLMPCSPAKARHLLDAGKAKVKKRTPFTIQLVYGSSGYTQEVILGVDAGSKTIGLSASAETEELLSAEVKPRNDVVDLLSTRREFRRARRNRKTRYRKPRFDNRVRSKHKGWLAPSVEVKIQEHITSIKRVCRILPVSKVVIETAEFDLQLLKAIADGKPVPQGEDYQKGEMYGHYNVRQYVLWRDGYTCQCCGAHTTKKKEVRLHVHHLESRKVGGDAPDNQVTLCESCHEKLHKGLIAEKDFKKRKRKSTRDATFMGIMRKTLMQRLCSELPIPVIETRGYITKATREKLLVLPKSHTNDALAIAQGKQGFNVGYLPGIVQIDKICTIRPVRHHNRQLHKATILKGGIRKSNQTEKYVFGYRLFDKVQFNGQDCFIWGRRTTGIFTIKTINGKMIKDGISFKKLKPVEKSTSYLIA

SEQ ID NO: 16850 - protein, 414 aa, unidentified; identical to SEQ ID NO: 6490
  REGION 1..414: note = Lachnospiraceae bacterium UBA4265

SEQ ID NO: 16851 - protein, 443 aa, Anoxybacillus sp.; identical to SEQ ID NO: 5909

SEQ ID NO: 16852 - protein, 470 aa, unidentified; identical to SEQ ID NO: 2825
  REGION 1..470: note = Human gut metagenome

SEQ ID NO: 16853 - protein, 406 aa, unidentified
  REGION 1..406: note = Human gut metagenome
MVYVQDIDGSPLMPTTRYGKVRRLLKANKATVISLCPFTIKLLYKTSDYKQEIVLGVDAGTKHVGLSATTKSKELYASEVILRSDVVDLLSTRRELRRTRRSRLRYRKPRFMNRIKSKKDRWIAPSVYHKIDSHIRIIGFVYSILPVSKLIVEVAQFDTQKIKNPEISDKEYQKGDQLGFWNVREYVLTRDGHKCQHCKGKSKDPILNIHHIESRKTGGDSPSNLITLCETCHKEYHKGNIDLKVKRGKSLRDAAVMGIMKWKLYEELKSRYDNVSMTFGYITKYNRINHGIEKSHVSDAFVISGNFDSYRLGYYYKRKLVRRHNRQIHKMKILKGGIKKPNQAPFKVFGFRLFDKVRYQDNVYFVYGRRTSGCFNIRDIDGDNNKNPTFKKLTYISHGLISVETG

SEQ ID NO: 16854 - protein, 414 aa, unidentified
  REGION 1..414: note = Human gut metagenome
MPCSPAKARLLLKEKKAIVVRRTPFTIQLTIATGESKQPVSLGVDAGYKHVGLSASTDKAELYASQVELRQDITDLLSARRALRRARRNRKTRYRAPRFDNRIRTKRKGWLAPSVENRINAHLSRIEAVLRLLPITKITVETASFDMQRLKNPDISGKEYQEGEQLGFWNVREYVLFRDGHVCRHCHGRSKDPVLNVHHLESRRTGSDSPDNLITLCETCHKALHRGEITLKAKRGQSFRAQAFMGIMRREVLNRLKASYPELKVHETYGYLTKHARIANGIVKSHGADAFGIAGNLGAERLGEFFFQKQTRRNNRQIHKLSILKGGIRKRNQAPFEAKGFRLFDKVACQGEEGFIFGRRSSGSFDVRKLDGTRISAGISCKKLRLLEKRRTYLTEIRKEEALPPLPEGRGLRA

SEQ ID NO: 16855 - protein, 446 aa, Azotobacter sp.; identical to SEQ ID NO: 13678

SEQ ID NO: 16856 - protein, 414 aa, unidentified
  REGION 1..414: note = Human gut metagenome
MPCSPAKARLLLKEKKAIVKRRTPFTIQLTIATGESKQPVSLGVDAGYKHVGFSASTEKAELYASEVELRQDVSDLLSARRALRQSRRNRKTRYRAPRFDNRIRTKRKSWLAPSVENRINAHLSRIEAVLRLLPVTKITVETASFDMQLLKNPDISGKEYQEGEQLGFWNVREYVLFRDGHVCQHCHGRSKDPVLNVHHLESRRTGGDSPGNLITLCETCHKALHRSEITLKTKRGQSFRAEAYMGLMRWEVLNRLKTSHPGLEVHNTYGYRTKYTRIVNGIDKSHCADAFCIAGNLGAERLGEFFFQKQTRRNNRQIHKLSILKGDIRKRNQAPFEVNGFRLFDKVACKGEEGFIFGRRSSGFFDVRKLDGTCISAGISYKKLHLLEKRRTYLTEIRKEEVLPPLPEGRGLRA

SEQ ID NO: 16857 - protein, 456 aa, unidentified; identical to SEQ ID NO: 3956
  REGION 1..456: note = Human gut metagenome

SEQ ID NO: 16858 - protein, 408 aa, unidentified; identical to SEQ ID NO: 5302
  REGION 1..408: note = Human gut metagenome

SEQ ID NO: 16859 - protein, 268 aa, unidentified
  REGION 1..268: note = Human gut metagenome
LTFTTDGHKCQNPNCKHKDKKEQILKVHHIRYRSEGGSDRPENLITLCSKCHTPANHKKGKFLYDWCVNGKKVRGFKDATFMSMIRWYLVNELKSKHNNVSITYGYITKNHRIQNGIEKSHLNDAFAIAKGTNQARTKDRFLVIQDRLKNRSLEKFYDSKIIDIRTEKKVSGGDLNCGRSTRNKNLNTENLRKYRGVKISKGQRRIRKQKYFYQPNDLVKYDGKVYTVKGTQNEGKYIALKEIKKVPKVELLIPYVFKKGLNWSYGLC

SEQ ID NO: 16860 - protein, 371 aa, Moorena sp.
MSKVFVIDSEKRQLDPMHSAQARQLLRNKKAAVFRRFPFTIILKESKPESPVSPLRLKLDPGAKTTGIALVNDSTGEIVFAAELKHRGFAIRDALTSRRQLRRGRRNRKTRYRKPRFLNRTRPEGWLAPSLQSRVENIKTWVNKLRKFAPIKAISQELVRFDMQLMRNPEIQGEEYQQGTLAGYETREYLLEKWNRQCAYCGVKDVPFQVEHIHPRAKGGSNSIANLTLSCEKCNTKKGTKDIKEFLKKDPSKLTKILGQAKRPLADAAAVNTTRWALFKTLRETGLPVETGSGGLTKFNRSQQKLEKTHWLDATCVGKSTPKLIIKCVKPLLIISNGHGSRQSCRTDKFGFPNRHVPREKYILIFKLETS

SEQ ID NO: 16861 - protein, 419 aa, unidentified
  REGION 1..419: note = Human oral metagenome
MLVYVLKQNGQPFMPTERFGKVRRLLKEVKAKVVRREPFTIRLLYEPETDVVQECYCGVDTGSKHVGVAVVGNDKVLYQSQTELRSDIKGKMYRRRISRCNRRNRKTRYRKPRFLNRRNSIKKDRLPPSVKHKVQAHIDEVEFCKKILPVSDLILEVSQFDTALMKNPGLMNEKVKHWGYQQGFNYGYSSRREAVLHRDNYTCQCCGKKNCRLEVHHIKFKSNGGTDDEENLITLCKECHDGVHTGTVELNKKPKKSKGLKHATHMSIIRSRLFREYPNAIETFGFVTAENRNHLKLEKDHYIDACVIASGGLEFKELDVIYRKRRVSKGDYQVTRGVRGERKLPTGKIYGFRKFDKVKYFGKEHFIKGRMSSGFAGLMDIFGNEVDFDFMPKGSKTPKLSNCERISARRSILCIRERK

SEQ ID NO: 16862 - protein, 442 aa, unidentified; identical to SEQ ID NO: 2903
  REGION 1..442: note = Human gut metagenome

SEQ ID NO: 16863 - protein, 431 aa, unidentified
  REGION 1..431: note = Human gut metagenome
MPNKVYVINKHGRPLMPCSPAKARHLLDDGKAKVKKRTPFTIQLVYGSSGYTQEVILGVDAGSKTIGMSVSTTKEELLSAEVKPRNDVVDLQSTRREFRRVRRNRKTRYRKPRFDNRVRSKRKGWLAPSVEVKIQEHITSIKRVCRILPVSKVVIETAEFDLQLLKAIADGKPVPQGEDYQKGEMYGHYNVRQYVLWRDNYTCQCCGAHATKKKEVRLHVHHLESRKVGGDAPDNQVTLCESCHEKLHKGLIAEKDFKKRKRRSTRDATFMGIMRKTLMQRLCSELPIPVVKTRGYITKATREKLLVLPKSHTNDALAIAQGKHGFNASYLPGIAQIDKIYTIRPVRHHNRQLHKATILKGGIRKSNQAEKYVFGYRLFDKVQFNGQDCFIWGRRTTGIFTIKTINGKMIKDGISFKKLKPVEKSTSYLIA

SEQ ID NO: 16864 - protein, 420 aa, unidentified; identical to SEQ ID NO: 4588
  REGION 1..420: note = Human gut metagenome

SEQ ID NO: 16865 - protein, 427 aa, Oscillatoria sp.; identical to SEQ ID NO: 5140

SEQ ID NO: 16866 - protein, 504 aa, Moorena sp.
MIPGGDLQLPALSLTIKTKAKCVVGKTQAITTWPRKTLPIRGALKMQNYVLVIDTNKRPLNPISPKKARRLLDKGKAAVFRMYPFTIILKTAIASPTISPCQIKIDPGSKFTGFALVQDNQVIWAMELEHRGGLIKKKLESRRAVRRGRRNRNTRYRKPRFLNRKRPEGWLAPSNQHRVLTIQTWVKRLIKFCPVNEIWVERVKFDTQKMQNPEVSGVEYQQGELAGYEVREYLLEKWGRECTYCGKQNVPLQVEHIHPKSRGGSNRVSNLCLACEKCNQRKGNKPIEEFLKKKPSLLQKIKTKALSPLRDAAVVNTTRNKLVRILREMKPVVTGTGAQTKYNRTKLGLPKQHWIDAACVGGVETLTLKTSQSLLVICKGQGGRQKAALNKYGYPIRHNPLKPIKGWCSGDIAKNLLTGEFGRVNPRSKSNSFNYTVSGKKAISLHVKNLARVHRKDGYTYSFNESSTIPDIKKTRTITKNEANKNEPVNRMVLEYDEDGELWF

SEQ ID NO: 16867 - protein, 424 aa, unidentified; identical to SEQ ID NO: 8578
  REGION 1..424: note = Human gut metagenome

SEQ ID NO: 16868 - protein, 414 aa, Moorena sp.
MKVYVRNQDGAPLMPCTEAKARKLLRAGKARVVARSPFTIQLAWQCEGHVQDVTVGIDKGSSVTGISCVGNGAVLLAAEIHHRRDVKEKLDIRRTHRKSRRARTWYRPARFANRASSTRSGRLPPSIKANVEEVIRVVKQLPLPISRIVVEDVQVDIAQLNNPTLRGSRYQDPTRLDENLRIACLMRDGYTCRHCGKGNCRLEAHHIVYREHGGKDTLANLLTLCERCHDRVHDGTITLSVTGVSGHLDQIAQRSMQGKTYLYATLGASVPLTTVFGYATSAFRKRRGLAKTHTADALCVATLGSGEIVAPECPNTYQINFRPRQTRRQFHDLPRKGKGRVRYQVNEELAGFRKGDIVRVKGWWVKQVYSIYSPTATTQGRLAFARVTGEPPSALPKDCVLLERGRTVRWKPIQ

SEQ ID NO: 16869 - protein, 475 aa, unidentified
  REGION 1..475: note = Human gut metagenome
MVAVVTSTGKPLMPTSAYRARKLLKKGRAVIFKYRPYFTIQLVDRADGEVQEVEYKSDTGSVHVGISVCTEKKELLSEQRDLLENEPEHHNDRKKNRRTRRNRKRYRKPRFDNRKKKPQEGHEKWLPPTLLHKMEVQVRLFREFCRVVPVTSACFEMGKFDTQALKAVSKGEPVPEGEGYQKGERYGTDTLRAAIFLRDGHTCRFCGRSVKDGAILHVHHVGYWKGDRTNRPANLASACEQCHTPANHGKNGLLYGKEPEFKTLKDASYMTSVRWIMLDEIKKAAPGVQVSVTYGVTTKRKRQELHLPKSHVNDAFSMASFHPKKRSDTEYWKKIPRHDRVLQKFYDAVYLDTRDGSEKKGSELSNGRISRNHKKDSENLHQYRGHKVSKGHNSIRRGASSLKPGSIVMYKGEKMTVHGTHTRYVKGKDGKTAKKVNVQFTCPASDGKKSASLEKCTPVSRVYNTGWKRYWPDKK

SEQ ID NO: 16870 - protein, 442 aa, unidentified; identical to SEQ ID NO: 6360
  REGION 1..442: note = Human gut metagenome

SEQ ID NO: 16871 - protein, 406 aa, unidentified; identical to SEQ ID NO: 3980
  REGION 1..406: note = metagenome

SEQ ID NO: 16872 - protein, 456 aa, unidentified
  REGION 1..456: note = Mouse gut metagenome
MGTLHLLASWCPWRHSWQVSGFILAAILMGRRASWMPYVLNQHGHPLMPCSPAKARHLLKDGKAKLMKRAPFTIQLLYGSSGYRQDVTLGVDAGSKHIGLPAVPADGQEVFAAEVTPRNDIVGNLSTRREFRRARRNRKTRYRKPKFNNRVRSKHKGWLAPSVEVKIQEHITVICRVCRLLPVTKVVDETAEFDLQLLKTIADGKSVPQGEDYQKGEMLGSYNVRQYVLWRDGYTCQCCGKHGHGVKLHVHHKESRKTGGDAPDNQTTLCDSCHEKFHKGVITLDKLKKRGRQSTRDAAFMGIMRKTLMLRLRQQLDIPVCETRGYITKYTRGERLHLPKSHINDALAIAIGPNGAQSVARADQRYTIKPVRHHNRQLHKATTLKGGIRKSNQAPKYVKGFRLFDKVLFEGMECFIWGRRSSGSMLLRRLDGSKVKDGAGFRKLTLLERSSYYLVS

SEQ ID NO: 16873 - protein, 422 aa, unidentified; identical to SEQ ID NO: 5333
  REGION 1..422: note = metagenome

SEQ ID NO: 16874 - protein, 424 aa, unidentified; identical to SEQ ID NO: 3434
  REGION 1..424: note = Human gut metagenome

SEQ ID NO: 16875 - protein, 443 aa, unidentified
  REGION 1..443: note = Human gut metagenome
VVKANGTAVFTAHLETRNKEVPKLMQDRKKARRARRTNGRRCRRQRRAKANGTISKKCVKQDTAQSKNPSKRAKEIGIIKRRLPGYKKDVLCIGIKNKEAKYTNRTRPEGWLTPTANQLLQTHINLVRKIQKFLPISDVVLEVNKFAFMRLDNPDIQKWQYQQGPLYQKGSLENAVSEMQEHHCLFCDKPIDHYHHVVPQSENGSNTIANIVGLCAEHHNLVHKDAAWQKKLAEEKVGLNKKYGALSVLNQIIPALTNKLSVLFPKHFFVTAGKSTHDYRATHGVSKDHWLDAYCIACSVLPSDVCDSNINNHMPYELKQFRRHARRALNNENMNRVYTLNDKAVAINRHKATEQEAASLEEFRKEHPNDVCKLKVKEHHPTYRNMNRNYPGSIFLVGKHVHIMQGIAGSKDGKATTYKDSNANSITASKCKFVAKNSGILFV

SEQ ID NO: 16876 - protein, 442 aa, Anaerostipes sp.; identical to SEQ ID NO: 2903

SEQ ID NO: 16877 - protein, 430 aa, unidentified; identical to SEQ ID NO: 4504
  REGION 1..430: note = Human gut metagenome

SEQ ID NO: 16878 - protein, 415 aa, unidentified
  REGION 1..415: note = Human gut metagenome
MVYVLDKNGQTLMPTDRHRKVRLMLQSGQAKVIKRCPFTIQLNYDSGHQTQEISLGIDAGSKHIGVSATTKIKVLYEADVELRNDIVDLLSSRRELRRGRRNRKTRYRQAKFNNRRCGNGWLAPSIRQKIGTHLTVVENICKILPISRIMVETASFDIQKIKNTDIQGAEYQQGDQLGFWNIREYVLFRDNHTCQCCKGKSKDKILNVHHIESRKTGGNAPNNLITLCEICHTGYHKGAVQLPKTVKRGMRFKDAAFMGIMRWAFYEALKQQYEPVALVHNTYGYITKHTRIAYNLPKEHYVDARCISGNPDAFPNGEYYYQKKVRCHNRQIHKLTILKGGIRKQNQATYLVKGYRLFDKVSYQGKGYFVFGRRQSGFFDIRTLSGEKVNKGSLSCKKLKFIATRTYYLTERRAV

SEQ ID NO: 16879 - protein, 442 aa, unidentified; identical to SEQ ID NO: 2903
  REGION 1..442: note = Human gut metagenome

SEQ ID NO: 16880 - protein, 444 aa, unidentified
  REGION 1..444: note = Bioreactor metagenome
VGGVLDAKSLYNIVDGIITAVRLIYPEKDFNLLIYVISKNNNPLMPTNRFGRVRRLLKDKMAKVISYEPFVIQLLYDSEEYVQPITIGVDAGSKTIGISVSTETKELFVAEVQLRNDIVNLLSTKRQYRRIRRSRLRYRKPRFLNRVKSKHKGWIAPSIEQKINSHIKIIDKIHQILPISKIIVETAQFDIQKIKNLDIDGIEYQQGEQFGFWNVREYVLFRDNHQCQGKKGCKNKIFQVHHLESRKTGGNRPDNLITLCKECHSNYHEGKLKLDKKKKNIFRDASHMNIMRWKLFKQLKDKFETVECTYGYITKFNRIKNSLEKSHINDAWCISGNFKAKRLNLYFYIKKVRCHNRQIHKAKILKGGKKKLNKSSYLVKGFRLFDKVEFKGIKCFIFGRRATGYFDIRKLDGEVVNRSASYEKLKFIQIMNYLLIEDRKNFRN

SEQ ID NO: 16881 - protein, 415 aa, Selenomonas sp.; identical to SEQ ID NO: 8317

SEQ ID NO: 16882 - protein, 429 aa, Streptomyces sp.
VFVLDRHGHPLQPCTPARARKLLTKGRAVVHRHTPFVIRLKDRAASESAVDGVEVGIDPGSKHTGLAVFTAVAGQRRARYALQLGHRGAQIRKKLQQRADYRRGRRSRNLRYRAPRFFNRRRPEGWLAPSLRHRVETTVSWVGRIARWAPVCAVHVERVAFDTHVISAGRPLQGAEYCRGTLHGYEIREYLLAKWGRTCAYCGSKGVPLNIEHIRPRSRGGSDRVSNLAIACIRCNQAKDNQPIEDFLKGKPKLLARILAQAKAPMRDAAAVQSTRWALWRSLSAMLPTYTASGGRTKWNRTRNKLPKSHTLDALAVGKLDTITETVTTVLVAACTGRGVHQRTSPDKHGFPRRTSPRTKRVHGFATGDLVTATVPAGKYAGTHTGRVMVRTSGLFDIRTPHGLAAAVKHTHVRLIQRSDGYAYTRHPE

SEQ ID NO: 16883 - protein, 431 aa, unidentified
  REGION 1..431: note = Human gut metagenome
MPNKVYVINKHGRPLMPCSPAKARHLLDAGKAKVKKRTPFTIQLVYGSSGYTQEVILGVDAGSKTIGLSASAETEELLSAEVKPRNDVVDLLSTRREFRRARRNRKTRYRKPRFDNRVRSKHKGWLAPSVEVKIQEHITSIRRVCRILPVSKVVIETAEFDLQLLKAIEEGKPVPQGEDYQQGEMYGHYNVRQYVLWRDGYTCQCCGAHATKKKEVRLHVHHLESRKVGGDAPDNQVTLCESCHEKLHKGLIAEKDFKKRKRKSTRDATFMGIMRKTLMQRLCSELPIPVIETRGYITKATREKLLVLPKSHTNDALAIAQGKQGFNVGYLPGIVQINKIYTIRPVRHHNRQLHKATILKGGIRKSNQAEKYVFGYRLFDKVQFNGQDCFIWGRRTSGYFVVKTIDGKVIHNSASFKKLNLVERASNYLIA

SEQ ID NO: 16884 - protein, 536 aa, unidentified; identical to SEQ ID NO: 2718
  REGION 1..536: note = Human gut metagenome

SEQ ID NO: 16885 - protein, 417 aa, unidentified
  REGION 1..417: note = Human gut metagenome
MPCSPAKARLLLKEKKAIVKRRTPFTIQLTIATGEAKQPVALGVDSGYKHIGLSATTEKAELYASEVELRQDITDLLSARLALRCSRRSRKTRYRAPRFDNRVASKREGWLASSVENRIAAHMSRVEAVMRVLPVTAITVETAAFDTQLLKNPDIAREAYQQGEQLGFWNVREYVLFRDGHVCQHCRGKYKDPILNVHHIESRRTGGDAPNNLITLCETCHKAFHRGEIKLKVKRGKSFKAETFMGIMRWTLFERLKKAHPELRVRNTYGYLTKHKRISHGIAKSHCADAYCIADNLGAKRLEGFFFQKQTRKHNRQIHKLSILKGGLRKKNQAPYEVKGFRLFDKVICKGEEAFIFGRRTSGSFDVRRLDGTRISAGINYKKLRLLEPRTTYLTEFRKEAALPHLHECRGFRAEFL

SEQ ID NO: 16886 - protein, 442 aa, Lactobacillus sp.; identical to SEQ ID NO: 12143

SEQ ID NO: 16887 - protein, 414 aa, unidentified; identical to SEQ ID NO: 2588
  REGION 1..414: note = metagenome

SEQ ID NO: 16888 - protein, 443 aa, unidentified
  REGION 1..443: note = Human oral metagenome
MTKTTTQKVTQVCVLDQNGQPLMPTQRLGKVYRLLKTKKAHIVAYEPFTVQLDYEPKTHIIQPMTLGVDSGAIHSGYSLANEHREYYSAEVIARDDISKNISDKRMYRRSRRSRKTRYRKPRFNNRKNKGKGWIPPSLEQKVNVQLNEIEHLHRYFPIETIIIEVAEFDIQKIKNPDISGKEYQQGTLQGYNIRNYLLEKYHHKCFYCDKDVSTFEVEHMIPKARNGSNRIDNLTLSCHDCNSNKGTLTAEEFITQTLSPQKAAQKLRQLPKTKQLLKYMAHMNTTRWVLYNTIKETYDSVSLTYGYITKHNRINAGLPKAHHIDAKCITGFSTVPSFDITVVKTKMRRHNRQLHRATFSKGHIRKAATLPRFVHGFQLYDIVLFNNHQYYIKGRRSSGSFALVSLEGLKDENRNYKKITFLAHTNAYLTNHYVNDTANRANG

SEQ ID NO: 16889 - protein, 429 aa, Moorena sp.; identical to SEQ ID NO: 3068

SEQ ID NO: 16890 - protein, 409 aa, Arthrospira sp.; identical to SEQ ID NO: 8750

SEQ ID NO: 16891 - protein, 428 aa, unidentified; identical to SEQ ID NO: 6748
  REGION 1..428: note = Human gut metagenome

SEQ ID NO: 16892 - protein, 437 aa, Clostridium sp.; identical to SEQ ID NO: 8734

SEQ ID NO: 16893 - protein, 416 aa, unidentified; identical to SEQ ID NO: 15082
  REGION 1..416: note = Human gut metagenome

SEQ ID NO: 16894 - protein, 432 aa, unidentified
  REGION 1..432: note = Human gut metagenome
YMVYVLDIDGQPLMPTSRHGKVRRLLNSHLAKVVKRCPFTIQLLYQSTKETQPVSLGVDAGSRHIGLSATTEQEVVYQEELVPRNDIVKLLSARRALRRSRRNRKTRYRKVRFNNCVHSKHKGWLAPSVEVKIQEHITAIKRICQILPISDIHVETAEFDLQRLKAMEEGRPLPVGTDYQLGEQYDFYNTRQYVLHRDEYTCQCCGTHDNNVKLHVHHVESRQTGGEAPNNLITLCEHCHKSIHAGKMMLPKGKKRGKSYRDAAFMGIMRNTLLERLKKEVNVPVTMTYGYITKYWREKAGLEKSHINDAICISKHPYARPLETYYLTKAVRHHNRQIHKTKFSKGGIRKRNQAPYLVKGFRLFDKVLYQGESYFIFGRRITGYFDIRTLDGTKVNKGSTSYKKLRIQDTAEAYLTEVRAIPHMNEFTCVLA

SEQ ID NO: 16895 - protein, 465 aa, unidentified; identical to SEQ ID NO: 4641
  REGION 1..465: note = Human gut metagenome

SEQ ID NO: 16896 - protein, 512 aa, unidentified
  REGION 1..512: note = Human gut metagenome
MSTIYVLNKDGKPLMPTTRGGHVRHLLKEQKARVVRTKPFTIQLLYETDDVVQHLYLGIDPGRTNIGVAVVKTDGTAVFTAHLETRNKEIPKLMKKRKDSRRARRTNGRRCRRQRRAKANGTISKKCVKQTTAQNGSVSKRAKEIGVIKRHLPGCEKEVLCIGIKNKEAKFSNRVKPEGWLTPTANQLLQTHINLVKKIQKFLPISDVVLEVNKFAFMQLDNPNIQKWQYQQGPLYQKASLEEAVSEMQEHHCLFCKKPIDHYHHVVPQHKNGSNTIGNIVGLCAKHHDLVHKDTTWQKKLAKKKTGLNKKYGALSVLNQIIPTLTKELSSLFLKHFFVTNGKSTYDYRAAHGVSKDHWLDAYCIACSVLPNDTCDKTINSRVPYEFKQFRRHDRRALNNENMSRVYTFNGKMVATNRHKATEQTTDSLEEFRQRQPNDVCNLKVKEHHPTYRNMNRNYPGSVFLIGKQVHVMQGIAGSKDGEATTYKDTNANSIAAGKCKFVAKNSGILFV

SEQ ID NO: 16897 - protein, 271 aa, unidentified
  REGION 1..271: note = Human gut metagenome
MVYVQDIDGKPMMPTTRHGKVRRLLKDSKAVVVNTCPFTIKLMYKTSGYKQEIVLGVDAGTKHVGLSATTKSKELYSSEVILRSDIVELLSTRRESRRARRNRLRYRKPRFENRVKSKRLGWVAPSVRHRIDAHIRVIDNVCSILPVSRVIVEVAQFDTQKIKNPDISGDEYQEGDQLGFWNVREYILARDGHKCQHCKGKSKDPILNVHHIESRKTGGDSPSNLITLCETCHKEYHKGNIDLKVKRGKSLRDAAVMGIMKWKLYEELKSR

SEQ ID NO: 16898 - protein, 426 aa, unidentified
  REGION 1..426: note = Human gut metagenome
LAKDLYRSTDREETNLRVYVLNKRGEPLMPCSAAKARILLKEKKAVVKRRTPFTIQLTIATGETKQSVTLGVDAGYKHIGLSASTEKAELYASEIELRQDVSELLAGRSALRQARRSRKTRHRAPRFDNRKREKGWLAPSVENRIGAHVSRVEAVLRILPVTKIIVETASFDVQRLKNPDMQGVEYQQGEQLGFWNVREYVLFRDGHECQHCHGKSKDQVLNVHHIESRRTGGDAPNNLITLCETCHKAFHRGEIELKVKRGRSFQAETFMGVMRRTFFERLRASHPEIEVRNTYGYLTKDTRIANKIEKSHCADAFCIAGNLKAKRLGYYFFQKQTRRHNRQIHKLTILKGGVRKRHQTPYEIKGFRLYDKVLYRGKVAFIFSRRSSGYFDIRTLDGERIAASGSYKKLRLLEKRRTFLIELRRN

SEQ ID NO: 16899 - protein, 494 aa, unidentified; identical to SEQ ID NO: 13959
  REGION 1..494: note = Human gut metagenome

SEQ ID NO: 16900 - protein, 440 aa, unidentified
  REGION 1..440: note = Human gut metagenome
MSTGLRAEQAEPAGIRKGDTLKVFVLNMRGKPLMPCSPAKARHMLKAGKAFVVRRTPFTIKLTIATGETKQDVTLGVDAGAKHVGLSATTEKEEVFASEVELRQDITGLLADRLAFRRARRNRKTRYRAPRFNNRVRSKNKGWLAPSVENRIQAHISRIEAVCRVLPITKIVIETASFDIQKIKNSEVEGSGYQQADQLGFWNVREYVLFRDGHVCQHCRGRSKDPILNVHHLESRKTGGDTPNNLITLCETCHKAYHAGKIKLKARRGTSFRAEAFMGIMRWTLLDRVRRAHPELPVENTYGYLTKHNRIALALPKTHCADAFCIAGNLNALRRGDFLFQRQTRTHNRQIHKCSILKGGVRKLNQAPFLVKGFRLFDKVKCKGGIGFVYGRRSSGFFDVRTLDGVRLSAGISYKKLMLVEKRTTFLTQLKKEHGASSPS

SEQ ID NO: 16901 - protein, 447 aa, unidentified; identical to SEQ ID NO: 12599
  REGION 1..447: note = Human gut metagenome

SEQ ID NO: 16902 - protein, 480 aa, unidentified
  REGION 1..480: note = Human gut metagenome
LYTKPLDNIGEGSLPPSGEINLKGMTFMVYVKSIDGKALMPTSNAKARKLLKQKKAKVVSLRPFVVKLTYKTKTEYIQKLNLGVDSGYSNIGFSVIDAKQEYIAGEVKLLEGMKKRLLEKASYRRIRRSRLRYRKARWNNRVKSKKKGWLAPSLKHKLDTHIKFIDYLKNILPIEKITIEVANFDIQKMKDDLISGIDYQNGDMFGFWNVREFVLHRDGHKCQNPNCKHKDKKEQILKVHHIRYRSEGGSDRPENLITLCSKCHTPANHKKGKFLYDWCVNGKKVRGFKDATFMSMIRWYLVNELKSKHNNVSITYGYITKNHRIQNGIEKSHLNDAFAIAKGTNQARTKDRFLVIQDRLKNRSLEKFYDSKIIDIRTEKKVSGGDLNCGRSTRNKNLNTENLRKYRGVKISKGQRRIRKQKYFYQPNDLVKYDGKVYTVKGTQNEGKYIALKEIKKVPKVELLIPYVFKKGLNWSYRLC

SEQ ID NO: 16903 - protein, 428 aa, Moorena sp.
MNRVFVLDDRKIPLMPCRSARARRLLAAGKAAVYRRVPFTIILKYEVDPDNQPVEFKVDPGSKTTGIALVGQFNRGNELLWGANLSHRGQSIKDKLESRRSLRRGRRNRKTRYRAARFLNRRKKTGWLPPSLQSRVDNVSSWLKKLRSRAPISECHVETVRFDLQKIVNPEISGIEYQKGELTGYEVREYLLEKWRRQCVYCDSKDTALEIEHIVPRSKGGSNRVSNLTISCRYCNQGKGNMPVEQFVKDPARLNRILAYAKAPLKDASAVNATRYAIGNAIKEFGLPTSFWTGGRTKLNRSKQHYAKDHYSDAACVGETGANVVISENPKPLLIKATGRGTRQTVRTDKFGFPRNAAGRVKRVFGFQTGDLVRLDLSKGKYAGTHVGRLAGIRANGRLDIATMAGRITASFKNFTIIQRGDGYAYTN

SEQ ID NO: 16904 - protein, 450 aa, Moorena sp.; identical to SEQ ID NO: 2935

SEQ ID NO: 16905 - protein, 414 aa, unidentified; identical to SEQ ID NO: 2588
  REGION 1..414: note = Human gut metagenome

SEQ ID NO: 16906 - protein, 557 aa, unidentified; identical to SEQ ID NO: 11277
  REGION 1..557: note = metagenome

SEQ ID NO: 16907 - protein, 431 aa, unidentified
  REGION 1..431: note = Human gut metagenome
MPNKVYVINKHGRPLMPCSPAKARHLLDAGKAKVKKRTPFTIQLVYGSSGYTQEVILGVDAGSKTIGVSASTKKEEFFAANVIPRNDVVDLLSTRREFRRARRNRKTRYRKPRFDNRVRSKHKEWLAPSVEVKIQEHITSIKRVCRILPVSKVVVETAEFDLQLLKAIADGKPVPQGEDYQQGEMYGHYNVRQYVLWRDNYTCQCCGTHPSKKKEVRLHVHHLESRKVGGDAPDNQVTLCESCHEKLRKGLIAEKDFKKRKRRSTRDATFMGIMRKTLMQRLCSELPIPVVKTRGYITKATREKLLVLPKSHTNDALAIAQGKRGFNVGYLPKIAQIDKIYTIRPVRHHNRQLHKATILKGGIRKSNQTEKYVFGYCLFDKVQFNGQDCFIFGRRTSGYFVVKTIDGKVIHNSASFKKLKLVERASNYLIA

SEQ ID NO: 16908 - protein, 456 aa, unidentified
  REGION 1..456: note = Human gut metagenome
MSTCVCVLSNNGERLMPTFRLGKVRRLLKDGKAKIVKHHPFTIQLLYDSKTNKQPIEICEDVGYNYIGISVKSESHEYVSAQYDTLQDEKEHHDDCRKMRRARRNRLRYRKPRFDNRKRSEGWLAPSLEHKKQLNISLVERYVSVIPITHATVEVGSFDTMLLQAIQKGETKPEGADYQEGPRYNLATLREAVFYRDNYTCQVCGRKITDGAILHMHHMFYWKGRHGYKLDELVTACEKCHTPANHQKGGKLFGFGEDKEFADLSGAAFMNAVRWQIVNALHTTYSKEFVTITYGAMTKEKRIALQLEKSHNNDAYAMGDFHPVHRCGFRHYQKRRRNNRVLEKFYDATYIDARTGNKAKGKELFNGRISRNHKKDSENLHKYRNKKVSRGRRSIRRQRYAIQPYDTVRLEGKTYITSGCHNKGTRLLIPVNGKSKSVAISKVQVVCHAGAWIQII

SEQ ID NO: 16909 - protein, 376 aa, unidentified
  REGION 1..376: note = metagenome
MVYVLNKQGKPLMPCKEAKARKLLKQHKARTVKYEPFTIQLLFDCENQTQDIALGVDAGSKYIGVSATTEKQVLYEAEVELRNDIVEKLSSRREARRTRRSRLRYRPARFNNRVHSKHKGWLAPSIEQKINAHIQVIRHLYEILPITKLIVETAQFDIQKINNPEISGEEYQQGNQLGFWNVREYVLFRDNHECQCCHGKSKDNVLNVHHLESRKTGGNAPNNLITLCETCHKAYHKGEVELKLKRGKNYRDAAFMGIMRKTLLLRLNQTYPNVHETFGYVTKNIRIENGLPKEHHVDARCISGNPLAKPLEYYLYQKCVRRQNRQIYKNNLCKNGRKISNQLIGDIFGFKLFDTVKYQNKQYFVFGRRKSGYFKI

SEQ ID NO: 16910 - protein, 451 aa, unidentified; identical to SEQ ID NO: 3581
  REGION 1..451: note = Human gut metagenome

SEQ ID NO: 16911 - protein, 289 aa, unidentified
  REGION 1..289: note = Human gut metagenome
CQILPISEIHVETAEFDLQRLKAMDEGSPLPVGIDYQLGEQYDFYNTRQYVLHRDGYTCQCCGTHDNNIKLHVHHIESRQTGGDAPNNLIILCEHCHKALHEGKLELPKGKKRGKSYRDATFMGVMRKTLLERLKKEIDVPVEGTYGYITKYWRERAGLEKSHIHDAVCISKYPYAKPLDIYYLTKTVRHHNRQIHKSNFSKGGIRKRNQAPYLVKGFRLFDKVLYQGKEYFIFGRRATGYFDIRTLDGTKVNKGSISYKKLRIQDTAKAYLKEARAIPHMNKFTCVLA

SEQ ID NO: 16912 - protein, 477 aa, unidentified; identical to SEQ ID NO: 5307
  REGION 1..477: note = Human gut metagenome

SEQ ID NO: 16913 - protein, 512 aa, unidentified; identical to SEQ ID NO: 3769
  REGION 1..512: note = Human gut metagenome

SEQ ID NO: 16914 - protein, 507 aa, unidentified; identical to SEQ ID NO: 2446
  REGION 1..507: note = Human gut metagenome

SEQ ID NO: 16915 - protein, 465 aa, unidentified
  REGION 1..465: note = Human gut metagenome
MSTCVCVLSNSGERLMPTFRLGKVRHLLKDGKAKIVKHHPFTIQLLYDGKTNTQPIEICEDVGYNYIGISVKSQSHEYVSAQYDTLQDEKACHDSCRKYRRTRRNRLRYRKPRFDNRKRSEGWLAPSLRHKKELNVNVVKMYCAVMPITHATVEVGSFDTMLVKAIQEGKAIPEGADYQKGPRYNLATLREAVFYRDNYVCKVCGRKATEGAILHVHHMFYWKGRHGNSLSELITVCEKCHTPANHQKGGKLYGFGENVKFADLSGAAFMNTVRWQIVNELYAAFGKDFVTVTYGAMTKEKRIALRLEKSHNNDAYAMGEFHPNCRCTFEHYEKVRRNNRTLEKFYDSRYIDIRTGEIATGKELFNGRINRSHKKDSENLHKYRGKRIRKGYRALRRKKVALNPGDLVSLNGEILTVHGTHTKKNGSVNVEFKTPSKSGKKSTSLKKLKIIKTISPMRSAWDKVS

SEQ ID NO: 16916 - protein, 507 aa, unidentified; identical to SEQ ID NO: 6546
  REGION 1..507: note = Human gut metagenome

SEQ ID NO: 16917 - protein, 426 aa, unidentified; identical to SEQ ID NO: 15348
  REGION 1..426: note = Bioreactor metagenome

SEQ ID NO: 16918 - protein, 408 aa, unidentified; identical to SEQ ID NO: 5694
  REGION 1..408: note = Human gut metagenome

SEQ ID NO: 16919 - protein, 416 aa, unidentified; identical to SEQ ID NO: 6623
  REGION 1..416: note = Human gut metagenome

SEQ ID NO: 16920 - protein, 514 aa, unidentified
  REGION 1..514: note = Human gut metagenome
MSVLVIGRNGRALMPTNPRKARLLLKKKTASVVCRHPFTIQLLYKTGCATQEGCIGIDTGSQHIGVGITCGDRVILKDEHALRSSMEKRSLLATRAVMRRGRRYRKVRYRKPKWRHHTKRMYFEKANRRGQHWRKVKTTTQSPRLKGWLPPSLQSKCDHHFRIIDRYLKYLPDPITRNLVIEAGRFDMARMNDPTIHGEMYQRGPMYDAENLRAYIFARDNYQCACCKAKAGTTRKADGTTVKLVAHHILFRSRGATDNPKYIISVCDHCHTTKAHQPGGILYSWMENNKKVARGLRDATFMNILRKRLFARYPQAAFTYGNITAADRKQLRLPKNHANDAVAISLFGKEASTVKNICQTMHYKQIRKSKRSLHEAIPRKGRKNPNTKAVRNKKNTTQVNGFKLWDSVLADGKKLFICSFTGTSAYLIDKNGCYISQPGKTYKQCPLSKLKRLHPNVDILPRINPWDSLDYNNITTPYRSGYSMIFQDLATIGVPHLGWYFLAAGQMPVPISLS

SEQ ID NO: 16921 - protein, 420 aa, Petrotoga sp.; identical to SEQ ID NO: 6357

SEQ ID NO: 16922 - protein, 445 aa, Scytonema sp.; identical to SEQ ID NO: 2723

SEQ ID NO: 16923 - protein, 411 aa, Orenia sp.; identical to SEQ ID NO: 7492

SEQ ID NO: 16924 - protein, 418 aa, Moorena sp.
MSYVFVIDQEKRPLDPVHPGRARKLLSSGKAAVYRRFPFVLILKHPVSEAHPQPLRLKIDPGSKTTGLAVLNDTSGQVLWAAELVHRGEEVHQALQKRAGVRRGRRSRHTRYRAARFSNRRRKRGWLAPSLCSRMQNVQTWTRRLMRWCPLGAISYEAVRFDTQAIQNPEIKGVAYQHGTLAGLEVKEYLLLKWRHKCVYCQKGDIPLEVEHIVPKRRGGSDRITNLTLACEACNQQKGSQTAQAFGFPHLQAQALQPLKDAAAVNSTRWALYERLKATGLPIEVSTGGQTKWNRKQRGIPKSHWLDAVCVGPSTPERVQWQHVIPLLITARGRQCRQLCNVDGWGFPRSRPKGPSKVFGFQTGDMVQAVVTRGKRNGGGHSWKTLPMTLITLSVSWLLQIRCKRSREEIFSISLFDN

SEQ ID NO: 16925 - protein, 428 aa, unidentified; identical to SEQ ID NO: 5036
  REGION 1..428: note = Human gut metagenome

SEQ ID NO: 16926 - protein, 413 aa, unidentified; identical to SEQ ID NO: 3220
  REGION 1..413: note = Human gut metagenome

SEQ ID NO: 16927 - protein, 423 aa, Moorena sp.; identical to SEQ ID NO: 4024

SEQ ID NO: 16928 - protein, 423 aa, Arthrospira sp.; identical to SEQ ID NO: 3091

SEQ ID NO: 16929 - protein, 416 aa, unidentified
  REGION 1..416: note = Human gut metagenome
MVYVLDKNGQPLMPTDRHRKVRLMLQSGQAKVIKRCPFTIQLNYDSGHQTQEISLGIDAGSKHIGVSATTKIKVLYEADVELRNDIVDLLSSRRELRRGRRNRKTRYRQAKFNNRRRGNGWLAPSIRQKIGTHLTVVENICKILPISRIMVETASFDIQKIKNPDIQGAEYQQGDQLEFWNVREYVLFRDGHTCQCCKGKSKDKILNVHHIESRKTGGNAPNNLITLCETCHTGYHKGTVQLPKAIKRGMRFKDAAFMGIMRWAFYEALKQQYEPVGTPVHNTYGYITKHTRIAYNLPKEHYVDARCISGNPEASSNGEYYYQKKVRCHNRQIHKLTVLKGGIRKQNQATYLVKGYRLFDKVSYQGKGYFVFGRRQSGFFDIRTLSGEKVNKGSLSCKKLKFIATRTYYLTERRAV

SEQ ID NO: 16930 - protein, 431 aa, unidentified
  REGION 1..431: note = Human gut metagenome
MDAWDIIVVLNKRGKPLMPCSPAKARLLLKEKKAIVKRRTPFTIQLTIATGESKQPVTLGVDAGYKHVGLSASTEKAELYASEVELRQDVSDLLSARRALRQSRRNRKTRYRAPRFDNRIRTKRKGWLAPSVENRINAHLSRIEAVLRLLPVTKITVETASFDMQLLKNPDIAGKEYQEGEQLGFWNVREYVLFRDGHVCQHCHGRSKDPVLNVHHLESRRTGGDSPGNLITLCETCHKALHRSEITLKTKRGQSFRAEAYMGLMRWEVLNRLKTSHPGLEVHNTYGYRTKYTRIVNGIDKSHCADAFCIAGNLGAERLGEFFFQKQTRRNNRQIHKLSILKGGIRKRNQAPFEVKGFRLFDKVACQGEEGFIFGRRSSGYFDVRKLDGTCISAGISYKKLHLLEKRRTYLTEIRKEEALPPLPEGRGLRA

SEQ ID NO: 16931 - protein, 426 aa, Geobacter sp.; identical to SEQ ID NO: 2608

SEQ ID NO: 16932 - protein, 430 aa, unidentified; identical to SEQ ID NO: 7436
  REGION 1..430: note = gut metagenome

SEQ ID NO: 16933 - protein, 427 aa, Moorena sp.
MQNYVFVIDASKQPLNPIHPKKARRLLDKGKAAVFRMYPFTIILKTAINNPTISPCQIKIDPGSKTTGFAIVQNDQVIWGMELEHRGGLIKKKLEYRRAVRRGRRNRNTRYRKPRFLNRKRPEGWLPPSLEHRILTTETWVKRLIKFCPVNEIWVERVKFDTQKMQNPEINGTEYQQGELAGYEVREYLLEKWGRQCTYCGKQNTPLQIEHIHPKSKGGSNRVSNLCLACEKCNQRKGNKPVEDFLRKKPSLLQKIKTKAKQPLSDAAAVNTTRNKIVKVLKGIKPVVTGTGAQTKYNRINFGLPKQHWIDAACAGDVEALVLKTSQPLLVTCKGPGGRQKAALNKYGYPIRHNPLKPIKGWITGDIAKHQKLGIGKVTPRSKGSFGFTPLGEKGYKSCRPQDISAVHRKDGYIYRFCQSLPGTAWK

SEQ ID NO: 16934 - protein, 419 aa, unidentified; identical to SEQ ID NO: 5742
  REGION 1..419: note = Human gut metagenome

SEQ ID NO: 16935 - protein, 431 aa, unidentified
  REGION 1..431: note = Human gut metagenome
MPNKVYVINKHGRPLMPCSPAKARHLLDAGKAKVKKRTPFTIQLVYGSSGYTQEVILGVDAGSKTIGMSASTTKEELLSAEVKPRNDVVDLLSTRREFRRARRNRKTRYRKPRFDNRVRSKHRGWLAPSVEVKIQEHITSIKRVCRILPVSKVVVETAEFDLQLLKAIADGKPVPQGEDYQQGEMYGHYNVRQYVLWRDGYTCKCCGAHTTKKKEVRLHVHHLESRKVGGDAPDNQVTLCESCHEKLHKGLIAEKDFKKRKRRSTRDATFMGIMRKTLMQRLCSELPIPVIETRGYITKATREKLLVLPKSHTNDALAIAQGKQGFNVGYLPGIVQIDKICTIRPVRHHNRQLHKATILKGGIRKSNQTEKYVFGYCLFDKVQFNGQDCFIWGRRTTGIFTIKTINGKMIKDGISFKKLKPVEKSTGYLIA

SEQ ID NO: 16936 - protein, 296 aa, unidentified
  REGION 1..296: note = Human gut metagenome
INAHLSRIEAVLRLLPVTKITVETASFDLQLLKNPDISGKEYQEGEQLGFWNIREYVLCRDGHVCQHCYGRSKDPVLNVHHLESRRTGGDSPGNLITLCETCHKALHRGEITLKAKRGQSFRAEAFMGIMRWEVHNRLRALHPGIEVSNTYGYRTKHARIANGIAKSHCADAFCIAGNLGAERLCEFFFQKQTRRNNRQIHKLSILKGGIRKRNQAPFEVKGFRLFDKVACQGEEGFIFGRRSSGFFDVRKLDGTRISAGISCKKLHLLEKRRTYLTEIRKEEALPALPEGRGPRA

SEQ ID NO: 16937 - protein, 428 aa, unidentified; identical to SEQ ID NO: 8908
  REGION 1..428: note = Human oral metagenome

SEQ ID NO: 16938 - protein, 423 aa, Moorena sp.
MRVFVLNKNLQPLDPCRPARARILLSTGKAKVYRRYPFTIILVEEISNPVTHEHQLKIDPGAKTTGLAVVQRQRVVWGAELTHRGFQIRDNLTSRRQLRRSRRNRKTRYRKPRFLNRTRAKGWLAPSLVSRIENILTWVKKIIRFCPITGISQELVRFDTQKLQNPELSGIEYQQGTLHGYEIREYLLEKWNRKCAYCGGKDTRLEVEHIKPKSKGGSNRISNLTLACHSCNQAKSNQDIELFLAKKPDLSKRILSQAKRPLSDAASVNITRWKLYHDLKSITLPVEVGSGGLTKFNRCRQNLPKTHWLDAANVGKVETLIIEVNNPLLITAKGHGTRQLCRTNKYGFPIRYCSRIKFHKGFQTGDIIRAVVTKGKKIGTYVGRVATRKSGSFNISTKSGLVQGISHKYCQFIHRKDGYAYTN

SEQ ID NO: 16939 - protein, 544 aa, unidentified
  REGION 1..544: note = Human gut metagenome
MKQKKQKVMVYILNKKGKPLMPTTRCGHVRKLLDSKKAVIVNSNPFTIRLKYDTPNGVQDVFAGIDSGRENIGSGASNKDGDCLYLGELKTSNKSIKMKMTERAGFRRERRRHDRQNKQRKARKDHTEIQNGKDDICRTTISCKSVQISYPTAEKSVTHKIIRGKEGKFANHNRDEGWITPSARQLVQMHINDLKSMCKILPISHVTLERVAFDFQKLENENIKVWEYGKGKLYGYDSPKEYINDVQDGKCLACGKPHIDYLHHIIPRSKGGSDKVSNIAGLCYDCHYGPMGVHNCQNTQDRLPELKNEINKQYKVSLLNSVMPVLIEEMDKFCKANSIILSICEGHDTAKLRDMYDLQKDHCLDGFAISLVGRNVKSVDVMPDRIHQKQRYKKKSKNIIQKHNCREYYDGKKLVAVNRHKGTDQKADSLEEYMNTYAETHTADECKKHFESLTVKPAKRTYTFHKEGRICPFHIGDKVRYEKKNKIKGNTKVETFICEGIYFTKDKNKAKVEHNKTKSKKMKFCRVLEPGCTPYINYRKLALM

SEQ ID NO: 16940 - protein, 440 aa, Lactobacillus sp.
MKGVQIMQNRVFVINKHGKALMPCKPRKARILLRDGKAKVLKKEPFTIQLLYGSTGYKQDISIGIDSGQRHIGLAVTSQDEVLFQGEVELRQDVKKLIDTRRIYRRSRRNRKTRYRKAKFLNRIAKKKDNWLPPSVLSKVNHNINWIKRLLSVLPKADLHIEVGKFDIQKMKNPEINGEGYQQGDLYGYQTVKQFVLARDNYTCQVCKKKDGKLKIHHIIYRSLGGTNTVNNLITVCSNCHTTKNHQTGILAKWCKDKKKVNKSYKGATFMNILRRRLFLAFPQAKFQYGAWTTLQRADLELTKSHYNDAVAISGIRKIKAKPTSIMMFKQFRKKKRSSHEATARKGRKTPNITSKRNSKNTKYARGFWLNDYAKIKNSNKKGYISGFTAKGAGTRLRDIFGEYVSNSDKSYTSTKNISLINHSNNWQEQVITEKQYIMG

SEQ ID NO: 16941 - protein, 493 aa, unidentified; identical to SEQ ID NO: 3781
  REGION 1..493: note = Human gut metagenome

SEQ ID NO: 16942 - protein, 406 aa, unidentified; identical to SEQ ID NO: 2874
  REGION 1..406: note = Human gut metagenome

SEQ ID NO: 16943 - protein, 489 aa, unidentified
  REGION 1..489: note = Human gut metagenome
MTMVYVQNKDGKPLMPTTRYCYVRLLLKENKARVVSTTPFTIQLNYDTPDITQDLILGIDPGRTNIGVAVVKEDGQCVFSAHLETRNKDVPLLMQKRAGFRKQHRTLDRRRKRQRRAKAAGTTVAEGSVERLLPGYEKPVVCHYIRNKEARFNNRSRPAGWLTPTANHLLQTHINLIAKVAKFLPITKVVVELNRFAFMAMDNPNIRRWEYQQGPLCGLGSVEDAVYAQQDGHCLFCKKPIDHYHHVIPRHKRGSETLANRCGLCAKHHDLVHTDKAWADKLVTRKEGMNKKYHALSVLNQIIPHLMEYIGSETLYDAYATDGKSTKGFRIAKNVPKEHYTDAYCIACSILDTDIEVSAPVEPFKLKQFRRHDRQACIRQMVDRKYLLDGKVVAANRHKAFEQKSDSLQEFREAYSDVAVSQLTVKPHPPQYKDMSRIMPGAVMDFDGIVGVMQSSIVGQFYKSTKGHKATPKRCALLSQNAGMVFIPT

SEQ ID NO: 16944 - protein, 415 aa, unidentified; identical to SEQ ID NO: 10904
  REGION 1..415: note = Human gut metagenome

SEQ ID NO: 16945 - protein, 424 aa, unidentified; identical to SEQ ID NO: 8578
  REGION 1..424: note = Human gut metagenome

SEQ ID NO: 16946 - protein, 512 aa, unidentified
  REGION 1..512: note = Human gut metagenome
MSTVYVLNKDGKPLMPTTRGGHVRHLLKEQKARVVRAKPFTIQLLYETNDVVQPLYLGIDPGRTNIGVAVVKANGTAVFTAHLETRNKEVPKLMQDRKKARRARRTNGRRCRRQRRAKANGTISKKCVKQDTAQSKNPSKRAKEIGIIKRRLPGYKKDVLCIGIKNKEAKYTNRTRPEGWLTPTANQLLQTHINLVRKIQKFLPISDVVLEVNKFAFMRLDNPDIQKWQYQQGPLYQKGSLENAVSEMQEHHCLFCDKPIDHYHHVVPQSENGSNTIANIVGLCAEHHNLVHKDAAWQKKLAEEKVGLNKKYGALSVLNQIIPALTNKLSVLFPKHFFVTAGKSTHDYRATHGVSKDHWLDAYCIACSVLPSDVCDSNINNHMPYELKQFRRHARRALNNENMNRVYTLNDKAVAINRHKATEQEAASLEEFCKEHPNDVCKLKVKEHHPTYRNMNRNYPGSVFLVGKQIHVMQGIASSKDGKATTYKDSNANSITASKCKFVAKNSGILFV

SEQ ID NO: 16947 - protein, 414 aa, unidentified
  REGION 1..414: note = Human gut metagenome
MPCSPAKARLLLKEKKAIVKRRTPFTIQLTIATGETKQPVSLGVDAGYKHVGLSASTEKAELYASEVELRQDITDLLSARRALRQSRRNRKTRYRAPRFDNRIRTKRKGWLAPSVENRINAHLSRIEAVLRLLPVTKITVETASFDLQLLKNPDISGKEYQEGEQLGFWNIREYVLCRDGHVCQHCYGGSKDPVLNVHHLESRRTGGDSPGNLITLCETCHKALHRGEITLKAKRGQSFRAEAFMGIMRWEVLNRLKASHPELEVNNTYGYRTKHARIANDIAKSHCADAFCIAGNLGAERLGEFFFQKQTRRNNRQIHKLSILKGGIRKRNQAPFEVKGFRLFDKVACQGEEGFIFGRRSSGFFDVRKLDGTRISAGISYKKLHLLEKRRTYLTEIRKEEVLPPLPEGRGLRA

SEQ ID NO: 16948 - protein, 438 aa, unidentified; identical to SEQ ID NO: 4848
  REGION 1..438: note = Human gut metagenome

SEQ ID NO: 16949 - protein, 486 aa, unidentified
  REGION 1..486: note = metagenome
MQKLEERNTYTPTDIPHVSGNCDRILNREETLSVSGLKTSSNNSDAALIAKEHAKQNTSVSAVYVLNMRGQPLMPTTPRKAKQLLNEDKAKVIKRTPFTIQLKYATGETKQEITLGVDSGFENIGFSAITAKKEVYSAEVKLRTDMVKLNSERRQYRRARRNRKTWYRQPRFDNKKKPDGWLAPSIQHKLDSHIKLIEKVKAILPITKIEIEVAAFDIQKIKNPEISGIKYQNGVQKDSWNTREYVLYRDNHTCQHCKGKSRNPILQVHHIVSRQIGGDAPDNLLTLCETCHDKVSKGKLILDVKIPTGFKPETFMSIVRWKLVNLLRGAGNIVNHTYGYITKFNRIALGLEKSHSIDAFVIAGGTMQERNSISFLIKQVRKCNRKLFKGDRSHIKNTATRIIHGFQRYDKVLWNKIEGFVFGRRKTGYFELRKLDGTKIHASAKIKDLTLLETANTLLISYLGGVRSSPDYKSGVSATPTPHGDL

SEQ ID NO: 16950 - protein, 456 aa, unidentified; identical to SEQ ID NO: 3956
  REGION 1..456: note = Human gut metagenome

SEQ ID NO: 16951 - protein, 512 aa, unidentified; identical to SEQ ID NO: 5824
  REGION 1..512: note = Human gut metagenome

SEQ ID NO: 16952 - protein, 424 aa, unidentified
  REGION 1..424: note = Human gut metagenome
MRVFVFNMRGRPLMPCSQRKARLLLRENKAKIYKYHPFTIQLTYTTGETKQDCHIGIDTGSKYIGAAVRSEDKVFWKGEIELRQDIRSNLDTKRIYRRSRRNRKTRYRKPRFLNRKRRDEWLQPSLQSRINHTFHWIDTLSSLVPNPILHIEVGKFDVAKMINPEIHGVDYQHGQTYGFFDERYFVFARDNYTCQCCGKSKNKILNTHHIIYRSNGGTNRVDNLITVCTDCHTSQNHRKGGIFYQWQEQHKKVKQYKEPPFMNTLRKRIFVAYPDAEITYGSETTPKRKAMKLDKTHYNDAIVISGINEIKENPEEWLLIKQFRKKKRSLHEATARKGRKKPNRNQTRNSKNTPYYKGFYLNDKVSVFGKSGYITGFTSNAAYIKDENNDYITLPNKTYKQVSINKMKLECHNNNWQYIIKNAV

SEQ ID NO: 16953 - protein, 458 aa, unidentified
  REGION 1..458: note = Human gut metagenome
MSTCVCVLSNNGERLMPTFRLGKVRRLLKDGKAKIVKHHPFTIQLLYDSKTNTQPIEICEDVGYNYIGISVKSESREYVSAQYDTLQDEKEHHDDCRKMRRSRRNRLRYRKPRFDNRKRGEGWLAPSLKHKKELNVNIVKMYCAIMPITHATIEVGSFDTMLVKAIQEGKVIPEGADYQKGPRYKLATLREAVFYRDNYVCKVCGRKATEGAILHMHHMFYWKGRHGNSLDELLTVCEKCHTPANHQKGGKLYGFGEGVKFTDLSGAAFMNTVRWQIVNELYAAFGKPFVTITYGAMTKEKRIALQLEKSHNNDAYAMGEFHPSCRCKFRHYQKRRRNNRVLEKFYDATYIDTRTGNKAKGKELFNGRISRNHKKDSENLHKYRAHKITKGRRSIRSKHYDIQSGDTVLYAGRKCITTGCFNKGKWLRIPVGSTAKSVAISKVKLINHVGAWKKGSSI

SEQ ID NO: 16954 - protein, 396 aa, unidentified; identical to SEQ ID NO: 4508
  REGION 1..396: note = Human gut metagenome

SEQ ID NO: 16955 - protein, 442 aa, unidentified; identical to SEQ ID NO: 2807
  REGION 1..442: note = Human gut metagenome

SEQ ID NO: 16956 - protein, 430 aa, unidentified; identical to SEQ ID NO: 3681
  REGION 1..430: note = Human gut metagenome

SEQ ID NO: 16957 - protein, 428 aa, unidentified
  REGION 1..428: note = Human gut metagenome
LKVFVLNMRGQPLMPCSPAKARHLLKAGKAAVRRRTPFTIQLRIATGETKQSVTLGVDAGAKHVGLSAATEKEEVFASEVELRQDITGLLAARLSLRRDRRHRKTRYRAPRFLNRVRSKHKGWLAPSVENRIQAHMSRIDAVCRLLPVTRIVIETASFDVQKIRNPEVEGTGYQQGDQLGFWNVREYVLFRDGHVCQHCHGHAKDKILNVHHLESRQTGGDAPNNLITLCETCHKACHAGKIKLKVKRGQSFRAEAFMGIMRWTLLDRVRKAHPGLPVENTYGYLTKNTRITLGLPKAHCVDAYCIAGNLKAVRRGVYLHQRQVRKHNRQIHKCTVLSKTLKDGTKIGYRKLNQTPHLVKSFRLFDKVRCLGQTGFIFGRRSSGYFDVRRLDGVKLSSGISYRKLTLLEKRSTYLTELRKEDGASSPV

SEQ ID NO: 16958 - protein, 446 aa, unidentified; identical to SEQ ID NO: 9324
  REGION 1..446: note = Wastewater metagenome

SEQ ID NO: 16959 - protein, 423 aa, Moorena sp.
MQYVFVLDQNKKPLDPCHSGRARKLLNSGKTAVFREFPFTIILKERLQEDSVVHEYRVKIDPGSKTTGVALLRDDENKVVWAAEIQHRGQNIRDALISRRDNRRGRRDRNCRYRPARFNNRSRRAGWLPPSLESRLANIETWVRRLAWSSPVTAFSMELVKFDTQLMETPEISGVQYQQGELVGYEVREYLLEKWSRKCAYCGATDVPLEIEHIIPRVRGGSNRVSNLSLACHGCNQSKNTQTAAEFGHPEIQAKAKLPLKDAAAVNATRWELWRRLSAWGISVECGTGGRTKYNRIGQNLPKEHWLDAACVGQSGENISVPNGMTPIFIKAYGHGSRQMCRVDKFGFPRTSSKAAKVVFGFQTGEIVKAIVKKGKKIGTHVGRLAVRSSGFFNIQTRTQVVQGISWKYCQSLHKPDGYSYLF

SEQ ID NO: 16960 - protein, 460 aa, unidentified
  REGION 1..460: note = Human gut metagenome
MVAVVDMSGRPLMPTNEYRARKLLKQKKAKIFGYRPFTIQLTERKSTEIQPIELCMDTGYIHIGISAKSERHEYLGMQIDTLTDEKLKRDDKRQYRRQRRNRKRYRAPRFDNRRRKEGWIAPSLEHKKEIHIDAIQRICKVMPITDITLEMGNFDTHVLKAVEEGKPLPQGSDYQHGERYGIATLREAVFLRDGYKCQCCEKSVKDGAILHVHHIKYRSQGGTNRMSNLITVCDKCHTPKNHKPGGKLWNWKPKLAEFKGASYMTSIRWMLYNEVTAMLPNSSVHITYGAKTKESRRKLDIKKSHVNDAYVMGLFCPKHRTKPVYFKKKRRNNRVLEKFYDAKYIDSRDGKKQSGQELFNGRINRNHRKDSENLHLYRKQKVTKGKRSIRNKHYPIQPHDILLYQKKKYENAGCHNNGSRVILLPEKKSVALKQLTIYQYAGGYYRVPYESNKKEERTGS

SEQ ID NO: 16961 - protein, 424 aa, unidentified; identical to SEQ ID NO: 3351
  REGION 1..424: note = Human gut metagenome

SEQ ID NO: 16962 - protein, 424 aa, Enterococcus sp.; identical to SEQ ID NO: 8320

SEQ ID NO: 16963 - protein, 456 aa, Halomonas sp.
MAIFVLDKKKQPLMPCSEKRARLLLARGRAVVHKRYPFTIRLKDRVGGETQPLRLGIDPGSKTTGLALMREPDSQQRHMLCLFELVHRGLQIKKALQQRAAFRRRRRSANLRYRAPRFNNRTKPKGWLAPSLQHRVDTVTAWVKRLSRLAPVTAISQELVRFDTQKLENPEISGVEYQQGTLLGYEVREYLLEKWERECAYCGTGDTPLEIEHVVPRSRGGSNRVSNLTLSCHPCNAEKDSQTLTDFFATNKGLKKRLKANGLSADAQLERVQRQLKQPMRDASAVNATRWALFSALKTTDLPVAVSSGGRTKYNRQRLNIPKTHALDAACVGAFGKLYDWTVPTLTIKAMGRGSYQRTRLTKHGFPRGFLMRQKQVHGFQTGDMVRAIVPTGKKAGTHTGRVAIRKTGSFNIQAEYGAVQGISHKYCTFIQRSDGYGYYVTLFSNLTGEAGRAVA

SEQ ID NO: 16964 - protein, 438 aa, Clostridium sp.; identical to SEQ ID NO: 4933

SEQ ID NO: 16965 - protein, 420 aa, unidentified
  REGION 1..420: note = Human gut metagenome
MQYAYVLNKRGEPLMPCSPGKARILLKQQKACVVKRTPFTIKLLHGSAGYKQPITLGVDAGSKHVGLSASTEKRKLYSEEFTPRNDVVELLSTRRQNRRSRRNRKTRYRAPRFNNRVHSKHKGWLAPSVEVKIQEHITVIKRICRILPITLVRVETAEFDTQRLKAMLAGKPLPVGTDYQLGEMYDEYNVRQYVLKRDNYTCQCCGAHTTAKKTVKLHVHHLESRKVGGNAPSNLITLCTTCHNNLHKGKITLDGKKRGKTLRDAAFMGIMRNTLLTRLRNELNIPVQNTYGYITKLLREQNDIKKSHVNDARCISKHPLAKPCSVCYRTKAIRHHNRQIHKAKILKGGIRKANQAPYIVKGFRLWDKVLYNEQECFISGRRSSGYFALRKFDGTTITNSISFKKLRLLEPATNYLIERK

SEQ ID NO: 16966 - protein, 412 aa, unidentified
  REGION 1..412: note = Human gut metagenome
PAKARHLLDDGKAKVVKRTPFTIKLLYGSTEYTQPVILGVDAGSKTIGLSASTTKEELFAAEVMPRNDVVENLSTRREFRRARRNRTTRYRKPRFNNRVHSKNNGWLAPSVEVKIQEHITSIKRVCAILPISKIVVETAEFDLQLLKAVQDGKPVPEGEDYQKGEMYGSYDVRQYVLWRDNYTCTCCGVKGTDKKPVKLHVHHFESRKHGGNAPDNYGTLCEDCHKKLHLGIITDISLKTRKRPSTRGAAFMGIMRKTLMQRLITGLFIPVAETKGYITKAAREEILKLPKTHTNDALAIAQGRHGFGIREQAYVKPTNRIYTVRPVRHHNRQLHKATMLKGGIRKLNQASKYIFGFRLYDKVLYQGGECFVWGRRRSGSFLLRTIDGTKVKDGVGYRNLTLLERSTNYLIA

SEQ ID NO: 16967 - protein, 544 aa, unidentified
  REGION 1..544: note = Human gut metagenome
MKQKKQKVMVYILNKKGKPLMPTTRCGHVRKLLDSKKAVVVNSNPFTIRLKYDTPNGVQDVFAGIDSGRENIGSGVSNEDGDCLYLGELRTSNKSIKMKMTERVGFRRERRKHDRQNKQRKARKDHTEIQNGKDDICRATISCKSVQISYPTAEESVTHKIIRGKEGKFANRHRDGDWITPSARQLVQMHMNDLKSICKILPISHVTLERVAFDFQKLENENIKAWEYGKGKLYGYDSPEEYIHDVQDGKCLVCGKPHIDYLHHIIPRSKGGSDKVSNIAGLCYDCHYGPIGVHNCQDTQDRLPELKNEVNKQYKVSLLNSVMPVLIEEIDKFCKANSIMFSICEGHDTAKVRDMYDLQKDHCLDGFAISLVGRNVKSVDVMPDRIHQKQRYKKKSKNIIQKRNYREYYDDKKLVAINRHKGTDQKADSLEEYMNTYAETHTTDECKKHFDSLVVKPARRTYTFHKEWRICPFHIGDKVRYEKKNKIKGNTKVDTFICEGIYFSKDENKAKVEHNKTKSKKMKFCRAIESGCIPYIDYIKLALI

SEQ ID NO: 16968 - protein, 298 aa, unidentified
  REGION 1..298: note = Human gut metagenome
IQEHITAIRRDCGILPVSKVVVETAEFDLQLLKAIEEGKPVPQGEDYQKGEMYGHYNVRQYVLWRDDYTCQCCGAHATKKKEVRLHVHHLESRKVGGDAPDNQVTLCESCHEKLHKGLIAEKDFKKRKRKSTRDATFMGIMRKTLMQRLCSELPIPVVKTRGYITKATREKLLVLPKSHTNDALAIAQGKRGFNVGYLPEIAQIDKIYTIRPVRHHNRQLHKATILKGGIRKSNQAEKYVFGYRLFDKVQFNGQDCFIWGRRTTGIFTIKTINGKMIKDGISFKKLKPVEKSTSYLIA

SEQ ID NO: 16969 - protein, 499 aa, unidentified
  REGION 1..499: note = Human gut metagenome
MRYVYVLDVDGKPLMPTCRFGKVRRMLKSGQAKAVDTLPFTIQLTYKPRTRILQPVTLGQDPGRTNIGMAAVRFDGKELGRFHCLTRNKEIPKLMADRMAARKASRRGERLARKRLARKLHTTAKHLEGRMLPGCSEPIAVKDIINTESRFNNRLRPEGWLTPTATQLLRTHINLFRKLSGILPVTDVAVELNKFAFIQLDNPEMKKREIDFCHGPLCGTGGLEAAVKEQQDGKCLLCGKESIGHYHHIVPRSRRGSNTIANIAGLCPKCHELVHKDADTAERLTEMKTGLTKKYGGTSVLNQIIPKLVETLADLFPGHFHVTNGWNTKEFREKHHLEKDHDVDAYCIACSHLKPEETLVETEPFEILQFRKHNRAIIHHQTERTYKLDGVTVAKNRKKRMEQKTDSLEDWYVDMAKEHGKTQADAMRSRLAVIKSTRYYNTPERMMPGTVFLYEGKRYVMTGQITNGKYYRAYDQEKRNFPAVKVRILTKNTGLVFVA

SEQ ID NO: 16970 - protein, 515 aa, unidentified
  REGION 1..515: note = Human gut metagenome
MSTVYVLNKDGKPLMPTTRCWHVRRLLKEQKARVVTSKPFTIQLLYETDDVAQPLYLGIDTGRTNIGVAVVRTDGTAVFTAHLETRNKEIPKLMQERKKARRARRTNGRRCRRQRRAKANGTISKKCVKQDTAQNGSVSKRAKKIGVIKRHLPGCEKEVLCIGIKNKEAKFSNRTRPEGWLTPTANQLLQTHINLVKKIQKFLPISDVVLEINKFAFMRLDNPNVQKWQYQQGPLYQNASLEEAVSEMQEHHCLFCKKPIAHYHHVVPQSENGSNTIGNIVGLCTKHHDLVHKDTAWQKKLAKKKTGLNKKYGALSVLNQIIPALTKELSSLFPKHFFATNGKSTYDYRAAHGVSKDHWLDAYCIACSVLPNDVCDSNINSRVPYELKQFRRHDKRALHKANMNRVYTLDGKKVATNRHKAIKQTTDSLEEFRQRQPDDVCKLKVKEHHPEYRNPERNFPGCVFLVGKHTHVMQGTSGSHNGQADGYYDTNGNSYSSGKCKFVAKNKGIDFCINW

SEQ ID NO: 16971 - protein, 420 aa, Moorena sp.; identical to SEQ ID NO: 7078

SEQ ID NO: 16972 - protein, 462 aa, unidentified
  REGION 1..462: note = Human gut metagenome
MSVLVIGRNGRALMPTTPRKARILLKKETVSVVCRHPFTIQLLYKTGCATQEGSIGIDTGSQHIGVGITCGDRVILKDEHELRSSMEKRSLLATRAAMRRGRRYRKVRYRKPKWRHHTKRMYFEKPNRRGRHWRKVKTTTQSPRPKGWLPPSLQSKCDHHFRIIDRYLKYLPDPITRNLVIETGRFDMARMNDPTIHGEMYQRGPMYDAENLKAYIFARDNYQCACCKAKAGTTRKTDGTTVKLVAHHILFRSRGATDNPKYMISVCDHCHTTKAHQPGGVLYSWMENNKKVTRGLRDAAFMNILRQRLFTRYPQAAFTYGNITAAGRKQLRLPKSHANDAVAISLFGKEVTAVRDTCQTVHYKQVRKSKRSLHEAIPRKGRKNPNTKAVRNKKNTTQVNGFKLWDSVLADGKKLFICSFTGTSAYLVDKNGCYVSQPGKTYKQWPLSKLKRLHPNGNWLMA

SEQ ID NO: 16973 - protein, 570 aa, Streptomyces sp.; identical to SEQ ID NO: 3191

SEQ ID NO: 16974 - protein, 425 aa, Moorena sp.
MSNYVLVIDAKNQPLSPCHSSVARKLLNQNKATVFLRYPFTIILKRAVEHSQIEPVELKLDPGSKTTGIALVQGNKVIWGAELTHRGQAIKASLESRRSLRRCRRNRQTRYRQARFLNRKRSEGWLAPSLQHRVETTLTWVKRLMRSAPISSIAQELVRFDLQKLENPEISGIEYQQGELQGYEVREYLLNKWDRKCAYCQAENVPLQIEHIHPKSKGGSDRISNLCLACEKCNLKKGTQDIEKFLVKQPDVLKRILAQSKRPLKDATAVNTTRWSLFNQLKETGLPVSTGSGGLTKFNRTRLNLPKTHWLDAACVGKVESLKILTRQPLLIEATGHGSRQMCRTDKWGFPSRYVPRFKFVKGFQTGDIVKAVVTKGKKIGTYIGRVAVRSSGSFNITSKGVIVQGISYKYCTIIHRKDGYLYAT

SEQ ID NO: 16975 - protein, 453 aa, Moorena sp.; identical to SEQ ID NO: 12809

SEQ ID NO: 16976 - protein, 470 aa, Rhodanobacter sp.; identical to SEQ ID NO: 3168

SEQ ID NO: 16977 - protein, 412 aa, unidentified; identical to SEQ ID NO: 3155
  REGION 1..412: note = Human gut metagenome

SEQ ID NO: 16978 - protein, 443 aa, Tepidimonas sp.; identical to SEQ ID NO: 15842

SEQ ID NO: 16979 - protein, 428 aa, unidentified; identical to SEQ ID NO: 5036
  REGION 1..428: note = Human gut metagenome

SEQ ID NO: 16980 - protein, 418 aa, unidentified; identical to SEQ ID NO: 4950
  REGION 1..418: note = Human gut metagenome

SEQ ID NO: 16981 - protein, 420 aa, unidentified
  REGION 1..420: note = Human gut metagenome
MVYVLDKNGHPLMPTCRHGKIKHLLKDGKAKVVKRCPFTIKLLYESTNHTQNLTLGIDTGSGTVGTAVSKDNGDIIYISEVVVRNDITDKMTRRSKYRRNRRNRKTRYRKARWLNRKNSIKTDRFSPTMTSKFHSHIKEIEYIKSILPITTMVFETGQFDTHLMKNPSLAAPDIKHWGYQKGSNYGFENTKAMVLNRDGYTCQYCKGKHKDSKLEVHHIVFRSKGGSDEESNLITLCHTCHKDLHSGKIHPDFKGETKGTLKYATQMNSIRKQLFRSYPEAVETFGYVTKTNRLSLGVEKEHYYDACTIATQGNPFVVRTNLYKKKCVSDGDFQKTKGIRSEQPIVTDKICGFRKFDKVQYFGKEYFIKGRMSTGYAFLMDIDGNKADFSAMPKRCKTPKLSNCKRLTARSTQMVLAVAV

SEQ ID NO: 16982 - protein, 451 aa, unidentified
  REGION 1..451: note = Human gut metagenome
MSVAVISKTGERLMPTSEYRARKLLKSGKAIKYSYHPFTIQLTERKTGNIQPIELCMDTGYIHIGISVKSEKHEYLTEQIDTLTDERSRHNARRMYRSQRRNRKRYRQPRFNNRKKDKGRIAPSLEHKKNIHVQTISRINNVMPLTDITMEMGNFDTQVLKAKEEGRPLPQGVDYQHGERYSIATLREAVFARDGYKCQCCGRTIKDGAILHVHHIKYRSQGGTNSISNLATVCDKCHTPKNHKPGGKLYGWKPKLPSFKGATFMTTIRWQLYNEAKALFPDIDIHITYGAATKERRRELNIDKSHINDAFVMGQFHPRHRIKAVLYKKKRRNNRCLEKFYDAKYIDSRDGKKRSGQELFNGRINRNHKKDSENLHQYRLQKVTAGKRTVRKQHYSVQPHDIIIYESRKRETTGCHCNGARVMLLPDKKSVSIKKIKIYRYAGGYFKSTFN

SEQ ID NO: 16983 - protein, 431 aa, unidentified; identical to SEQ ID NO: 6230
  REGION 1..431: note = Human gut metagenome

SEQ ID NO: 16984 - protein, 442 aa, Ktedonobacter sp.
MSKVLLLDMTKQPLDPVHPGRARLLLKEGKAAVYRRYPFTLILKTQVDSPAVSALRLKLDPGAKTSGLALVDDASGEVVWAAELGHRGASIKKRIDARRGVRRKRRSRFTRYRKPRFHNRKSSRRKGRLPPSLESRVANMLTWVGRLRRLCPIEVISMELVKFDMQAMQNPEITGAQYQQGERMGYETREYLLAKWGRRCAYCGAEDVPLEIEHILCRARGGTHRVSNLTLACEPCNVKKGTQLIEDFLNKKPDVLARILAQAKTPLKAAAAVNATRWHLFERLKATGLPLETSSGGLTKYNRAKRHLPKTHWLDAACVGQSTPKPLETSQVVPLLIEATGHGNRQMCGVDEHGFPIRHRQRKKVHFGYQTGDLVRAVVPTGARAGTHVGRVLARASGSFDLRTKAGRQAGISYRYCRPIHRNDGYRYQQGGRHAVPATQST

SEQ ID NO: 16985 - protein, 453 aa, Moorena sp.; identical to SEQ ID NO: 7420

SEQ ID NO: 16986 - protein, 433 aa, unidentified
  REGION 1..433: note = Bioreactor metagenome
MVYVLSIEGKPLMPTNRRGKIRRLLKEGKAKVVKVKPFTIQLLYQTKEYTQPITLGIDSGYTYIGFSAITEKRELISGEVNLRNDVSELIKEKHMYRRIRRNRLRYRKPRFNNRKRKEGWLAPSIQHKLDSHVRFIQKLKTILPITNIIVEVANFDTQKIKNPNIGGIEYQQGEQKGFWNIREYVLYRDNYICQLCGKQGIPLEVHHIGYWIPDRTDRPDNLITLCIKCHTPKNHQEGGKLWGMKPKSKPLKEATFMSTVRWKLVNTLSCKHTYGYITKSKRIILGLEKTHYNDAFCIAGGTNQERITPIMFEQIKRNNRSLEKFYDAKYVDIRTGKILSGQELFSGRRCRNKNLNSENLHKYRGHKQSKGRRSIRTQRYFYQPKDIVTYDRKQYIVKGIQSKGSYIKLEGLSKPVKVELVKPYIFRKGICTI

SEQ ID NO: 16987 - protein, 431 aa, unidentified; identical to SEQ ID NO: 2952
  REGION 1..431: note = Human gut metagenome

SEQ ID NO: 16988 - protein, 408 aa, unidentified; identical to SEQ ID NO: 8232
  REGION 1..408: note = Human gut metagenome

SEQ ID NO: 16989 - protein, 442 aa, unidentified; identical to SEQ ID NO: 3791
  REGION 1..442: note = Human gut metagenome

SEQ ID NO: 16990 - protein, 470 aa, unidentified; identical to SEQ ID NO: 2925
  REGION 1..470: note = Human gut metagenome

SEQ ID NO: 16991 - protein, 427 aa, Enterococcus sp.; identical to SEQ ID NO: 5630

SEQ ID NO: 16992 - protein, 424 aa, Oscillatoria sp.; identical to SEQ ID NO: 13249

SEQ ID NO: 16993 - protein, 420 aa, unidentified
  REGION 1..420: note = Human gut metagenome
MQYVYVLNKHGEPLMPCSPGKARILLKQQKACVVKRTPFTIKLLYGSAGYKQPITLGVDAGSKHVGLSASTEKRELYSEEFTPRNDVVELLSTRRQNRRSRRNRKTRYRAPRFNNRIHSKHKGWLAPSVEVKIQEHITVIKRICRILPITLVRVETAEFDTQHLKAMLSGKPLPVGTDYQLGEMYDEYNARQYVLRRDNYTCQRCGAHTTKKKTVKLHVHHLESRKTGGNAPSNLITLCVDCHKAFHAGKVKLDGKKRGKSLKDAAFMGAMRNTLLTRLRNELNIPVQNTYGYITKLLREQNDIKKSHVNDARCISKHPLAEPCSVCYRTKAIRHHNRQTHKANFSKKGIRKRSQIPYLVEGFRLWDKVLYKGQECFVSGRRASGSFTLKRLDGTRISKGVTFKKLRLLEPATNYLIERM

SEQ ID NO: 16994 - protein, 431 aa, unidentified; identical to SEQ ID NO: 13432
  REGION 1..431: note = Human gut metagenome

SEQ ID NO: 16995 - protein, 461 aa, unidentified
  REGION 1..461: note = Human gut metagenome
VQPLYLGIDPGRSNIGVAVVKTDGMAVFTAHLETRNKEIPKLMKKRKDSRRARRTNGRRCRRQRRAKANGTISKKCVKQTTAQNGSVSKRAKEIGVIKRHLPGCEKDVLCIGIKNKEAKFNNRTRPTGWLTPTANQLLQTHINLVKKIQKFLPISDVVLEVNKFAFMQLDNPNIQKWQYQKGPLYQKESLKSAVSEMQEHHCLFCKKKIDHYHHVVPQHKNGSNTIDNIVGLCTQHHDLVHKDATWQKRLAKKKTGLNKKYGALSVLNQIIPALTKELSSLFPKHFFVTNGKSTYDYRAAHGVSKDHWLDAYCIACSVLPNDTCDKTINSRVPYELKQFRRHDRRALNNENMSRVYTFNGKMVATNRHKATEQTTDSLEEFRQRQPNDVCNLKVKEHHPTYRNMSRNYPGSIFLVEKQVHIMQGIAGSKDGKATTYKDTNANSIAAGKCKFVAKNSGILFV

SEQ ID NO: 16996 - protein, 406 aa, unidentified; identical to SEQ ID NO: 15669
  REGION 1..406: note = Human gut metagenome

SEQ ID NO: 16997 - protein, 470 aa, unidentified
  REGION 1..470: note = Human gut metagenome
MSVFVVGLNGCRLMPTSERKARLLLKHGKASVYRKVPFTIKLNYKTGSTTQSGYLGIDTGSQHIGVSVVREDGAVLHKEEIGLRDSMSKRKLMQSRASSRRGRRHRKTRYRHPKWRPKAKRVYCEIPDRKGRHWKKKEITFASKRPKGWLPPSLQSKTDHHIRWIKKLQELLPEEYRLSIELGRFDPARLKDPEIHGELYQKGPQYDYENVRAYVLNRDRYTCQVCGKKGGKLHVHHILYRSHGATDDPQYMATVCSDCHNTENHQQGGILYQWMQKQKKFTRGLRDATFMNILRKRLIEAFPGATFTYGNITKADRERLRLPKSHGNDATAIAIVKTGIMTVKDKEPVIYIQQVRRKKRSLHEETPRKGRKEPNRTASRYDKNTKAVTVTKRKNKKKITITGCLFDRVELNGKKGWISGFTDKSCYVKDVNDQYIRTSPKYKQVSLSKLKILHHCGNWAIGARQSLGKG

SEQ ID NO: 16998 - protein, 415 aa, unidentified
  REGION 1..415: note = Human gut metagenome
MVYVVANDGQPLMPTERHGKVCRMLKSGIAKVVKKCPFTIQLQYESERNVQPVALGIDAGSKHVGVSATTKAKVLYESDVELRDDIVKLLATRRQLRRRRRSRKTRYRPARFDNRRRKEGWLAPSIRQKIESHLTVVANVCKILPVSQIIVETASFDIQKIKNPDIQGIEYQQGEQMDFWNIREYVLFRDGHICQCCKGRSKDKILNVHHIESRKTGGNAPNNLITLCETCHKGYHNGTVILPKNIKHGMQFKDAAFMGIMRWTFYNTLKEQYEPDIPVSMTYGYLTKNTRIEHGLPKEHYIDARCISGNPDAVSDGTYYYQKKVRCHNRQIHKQTILKGGIRKSNQAEYLVKGYRLFDKVRYQGREYFIFGRRKSGFFDIRTLSGEKVNKGSINVKRLTFVDTRKNYLTERRTV

SEQ ID NO: 16999 - protein, 415 aa, unidentified; identical to SEQ ID NO: 4916
  REGION 1..415: note = Human gut metagenome

SEQ ID NO: 17000 - protein, 413 aa, unidentified
  REGION 1..413: note = Human gut metagenome
MTSYAFVLDANGKQLAPTKEPKAWFLIRKKRAALVSKYPMVIQLKKEIPEKEICQDEIRCGIDDGGLHVGIALVQKCKTRNKVVFKGIIEQRNDVKHLMEVRRGYRRYHRYHKRYRQARFDNRKSSKREGRIAPSILQKRQATIRVIHWLNKWINITNYWLEDVSVDIRALTDGYQSYRWQYKKSNRLDENIRKAAILRDDGKCMECGKSNCRLEVHHIKPKRRNGSNTLDNLITLCESCHQKTEGQEELYMDRYFSLLKSSDNKNLNDAQHVMIGKMWLRKQLSGLGVLYLTSGGDTANKRIDWNIEKSHTNDAVCITDLQPDTCDIKEWAIKPMRRQSKAKTDHVLGIHHRDLVEYTFKNGETHRGYVTALYPEQKAINFQSQTKHCKKVNARKCKLLWNYSKIYWFENAS

SEQ ID NO: 17001 - protein, 518 aa, unidentified; identical to SEQ ID NO: 9967
  REGION 1..518: note = Human gut metagenome

SEQ ID NO: 17002 - protein, 414 aa, unidentified; identical to SEQ ID NO: 2588
  REGION 1..414: note = Human gut metagenome

SEQ ID NO: 17003 - protein, 415 aa, unidentified
  REGION 1..415: note = Human gut metagenome
MKMIYTRSKENKALMPTERGGRIGYLLRHGKAHVVSRVPFVVQLDYESPTYTQAISLGIDTGSKHIGVSASNEKKELFAAQVELRSDVTKLLSDRRELRRTRRYRKTRYRKPRFDNRRKKVGWLAPSVEQKVGSHLKVIRLVRGLLPLSRITIEVVQFDIQKIKSPNIEGEEYQQGEQSGFWNVREYVLARDGHRCVHCKGKSKDPILNVHHLESRKTGGNSPSNLVTLCESCHKAYHRGEFELKIKCGRPFRDASVMSIMRWAVYERARSEFGNINLTYGYATKHTRIENGIAKTHAADAFCIARNVHARRSDFFFLCRCVPRHTRALHVANPKKGGLRRSTIAPHKVGGSRFQRFDMVRWKGKDCFIFGSTNGRPVLRNCSGDKIHETSSVNIKNVKFIKRLRNNILIEIKYL

SEQ ID NO: 17004 - protein, 419 aa, unidentified; identical to SEQ ID NO: 3867
  REGION 1..419: note = Human gut metagenome

SEQ ID NO: 17005 - protein, 489 aa, Moorena sp.
MLLQFQPLEAPVADTLQGKDETNRSGMPLINTVEESRRGTSTSARHQPRKGFRKEGTDVVFVLDKHKRPLMPCTEKRARLLLRQARAVVHRRAPFTIRLKDRSVADSALQPVVLKLDPGSKTTGVALARAADTPDGSVHHALHLAEITHKGALIAERMRKRAQARQRRRTANLRYRAPRFDNRRRSAGWLTPSMRSRLDNLLTWARRYGRWAPIHSIELEHVRFDTQLLQNPEISGAAYQRGDLYDYELWHYLLEKWGRACVYCGATNLPLERDHIIPRSRGGSDRASNLTVACRRCNQDKGDRTASEYGYPEVQARARVPLADVAAVNTLRWALRNRLQALGITVGCWSGGRTHWNRVRFGLPKTHAIDALCVGQLVGVRGDDVPVLGVRAMGRGAYCRTRYTRYGFPRGYLLRQKHVHGFATGDLVRAELPAGKHAGVHIGRVAVRASGSFRVGTVDGISWRHCRLLQRADGYEYAWKGGVALPPQP

SEQ ID NO: 17006 - protein, 429 aa, unidentified
  REGION 1..429: note = gut metagenome
MIFVIDSNKKTLDMCHPAKARKLLRDGKAAIYRKEPFTIILKKEIKNDVEKDYRLKIDYGSRHTGLAILKGEKVCWLGQIEHRTDIKELLDKRRGYRRRRRNTNLRYRKARFLYRIKPRGWLSPSLMSRVNNIKTFVRRLVRILPLGAISYENVKFDTQKLQNPDISGIEYQQGTLAGYEVREYLSERFEHKCCYCGISEGEGRKFEVEHIIPKSRGGSNRINNLAWSCHDCNKEKGNRTAEEYGHPEVQAQVQRSLKDAALVTATRWKVLNVLKSFELPVECGTGGLTRYNRTQRNIPKDHYFDACCVGVSTPQELRFSTNIVHIITAIGRGKHCRTNVNAFGFPRGYLARQKKFFGFQTGDIVKAVVIRGKKIGTYFGKVLCRKTGSFDIRTKTGRVQGIGYRYFRLIQHLDGYSYDRKQCRIPPHV

SEQ ID NO: 17007 - protein, 396 aa, unidentified
  REGION 1..396: note = Human gut metagenome
VVRRTPFTIQLTIATGESKQPVSLGVDAGYKHVGLSASTEKAELYASEVELRKDITDLLSARRALRQSRRNRKTRYRAPRFDNRIRTKRKGWLAPSVENRINAHLSRIEAVLRLLPITKITVETASFDMQRLKNPDISGKEYQEGEQLGFWNIREYVLCRDGHVCQHCYGRSKDPVLNVHHLESRRTGGDSPGNLITLCETCHKALHRGEITLKPKRGQSFRAEAFMGIMRWEVLGRLKASHPELEVNNTYGYRTKHARIANDIAKSHCADAFCIAGNLGAERLGEFFFQKQTRRNNRQIHKLSILKGGIRKRNQAPYEIKGFRLFDKVACQGEEGFIFGRRSSGFFDVRKVDGTRISAGISYKKLHLLEKRRTYLTEIRKEEALPPLPEGRGLRA

SEQ ID NO: 17008 - protein, 429 aa, Parasutterella sp.; identical to SEQ ID NO: 3656

SEQ ID NO: 17009 - protein, 457 aa, unidentified; identical to SEQ ID NO: 3236
  REGION 1..457: note = Human gut metagenome

SEQ ID NO: 17010 - protein, 465 aa, unidentified; identical to SEQ ID NO: 6446
  REGION 1..465: note = Human gut metagenome

SEQ ID NO: 17011 - protein, 466 aa, unidentified
  REGION 1..466: note = Human gut metagenome
LSIKPLINIGEGVIYSSICTGLSLQTYQKRKEVPYMVYVLDIDGQPLMPTTRHGKVRRLLNNHLAKVVKRCPFTIQLLYQSTKETQPVSLGVDAGSKHIGMAATTEKKVVYQEELSPRNDVVKLLSARRTLRRTRRNRKTRYRKPRFNNRAHSKHKGWLAPSVEVKIQEHITAIKRICQILPISEIHVETAEFDLQRLKAMDEGSPLPVGIDYQLGEQYDFYNTRQYVLHRDGYTCQCCGTHDNNIKLHVHHIESRQTGGDAPNNLIILCEHCHKALHEGKLELPKGKKRGKSYRDATFMGVMRKTLLERLKKEIDVPVEGTYGYITKYWRERAGLEKSHIHDAVCISKYPYAKPLDIYYLTKTVRHHNRQIHKSNFSKGGIRKRNQAPYLVKGFRLFDKVLYQGKEYFIFGRRATGYFDIRTLDGTKVNKGSISYKKLRIQDTAKAYLKEARAIPHMNKFTCVLA

SEQ ID NO: 17012 - protein, 443 aa, Anoxybacillus sp.; identical to SEQ ID NO: 5909

SEQ ID NO: 17013 - protein, 430 aa, unidentified; identical to SEQ ID NO: 6608
  REGION 1..430: note = Human gut metagenome

SEQ ID NO: 17014 - protein, 470 aa, unidentified; identical to SEQ ID NO: 2825
  REGION 1..470: note = Human gut metagenome

SEQ ID NO: 17015 - protein, 451 aa, unidentified
  REGION 1..451: note = Human metagenome
VSANQETMLMFCIDNRETHIPSMTLARRKMLRKEGYPEMENIKKEYCFVVDKNNHPLAPTKMNKGWYLIRKNKAKLKSMYPMVIQLKKEIKFNKNDKSYMVCGIDDGSLHVGLAIVQKCPTKNKIIFKGTIEQRQDVKHKMDTRRGYRRYHRYHKRYRPARFNNRISSKRIGRLAPSIKQKKDAILRVLYQLNKWINIKEYYLEDVCIDIRAMTDDYKPYKWQYQKSNRLDENLRKAAIIRDNYKCQECGKSNCKLEIHHIRARKYSGADTIGNLITLCSKCHQKTEGKEQDFEDKYFKIIDSKPKRFDYAMHVMQGKNYLRNKISELGLLHLTNGGETANKRIEWNIEKSHSNDAICIADGIPDTCNIKEWIIKPMRRKSKAKTDNVLGIKHRDLVSYTYKNGETHAGYVTALYPKQLALNFQSRIKHCKKVNARKCRLLWQFNKIYWLE

SEQ ID NO: 17016 - protein, 425 aa, unidentified; identical to SEQ ID NO: 13021
  REGION 1..425: note = Human gut metagenome

SEQ ID NO: 17017 - protein, 409 aa, Moorena sp.; identical to SEQ ID NO: 2993

SEQ ID NO: 17018 - protein, 422 aa, unidentified
  REGION 1..422: note = Human gut metagenome
LNKRGKPLMPCSPAKARLLLKEKKAIVVRRTPFTIQLTIATGESKQPVSLGVDAGYKHVGLSASTEKAELYASEVELRKDITDLLSARRALRQSRRNRKTRYRAPRFDNRIRTKRKGWLAPSVENRINAHLSRIEAVLRLLPITKITVETASFDMQRLKNPDISGKEYQEGEQLGFWNVREYVLFRDGHVCRHCHGRSKDPVLNVHHLESRRTGSDSPDNLITLCETCHKALHRGEITLKAKRGQSFRAQAFMGIMRREVLNLLKASYPELKVHETYGYLTKHARIANGIVKSHGADAFCIAGNLGAERLGEFFFQKQTRRNNRQIHKLSILKGGIRKRNQAPFETKGFRLFDKVACQGEEGFIFGRRSSGSFDVRKLDGTRISAGISCKKLRLLEKRRTYLTEIRKEEALPPLPEGRGLRA

SEQ ID NO: 17019 - protein, 442 aa, unidentified
  REGION 1..442: note = Human gut metagenome
MGEGLQPTERSRRQNLRVFVLNKRGQPLMPCSPAKARLLLKEKKAVVRHRTPFTIQLTQATGETVQPVTLGVDAGSKFIGLSASTEKAEHYASEAELRTEVVDLLSSRREMRRARRNRKTRYRAPRFDNRIHSKNKGWLTPSVENKINTHLSCVDNVRKCLPVTKIVVETAAFDIQKIKNPDIEGTDYQQGDQLGFWNVREYVLCRDGHQCCHCHGKSKDPILNVHHLESRKTGGNAPNNLITLCETCHKAYHDGKITLKQKRGQVFRDAAFMGIMRWTFFNRLKAQCPEIEVRNTYGYLTKNTRIRHGLEKSHHTDAFCIAGNLEAKRLGVYFFQKQTRKHNRQIHKMSILKGGVRKLQQAPYEVKGFRLFDKVRYDGREAFIFGRRSSGYFDIRLLTGEKVSAGVSYKKLVLLEKRKTFLTQLIKENAIPPATEVVGFLA

SEQ ID NO: 17020 - protein, 414 aa, unidentified; identical to SEQ ID NO: 2588
  REGION 1..414: note = Human gut metagenome

SEQ ID NO: 17021 - protein, 431 aa, Microcoleus sp.
MSNFVFVLDTNKQPLDPVTSGLARRMLTQGKAAVYKRYPFTIILKYSCDKPQTKSHEIKIDPGSKTTGLALLQGDEVIWAAELAHRGNHITGDLASRSAIRRNRRNRKTRYRQPRFLNRTRTPGWLPPSLASRVSNIVTWVNRLRRYVPVTAISQELVKFDTQAMLAPEISGIEYTQGELAGYEIRQYLLEKWGRKCAYCGVENTPLEVEHIHPKSKGGSSRVSNLTLACRNCNLAKCNRDIKDFLSEKPDILSRVLKFACLPLKDAAVVNSTRWSLFEKLQQTGLPVTTGTGGRTQYNRTRMGLPKSHWLDAACVGEVEQLVILTRQPLLITAKGWGNRQMCTPNKYGFPNKHRTRCKTFFGFQTGDMVRAVLPSGKFAGTHVGRLAVRESGVFDLRTAWGKISPMRHKYCKTVHRNDGYMYGFSTLVRY

SEQ ID NO: 17022 - protein, 413 aa, unidentified
  REGION 1..413: note = Human gut metagenome
MTSYSFVLDANGKQLAPTKEQKAWFFIRKKRASLVSKYPIVIQLMKEIPEKEICQDEIRCGIDDGGLHVGIALVQKCKTKNKVVFKGTMEQRNDVKHLMEVRRGYRRYHRYHKRYRQARFDNRKSSKREGRIAPSILQKRQATIRVIHWLNKWINITNYWLEDVSVDIRALTDGYQSYRWQYQKSNRLDENIRKAAILRDGGKCMECGKSNCRLEVHHIKPRRRNGSNTLDNLITLCESCHQKTEGQEELYMDRYFSLLKSSDNKNLNYAQHVMIGKMWLRKQLSGLGVLYLTSGGDTANKRIDWNIEKSHANDAVCITDLRPDTCDVKEWTMKPMRRQSKAKTDHVLGIHHRDLVEYTFKNGETHRGYVTALYPEQKAINFQSPTKHCKKVNARKCKLLWKYSKIYWFENAS

SEQ ID NO: 17023 - protein, 414 aa, unidentified
  REGION 1..414: note = metagenome
MPCSPAKARLLLKEKKAIVKRRTPFTIQLTIATGESKQPVTLGVDAGYKHVGLSASTEKAELYASEVELRQDITDLLSARRALRQSRRNRKTRYRAPRFDNRISTKRKGWLAPSVENRINAHLSRIEAVLRLLPVTKITVETASFDLQLLKNPDISGKEYQEGEQLGFWNIREYVLCRDGHVCQHCYGRSKDPVLNVHHLESRRTGGDSPGNLITLCETCHKALHRGEITLKAKRGQSFRAEAFMGIMRWEVLGRLKASHPELEVNNTYGYRTKHARIANDIAKSHCADAFCIAGNLGAERLGEFFFQKQTRRNNRQIHKLSILKGGIRKRNQAPFEVKGFRLFDKVACKGEEGFIFGRRSSEYFDVRKLDGTRISAGISYKKLHLLEKRRTYLTEIRKEEALPPLPEGRGLRA

SEQ ID NO: 17024 - protein, 391 aa, unidentified
  REGION 1..391: note = Human gut metagenome
YIGISAKSKSREYVSTQYDTLQDEKEHHDDCRKMRRSRRNRLRYRKPRFDNRKRDEGWLAPSLEHKKQLNISLIERYVSVIPITHATVEVGSFDTMLLQSIQKGEAKPEGADYQKGPRYNLATLREAVFYRDNYTCQVCKRKITDGAILHMHHMFYWKGRHGYQLDELVTVCEKCHTPANHQKGGKLYGFGKDKKFANLSGAAFMNAVRWQIVNALYATYGKEFVTITYGAMTKEKRIALQLEKTHNNDAYAMGDYHPARRCKFRHYQKRRRNNRVLEKFYDATYVDTRTGNKAKGKELFNGRISRNHKKDCENLHKYRSKKVSKGRRSIRRQHYAIQPYDTVRFEGKTYITSGCHNKGTRLLIPVNGKSKSVAISKVQVVCHAGAWIQII

SEQ ID NO: 17025 - protein, 428 aa, unidentified; identical to SEQ ID NO: 5036
  REGION 1..428: note = Human gut metagenome

SEQ ID NO: 17026 - protein, 413 aa, unidentified; identical to SEQ ID NO: 3220
  REGION 1..413: note = Human gut metagenome

SEQ ID NO: 17027 - protein, 442 aa, unidentified; identical to SEQ ID NO: 3791
  REGION 1..442: note = Human gut metagenome

SEQ ID NO: 17028 - protein, 424 aa, unidentified; identical to SEQ ID NO: 3232
  REGION 1..424: note = Human gut metagenome

SEQ ID NO: 17029 - protein, 431 aa, unidentified
  REGION 1..431: note = Human gut metagenome
MPNKVYVINKHGRPLMPCSPAKARHLLDEGKAKIKKRTPFTIQLVYGSSGYTQEVILGVDAGSKTIGVSALTKKEELFAANVIPRNDVVDLLSTRREFRRARRNCKTRYRKPRFDNRVRSKHKGWLAPSVEVKIQEHITSIKMVCRILPVSKVVIETAEFDLQLLKAIADGKPVPQGEDYQKGEMYGHYNVRQYVLWRDDYTCQCCGAHATKKKEVWLHVHHLESRKVGGDAPDNQVTLCESCHEKLHKGLITEGDFKKRKRRSTRDATFMGIMRKTLMQRLCSELPIPVVETRGYITKATREKLLVLPKSHTNDALAIAQGKRGFNVGYLPGIIQTDKIYTIRPVRHHNRQLHKAAILKGGIRKSNQVGKYVFGYRLFDKVQFNGQDCFIWGRRTTGIFTIKTINGKMIKDGISFKKLKPVEKSTSYLIA

SEQ ID NO: 17030 - protein, 419 aa, Moorena sp.
MQNYVFVVDTNKRPLNPISPKKARRLLGKSKAAVFRMYPFTIILKTAVDNPTISPCQIKIDPGSKVTGFALVQNNQVIWGMELEHRGGLIKKKLESRRAVRRGRRSRHTRYRKPRFLNRKRPESWLPPSLEHRIMTIETWVKRLIKFCPVNEIWVERVKFDTQKMPNPEINGVEYQQGDLVGYEVREYLLEKWGRECTYCGKQSVPLQIEHIHPKSKGGSDRVSNLCLACEKCNQRKGNKPIEEFLKKKPSLLQKIKSKAKQPLRDAAAVNATRNKLVKVLLRIKSVVTGTGAQTKYNRTKLGFPKEHWIDAACVGDIETLILRTSQPLLVTCKGQGSRQKAALNKYGYPIRHNPLKPIKGWVTGDIAKHQELGIGKVTPRSKGSFGFTPLGMKGYKSCKPQDISAIHRKDGYIYSFYK

SEQ ID NO: 17031 - protein, 396 aa, unidentified
  REGION 1..396: note = Human gut metagenome
VVRRTPFTIQLTIATGEAKQPVSLGIDAGYKHVGLSASTEKAELYASEVELRQDITDLLSARRALRQSRRSRNTRYRAPRFDNRIRTKRKGWLAPTVENRINVHLSRIETVLRLLPVTKITVETASFDTQLLKNPDIAGKEYQEGEQLGFWNVREYVLFRDGHVCQHCHGRSKDPVLNVHHLESRRTGGDSPGNLITLCETCHKALHRGEIKLKAKRGRSFRAETFMGIMRWGVLNRLKASHPKLEVHNTYGYRTKHARISNGIAKSHCADAFCIAGNLGAERLGEFFFQKQTRRNNRQIHKLSILKGGIRKRNQAPFEVKGFRLFDKVACQGEEGFIFGRRSTGYFDVRKLDGTCISAGISYKKLHLLEKRRTYLTEIRKEEALPPPPEGRGLRA

SEQ ID NO: 17032 - protein, 366 aa, unidentified
  REGION 1..366: note = Human gut metagenome
KHVGLSASTEKAELYASEIELRQDITDLLSARRALRQSRRNRKTRYRAPRFDNRIRTKRKGWLAPSVENRINAHLSRIEAVLRLLPVTKITVETASFDLQLLKNPDISGKEYQEGEQLGFWNIREYVLCRDGHVCQHCYGRSKDPVLNVHHLESRRTGGDSPGNLITLCETCHKALHRGEITLKAKRGQSFRAEAFMGIMRSEVLNRLKASHPELEVNNTYGYRTKHARIANDIAKSHCADAFCIAGNLGAERLGEFLFQKQTRRNNRQIHKLSILKGGIRKRNQVPFEVKGFRLFDKVACKGEEGFIFGRRSSGFFDVRKLDGTRISAGISYKKLRLLEKRQTYLTEIRKEEALPPLPEGRGLRA

SEQ ID NO: 17033 - protein, 456 aa, unidentified
  REGION 1..456: note = Marine metagenome
MAIFVLDKKKQPLMPCSEKRARLLLARGRAVVHKRYPFTIRCKDRVGGETQPLRLGIDPGSKTTGLALMREPDSQQRHVLCLFELIHRGFQIKKALQQRAAFRRRRRSANLRYRAPRFNNRIKPKGWLAPSLQHRVDTVTAWVNRLSRLAPVTAISQELVRFDTQKLDNPEISGVEYQQGTLLGYEVREYLLEKWGRECAYCGTTDTPLEIEHVVPRSRGGSNRVSNLTLSCHPCNAEKDSQTLTDFFATNKGLKKRLKANGHAADARLDRVQRQLKQPMRDASAVNATRWALFSALKTTDLPVAVSSGGRTKYNRQRLNIPKTHALDAACVGAFEKLHDWTVPTLTIKAMGRGSYQRTRLTKHGFPRGFLMRQKQVHGFQTGDMVRAIVPTGKKAGTHTGRVAIRKTGSFNIQAEYGAVQGISHKYCTLIQRSDGYGYYVTLFSNLTGGAGQAVA

SEQ ID NO: 17034 - protein, 456 aa, Moorena sp.; identical to SEQ ID NO: 9766

SEQ ID NO: 17035 - protein, 430 aa, Nostoc sp.; identical to SEQ ID NO: 7739

SEQ ID NO: 17036 - protein, 295 aa, unidentified
  REGION 1..295: note = Human gut metagenome
MRLDNPNIQKWQYQQGPLHQKASLEEAVSEMQEHHCLFCKNTIDHYHHVVPQHKNGSNTIDNIVGLCTKHHDLVHKETEWQEKLAKKKTGLNKKYGALSVLNQIIPALTKELSSLFPKHFFVTTGKSTYDYRAAHGISKDHWLDAYCIAGSVLPNDVCDNSINNRIPYELKQFRRHDRRASHKENVNRVYTLNGKKVATNRHKAIEQTADSLEEFRQRQPNDVYKLKVKEHHPEYRNPKRNFPGCVFLVGKHTHVMQGTSGSHNGKADGYYDTNGNSYSSGKCKFVVKNKGIVFA

SEQ ID NO: 17037 - protein, 453 aa, unidentified
  REGION 1..453: note = Human gut metagenome
MLMAVAVVSRTGVPLMPTSPYRARKLLASGKAEKYGYDPFTIRLTERETGDTQPVELCMDTGYIHIGVSVKSEKHEYLALQIDTLTDEKKKHEKCREKRRNRRSRKRYRKPRFDNRKRDKGWLAPSLEHKKEIHVRAAERICRVVPVTDITMEMGNFDTQVLKAREEGRPLPQGTDYQQGERYGTATLREAVFSRDNYTCLCCGRTMKDGAYFHVHHIRYRSQGGTDRMANLATVCEKCHTPANHQPGGKLYNWKPEIKSFKGATFMTAVRWQMYREIKEKIPDISVHLTYGAATKERRRALDIEKSHVNDAFVMGRFHPGHRARPELYIKKRRNNRVLESFYDARYIDSRDGKRKSGKELFNGRISRNHKKDSENLHKYRLRKVSKGKRSIRKKHYPIQPHDILVYCGRKYETAGCHNLGTGAILLPERRSIAVSKLKIYRYSGGYYKAEFN

SEQ ID NO: 17038 - protein, 456 aa, unidentified; identical to SEQ ID NO: 15919
  REGION 1..456: note = Human gut metagenome

SEQ ID NO: 17039 - protein, 405 aa, unidentified
  REGION 1..405: note = Human gut metagenome
GRRCRRQRRAKANGTISKKCVKHDTAQNGSVSKRAKEIGVIKRHLPGCEKDVLCIGIKNKEAKFSNRTRPEGWLTPTANQLLQTHINLVKKIRKFLPISDAVLEINKFAFMQLNNPNIQKWQYQQGPLYQKANLEEAVSEMQEHHCLFCKKPIAHYHHVVPQSENGSDTIGNIVGLCTKHHDLVHKDTAWQKKLAKKKTGLNKKYGALSVLNQIIPALTKELSSLFPKHFFATNGKSTYDYRSAHGVSKDHWLDAYCIACSVLPNDVCDSGINNRVPYELKQFRRHDRRALNNENMSRVYTLNDNVVATNRHKATKQTTDSLEEFRQNHPDDVCKLKVKEHHPTYRNMNRNYPGSVFLIGKQVHVMQGIAGSKDGEATTYKDTNANSIAAGKCKFVAKNSGILFV

SEQ ID NO: 17040 - protein, 364 aa, unidentified
  REGION 1..364: note = Human gut metagenome
YKHVGLSASTEKAELYASEVELRQDITDLLSARRALRQSRRNRKTRYRAPRFDNRIRTKRKGWLAPSVENRINAHLSRIEAVLRLLPVTKITVETASFDLQLLKNPDISGKEYQEGEQLGFWNIREYVLCRDGHVCQHCYGRSKDPVLNVHHLESRRTGGDSPGNLITLCETCHKALHRGEITLKAKRGQSFRAEAFMGIMRWEVHSRLRALHPGIEVSNTYGYRTKHARIANGIAKSHCADAFAGNLGAERLCEFFFQKQTRRNNRQIHKLSILKGGIRKRNQAPFEIKGFRLFDKVVCKGEEGFIFGRRSSEYFDVRKLDGTRISAGISYKKLHLLEKRRTYLTEIQKEECPPLPEGRGLRA

SEQ ID NO: 17041 - protein, 416 aa, Moorena sp.; identical to SEQ ID NO: 7050

SEQ ID NO: 17042 - protein, 415 aa, unidentified
  REGION 1..415: note = Human gut metagenome
MVYVLDKNGQPLMPTDRHRKVRLMLQSGQAKVIKRCPFTIQLNYDSGHQTQEISLGIDAGSKHIGVSATTKIKVLYEADVELRNDIVDLLSSRRELRRGRRNRKTRYRQAKFNNRRRGNGWLAPSIRQKIGTHLTVVENICKMLPISRIMVETASFDIQKIKNPDIQGAEYQQGDQLEFWNVREYVLFRDGHTCQCCKGKSKDKILNVHHIESRKTGGNAPNNLITLCETCHTGYYKGTVQLPKAIKRGMRFKDAAFMGIMRWAFYEALKQQYEPVALVHNTYGYITKHTRIEHNLPKEHYVDARCISGNPDAFPNGEYYYQKKVRCHNRQIHKLTVLKGGIRKQNQATYLVKGYRLFDKVSYQGKGYFVFGRRQSGFFDIRTLSGEKVNKGSLSCKKLKFIATRTYYLTERRAV

SEQ ID NO: 17043 - protein, 406 aa, unidentified; identical to SEQ ID NO: 3415
  REGION 1..406: note = Human gut metagenome

SEQ ID NO: 17044 - protein, 442 aa, unidentified
  REGION 1..442: note = Human gut metagenome
MSTSVFVLDKKHRPLMPCRPARARRLLRAGRARVVKRFPFVIRLVDRTVEQSEVQPVLIKLDPGSRETGAAVVRDDEKKRHHALAFFVIEHRGGAIRDALKARSAFRRRRRSQNLRCRSPRFLNRVKPKGWLPPSLRHRVETTLSFVRRMCRYLPVSGIATELVKFDSQKLQNPEVSGVKYQQGTLFEYEVREYLLEKFGRKCVYCGAEGVPLNIDHVVPRAKGGSNRVSNLVLACVSCNQKKGARSLEDFLKGKPEVLARVRRELKTPLRDAAAVNATRWVLFNELKATGLPVETGSGALTKFNRHAFGVEKEHWLDALCVGRLNGAVTRKGLNVLEIRCMGRGSRQRTRLTKYGFPRGYLMRQKCVHGFATGDMVEANVPKGKKAGLWRGRVAVRVSGSFNIQTPKGVIQGVGWKHCRLISHNDGYGYAWLGHAPHSSPA

SEQ ID NO: 17045 - protein, 470 aa, unidentified; identical to SEQ ID NO: 2825
  REGION 1..470: note = Human gut metagenome

SEQ ID NO: 17046 - protein, 442 aa, unidentified; identical to SEQ ID NO: 16306
  REGION 1..442: note = Human gut metagenome

SEQ ID NO: 17047 - protein, 515 aa, unidentified; identical to SEQ ID NO: 4372
  REGION 1..515: note = Human gut metagenome

SEQ ID NO: 17048 - protein, 322 aa, Lactobacillus sp.; identical to SEQ ID NO: 5618

SEQ ID NO: 17049 - protein, 455 aa, Streptomyces sp.
LATFRVGEKTHQAVLHQQLALELDPADNPRDRDETGAERREATGAEHVRGEIPAASPGSGGVTPNQPVGEEPRERHPFVFVLDKHGRPLQPCTPARARKLLKKGRAVVHRHTPFAIRLKDRTIAESEVDGVELGIDPGSKHTGIATFTAQAGERRGRYAVQLDHRGAVIRKKMGQRAAYRRRRRTSNLRYRAPRFNNRTRPDGWLAPSLQHRVTTTVSWVRRLARWAPVRAVHVERVAFDTHAISAGRPLEGAEYQHGTLHGTEIREYLLAKFGRACVYCGIAGVPLNIDHVHPRSRGGSDRISNLVIACIPCNESKSHRPVEEFVRDKSKLAKILAQAKAPLRDAAAVQSTRWALWRALDQMLPTHIASGGRTKWNRTRCGLPKSHTLDALNVGKLDTVTETANPILVAGCSGRGQHQRTSPDRHGFPRRTSPRIKTVHGYATGDLVTASVPKG

SEQ ID NO: 17050 - protein, 426 aa, Anoxybacillus sp.
MVFVLDTNKRPLAPCHEAVARKLLKQGKAAIYKRFPFTIILKKSVDESEIKATYRLKIDYGSRHTGLAILRGQEVLWLAQLDHRTDIKERLDKRRAFRRARRKRKTRYRKPRFLNRRRKDGWLPPSLESRVQNIQTWVERLRKICPIEHISYENAKFDTQLMRNPEINGVEYQQGTLQGYEVREYLLEKFGRKCCYCGKENVPLEVEHIIPKSRGGTDRVDNLCLACHDCNQRKGSKTAEEFGYPHIQKQVKESLKDTSAINSTRWKAYEVLKQTGLDVECGTGARTKMNRIRLDLPKTHYFDACCVGESTTNHLYFKTKEVLFIKAKGRGSRSRTNLDRYGFPRGYLARQKFFFGFQTGDMVKAVVPRGKYQGVWFGEVACRKTGSFDIKGKDGKRIAQGINYRYVQVIQRFDGYAYGKGVAELA

SEQ ID NO: 17051 - protein, 391 aa, Methanobrevibacter sp.; identical to SEQ ID NO: 13532

SEQ ID NO: 17052 - protein, 418 aa, unidentified
  REGION 1..418: note = Human gut metagenome
MIYVRSKDGKALMPSERGGRIGYLLRHGKAHVVSRVPFTVQLDYESTTYTQEVSLGVDAGSKHIGVSASSEKKELLAAQVELRNDVVNLLSTRRELRRTRRNRKTRYRKVRFDNRKKKDGWLAPSVEQKVDSHLKVIRLVHKLLPITKTTIEVAQFDAQKIKSPDIKGEEYQQGEQMGFWNVREYVFARDGHRCVHCKGKSKDPILNVHHLESRKTGGNSPSNLVTLCETCHKAYHRGEFELKTKRGSSLRDAAVMNIMRRAVYERAKLEFGNVHLTYGYVTKHTRIENAIAKAHAADAFCIAKNVHATRLRTFFLCRCVPRHTRALHVANPKKGGIRRSTIASHKIGKSHFQRFDMVRWKSKECFIFGSTNGRPVLRDIEGIKMHENTSVNIKTIKFLKRLRNNILVEEKNFRKLSN

SEQ ID NO: 17053 - protein, 566 aa, unidentified
  REGION 1..566: note = Human gut metagenome
MEEKRMYHVKIKNEVKEYEAAITYHDIAKEYQKDYEHEIVLVFVDGKLQELHKRLKKDCEISFVTTADPIGHEAYKRSMSFLLVKAVYDVAGHKNIDKVRMHFAIGPGYYCTIQLMSVAVISKTGERLIPASEYRARKLLKSGKAIKHSYHPFTIQLTERETGDIQPIELCMDTGYIHIGISVKSEKHEYLAEQIDMLTDERGRHDACRMYRRQRRGRKRYRQARFNNRKRDQGWIAPSLEHKKKIHIQAISRINNVMPITDITLEMGNFDTQVLKAKEEGKPLPQGADYQHGERYGIATLREAVFARDNYKCQCCGRTIKDGAILHAHHIKYRSKGGTNSMSNLATVCDKCHTPKNHKPGGKLYDWKPKLSSFKGATFMTTIRWQLYSEVKTLFSDIDIYITYGAVTKERRRELDIDKSHVNDAFVMGQFHPKHRIKAVLHKKKRRNNRCLEKFYDAKYIDSRDGKKRSGQELFNGRINRNHKKDSENLHPYRLQKVTPGKRTIRKQHYKIQPHDIVIYENRKREAIGCHCNGARVMLLPDKKSASIKKIKIYKYAGGYFKSAFN

SEQ ID NO: 17054 - protein, 440 aa, Moorena sp.; identical to SEQ ID NO: 5150

SEQ ID NO: 17055 - protein, 455 aa, unidentified
  REGION 1..455: note = Human gut metagenome
MVFVLDRHHKPLMPCHPARARRLLGKGRARIHKLYPFTIRLVDRELKDSTVQPVVLKLDPGSKETGMALVREDETKTHHALYFVNLKHRGSEIKQSLLQRSSFRRSRRSRNLHYRAPRFLNRTRPQGWLAPSLQHRVDTTLSWVERLRKLAPVATLEMELVKFDTQKMQNPEIDGVAYHQGELAGFEVREYLLEKFGRKCIYCGAEGVPLNIDHIVPKSAGGSNRVSNLVLACVDCNQKKNNLPLEVFLKGDKAKINRIRSQLKTPLKDAASVNTTRWQLFEALKLTGLSLTTATGARTKYNRHQFGVPKEHWLDALCVGETAAVRGWQPLGVLVVKCTGRGAYKRTRLTKDGFPRGYLTRTKRFFGFGTGDMVVATVFASKKKGSYKGRVAVRKSGSFAIQTASRKVDGISYRYCRLLSRADGYGYSWHSSKSLINSTKETALLPRINTQVSAP

SEQ ID NO: 17056 - protein, 423 aa, Moorena sp.
MRVFVLNKNRQPLDPCKPARARILLSTGKAKVYRRYPFTIFLTEEIKEPITHEHQLKIDPGAKTSGLAIVQGKRVIWGAELTHRGFQIREALTSRRQLRCSRRNRKNRYRKPRFLNRTRPKGWLAPSLMSRVQNILTWVKKLTRLCPVTGISQELVRFDTQKLQNPEISGIEYQQGTLYGYELREYLLEKWNRKCAYCGATGTQLEIEHIKPKSKGGSDRVSNLAIACRPCNQAKSNQDIELFLSKKPSILKRILNQAKRPLADAASVNTTRWKLYHELKSIGLPIEVGSGGLTKFNRCRQSLPKTHWLDAANVGKVETLIIEVTHPLIMTAKGHGTRQLCRTNKYGFPIRHCSRIKFHKGFQTGDIVRAVVTKGKKIGTYVGRVATRKSGSFNISTKSGLVQGISHKYCQFIHRKDGYAYTN

SEQ ID NO: 17057 - protein, 414 aa, Parasutterella sp.
MPCSPAKARLLLKEKKAIVVRRTPFTIQLTIATGESKQPVSLGVDAGYKHVGLSASTEKAELYASEVELRPDVSDLLSARRTLRQSRRNRKTRYRAPRFDNRIRTKRKGWLAPSVENRINAHLSRIGAILRLLPVTKITVETASFDTQLLKNPDISGKEYQEGEQLGFWNVREYVLFRDGHACQHCHGRSKDPVLNVHHLESRRTGGDSPGNLLTLCETCHKALHRREIKLKTKRGQSFRTEAFMGIMRWEVHNRLRALHPGIEVSNTYGYRTKHARIANGIAKSHCADAFCIAGNLGAERLCEFFFQKQTRRNNRQIHKLSILKGGIRKRNQAPFEVKGFRLFDKVACQREESFIFGRRSSGVFDVRKLDGTRISAGISCKKLHLLEKRRTYLTEIRKEEALPPLPEDRGLRA

SEQ ID NO: 17058 - protein, 415 aa, Bacillus sp.; identical to SEQ ID NO: 2671

SEQ ID NO: 17059 - protein, 416 aa, unidentified
  REGION 1..416: note = Syntrophaceae bacterium UBA6255
MCVYVINKNGNPLMPCKPAKAKHLLKAGKAKVIKRTPFTIKLLWDCEENTQEVVAGMDTGSKTIGCAVIANGKVVYQSEVQIRQDVSKKMEQRRMYRRIRRGRKTRYRKARWQNRASMRKEGRLAPSITSKVDSHLREKKFVESILPVFCWKVEIASFDIHKISNPDVKRWDYQKGNQKGFYNVKAYVLHRDGYQCQKCKTRKGKLHVHHVVFRSNGGTDTPSNLITLCEGCHDKLHNGEFQIKGSRSKTKHATEVGVVTSQLKKRFGDFEETFGYETKFKREQILQLPKSHHFDAVAICCEEGEIVELSDNIYFKKHVSNGDYQQTKGSRSEKRIPTGKLFGLRKFDYIQTPKVTGFIKGKRSTGFFAISDLEGKVINPSVNVKKNCTRLTARTTTLIERRGTFLHGASPVVSCA

SEQ ID NO: 17060 - protein, 265 aa, unidentified
  REGION 1..265: note = Human gut metagenome
MPNKVYVINKHGRPLMPCSPAKARHLLDEGKAKIKKRTPFTIQLVYGSSGYTQEVILGVDAGSKTIGMSTSTKKEEVFAVDVTPRNDVVDLMSTRREFRRARRNRKTRYRKPRFDNRVRSKHKEWLAPSVEVKIQEHITAIKMVCRILPVSKVVIETAEFDLQLLKAIADGKPVPQGEDYQKGEMYGHYNVRQYVLWRDDYTCQCCGAHATKKKEVRLHVHHLESRKVGGDAPDNQVTLCESCHEKLHKGLITAKDFKKRKRRST

SEQ ID NO: 17061 - protein, 513 aa, unidentified; identical to SEQ ID NO: 3179
  REGION 1..513: note = Human gut metagenome

SEQ ID NO: 17062 - protein, 413 aa, unidentified
  REGION 1..413: note = Human gut metagenome
MTNYAFVLDADGKQLAPTKEQKAWFLIRKKRAALVSKYPMVIQLNKEVPDEEICKDEIRCGIDDGGLHVGIALVQKCQTQNKVVFKGTIEQRNDVKHLMDIRRGYRHYHRYHKRYRQARFNNRSSSKQKGRITPSILQKRQATVRVINQLNKWINITDYWLEDVAIDIRAMTDGYKPYKWQYQKSNRLDENIRKAVILRDGCKCMECGKSNCKLEVHHIKPRRSKGSNTLGNLITLCAKCHHKTKGVEELYMDRYFALLNSSDNKNLNYAQHVMIGKKWLREQLSSLVILHLTNGGDTANKRIDWDIAKSHSNDAICITNLRPDECEIKEWTIKPMRRQSKAKTDNVLGIKHRDFVEYTFKNGETHRGYVTALYPEQNALNFQSPTKHCKKVNVRKCKVLWKYSKIYWLDNVS

SEQ ID NO: 17063 - protein, 457 aa, unidentified; identical to SEQ ID NO: 14039
  REGION 1..457: note = Human gut metagenome

SEQ ID NO: 17064 - protein, 470 aa, unidentified; identical to SEQ ID NO: 2825
  REGION 1..470: note = Human gut metagenome

SEQ ID NO: 17065 - protein, 430 aa, Thiothrix sp.
MAVFVWDKRKQPLMPCSEKRARLLLARGRAVVVKHYPFSIRLKDRVGGEAQPLQVKLDPGSRHTGMALVREDKEKLTVLNLFQLNHRGLSISENLTSRRAMRNRRRGTSRYRPARFNNRPKPQSWLAPSLQHRIDTVMAWVNKLQRLAPVAAFSQELVRFDMQLLNNPEISSIGYQQGELQGYEVREYLLEKWGRQCAYCGAEHIPLEIEHIVPKANGGSNRVSNLTLACRTCNQRKGSQPVETFLAKKPVLLQKIKAQAKRPLKDAAAVNSTRWALANHLKATGLPVELASGGRTKFNRVQQSIPKSHALDAVCVGDTARIVRWNIPTLEIKCTGRGSYQRTRLDKYGFPRGYLLRQKAVHGFQTGDQVTANVTKGKKIGAYKGRVAVRASGFFNITTATGVVQGISHKHCQLIARNDGYGYIFQPKMA

SEQ ID NO: 17066 - protein, 423 aa, Arthrospira sp.; identical to SEQ ID NO: 3160

SEQ ID NO: 17067 - protein, 440 aa, Moorena sp.; identical to SEQ ID NO: 5150

SEQ ID NO: 17068 - protein, 424 aa, Anabaena sp.
MSNYALVMDTNKQPLSPCHPSVARKLLDSGKAALFRIYPFTIILNKSCSDVVNQAIELKIDPGSKTTGIALVQGEKIIFGAELSNRGSAIKASLESRRSLRRGRRNRHTRYRQARFLNRTRTKNWLAPSLQHRVETTLTWVNKLIKFAPLTRISQELVRFDLQQIDNPEISGIEYQQGTLSGYEVREYLLEKWQRKCAYCGIENVPLQVEHIHPKARGGTNRISNLCLACEKCNIKKGTQDIEKFLAKKPDILKCILAQAKRPLKDAAAVNSTRWALFSRLQETGLPVSTGSGGQTKFNRTRLKFPKTHWLDAACVGQIGELEILINKPLLIKATGHGTRQMCRTDKFGFPSRYVPRIKFVKGFQTGDIVEAIVTTGKKIGKYIGRVAVRGTGSFNISASKLVQGISYKYCKIIHRKDGYDYAF

SEQ ID NO: 17069 - protein, 404 aa, unidentified
  REGION 1..404: note = Human gut metagenome
MPNKVYVINKHGRPLMPCSPAKARHLLDAGKAKVKKRTPFTIQLVYGSSGYTQEVILGVDAGSKTIGMSASTTKEELLSAEVKPRNDVVDLLSTRREFRRVRRNRKTRYRKPRFDNRVRSKHKEWLAPSVEVKIQEHITSIKRVCRILPVSKVVIETAEFDLQLLKAIADGKSVPQGEDYQKGEMYGHYNVRQYVLWRDNYTCQCCGAHATKKKEVRLHVHHLESRKVGGDAPSNLITLCDSCHEKFHKGIITAANLKKRKRRSMRDATFMGIMRKTLIQRLRAELTIPVAETRGYITKTTREKLLVLPKSHTNDALAIALGKHGFNVGYLPEIAQIDKIYTIRPVRHHNRQLHKVTILKGGIRKSNQAEKYVFGYRLFDKVQFNGQDCFIWGRRTTGIFTIKT

SEQ ID NO: 17070 - protein, 408 aa, unidentified; identical to SEQ ID NO: 10304
  REGION 1..408: note = Human gut metagenome

SEQ ID NO: 17071 - protein, 457 aa, Moorena sp.; identical to SEQ ID NO: 6126

SEQ ID NO: 17072 - protein, 470 aa, unidentified
  REGION 1..470: note = Human gut metagenome
MSVFVVGLNGCRLMPVSERKARLLLKGGKASVYRKVPFTIKLNYKTGSTVQPGYLGIDTGSQHIGVSVVQKDGTVLHKEEIGLRDSMSKRKLLESRASSRRGRRYRKTRYRHPKWKPKTKRTYNEKADRKGRHWKKQKNTFTSKRQAGWLPPSLQSKTDHHIQWIRKLLDLLPEGYRLSIELGRFDPARMKDPEIHGELYQKGPQYDYENVRAYVLARDGYTCRVCKKKGGKLHVHHILYRSRGASDNPKYMAAVCSKCHTTENHLPGGILYQWMQDQKKFTRGLRDATFMNILKKRLRKAFPDAVFTYGNITKADREKLELPKSHGNDATAIALVKTEVKSVKDEEPVIHIQQVRRKKRSLHEETPRKGRKEPNRTASRSDKNTKSVTVTKGSGEKKASMTACLFDRVELDGKKGWITGFTGTSCYVKDKEDNYICTSPKYKQVSISRLRILHHCGNWAIGAEKPLGKG

SEQ ID NO: 17073 - protein, 432 aa, Moorena sp.
MRVFVLDKNKKPLDPCQPARARILLKQGRAKVFRRYPFTIMMRDLEELECVTHNHQIKLDPGSQTTGLAIIQEKVVVWGAELTHRGLQIRDGLTSRRKLRRSRRNRKTRYRQPRFLNRKRPDGWLAPSLMSRVYNILTWVKKLTRFCPITGISQELVRFDTQKMENPEISGTEYQQGTLYGYEVREYLLSKWNRKCAYCGVSDTQLEVEHIKPKSKGGSDRLSNLAIACRKCNQIKGNQEIEQFLSGKPDVLKRILSQAKRPLVDAAAVNSTRSRSVANGEWKLYNELKALGLPIETGSGGLTKYNRCRQNLPKTHWLDAANVGEVDTLYIESYQPLLISAKGHGTRQMCRTNKFCFPTRYVPRFKFVKGFQTGDIAKAVVTKGKKIGTYTGRIATRKTGSFNISTKHELVQGISHKYCSIVHRKDGYSYSF

SEQ ID NO: 17074 - protein, 456 aa, unidentified; identical to SEQ ID NO: 10734
  REGION 1..456: note = Human gut metagenome

SEQ ID NO: 17075 - protein, 428 aa, Moorena sp.; identical to SEQ ID NO: 15134

SEQ ID NO: 17076 - protein, 414 aa, unidentified
  REGION 1..414: note = Bacteroidales bacterium
MVYVINLDNTPLMPCTSAIARLLLSQGKAKCIKRTPFTIKLLYQTTNYTQPITLGVDTGSGKIGSSAVNDKGDVLYMSQVEIRNDISDKLKQRSKYRRNRRNRKTRYRKARWLNRKNSIKNDRFSPTMTSKINSHLREIEFVQTILPISKIILETATFDPHALKNPAVLNNKWLYQKGINYGFANTKAYVLDRDNHTCQHCKGKSKDSKLEVHHIVFRRNGGSDEASNLVTLCKICHEDLHSGSITLKGGKTKGHLKHATQMNSIRTQLLRLLPCAEETFGFVTKEHRQLLDLPKEHHIDAVAIASQGNEVQFKTNVVLFKKCVSDGDYQQSKGIRSEQRITTGKIQGFRKFDKVRYLGVEYFIKGRMSTGYAILMDAKGTKITLKPIPKFGKMERVQARKSWIISQETIQNIS

SEQ ID NO: 17077 - protein, 494 aa, unidentified; identical to SEQ ID NO: 6359
  REGION 1..494: note = Human gut metagenome

SEQ ID NO: 17078 - protein, 460 aa, unidentified; identical to SEQ ID NO: 7734
  REGION 1..460: note = Mouse gut metagenome

SEQ ID NO: 17079 - protein, 435 aa, unidentified; identical to SEQ ID NO: 4695
  REGION 1..435: note = Human gut metagenome

SEQ ID NO: 17080 - protein, 541 aa, unidentified
  REGION 1..541: note = Human gut metagenome
MSTVYVLNKDGKPLMPTTRGGHVRHLLKEQKARVVQSNPFTIQLLYETDDAVQPLYLGIDPGRTNIGVAVVKADGTAVFTAHLKSRNKEIPKLMQDRKRARRARRTNGRRHRRQRRAKANGTISKKCVKQTTTQNGSVSKRAKEIGIIKRHLPGCEKDVLCIGIKNKEAKYTNRERPEGWLTPTANQLLQTHVNLVKKVQKLLPISDVVLEVNKFAFMRLDNPDIQKWQYQQGPLYKKESLESAVSEMQEHHCLFCKKPIDHYHHVVPKSENGSNTIANIVGLCAEHHNLVHKDVAWQEKLAEKKTGLNKKYGALSVLNQIIPALTNKLSVLFPKHFFVTAGKSTHDYRAAHGVSKDHWLDAYCIACSVLPSNVCDSNINNHVPYELKQFRRHDRRVLHKANMSRVYTLNGKAVATNRHKAIKQTTDSLEEFRQNYPDDVYKLKVKEHHPAYRNLNRNYPGSVFLVGEQAHVMQGIASSKDGKTTKYNDTNATTIIAGKCKFVAKNSGILFVQCKFRKALSGQQPRLNRLAGYRRGLRGNP

SEQ ID NO: 17081 - protein, 374 aa, Oscillatoria sp.
  SITE 291: note = misc_feature - Xaa can be any naturally occurring amino acid
ANPEPLELKLDPGSKVSGMALKQGNQIIFAAELQHRGEPIKKALLSRRQLRRSRRNRKTRYRPARFLNRTRSKGWLAPSLQHRVDTLMTWVNRFRRLAPVGQITQELVRFDLQLMENPEISGVQYQQGELQGYEVREYLLQKWDRTCAYCGAQNVPLEVEHIQPRSKGGSDRVSNLTLTCHSCNQAKGNGDIRDFLSGQPDLLGRILKQAKSPLKDAAVVNSTRWALFKALKATGLRVTTGTGGQTKFNRLRLNLPKAHWLDAACVGPVESLEVMTSKPLLIIAKGHGTRXMCGTDKYGFPTRHRSRIQVHKGFRTGDIVAATVTAGKTIGSYVGRVLCRASGSFDITTASVRVAGISHKYCKPIHRKDGYAYA

SEQ ID NO: 17082 - protein, 442 aa, unidentified; identical to SEQ ID NO: 2903
  REGION 1..442: note = Human gut metagenome

SEQ ID NO: 17083 - protein, 327 aa, unidentified
  REGION 1..327: note = Human gut metagenome
LRVFVLNKRGKPLMPCSPAKARLLLKEKKAIVKRRTPFTIQLTIATGETKQPVSLGVDAGYKHVGLSASTEKAELYASEVELRQDITDLLSARRALRQSRRNRKTRYRAPRFDNRISTKRKGWLAPSVENRINAHLSRIEAVLRLLPVTKITVETASFDLQLLKNPDISGKEYQEGEQLGFWNIREYVLCRDGHVCQHCYGRSKDPVLNVHHLESRRTGGDSPGNLITLCETCHKALHRGEITLKAKRGQSFRAEAFMGIMRSEVLNRLKASHPELEVNNTYGYRTKHARIANDIAKSHCADAFCIAGNLGAERLGEFFFQKQTRRN

SEQ ID NO: 17084 - protein, 450 aa, Moorena sp.; identical to SEQ ID NO: 4205

SEQ ID NO: 17085 - protein, 406 aa, unidentified
  REGION 1..406: note = Human gut metagenome
MVYVQDIDGKPMMPTTRHGKVRRLLKDNKAVVVNTCPFTIKLTYKTSDYKQEIVLGVDAGTKHVGLSATTKSKELYSGEVILRNDIVELLSTRRESRRARRNRLRYRKPRFENRVKSKRLGWVAPSVRHKVDAHIRVIDNICSTLPISRIIVEIAQFDTQKIKNPDISGNEYQEGDQLGFWNVREYVLARDGHKCQHCKGKSKDPILNVHHIESRKTGGDSPSNLITLCETCHKEYHKGNIDLKVKRGKSLRDAAVMGIMKWKLYEELKSRYPNVSMTFGYITKYNRIKYGIEKSHTSDAFVISRNFNAKRIERQYLKRLIRRHNRQIHKMKILKGGKKKNNQAPFEVFGFRLFDKVLYNNEICFIYGRRKSGCFDIRDFDGKNSKNVTYKKLKLIRGKRYPIILK

SEQ ID NO: 17086 - protein, 342 aa, unidentified
  REGION 1..342: note = Human gut metagenome
MIIALDKYKRPLGFLTERRCRILMERKRAVLYRVFPTVVILMDVDARTIPDLPSFRIKIDPGSKYTGIAIIRNDTDEFVYAMQIEHRGDTVRAALNKRKNARRNRRSRETGYRRAKWGNRCLSEKDKRSYDSSREDGWLPPSIRSAADNVISWVRRLGRWINLTECSFEAVRFDTQLMEDPDIEGEEYQHGTLFGLEIKEYLMEKFGHTCQYCGGKSGDPVLEWEHMRPKSRGGSDRVKNALLSCSSCNKDKGNRTPEEWLEQIKARLPREKGKRKELDEERVKLIQKVIDGKPQGSALRYAAWVSSSRRYLEKALFGIFGDVECSSGGGKKNNPTGLWLFI

SEQ ID NO: 17087 - protein, 501 aa, Streptomyces sp.; identical to SEQ ID NO: 5519

SEQ ID NO: 17088 - protein, 419 aa, unidentified; identical to SEQ ID NO: 5032
  REGION 1..419: note = Human gut metagenome

SEQ ID NO: 17089 - protein, 431 aa, unidentified; identical to SEQ ID NO: 11494
  REGION 1..431: note = Human gut metagenome

SEQ ID NO: 17090 - protein, 458 aa, Lactobacillus sp.; identical to SEQ ID NO: 4474

SEQ ID NO: 17091 - protein, 504 aa, unidentified
  REGION 1..504: note = Human gut metagenome
LLKEQKARVVRTKPFTIQLLYETNDVVQPLYLGIDPGRTNIGVAVVKTDGTAVFTAHLETRNKEIPKLMKKRKESRRARRTNGRRCRRQRRAKANDTISKKCVKQPTAQNGSISKRAKEIGIIKRRLPGCEKDVLCIGIKNKEARFNNRTRPEGWLTPTANQLLQTHINLVKKIQKFLPISDVVLEVNKFAFMQLDNPNIQKWQYQQGPLYKKESLERAVSEMQEHHCLFCDKPIDHYHHVVPQSENGSNTIANIVGLCAEHHNLVHKDAAWQKKLAEEKVGLNKKYGALSVLNQIIPALTKELSFLFPEHSFVTNGKSTYDYRATHGVSKDHWLDAYCIACSVLPSDVCDSNINNHMPYELKQFRRHDRRVLHKANTSRVYTLNGKKVATNRHKAAKQTADSLEEFRQSHPDDVCKLKVKEHHPAYRNLNRNYPGSVFFVGKQVHVMQGIASSKDGKATKYNDTSATTIAAGKCEFVAKNSGILFVQCKFRKVFSDETTKKLQ

SEQ ID NO: 17092 - protein, 431 aa, unidentified; identical to SEQ ID NO: 5054
  REGION 1..431: note = Human gut metagenome

SEQ ID NO: 17093 - protein, 417 aa, unidentified; identical to SEQ ID NO: 6596
  REGION 1..417: note = Human gut metagenome

SEQ ID NO: 17094 - protein, 451 aa, unidentified; identical to SEQ ID NO: 15478
  REGION 1..451: note = Human gut metagenome

SEQ ID NO: 17095 - protein, 413 aa, unidentified; identical to SEQ ID NO: 3476
  REGION 1..413: note = metagenome

SEQ ID NO: 17096 - protein, 419 aa, unidentified
  REGION 1..419: note = Campylobacterales bacterium
MVFVLSKNKTPLAPTSKAKARILLKKGKATVDKIFPFTIRLKENKECQKSFEIKFDVGSSVTGVAIVDAIKCFFFAQIVHRGKTVKKAMDSRRATRRSRRNRKTRYREPRFDNRTRPKGWLPPSIKSRADNVINFAKKYSKLISINSIVVERVSFDISSMTQDRKLYGVEYQNGELKDRKLREYIFAKNNNKCVYCGKKGQEIEHIVPKSKGGTNLIYNLTLSCRNCNIKKGKLTLKEFGKKIGKDLSPLEPKKTPKNASIIQSAREYTIKELKKDFEVKIGEGWETYANREEIDLPKEHYFDAMCIGDTYKYKIFTNSVLEVKAQGRGKRQVCLMDRFGFPRTKAKGEKIIKGFQTGDIVKAVVTKGKKLGTYLGKVAVRSSGYFNITTKLGTIQGINHKYCKTIQKGDGYSYATIKI

SEQ ID NO: 17097 - protein, 549 aa, unidentified
  REGION 1..549: note = Human gut metagenome
VQFAWWLCHPKPSDNIEDVNHETALMLLQIKAGTETFGTAPCGSGPKAEGVSPERKAMNTVAVVTNTNKPLMPTSPYRARKLLSSGKAKIVKHRPFTILLVNRSDGNVQEIEYKSDTGYLHVGISVCSEKREFVREQRDLLPDEKEKHNDRRKYRRTRRNRKRYRKRYRKARFDNRIGKIRKKEKNEHVWLPPSLEHKVDAQVQLFLRLYQVMPVKRAVFEMGQFDPALMKALEKGEAAPQGIDYQMGERYQIATRRAAVFTRDRYACVFCGRSIKDHAILHVHHIGFWKQDRSNRLDNLATCCEQCHTSENHRPGGILYGVEPKLESLASATYMNVVRFELLRRLKEAAPDVEFHISYGAKTSVIRKQRSISKSHTNDAYCLGQYFPKLRAEEIGFQKIRRNDRILQKFYDAEYLDSRDGTTKKGKELTNGRISRNHKKDHENLHQYRGKKLSKGRITIRRGRSSLKPGSLVRFDGEVLTVHGTHRSRKKNKAGHIKVSVNVEFERPSKTGRKSAALSKCQIISRSYNTGWKQIQLRKEEQGRIAAVV

SEQ ID NO: 17098 - protein, 426 aa, unidentified
  REGION 1..426: note = metagenome
LAKDHYRSIDREETNLRVYVLNKRGEPLMPCSAAKARILLKEKKAKVKRRTPFTIQLTIATGETKQPVTLGVDSGYRHVGLSASTEKAELYASEIELRQDISELLAARRALRGARRSRKTRYRAPRFDNRKRDKGWLAPSVENRIGAHVSRVEAVLRILPVTKIIVETASFDVQRLKNPDIQGVEYQEGEQLGFWNVREYVLFRDGHECQHCHGKSKDRVLNVHHIESRRTGGDAPNNLITLCETCHKAFHRGEIELRVKRGRSFQAETFMGVMRWTFFERLRARHSEIEVRNTFGYLTKNTRITHGIEKTHCADAFCIAGNLKAKRLGYYFFQKQTRRHNRQIHKLTILKGGARKRHQTPYEIKGFRLYDKVLFQGKTAFIFGRRSSGYFDIRTLDGERISASVSYKKLRLLEKRRTYLIELRRN

SEQ ID NO: 17099 - protein, 470 aa, unidentified; identical to SEQ ID NO: 2825
  REGION 1..470: note = Human gut metagenome

SEQ ID NO: 17100 - protein, 470 aa, unidentified; identical to SEQ ID NO: 2825
  REGION 1..470: note = Human gut metagenome

SEQ ID NO: 17101 - protein, 419 aa, Moorena sp.
LSTVFVIDQKRTPLGPVHPGWARKLLSSGQAVVSKRYPFTIILKNVVEEPAVQPLRVKLDPGSKTTGIAVLNDATGTVVFAAELTHRGNAIKSSLDDRRASRRSRRTRHTRYRAARFNNRTRPKGWLAPSLLSRVCNVETWVKRLQRVCPITAISMELVRFDLQQMENAEISGVEYQQGTLQGYEVREYLLNKWNRMCAYCGKKDVPLQVEHIHPRARGGTNRISNLCLACEPCNTAKGTLDIAVFLAKKPDILKRILAQAKAPLKDASAVNSTRWALYERLKAFSVPVECGSGGMTKFNRMTRTLDKAHWRDAACVGKSTPETLHTQGIRPLLIAATGHGRRQMCVPDKYGFPKQHKERCKMFLGYRTGDVVKAITPKLTVTGRIAIRHRPSFRIGKSDIHPKYMRRVHRADGYTYAW

SEQ ID NO: 17102 - protein, 424 aa, unidentified; identical to SEQ ID NO: 8578
  REGION 1..424: note = Human gut metagenome

SEQ ID NO: 17103 - protein, 419 aa, unidentified
  REGION 1..419: note = Human metagenome
MVYVINKDGQALMPTERFGKVRRLLKNGLAHVICRIPFTIRLNYETTHFVQPISLGVDAGSKHIGISATTSEKELYAADVELRNDIVDKLSTRREQRRTRRSRLRYRKARFNNRVSSKHKGWLAPSVENKIQTHLTVVEKIHKFLPITKIIVETASFDIQKIKNPSISSKEYQQGEQLDFFNVREYVLFRDNHTCQHCKGKSKDHILNVHHIESRKTGGNSPSNLITLCESCHKAYHNGKIDIKIKRGASFRDATFMGIARWTTYERVKNIYPNVSMTFGYITKNTRITNGLPKEHYVDARCISGNPKSKPLGYYFYQKKVRCQNRQIHKANFLKGGRKKLNQSPFLVKGYRLFDLVEYQKELYYIFGRRDRGFFDIRKLDGTKVNKGSISCKHIRLVSKRRSILTERRNSCSIPPTKL

SEQ ID NO: 17104 - protein, 418 aa, unidentified; identical to SEQ ID NO: 11314
  REGION 1..418: note = Human gut metagenome

SEQ ID NO: 17105 - protein, 431 aa, unidentified
  REGION 1..431: note = Human gut metagenome
MPNKVYVINKHGRPLMPCSPAKARHLLDAGKAKVKKRTPFTIQLVYGSSGYTQEVILGVDAGSKTIGVSALTKKEELFAANVIPRNDVVDLLSTRREFRRARRNCKTRYRKPRFDNRVRSKHKGWLAPSVEVKIQEHITAIRRVCGILPVSKVVVETAEFDLQLLKAIADGKPVPQGEDYQKGEMYGHYNVRQYVLWRDNYACQCCGAHATKKKEVRLHVHHLESRKVGGDAPDNQVTLCESCHEKLHKGLIAEKDFKKRKRRSTWDATFMGIMRKTLMQRLCSELPIPVVKTRGYITKATREKLLVLPKSHINDALAIAQGKHGFNVGYLPGILQIDMIYTIRPVRHHNRQLHKATILKGGIRKSNQTEKYVFGYRLFDKVQFNGQDCFIWGRRTTGIFTIKTINGKMIKDGISFKKLKLVEKSTSYLIA

SEQ ID NO: 17106 - protein, 452 aa, unidentified
  REGION 1..452: note = metagenome
MVFVLSSTNKKLMPTNEYRARKLLKSGKAAVYKHRPFTIILTKRKDGYTQPIEYCCDTGYQHIGISIKSQKHEYVNEERILLKDETERHNDCRKYRRTRRNKLRYRKARWNNRHNNLICKDGFAPSIRNKRDVHINLFKMYHEVCPITSATFEMGQFDTQLLKAVENGDNVPQGTDYQHGERYGYSTLREAVFARDNYKCVCCRKSAIKSGLILKMHHLGYRIGDRSNRMSNLATVCSNCHTSKNHQKGGKLYDLKPKLKTFKGATFMTMARYDMFSKLKESAPDIKFNMTYGALTKLKRKDYSIKKSHSNDAYCMGVFHPKHRTDFKCYQKLRRNNRILSKFYDAKYIDLRDGTVKSGKQLSCNRTNRRELRNSNKNERIYRGPKISKGKTVVRKQHYQYRPYDFVWYKNVKYAVKGVQDKGKRIALQNHLPVSISKIKRSVHVNGWKLVI

SEQ ID NO: 17107 - protein, 406 aa, unidentified; identical to SEQ ID NO: 4082
  REGION 1..406: note = Human gut metagenome

SEQ ID NO: 17108 - protein, 420 aa, unidentified; identical to SEQ ID NO: 5662
  REGION 1..420: note = Human gut metagenome

SEQ ID NO: 17109 - protein, 419 aa, unidentified; identical to SEQ ID NO: 14613
  REGION 1..419: note = Human gut metagenome

SEQ ID NO: 17110 - protein, 436 aa, unidentified
  REGION 1..436: note = Human oral metagenome
MTKTLTKQTTQACILDQQGKPLMPTTRLGKVYRLLKTQKAHIVSYEPFTIQLDYEPDTHIIQPMTLGVDSGAIHSGYSLANEHREYYSAEVIARDDVSKRLSDRRMYRQNRRSRKTRYRKTRFNNRKNKKKGWLPPSLEQKVAVQVNEIDHLHRYFPIETIVVEVAEFDIQKIKNPDISGVGYQQGTLQGYNIRNYLLEKHGRKCFYCGKTVSKFEVEHMLPKSRGGSNRIDNLTLSCHDCNQKKDTLTAEEFIRQTLPAKKAATKLKQLSNEKRLFKYMTQMNATRWALYNTINEKYANVKMTYGYITKYKRIQADLPKAHHIDAKCITGFVTVPSMKQTVVKIKMRRHNRQLHRATFSKGHVRKAACLPTIVFGFQLYDHVLFDNHHYYIKGRRSSGYFKLTSIEGLKDEERSYKKLTQLAHTNAYLINRYVNA

SEQ ID NO: 17111 - protein, 420 aa, unidentified
  REGION 1..420: note = Human gut metagenome
LRVFVLNKRGQPLMPCSPAKARLLLKEKKAIVKRRTPFTIQLTIATGEARQPVTLGVDSGYKHIGLSATTEKAELYASQVELRQDITDLLSARLALRRSRRSRKTRYRAPRFNNRVASKRKGWLAPSVENRIAAHMSRVEAVMRVLPVTAITVETAAFDTQLLKNPDIAGEAYQQGEQLGFWNVREYALFRDGHVCQHCRGKSKDPILNVHHIESRRTGGDAPNNLITLCETCHKAFHRGEIELKVRRGKSFKAETFMGIMRWTLFERLKKAHPELRVRNTYGYLTKHKRISHGIAKSHCADAYCIADNLGAKRLSGYLFQKQTRKHNRQLHKLSILKGGLRKKNQAPYEVKGFRLFDKVICKGEEAFIFGRRTSGSFDVRRLDGTRISSGISYKKLRLLEPRTTYLTEFRKEAALPPLH

SEQ ID NO: 17112 - protein, 470 aa, unidentified; identical to SEQ ID NO: 5320
  REGION 1..470: note = Human gut metagenome

SEQ ID NO: 17113 - protein, 409 aa, unidentified
  REGION 1..409: note = Human gut metagenome
EPLMPCSPRKARLLLKQKKACVVKRTPFTIKLLYGSTGYKQPITLGVDAGSKHIGISATTEKYELYREEATPRNDVVDLLSARRAFRRNRRNRKTRYRAPRFNNRVHSKHKGWLAPSVEVKIQEHITLIKRVCRILPVTLVRVETAEFDTQRLKAMLEGKPLPVGTDYQLGEMYDEYNVRQYVLKRDNYTCQCCGAHPTKTKAVKLHVHHIETRKTGGNAPNNLITLCTACHKTLHARKVTLDGRKRGKPLKDAAFMGIMRKTLMERLLKELKIPVQGTYGYITKYLREKHSIPKSHTNDARCISKNPLAIPCDTCYYTKAIRHHNRQLHKATILKGGIRKANQALYTVKGYRLWDKVSYNGSECFITGRRTSGYFALKKLDGTVVSNSASYKKMRLLEVATNYITERR

SEQ ID NO: 17114 - protein, 413 aa, unidentified; identical to SEQ ID NO: 3587
  REGION 1..413: note = Human gut metagenome

SEQ ID NO: 17115 - protein, 446 aa, Lactobacillus sp.; identical to SEQ ID NO: 12236

SEQ ID NO: 17116 - protein, 453 aa, unidentified
  REGION 1..453: note = Human gut metagenome
RLMPTIRLGKVRHLLKDGKAKIIKHHPFTIQLLYDSKTDTQPIEICEDVGYNYIGISVKSESHEYVSAQYDTLQDEKDCHDDCRKMRRSRRNRLRYRQTRFDNRKRGEGWLAPSLEHKKELNVNVIKMYCEVAPITHATVEVGSFDTMLVKAIEEGKAAPEGVDYQKGPRYNLATLREAVFYRDNYTCQVCGREAQKDSAILHVHHMFYWKGRHGNSLSELLTVCEKCHTPANHQKGGKLYGFGENIKFANLSGAAFMNTVRWQIVNELYAAFGKPFVTFTYGVMTKEKRIALNLEKSHNNDAYAMGSFHPADRCAFEHYEKVKRNNRILERFHDSQYIDIRTGNVTNGKSLFNGRINRSHKKDSENLHKYRGKRIRKGYRALRRKKVALNPGDSVSLNGEILIIQSTHTKKNGSVNVEFKTPSKSGKKSASLKKLKIVKMSNSMHSAWTKVS

SEQ ID NO: 17117 - protein, 450 aa, Moorena sp.; identical to SEQ ID NO: 2935

SEQ ID NO: 17118 - protein, 414 aa, unidentified; identical to SEQ ID NO: 4492
  REGION 1..414: note = Human gut metagenome

SEQ ID NO: 17119 - protein, 422 aa, unidentified
  REGION 1..422: note = Human gut metagenome
IVKHHPFTIQLLYDSKTNTQPIEICEDVGYNYIGISAKSKSREYVSTQYDTLQDEKEHHDDCRKMRRSRRNRLRYRKPRFDNRKRDEGWLAPSLEHKKQLNISLIERYVSVIPITHATVEVGSFDTMLLQSIQKGEAKPEGADYQKGPRYNLATLREAVFYRDNYTCQVCKRKITDGAILHMHHMFYWKGRHGYQLDELVTACEKCHTPANHQKGGKLFGFGKDKKFANLTGAAFMNAIRWQIVNALYATYGKEFVTITYGAMTKEKRIALQLEKSHNNDAYAMGKLHPSRRCTFVHYEKIKRNNRVLEKFYDATYIDARTGNKAKGKELFNGRISRDHKKDSENLHKYRNKKVSRGRRSIRRQRYAIQPYDTVRLEGKTYITSGCHNKGTRLLIPVNGKSKSVAISKVQVVCHAGAWIQII

SEQ ID NO: 17120 - protein, 417 aa, unidentified
  REGION 1..417: note = Human gut metagenome
MPCSPAKARLLLKEKKAIVKRRTPFTIQFTIATGEARQPVALGVDSGYKHIGLSATTEKDELYASQVELRQDITDLLSARLALRRSRRSRKTRYRAPRFDNRVASKRKGWLAPSVENRIAAHMSRVEAVMRVLPVTAITVETAAFDTQLLKNPDIAGEAYQQGEQLGFWNVREYVLFRDGHVCQHCRGKSKDPILNVHHIESRRTGGDAPNNLITLCETCHKAFHRGEIKLKVKRGKSFKAETFMGIMRWTLFERLKKAHPELRVRNTYGYLTKHKRISHGIAKSHCADAYCIADNLGAKRLEGFFFQKQTRKHNRQIHKLSILKGGLRKKNQAPYEVKGFRLFDKVICKGEEAFIFGRRTSGSFDVRRLDGTRISAGISCKKLRLLEPRTTYLTEFRKEAALPHLHECRGFRAEFL

SEQ ID NO: 17121 - protein, 462 aa, unidentified
  REGION 1..462: note = Human gut metagenome
PMVKSSERQERCCRLETPSNIGEGSQPVERPRRENLRVFLLNKRGKPLMPCSPAKARLLLKEKKAIVVRRTPFTIQLTIATGESKQPVSLGVDAGYKHVGLSASTEKAELYASEVELRPDVSDLLSARRTLRQSRRNRKTRYRAPRFDNRIRTKRKGWLAPSVENRINAHLSRIGAILRLLPVTKITVETASFDTQLLKNPDISGKEYQEGEQLGFWNVREYVLFRDGHACQHCHGRSKDPVLNVHHLESRRTGGDSPGNLLTLCETCHKALHRREIKLKTKRGQSFRAEAFMGIMRWEVLNRLKASHPELEVHNTYGYRTKHTRIVNGIDKSHCADAFCIAGNLGAKRLGEFFFQKQTRRNNRQIHKLSILKHGLRKRNQAPFEVKGFRLFDKVVCQGEEGFIFGRRSSGSFDVRKLDGTRISAGISYKKLRLLEKRRTYLKEIRKEEALPPLPEGRSLRA

SEQ ID NO: 17122 - protein, 442 aa, Moorena sp.
MTQVFVLDRERHPLDPCHPARARELLRDGRAAVWRRFPFTIILNDRSRAESVVHEHRVKIDPGSHTTGLALVAGARVLWAAELTHRGQRITAALRSRHAIRRGRRQRQTRYRQPRFLNRRRPVGWLPPALGSRVANIMTWVERLARLCPITALSQELVRFDMQLMQNAEIAGVQYQQGELAGYEVREYLLEKWHRTCAYCGAKNVPLEVEHITPKVRGGSNRVSNLTLACVPCNKKKGAQTAAEFGFPQVQAQARMPLQDAAAVNATRWRLYQALHATGLSVETGTGGRTRYNRTRLGLAKSHWADAACVGASTPDTLEVTGIRPLGIRAMGHGTRQMCRTDAHGFPQTHRGRQKGYFGMQTGDLVKAMVPKGKYIGTLMSRVVVKASGWFDLVIHGKKASVHQQHCTRLWAADGYTYTLPAVAGTAVSSPRSSEGSPQRKF

SEQ ID NO: 17123 - protein, 421 aa, unidentified
  REGION 1..421: note = Human gut metagenome
MVYILDINGQPLMPTDRYGKVKHLLRQGKAVVVKRCPFTIRLLYDTTAYTQKLTLGVDTGSGTLGTAVSDEKGNIVYMSEVTVRNDITDKMKQRLRYRRNRRDRKTRYRKARYLNRRNSIKSDRFNPTMTSKFHSHIKEIDYIKSILPVKTLVLETGQFDTHLLKNPCLANPKVRHWGYQKGVNYGFENTKAMVLNRDNYICQYCRGKHKDSRLEVHHIIFRSNGGSDEQENLITLCHTCHKALHSGRINPNLSGRKKGTLRYATQMNSIRCQLLKHYPDAIETFGCVTKANRLNLNLEKHHYTDACVIAAETKPVCLITDILYLKKSVSDGDFQQTKGIRSEQVINTGKIYGFRKFDRVRYLGNEYFIKGRMSTGYAVLMDINGKKADFSKMPKGFKTPKLSICRRISARKSQLIQAMAI

SEQ ID NO: 17124 - protein, 458 aa, unidentified
  REGION 1..458: note = IscB polypeptide
MKQKLQKKLKNIPTDTSLVCSSISSGLNKGEFSHPSDQSKVLICNNSEENHRKHKSGSDLRVLNIVYVLNKRGNALMPTCQSRARRLLKSNKAKVVKIYPFTIQLIITTGETRQDIVLGVDMGSKYIGISAISNKQELFVAEVILRTDIVELLSEKRMYRRGRRNKHHWYRKPRFNNKKKSSGWLAPSIQHKVDSHIRVINKISKLLPISKVILETAKFDIQKINDINISGKEYQNGVQKDFWNIREYVLYRDNHTCQHCKKENLILNVHHIVTRKKGGDRPDNLITLCEKCHNKFHKGKIKLDIKIKNNFKSQTCMSIIRKFIIDKLKKNYVVEETYGYLTKAKRIENKIEKSHINDAFVIANGNKQIRINSYLISQKRKNNRCLQTNRKGFAPSIRRKRYNIQPLDVVKIKDVNYIVKGMFNKGEYVRVVNSNIKVFNFKIGLIEKYFNRGTLIWK

SEQ ID NO: 17125 - protein, 522 aa, Moorena sp.; identical to SEQ ID NO: 16031

SEQ ID NO: 17126 - protein, 488 aa, unidentified
  REGION 1..488: note = Human gut metagenome
MNTVAVVTNTNKPLMPTSPYRARKLLSSGKAKIVKHRPFTILLVNRSDGDIQEIEYKSDTGYLHVGISVCSEKREFVREQRDLLPDEREKHNDRRKYRRTRRNRKRYRKARFDNRIGKIRKAEKNKHVWLPPSLDHKVDAQVQLFLRLYQVMPVKRAVFEMGQFDPALMKALEKGESAPQGIDYQMGERYQIATRRAAVFIRDRYTCVFCGRGIKDHAILHVHHIGFWKQDSSNRLDNLATCCEQCHTSENHRPGGILYGVKPKLKSLASATYMNVVRFELLRRLKEAAPDVEFHISYGAKTSVIRKQRSISKSHTNDAYCLGQYFPKLRAEEIGFQKIRRNDRILQKFYDAEYLDSRDGTTKKGKELTNGRISRNHMKDHKNLHQYRGKKLSKGRVTIRRGRSSLKPGSLVRFNGEVLTVHGTHRSRKKNKAGHIKVSVNVEFERPSKTGRKSAALSKCQIISQSYNTGWKKIQLRKEEQGKIAAVG

SEQ ID NO: 17127 - protein, 512 aa, unidentified
  REGION 1..512: note = Human gut metagenome
MSTVYVLNKDGKPLMPTTRCGHVRYLLKEKKARVVASKPFTIQLLYETDDVVQPLYLGIDPGRSNIGVAVVKTDGMAVFTAHLETRNKEIPKLMKKRKDSRRARRTNGRRCRRQRRAKANGTISKKCVKQTTAQNGSVSKRAKEIGVIKRHLPGCEKDVLCIGIKNKEAKFNNRTRPTGWLTPTANQLLQTHINLVKKIQKFLPISDVVLEVNKFAFMQLDNPNIQKWQYQKGPLYQKESLKSAVSEMQEHHCLFCKKKIDHYHHVVPQHKNGSNTIDNIVGLCTQHHDLVHKDATWQKRLAKKKTGLNKKYGALSVLNQIIPALTKELSSLFPKHFFVTNGKSTYDYRAAHGVSKDHWLDAYCIACSVLPNDTCDKTINSRMPYELKQFRRHDRRALNNENMSRVYTFNGKMVATNRHKATEQTTDSLEEFRQRQPNDVCNLKVKEHHPTYRNMSRNYPGSIFLVEKQVHIMQGIAGSKDGKATTYKDTNANSIAAGKCKFVAKNSGILFV

SEQ ID NO: 17128 - protein, 417 aa, unidentified
  REGION 1..417: note = Human gut metagenome
MPCSPAKARLLLKERKAIVKRRTPFTIQLTIATGEAKQPVTLGVDSGYKHIGLSATTEKVELYASEVELRQDITDLLSARLALRRSRRSRKTRYRAPRFNNRVASKHKGWLAPSVENRIAAHLSRVEAVMRVLPVTAITVETAAFDTQLLKDPDITGAAYQQGEQLRFWNVREYVLFRDGHVCQHCRGKSKDPILNVHHIESRRTGGDAPNNLITLCETCHKAFHRGEIKLKVRRGKSFKAETFMGIMRRTLFERLKKAHPELNVRNTYGYLTKHKRISYGIAKSHCADAYCIADNLGAKRLEGFFFQKQTRKHNRQIHKLLILKGGLKKKNQAPYEVKGFRLFDKVICKGEEAFIFGRRTSGSFDVRRLDGTRISAGINYKKLRLLEPRTTYLTEFRKEAALPPLHKCRGVCAEFL

SEQ ID NO: 17129 - protein, 430 aa, unidentified
  REGION 1..430: note = gut metagenome
MPKVYVLNRHGRPLMPCTPAKARHLLDAGKAKVRHRTPFTIQLLYGSTGYTQEVILGVDAGSKTIGLSAATETEELFSAEVKPRNDVVELMSARRQFRRARRNRTTRYRKPRFDNRVRSKHKGWLAPSVEVKIQEHMTAIRRACAILPVSKVVVETAEFDLQLLKAVAEGKPVPQGEDYQKGEMYGHYNVRQYVLWRDSYTCRICGVHGSVRKGVPLHVHHLESRRVGGDAPDNLVTLCTACHDKLHKGIIMAADIKKRKRRSTRDATFMGIMRMTLLRRLREQLPVPVVETRGYITKATRENLLVLPKSHTNDALAIAHGPQGFRAEYLPNIRQADRLYTIRPVRHHNRQLHKATILKGGVRKANQAEKYICGFRLYDKVLYNGIECFVWGRRTNGSFLLRQLNGEKVKDGVSYKHLKLLERSQSYLVA

SEQ ID NO: 17130 - protein, 428 aa, Mastigocladus sp.; identical to SEQ ID NO: 9878

SEQ ID NO: 17131 - protein, 436 aa, unidentified; identical to SEQ ID NO: 11244
  REGION 1..436: note = Human oral metagenome

SEQ ID NO: 17132 - protein, 512 aa, unidentified; identical to SEQ ID NO: 7153
  REGION 1..512: note = Human gut metagenome

SEQ ID NO: 17133 - protein, 351 aa, unidentified
  REGION 1..351: note = Human gut metagenome
MSTVYVLNKDGKPLMPTTRCGHVRRLLKEQKAQVVTSKPFTIQLLYETDDVVQPLYLGIDPGRTNIGVAVVKIDGTAVFTAHLETRNKEIPKLMQGRKKARRARRTNGRRCRRQRRAKANGTISKKCVKQTTAQNGSVSKRAKKIGVIKRHLPGCEKEVLCIGIKNKEAKFSNRTRPEGWLTPTANQLLQTHINLVKKIQKFLPISDVVLEINKFAFMRLDNPNVQKWQYQQGPLYQKASLEEAVSEMQEHHCLFCKNTIDHYHHVVPQHKNGSNTIGNIVGLCTKHHDLVHKDTSWQEKLAKKKTGLNKRYGALSVLNQIIPALTKELSSLFPKHFFATNILRKPRHVCG

SEQ ID NO: 17134 - protein, 420 aa, unidentified
  REGION 1..420: note = Human gut metagenome
MQYVYVLNKHGEPLMPCSPGKARLLLKQQKACVVKRTPFTIKLLFGSAGYKQPITLGVDAGSKHVGLSASTEKRELYSEEFTPRSDVVELLSTRRQNRRSRRNRKTRYRVPRFDNRVHSKHKGWLAPSVEVKIQEHITVIKHICKILPISLVRVETAEFDTQRLKAMLAGKPLPVGTDYQLGEMYDEYNVRQYVLKRDHYTCQCCGAHNTAEKVVKLHVHHLESRKTGGNAPSNLVTLCTTCHKNLHKGRVTLDGKERGKPLRDAAFMGIMRKTLMARLKEELPIPVEGTYGYITKMRREQNDIKKSHTNDARCISKHPLAEPCSVCYRTKAIRHHNRQTHKANFSKKGIRKRSQMPYLVEGFRLWDKVLYKGQECFVSGRRSSGSFALKKLDGTSISKGVTFKKLRLLEPATNYLIERM

SEQ ID NO: 17135 - protein, 325 aa, unidentified
  REGION 1..325: note = Human gut metagenome
RKTRYRAPRFDNRIRTKRKGWLAPSVENRINAHLSRIEAVLRLLPVTKITVETASFDLQLLKNPDISGKEYQEGEQLGFWNIREYVLCRDGHVCQHCYGRSKDPVLNVHHLESRRTGGDSPGNLITLCETCHKALHRGEITLKAKRGQSFRAEAFMGIMRWEVHNRLRALHPGIEVSNTYGYRTKHARIANGIAKSHCADAFCIAGNLGAERLCEFFFQKQTRRNNRQIHKLSILKGGIRKRNQAPFEVKGFRLFDKVACQGEEGFIFGRRSSGFFDVRKLDGTRISAGISYKKLHLLEKRQTYLMEIRKEEAFPPLPEGRGLRA

SEQ ID NO: 17136 - protein, 418 aa, unidentified; identical to SEQ ID NO: 2710
  REGION 1..418: note = Human gut metagenome

SEQ ID NO: 17137 - protein, 453 aa, Lactobacillus sp.; identical to SEQ ID NO: 4050

SEQ ID NO: 17138 - protein, 424 aa, unidentified; identical to SEQ ID NO: 3351
  REGION 1..424: note = Human gut metagenome

SEQ ID NO: 17139 - protein, 411 aa, unidentified; identical to SEQ ID NO: 8372
  REGION 1..411: note = Human gut metagenome

SEQ ID NO: 17140 - protein, 456 aa, unidentified; identical to SEQ ID NO: 11534
  REGION 1..456: note = Human gut metagenome

SEQ ID NO: 17141 - protein, 432 aa, unidentified
  REGION 1..432: note = Human gut metagenome
MLTGLLAEQVDPAGIRKGDTLKVFVLNMRGKPLMPCSPAKARHMLKAGKAVVARRTPFTIKLTIATGETKQDVTLGVDAGAKHVGISATTEKEEVFASEVELRQDITGLLADRLAFRRSRRNRKTRYRAPRFNNRVRSKHKGWLAPSVENRIQAHISRIEAICRVLPITKIVIETASFDIQKIKNPEVEGTDYQQGDQLGFWNVREYVLFRDGHVCQHCRGRSKDPILNVHHLESRKTGGDAPNNLITLCETSHKAYHAGKIKLKTRRGTSFRAEAFMGIMRRTLLDRVRKAHPELSVENTYGYLTKHKRIALGLPKTHCADAFCIAGNLNALRRGDFLYQRQTRKHNRQIHKCSILKGGVRKLHQAPFLVKGFRLFDKVKCTGRIGIIFGRRSTGSFDVRTLDGTRLSAGISSKKLTLLEKRTTFLTQLRK

SEQ ID NO: 17142 - protein, 426 aa, unidentified; identical to SEQ ID NO: 7286
  REGION 1..426: note = Human metagenome

SEQ ID NO: 17143 - protein, 429 aa, unidentified
  REGION 1..429: note = Human gut metagenome
KHMSSTRYWHEEKFSERKVSEMTNYAFVLDANNKQLTPTKEQKAWFLIRKKRATLVSKYPMVIQLKKKIPDKEICKDEVRCGIDDGGLHVGVALVQKCQTRNKVVFKGVIEQRNDVKHLIDVRCGYRRYHRYHKRYRSARFNNRNSSKREERIAPSILQKRQATIRVINQLNKWINITNYWLEDVAIDIRALTDGYKPYRWQYQKSNRLDENIRKAVILRDGCKCMECGKSNCRLEVHHIKPRRLKGSSTLDKLITLCTKCHQKTESVEELYMDRYFALLNSSDNKNLNYAQHVMIGKKWLREQLSNLGMLYLTNGGDTANKRIDWDIAKSHSNDAICITDLRPDTCEIKEWAIKPMRRQSKAKTDNVLGIKHRDLVEYTFRNGETHRGYVTALYPEQNAINFQSPTKHCKKVNAKNVKYFGNILKFTG

SEQ ID NO: 17144 - protein, 424 aa, unidentified; identical to SEQ ID NO: 3434
  REGION 1..424: note = Human gut metagenome

SEQ ID NO: 17145 - protein, 456 aa, Halomonas sp.; identical to SEQ ID NO: 8852

SEQ ID NO: 17146 - protein, 556 aa, unidentified
  REGION 1..556: note = Human gut metagenome
MAWEAIQTRRIKPHDIGEGTLRRHAAGTVSFPVLCKNRKETLMSVLVIGRNGRALMPTNPRKARLLLKKKTASVVCRHPFTIQLLYKTGCATQEGCIGIDTGSQHIGVGITCGDRVILKDEHALRSSMEKRSLLATRTVMRRGRRYRKVRYRKPKWRHHTKRMYFEKANRRGQHWRKVKTTTQSPRLKGWLPPSLQSKCDHHFRIIDRYLKYLPDPITRNLVIEAGRFDMARMNDPTIHGEMYQRGPMYDAENLRAYIFARDNYQCACCKAKAGTTRKADGTTVKLVAHHILFRSRGATDNPKYIISVCDHCHTTKAHQPGGILYSWMENTKKVARGLRDATFMNILRKRLFARYPQSAFTYGNITAADRKLLRLPKNHANDAVAISLFGKEASTVKNICQTMHYKQIRKSKRSLHEAIPRKGRKNPNTKAVRNKKNTTQVNGFKLWDSVLADGKKLFICSFTGTSAYLIDKNGCYISQPGKTYKQCPLSKLKRLHPNVDILPRINPWDSLDYNNITTPYRSGYSMIFQDLATIGVPHLGWYFLAAGQMPVPISLS

SEQ ID NO: 17147 - protein, 344 aa, unidentified
  REGION 1..344: note = Human gut metagenome
VVDLLSTRREFRRERRNRKTRYRKPRFDNRVRSKHKGWLAPSVEVKIQEHITAIKRVCRILPVSKVVVETAEFDLQLLKAIEEGKPVPQGEDYQKGEMYGHYNVRQYVLWRDNYTCQCCGAHATKKKEVRLHVHHLESRKVGGDAPDNQVTLCESCHKKLHKGLIEAKDFKKRKRRPTRDATFMGIMRATLLQRLRSELPIPVIETRGYITKATREKLLVLPKSHTNDALAITQGKHGFNVGYLPGIVQSDKTYTIRLVRHHNRQLHKATILTGGIRKSNQAEKYVFGYRLFDKVQFNGQDCFIWGRRTTGIFTIKMINGKMIKDGISFKKLKLVEKSTNYLIV

SEQ ID NO: 17148 - protein, 419 aa, unidentified; identical to SEQ ID NO: 3670
  REGION 1..419: note = Human gut metagenome

SEQ ID NO: 17149 - protein, 451 aa, unidentified
  REGION 1..451: note = Human gut metagenome
MSVAVISKTGERLMPSSEYRARKLLKSGKAVKYSYHPFTIQLTKRKTGYAQPIELCMDTGYIHIGISVKSEKHEYLAEQIDTLTDEKTKHGACRMYRTLRRGRKRYRQPRFNNRKRDKDWIAPSLEHKKDIHVQAISRINKVMPLTDITMEMGNFDTQVLKAKEEGKPLPQGADYQHGERYGIATLREAVFSRDGYKCQCCGRTISDGAILHVHHIKYRSQGGTNSMTNLATVCDKCHTPKNHKPGGKLYNWKPKLPDFKGATFMTTIRWQLYNEVKSLFPDINVHITYGAATKEQRRELNIDKSHVNDAFAMGKFHPKHRTNAALYKKKRRNNRCLEKFYDAKYIDSRDGSKRTGQELFNGRINRNHKKDSENLHRYRLQKITAGKRTVRKRHYNIQPHDIVMYENRKRETSGCQSNGTRVILLSDKKSVAVKKVKIYKYAGGYFKSTFN

SEQ ID NO: 17150 - protein, 428 aa, unidentified; identical to SEQ ID NO: 5055
  REGION 1..428: note = Human gut metagenome

SEQ ID NO: 17151 - protein, 420 aa, unidentified
  REGION 1..420: note = Human gut metagenome
MQYVYVLNKHGEPLMPCSPRKARLLLKQKKACVIKRTPFTVKLLYGSTGYKQPVTLGVDAGSKHIGISATTEKHELYREEATPRNDVVDLLSARRAFRRSRRNRKTRYRAPRFDNRVHSKHKGWLAPSVEVKIQEHITLVEHVCRILPVTLVRVETAEFDTQRLKAMLEGKPLPVGTDYQLGEMYDEYNVRQYVLKRDNYTCQCCGAHSTKTKGVKLHVHHIETRRTGGNAPNNLITLCTACHKALHAGKVTLDGKKRGKPLKDAAFMGIMRKTLMERLRKELKIPVQGTYGYITKCLREKNGIPKSHTNDARCISKNPLAIPCDTCYYTKAVRHHNRQLHKATILKGGIRKANQAPYIVKGYRLWDKVSCNGTECFITGRRTSGYFALKKLDGTVISNSISYKKLRLLEVATNYITERK

SEQ ID NO: 17152 - protein, 419 aa, unidentified
  REGION 1..419: note = Human gut metagenome
MYVYVLNKHGEPLMPCSSRKARTLLDNKKACVAKRTPFTIKLLHGSAGYKQPITLGVDAGSKHVGLSASTETHELYREEFTPRNDVVDLLSTRREFRRARRNRKTRYRAPRFNNRVHSKHKGWLAPSVEVKIQEHITVIKHVCQIMPVSLVRVETAEFDTQRLKAMLEGKPLPVGTDYQLGEMYDEYNVRQYVLKRDNYTCQCCGAHATKTKQVKLHVHHLESRKTGGNAPSNLITLCPTCHKAIHEGKKTLDTKKRGKPLRDAAFMGIVRKTLLMRLRKKLSIPVQQTYGYITKMLREKNNLPKSHMNDALCIAKHPKAAPCENCYRSKAVRHHNRQIHKATILKGGIRKNNQAPYTVKGFRLWDKVLCNGQECFISGRRATGYFALKKLDGTVVTNSVSYQKLRLLETAKNYLRERM

SEQ ID NO: 17153 - protein, 465 aa, unidentified; identical to SEQ ID NO: 3856
  REGION 1..465: note = Human gut metagenome

SEQ ID NO: 17154 - protein, 451 aa, unidentified
  REGION 1..451: note = Bioreactor metagenome
MWTYHYFVVSYYSLRRVNVVFVISKEGKPLMPTKNHAKVRILLKHKKAKVIRRKPFTIQLLYETTTYTQPITLGIDSGYSYIGFSAITEKEELICGEVKLLQGISERLKERAMYRRQRRSRLRYRKPRFDNRKKCSDWLPPSIQHKFDSHIRFINFLKKILPVTDVVIEVANFDTHKLKNPDVEGIGYQQGEQEGFYNLREYILYRDNYKCQLCGREDLPLEVHHIGFWKQDRTDRPSNLITLCIKCHTPKNHQENGKLWGLEPILKPLKEATFMSTVRWKLVNILNCKYTYGYITKFKRVALGLEKTHYNDAFCIAGGINQARTKPIIFEQIRRNNRSLEKFYDAKYIDIRTGKVATGQELFCGRRTRNKNYNTENLRKYRGQKISKGQRRIRTQRYFYQPKDIVIYNGKKYVVKGVQNKGNYIKLEKLNKPVKVSLVKPYEFRKGFCVV

SEQ ID NO: 17155 - protein, 417 aa, unidentified; identical to SEQ ID NO: 2758
  REGION 1..417: note = Human gut metagenome

SEQ ID NO: 17156 - protein, 490 aa, unidentified; identical to SEQ ID NO: 7071
  REGION 1..490: note = Human oral metagenome

SEQ ID NO: 17157 - protein, 461 aa, unidentified
  REGION 1..461: note = Human gut metagenome
MVYVINKQGQALMPTERFGKVRRLLKNGLAHVVCRIPFTIQLDYDTTDYTQPISLGVDAGSKHIGISATTSEKELYAADVELRNDIVDKLSTRREQRRTRRSRLRYRKARFNNRISSKRKGWLAPSVENKIQTHLTVVEKIHKFLPITNIVVETASFDIQKIKNPSISNEEYQQGEQLDFFNVREYILFRDGHTCQHCKGKSKDKVLNVHHIESRKTGGDSPNNLITLCETCHKAYHRGEFELNVKRGKSFRDAAFMGIMRWNLYDRLKNIYPNVSMTFGYITKNTRITNNLPKEHYVDARCISGNPVAKPLGYYFYQKKVRCQNRQIHKVNFLKGGRKKLNQAPFLVKGFRLFDLVEYQKDLYYIFGRRDSGFFDIRKLDGTKVNKGSISCKQMRLIDIRKTIIIEKRIASKFMKKGDKVREIGDTLTGTIVYIANGYADVKYPNMKGVCSLPVQFLEKV

SEQ ID NO: 17158 - protein, 408 aa, unidentified
  REGION 1..408: note = Fermentation metagenome
MPCENVVARLLLKQKKAKVKRKTPFTIKLLYDTTEYIQDCTLGVDTGSSHVGTSVINSKNEVLYMSDVEIRNDIADKMTQRAKYRRNRRNRKTRYRKARWLNRKNSIKKDRFSPTMRSKLDSHTKEIEFIKSILPISRLVIETATFDPHLLKNPSLHNSIYKKWGYQQGGNYGFENTKAKVLNRDNYICQYCKGKKKDSKLEVHHIIYRSNGGSDEEDNLITLCHTCHKCVHIGIVKLKLTGKRKGQLKHATQMNSIRIQLLKLCSDAIETFGYITKANRLMLGIDKNHHLDACVIASGGNKFTIRQNILYRKKCVSDGDFQQTKGIRSQQAIPTGKIQGFRKFDKVRYLGKEYFIKGRMSSGYAILMDIEGNKVDFSSMPKGWKTPKLSNCKRISARKTWMVDSLVV

SEQ ID NO: 17159 - protein, 439 aa, Moorena sp.
MRVFVLDKDFKPLDPCRPARARLLLKQGRAKVFRRYPFTIILKDLEVGNCTTHNHQLKIDPGAKTTGLAILQDNTVIWGAEIRHRGFQIRDALTSRRQLRRSRRNRKTRYRKPRFLNRKRPLEWLAPSLMSRVHNILTWVKKLIRFCPMTGISQELVRFDTQKMENPEISGTEYQQGTLYGYEIREYLLEKWNRKCAYCGATDTRLEVEHIKPRSNGGSDRVSNLAIACHDCNQAKGNQDIKQFLSRKPDVLKRVLSQSKRLAVGHATRTLADTAAVNSTRWKLYKKLKSTGLPVETGSGGQTKYNRRRFNLVKTHWLDAACVGNVEAIYVENCQFLLIMAKGHGTRQICRTDKFGFPKRYCSRTKIHKGFQTGDIVKAIVTKGKKIGTYVGRVATRKTGSFNISTANGLIQGISYKYCTPIHKKDGYSYQINTLSSLS

SEQ ID NO: 17160 - protein, 427 aa, Moorena sp.
MQNYVFVIDTKNQPLNPISPKKARRLLDKGKAAVFRMYPFTIILKTAIDNPTISPCQIKIDPGSKVTGFALVQNNQVIWGMELEHRGGLIKKKLESRKAVRHRRRNRNTRYRKPRFLNRRRKEGWLAPSLEHRVLTIETWVKRLIKFCPINQVWVERVKFDTQKMQNPEINGVEYQQGELAGYEVKEYLLEKWGRECTYCGKQSVPLQIEHIHPKSLGGSNRVSNLCLACEKCNQRKGNKPIEEFLKKKPNLLQKIKTKTKQPLPDAAAVNTTRNKLVKVLRSIKFVVTGTGAQTKYNRTRLGLPKQHWIDAACVGNIETLVLKTSQPLLVTCKGQGGRQKAALNKYGYPIRHNPLKPIKGWLTGDIAKHQKLGIGKVTPRSKGSFGFTPLGMKGYKSCFPQDISAIHRKDGYTYSFCQHMPEFTGK

SEQ ID NO: 17161 - protein, 440 aa, Moorena sp.; identical to SEQ ID NO: 5150

SEQ ID NO: 17162 - protein, 465 aa, unidentified; identical to SEQ ID NO: 10943
  REGION 1..465: note = Human gut metagenome

SEQ ID NO: 17163 - protein, 442 aa, unidentified; identical to SEQ ID NO: 4533
  REGION 1..442: note = Human gut metagenome

SEQ ID NO: 17164 - protein, 448 aa, unidentified; identical to SEQ ID NO: 8365
  REGION 1..448: note = Human gut metagenome

SEQ ID NO: 17165 - protein, 394 aa, unidentified
  REGION 1..394: note = Human gut metagenome
ANGTISKKCVKQDTAQNGSVSKRAKKIGVIKRHLPGCEKEVLCIGIKNKEAKFSNRVRPEGWLTPTANQLLQTHINLVKKIQKFLPISDVVLEVNKFAFMQLDNPNIQKWQYQQGPLYQKANLEEAVSEMQEHHCLFCKKPIDHYHHVVPQHKNGSNTIGNIVGLCTKHHDLVHKEAAWQEKLAKKKTGLNKKYGALSVLNQIIPALTKELSSLFPKHFFATNGKSTYDYRAAHGVSKDHWLDAYCIACSVLADDVCDNNINSHVPYELKQFRRHDRRALHKENMSRVFTLNGKSVATNRHKATEQTTDSLEEFRQCQPDDVCKLKVKEHYPEYRNPKRNFPGCVFLVGKHTHVMQGTSGSHNGKADGYYDTNGNSYSSGECKFVAKNEGIVFA

SEQ ID NO: 17166 - protein, 428 aa, Moorena sp.
MQNYVFVIDTNKQPLNPILPKKARRLLDKGKAAVFRMYPFTIILKTAVDNPTISPCQIKIDPGSKFTGFALVQNDQVIWGMELEHRGGLIKKKLESRSAVRRGRRNRHTRYRKPRFLNRRRSEGWLPPSLEHRVSTIETWVKRLIKFCPVSEIWVERVKFDTQKMQNPEINGIEYQQGELAGYEVREYLLEKWGRECAYCGKQNIPLQIEHIHPKSKGGSDSAKPTLRERVSNLCLACEKCNQRKGNRPIEEFLKKKPGLLEKIKNKALSPLRDAAAVNTTRNKVVKVLKEIKPVVTGTGAQTKYNRTKLGLPKQHWIDAACVGDVEALVLRTSQPLLVTCKGQGGRQKAALNKYGYPIRHNPLKPIKGWCSGDIAKNLLTGEFGRVNPRSKSNSFNYTVSGKKAISLHVKNLCRVHRKDGYSYGFCR

SEQ ID NO: 17167 - protein, 423 aa, Moorena sp.
MRVFVLNSNRQPLDPCKPARARILLSTGKAKVYRRYPFTIILTEEIQEPITHGSQFKIDPGAKTSGLAIVQGNRIVWGGELTHRGFQIRDALTSRRQLRCARRNRKTRYRKPRFLNRSRPEGWLAPSLMSRVQNILTWVKKLTRLCPIAGISQELVRFDTQKLQNPEISGIEYQQGTLYGYELREYLLEKWNRKCAYCGTTGTQLEIEHIKPLSKGGSNRVSNLAIACHSCNQSKSAQEIEQFLSGKPDVLKRVLSQAKRPLTDAAAVNTTRWKLYHELKSIGLPVEVGSGGLTKFNRCRQNLPKTHWLDAANVGKVDTLIIEGYQPLLIAAKGHGTRKICRTNKYGFPIRYCSRTKIHKGFQTGDIVRAVVTKGKKIGTYVGRVATRKSGSFNISTKSGLVQGISHKYCQFIHRKDGYAYRH

SEQ ID NO: 17168 - protein, 420 aa, unidentified; identical to SEQ ID NO: 3504
  REGION 1..420: note = Human gut metagenome

SEQ ID NO: 17169 - protein, 418 aa, unidentified; identical to SEQ ID NO: 14280
  REGION 1..418: note = coral metagenome

SEQ ID NO: 17170 - protein, 515 aa, unidentified
  REGION 1..515: note = Human gut metagenome
VTDVSTIYVLNKDGKPLMPTTRCGHVRYLLKEKKARVAASKPFTIQLLYETDDVVQPLYLGIDPGRTNIGVAVVKTDGTAVFTAHLETRNKEIPKLMQGRKKARRARRTNGRRCRRQRRAKANGTISKKCVKQTTAQNGSVSKRAKGIGVIKRHLPGCEKDVLCIGIKNKEAKFSNRTKSEGWLTPTANQLLQTHINLVKKIRKFLPISDVVLEINKFAFMQLDNPNVQKWQYQQGPLYQKANLEEAVSEMQEHHCLFCKKPIAHYHHVVPQSENGSNTIGNIVGLCTKHHDLVHKDTAWQKKLAKKKTGLNKKYGALSVLNQIIPALTKELGSLFPKHFFATNGKSTYDYRAAHGVRKDHWLDAYCIACSVLPNDVCDKNINSRVLYELKQFRRHDRRALHKENINRVYTLNGKKVATNRHKAIEQTTDSLEEFRQNHPNDVCKLKVKEHHPEYRNPKRNFPGCVFLVGKHTHVMQGTSGSHNGKADGYYDTNGNSYPFGKCKFVAKNEGIVFA

SEQ ID NO: 17171 - protein, 515 aa, unidentified; identical to SEQ ID NO: 15867
  REGION 1..515: note = Human gut metagenome

SEQ ID NO: 17172 - protein, 431 aa, unidentified
  REGION 1..431: note = Human gut metagenome
MVYVLDINGQPLMPTTRHGKVRRLLNSHLAKVVKRCPFTIQLLYQSTKEIQPVSLGVDAGSKHIGMAATTEKKVVYQEELSPRNDVVKLLSARRTLRRTRRNRKTRYRKPRFNNRVHSKHKGWLAPSVEVKIQEHITAIKRICQILPISEIHVEISEFDLQRLKAMEEGRTLPVGTDYQLGEQYDFYNTRQYVLHRDGYTCQCCGTHDNNIKLHVHHIESRQTGGNAPSNLITLCEHCHKALHKGKFELPKGKKRGKTYRDATFMGIMRKTLLERLKKEIDVPVAGTYGYITKYWRERAGLEKSHINDAICISKYPYAKPLDTYYLTKVVRNHNRQIHKSNFSKGGIRKRNQAPYLIKGFRLFDKVLYQGKEYFIFGRRATGYFDIRTLDGTKVNKDSISYKKLRIQDTAKAYLKEARAIPHMNKFTCVLA

SEQ ID NO: 17173 - protein, 426 aa, Anoxybacillus sp.
MVFVLDTNKCPLAPCHEAVARKLLKQGKAAIYKRYPFTIILKKSVDNFRPKTPYRLKIDHGSKHTGLAILRGQEVVWLGQLDHRTDIKERMDKRRAFRRARRNRKTRYRKPRFLNRRRKDGWLPPSLESRVQNIQTWVNRLKKLCPIGYISYENTKFDTQLMRNPEISGIEYQQGTLQGYEVREYLLEKFGRKCCYCGKENVPLEVEHIIPKSRGGTDRVDNLCLACHDCNQRKGSKTAEEFGYPHIQKQVKESLKDASAVNSTRWKVYEVLKQSGCEVECGTGARTKMNRIRLDLPKTHYFDACCVGESTPNHLYFKTKEVLFIRAKGRGSRSRTNLDRYGFPRGYLARQKFFFGFQTGDMVKAVIPRGKYQGVWFGEVACRKTGSFDIKGKDGKRIAQGINYRYVQVIQRFDGYTYRREGMNIA

SEQ ID NO: 17174 - protein, 450 aa, Moorena sp.; identical to SEQ ID NO: 4205

SEQ ID NO: 17175 - protein, 426 aa, unidentified; identical to SEQ ID NO: 3614
  REGION 1..426: note = Human gut metagenome

SEQ ID NO: 17176 - protein, 555 aa, unidentified
  REGION 1..555: note = Human gut metagenome
YIKMTSCTCTVFPACNHAKASSSQGKHNLLFRQERLIVKEVAYMPTVYVLNKDGKPLMPTTRGGHVRHLLKEQKARVVRAKPFTIQLLYETDDAVQLLYLGIDPGRTNIGVAVVKANGTAVFTAHLETRNKEIPKLMQDRKKARRARRTNGRRCRRQRRAKANGTISKKCVKQTTAQNGSVSKRAKDIGVIKRRLPGCEKDVLCIGIKNKETKFTNRTRPEGWLTPTANQLLQTHINLVKKIQKFLPISDVVLEVNKFAFMRLDNPDIQKWQYQQGPLYQKGSLENAVSEMQEHHCLLCDKPIDHYHHVVLQSENGSNTIANIVGLCSEHHNLVHKDAAWQKKLAEEKVGLNKKYGALSVLNQIIPALTNKLSVLFPKHFFVTTGKSTHDYRESHSVSKDHWLDAYCIACSVLPSNVCDSNINNHVPYELKQFRRHDRRALHKENMSRVYTLNGKAVATNRHKAIKQTTDSLEEFRQSHPGDVCKLKVKEHHPAYRNLNRNHPGSVFFVGEQAHVMQSIVASKDGKATRYKDTNVNKIAAGQCRFVAKNEGIVFT

SEQ ID NO: 17177 - protein, 447 aa, unidentified; identical to SEQ ID NO: 5316
  REGION 1..447: note = Human gut metagenome

SEQ ID NO: 17178 - protein, 418 aa, unidentified
  REGION 1..418: note = Human gut metagenome
MVCVLSKTGQPLMPTENHAKVRVLLKQQKAKIVHRCPFTIQLLYDSTDYTQPVSLGIDAGSRHIGVSATTETKVLYEADVTLRNDIVDLLSTRREARRTRRSRKTRYRKPRFNNRTRKDGWLAPSIQQKVDTHLTTVRKVTEILPVNSITVETASFDIQKIKNPDIAGTGYQQGEQLDFWNVREYVLFRDGHKCQCCKGKSKDPVLNVHHIESRKTGGNAPNNLITLCETCHKGYHNGTVSLPKNIRRGMKFNDAAFMGIMRWAFFNRVKETYEPLGIMVNMTYGYITKNTRIEHNLPKDHFIDARCISGHPDATSGGTVFYQKKVRCHNRQIHKQKILKGGIRKRNQAPYLVKGFRLFEKVKYHGKQYFIFGRRSSGFFDIRTLDGTKVNKGSVSCKKIRSLDMPRSYLTEERKVIV

SEQ ID NO: 17179 - protein, 494 aa, unidentified; identical to SEQ ID NO: 10441
  REGION 1..494: note = gut metagenome

SEQ ID NO: 17180 - protein, 399 aa, unidentified
  REGION 1..399: note = IscB polypeptide
MSNFKVFVVDSEGTPLLPTSQARARLLLKKEKATVYSVIPFTIQLKYKIDKPIGEFKCGIDDGAKYVGISIGYNKKVIFAGNIELRQDVKRKMKERHDCRVVRRSRKLRNRPKRFLNRGKKGFITPTIRTKKESILRVINFLKKRINITSCVIEHGQFDISSMNKGYKLIGEEYQKSEYKGNNWRQKVLFRDNYTCRKCKTKSQLQAHHIKYVSNGGTNLVSNGYTLCKDCHSKLHKGEWKLKQSKASNLKFAAHTQQGKWWLFDKLKSIFKKVNICYGWMTAKNRRRLNLEKDHHYDASAMINCNDYETNIYKIKPRRTKVWENNPTKKCTEKNGFKHYDIVKSIHRTKGIIIGSIRSLKAKVITLRTSFDNNFPVSYNKSKILWRPKGLILINNFNG

SEQ ID NO: 17181 - protein, 431 aa, unidentified
  REGION 1..431: note = Human gut metagenome
MPNKVYVINKHGRPLMPCSPAKARHLLDAGKAKVKKRTPFTIQLVYGSSGYTQEVILGVDAGSKTIGMSASTTKEELLSAEVKPRNDVVDLLSTRREFRRARRNRKIRYRKPRFDNRVRSKHKGWLAPSVEVKIQEHITSIKRVCRILPVSKVVVETAEFDLQLLKAIADGKPVPQGEDYQKGEMYGHYNVRQYVLWRDGYTCKCCGAHTTKKKEVRLHVHHLESRKVGGDAPDNQVTLCESCHEKLHKGLIAEKDFKKRKRKSTRDATFMGIMRKTLMQRLCSELPIPVIETRGYITKATREKLLVLPKSHTNDALAIAQGKQGFNVGYLPGIVQIDKICTIRPVRHHNRQLHKATILKGGIRKSNQTEKYVFGYCLFDKVQFNGQDCFIWGRRTTGIFTIKTINGKMIKDGISFKKLKPVEKSTGYLIA

SEQ ID NO: 17182 - protein, 427 aa, Nostoc sp.
MSKVFVLDTEKRPLDPIHAAQARQLLRNKKAAVFRRFPFTIILKESRADASVSDLRIKLDPGAKITGIALVNDSTGEVVFAADLKHRGFAIRDALISRRQLRRTRRNRKTRYRKPRFLNRTRPEGWLAPSLMSRVHNVETWVNRLRKFAPITAISTELVKFDMQLMRNPEIEGKEYQQGTLAGYETREFLLEKWNRQCAYCGIKDIPLQIEHIHSRSKGGSNSITNLTLSCEKCNVKKGTKDIKDFLKKDPTKLQKILAQAKKPLADAAAVNATRYKLLEVLKSTDLPVECGSGGLTKFNRTRQQLIKTHWLDAACVGQSTPILIIKGIKPLLITANGHGTRQMCRTDKFGFPNRYVPKLKFIKGFQTGDIVKAVVTNGKKIGEYIGRVAVRSTGSFNISAQRGLIQGINYKFCKSIHKKDGYSYSS

SEQ ID NO: 17183 - protein, 427 aa, unidentified
  REGION 1..427: note = Candidatus Kapabacteria bacterium
MQKVFVLDTDKRPLAPCRPKRARMLLGEGKAAVYRRFPFTIILKRSYPDATPRALRAKLDPGSKTTGIALVEETTGEVVFAAELTHRGQRVHEALEQRRGVRRGRRNRHTRYRKPRFLNRTRPRHGNRGAWLPPSLESRLANITTWVQRLTRLSPVKSMSQELVRFDTQKMQDAEISGVEYQQGALQGYEVREYLLEKWQRRCAYCTAKDVPLEVEHIIPKARGGSNRVSNLTLACRKCNERKGTQTAEEFGHEHLHKQARMPLKDTAAVNAPRWELYNRLQLFGLPVELGSGGRTKYNRNRQGYAKAHWIDAACVGASGEAVRIDAGMRPLTITAQGWGNRQMCRVDKYGFPRTSAKGAKSVKGFQTGDMVKAVVPSGAKRGTHEGKVAVRSSGSFNITDKNGTVQGVSYKYCKIVQRCDGYRYAV

SEQ ID NO: 17184 - protein, 417 aa, unidentified
  REGION 1..417: note = Human gut metagenome
MPCSPAKARLLLKEKKAIVKRRTPFTIQLTIATGEAKQPVTLGVDSGYKHIGLSATTEKAELYASEVELRQDITDLLSARLALRRSRRSRKTRYRAPRFNNRVASKHKGWLAPSVENRIAAHLSRVEAVMRVLPVTAITVETAAFDTQLLKNPDITGAAYQQGEQLGFWNVREYVLFRDEHVCQHCRGKSKDSILNVHHIESRRTGGDAPNNLITLCETCHKAFHRGKIKLKVRRGKSFKAETFMGIMRWTLFERLKKAHPELNVRNTYGYLTKHKRISHGIAKSHCADAYCIADNLGAKRLEGFFFQKQTRKHNRQIHKLLILKGGLKKKNQAPYEVKGFRLFDKVICKSEEAFIFGRRTSGSFDVRRLDGTRISAGISYKKLRLLEPRTTYLTEFRKEAALPPLHECRGFRAEFL

SEQ ID NO: 17185 - protein, 462 aa, unidentified
  REGION 1..462: note = Human gut metagenome
MSVLVIGRNGRALMPTTSRKARLLLKKKIASVVCRHPFTIQLLYKTGCATQEGCIGIDTGSQHIGVGVTCGDRVILKEEHELRSSMEKRSLLVTRAAMRRGRRYRKVRYRKPKWRQHTKRMYFEKANRKGQHWRKVKTTTQSPRPKGWLSPSLQSKCDHHFRIIDRYLKYLPDSITRNLVIEAGRFDMARMNDPMIHGEMYQRGPMYDAENLRAYIFARDGYQCACCKAKAGTTRKTDGTTVKLVAHHILFRSRGATDNPKYMVSVCDHCHTTKAHQPGGVLYSWMERNKKVTRGLRDAAFMNILRQRLFARYPQAAFTYGNITAADRKQLRLPKSHANDAVAISLFGKEVSAVRDTCQTVHYKQVRKSKRSLHEAIPRKGRKRPNTKAVRNKKNTTQVNGFKLWDSVLANGKKLFICSFTGTSAYLIDKNGCYVSQPGKTYKQWPLSKLKRLHPNGNWLMT

SEQ ID NO: 17186 - protein, 406 aa, unidentified; identical to SEQ ID NO: 7406
  REGION 1..406: note = Human gut metagenome

SEQ ID NO: 17187 - protein, 418 aa, unidentified; identical to SEQ ID NO: 6835
  REGION 1..418: note = Human gut metagenome

SEQ ID NO: 17188 - protein, 512 aa, unidentified; identical to SEQ ID NO: 9077
  REGION 1..512: note = Human gut metagenome

SEQ ID NO: 17189 - protein, 431 aa, unidentified; identical to SEQ ID NO: 4830
  REGION 1..431: note = Human gut metagenome

SEQ ID NO: 17190 - protein, 466 aa, unidentified; identical to SEQ ID NO: 3943
  REGION 1..466: note = Mouse gut metagenome

SEQ ID NO: 17191 - protein, 447 aa, unidentified; identical to SEQ ID NO: 5309
  REGION 1..447: note = Human gut metagenome

SEQ ID NO: 17192 - protein, 483 aa, unidentified
  REGION 1..483: note = Human gut metagenome
MKVYVIGLNGIGLAPTTPRKARLLLKNGRAKIAFRQPFTIQLTYKTGCTHPKEMVIGIDTGSQHIGAGIISKETEQVVSKEEYELRSSMEKRSLLETRKAYRRGRRYRKVRYRHPKFKPATRRVYIEKPVTQNKHQTHWKKQANTFDSARSDGWLPPSIQSKLDHHIRIISRYQNALPKDTQLRIEVGRFDVQHMENPQIRGEMYQKGAMYEYENKKAFVFSRDGYTCKCCKCKAGSKRKDGTTVKLVVHHVDFRSQGASDNPNRLVTVCDRCHTTAAHKPGGILYDWMLKEKKFTRGYRDTSIMNILRRRLWQAFPDAAFTYGNITAVDRKILHIDKTHGNDAVAIAAHGMDRITDIPNTTYYRQMRKQKRSLHEATPRKGRKEPNRTAKRNAKNTCVVKGIYLNDKVKAFGQTGWVTGFSGTSSVYIKNREGEYITVPGKNHKMVPLAELSVRTHCNNWAVSDIKTISNRRQENCDAEMCM

SEQ ID NO: 17193 - protein, 408 aa, unidentified; identical to SEQ ID NO: 4614
  REGION 1..408: note = Human gut metagenome

SEQ ID NO: 17194 - protein, 427 aa, Enterococcus sp.; identical to SEQ ID NO: 5630

SEQ ID NO: 17195 - protein, 336 aa, Clostridium sp.; identical to SEQ ID NO: 16390

SEQ ID NO: 17196 - protein, 442 aa, unidentified
  REGION 1..442: note = Human gut metagenome
GERLMPTSEYRARKLLKSGKAIKYSYHPFTIQLTERKTGNIQPIELCMDTGYIHIGISVKSEKHEYLTEQIDTLTDERSRHNARRMYRSQRRNRKRYRQPRFNNRKKDKGWITPSLEHKKNIHVQTISRINNVMPLTDITMEMGNFDTQVLKAKEEGRPLPQGVDYQHGERYSIATLREAVFARDGYKCQCCGRTIKDGAILHVHHIKYRSQGGTNSISNLATVCDKCHTPKNHKPGGKLYGWKPKLPSFKGATFMTTIRWQLYNEAKALFPDIDIHITYGAATKERRRELNIDKSHINDAFVMGQFHPRHRIKAVLYKKKRRNNRCLEKFYDAKYIDSRDGKKRSGQELFNGRINRNHKKDSENLHQYRLQKVTAVKRTVRKQHYSVQPHDIIIYESRKRETTGCHCNGARVMLLPDKKSVSIKKIKIYRYAGGYFKSTFN

SEQ ID NO: 17197 - protein, 515 aa, unidentified; identical to SEQ ID NO: 5111
  REGION 1..515: note = Human gut metagenome

SEQ ID NO: 17198 - protein, 431 aa, unidentified; identical to SEQ ID NO: 8285
  REGION 1..431: note = Human gut metagenome

SEQ ID NO: 17199 - protein, 512 aa, unidentified; identical to SEQ ID NO: 8121
  REGION 1..512: note = Human gut metagenome

SEQ ID NO: 17200 - protein, 480 aa, unidentified
  REGION 1..480: note = Human gut metagenome
LYTKPLDNIGEGSLPPSGEINLKGMTFMVYVKSIDGKALMPTSNAKARKLLKQKKAKVVSLRPFVVKLTYKTKTEYIQKLNLGVDSGYSNIGFSVIDAKQEYIAGEVKLLEGMKKRLLEKASYRRIRRSRLRYRKARWNNRVKSKKKGWLAPSLKHKLDTHIKFIDYLKNILPIGKITIEVANFDIQKMKDDLISGIDYQNGDMFGFWNVREFVLHRDGHKCQNPNCKHKDKKEQILKVHHIRYRSEGGSDRPENLITLCSKCHTPANHKKGKFLYDWCVNGKKVRGFKDATFMSMIRWHLVNELKSKHNNVSITYGYITKNHRIQNGIEKSHLNDAFAIAKGTNQARTKDRFLVIQDRLKNRSLEKFYDSKIIDIRTEKKVSGGDLNCGRSTRNKNLNTENLRKYRGVKISKGQRRIRKQKYFYQPNDLVKYDGKVYTVKGTQNEGKYIALKEIKKVPKVELLIPYVFKKGLNWSYGLC

SEQ ID NO: 17201 - protein, 406 aa, unidentified; identical to SEQ ID NO: 2874
  REGION 1..406: note = Human gut metagenome

SEQ ID NO: 17202 - protein, 430 aa, unidentified; identical to SEQ ID NO: 3252
  REGION 1..430: note = Human gut metagenome

SEQ ID NO: 17203 - protein, 512 aa, unidentified; identical to SEQ ID NO: 16617
  REGION 1..512: note = Human gut metagenome

SEQ ID NO: 17204 - protein, 422 aa, unidentified
  REGION 1..422: note = Human gut metagenome
LNKRGKPLMPCSPAKARLLLKEKKAIVVRRTPFTIQLTIATGESKQPVSLGVDAGYKHVGLSASIEKAELYASEVELRKDITDLLSARRALRQSRRNRKTRYRAPRFDNRIRTKRKGWLAPSVENRINAHLSRIEAVLRLLPVTKITVETASFDMLLLKNPDIAGKEYQEGEQLGFWNVREYVLFRDGHVCQHCYGRSKDPVLNVHHLESRRTGGDSPGNLITLCETCHKALHRGEITLKAKRGQSFRAQAFMGIMRREGLNRLKASHSELEVNNTYGYRTKHARIVNGIDKSHCADAFCIAGNLGAERLCEFFFQKQTRRNNRQIHKLSILKGGIRKRNQAPFEIKGFRLFDKVACKGEESFIFGRRSSGYFDVRKLDGTRISAGISYKKLRLLEKRRTYLTEIRKEEALPPLPEGRGLRA

SEQ ID NO: 17205 - protein, 442 aa, unidentified; identical to SEQ ID NO: 4418
  REGION 1..442: note = Human gut metagenome

SEQ ID NO: 17206 - protein, 416 aa, unidentified; identical to SEQ ID NO: 11239
  REGION 1..416: note = Fusobacteriaceae bacterium

SEQ ID NO: 17207 - protein, 408 aa, unidentified; identical to SEQ ID NO: 8581
  REGION 1..408: note = metagenome

SEQ ID NO: 17208 - protein, 430 aa, unidentified
  REGION 1..430: note = Human gut metagenome
MVYMLSHTGQPLMPTEDHRKVRLLLKNKKAKVVKRTPFTVQLLSCTHEYKQPVTLGVDAGSRHIGLSACTENRELYAEDLQPRNDVVKNLSDRRQYRRSRRNRKTRYRAPRFENRVHSKHKGWLAPSVEVKIQEHITAIKRVCSRIPISKIIVETAEFDMQLLKAMELGLPLPAGTDYQEGEMLGQYNVRQYVLFRDSYTCQCCGAHPTAKKEVKLHVHHIESRKTGGNAPGNLITLRERCHKLLHEGKITLPGKRLHRPMRDAAFMGIMRKTLLARLRNELSVPVYETHGYITKYLREKHGIEKSHTNDARCIAGYPLASPCADIFYAKAVRHHNRQIHKATILKGGIRKRNQLPYLVHGFRLWDKVLCNGKEGFITGRRTSGFFVVKQLNGTTLSVGISHKKLRLLEKRTNYITERRTAIPLRLTLGV

SEQ ID NO: 17209 - protein, 475 aa, unidentified; identical to SEQ ID NO: 4985
  REGION 1..475: note = Human gut metagenome

SEQ ID NO: 17210 - protein, 443 aa, Fervidobacterium sp.; identical to SEQ ID NO: 9897
  REGION 75..77: note = misc_feature - Xaa can be any naturally occurring amino acid

SEQ ID NO: 17211 - protein, 470 aa, Blautia sp.; identical to SEQ ID NO: 2925

SEQ ID NO: 17212 - protein, 442 aa, unidentified; identical to SEQ ID NO: 2903
  REGION 1..442: note = Human gut metagenome

SEQ ID NO: 17213 - protein, 470 aa, Moorena sp.
VFVPLSLTVIQLYQGEGSAVSLTSPKNLGEENITRLTEISMSNLVFVFDTNQRPLDPVHPGKARRLLSTGNAAVFRRYPFTIILKPACPEVPMQELELQLDPAAKVTGMAVVQGTKVIFGAELEHRPQQIKDALLSRGQLRRSRRNRKTRYRQARFLNWTRPKGWLSPSLQHRVDTTMTWANRFRRLAPIARITQELVRFDLQLMHNPERSGVEYQQGELQDDEVREYSLEKWNRKCAYCGAKNVALEVEHIQPQSKGRTDRVSNLTMACHSCNQSKSNGDIRDFLSGNPDVWNRILEQAKSPLKDAAAVNSTRWALFNALKQTGLLVATGTGGQTKFHRTRLDLPKTYWLDAASVGKIDSLQVLTTKPLLIAAKGHGTRQMCGTDKYGFPTRDCSRVQIHQGFRTGDIVTAIVTKGKKIGSYVGRVLARASGSFDITTQLGRVWWNEPQVLPTNLPKGWLCLCVRSYYR

SEQ ID NO: 17214 - protein, 423 aa, unidentified; identical to SEQ ID NO: 3951
  REGION 1..423: note = Human gut metagenome

SEQ ID NO: 17215 - protein, 248 aa, unidentified
  REGION 1..248: note = Human gut metagenome
LLMVAVVDLFGKPLMPTNEYRARRLLKQKKAKIFGYRPFTIQLTERKSTEIQPIELCMDTGYIHIGISAKSERHEYLGMQIDTLTDEKLKRDDKRQYRRQRRNRKRYRAPRFDNRRRKEGWIAPSLEHKKEIHIDAIQRICKVMPITDITLEMGNFDTHVLKAVEEGKPLPQGSDYQHGERYGIATLREAVFLRDGYKCQCCEKSVKDGAILHVHHIKYRSQGGTNRMSNLITVCDKCHTPKNHKPGG

SEQ ID NO: 17216 - protein, 415 aa, Bacillus sp.
MFVYVVNKHGHPLMPCTPRKARVLLKKKQAKVIKREPFTIQLLYGSSGYKQPISLGIDAGTKHIGFSATSENTVFIEGEVQLRTDIQNLLSTRREFRRARRNRKTRYRQARFQNRKKSEGWLAPSVQHKVDSHIRLIEKLHKILPITSITVEVAQFDTQKLKNPDIRGEEYQQGDQLGFWNTREYVLFRDKHSCQQCKGKSKDKILNVHHIESRKTGGDSPDNLIALCETCHDYIHQHHLEHLFTRKRKTLRDASHMTVMRWFIYNGIQERFENVHLTYGYLTKHTRISHGLEKSHEVDARCISGNPLAHPTQHVFILKQVRRNNRQLHKATILKGGIRKANKAEKYVKEFQLFDQVKYEEQACFIFGRRSTGYFDLRLLDGTVIHRSASYKKLIPLARASTWLVERRERQGDPH

SEQ ID NO: 17217 - protein, 448 aa, unidentified
  REGION 1..448: note = Human gut metagenome
MSTGLRAVQAEPAGIRKGDALKVFVLNMRGRPLMPCSPARARHLLKAGKAVVRRRTPFTIQLRIATGETKQSVTLGVDAGAKHVGLSAATEKEEVFASEVELRQDITGLLAARLSLRRERRQRKTRYRAPRFLNRVRSKHKGWLAPSVENRIQAHMSRIDAICGLLPVTKIVIETASFDIQKIKHPDVEGTDYQQGDQLGFWNVREYVLFRDGHVCQHCHGHAKDKILNVHHLESRQTGGDAPNNLITLCETCHKACHAGKIKLKVKRAQSFRAEAFMGIMRWTLLDRMRKAHSGLPVENTYGYLTKNTRITPGLPKTHCVDAYCIAGNLKAVRRGVCLHQRQVRKHNRQIHKCTVLSKTLKDGTKIGYRKLNQTPHLVKSFRLFDKVRCLGQTGFIFGRRSSGYFDVRRLDGVKLSSGISYRKLTLLEKRSTYLTELRKEDGASSPV

SEQ ID NO: 17218 - protein, 304 aa, unidentified
  REGION 1..304: note = Human gut metagenome
LAGAICGGQDPGAYHQYQAGFELLPIGKVVVETAEFDLQLLKSIADGMPVPQGEDYQKGEMYGFYNVRQYVFFRDGYTCQCCGAHGKGIKFHTHHLESRKTGGNAPDDLVTVCDKCHKAFHAGLITDAKLKKRRRKSTRDAAFMGIMRKTLLQRLRAELPIPVVETRGYITKATRERLLKLPKSHTNDALAIAMGRHGFGIEEVTYMPQSDRIYQIKPVRHHNRQLHKAIPKKGGRRQRSQGPKYVQGFRRFDKVLYRGQECFIWGLRTRGYFQLKLLNGTKVHESAKASELILLEHRSGYLIA

SEQ ID NO: 17219 - protein, 442 aa, unidentified; identical to SEQ ID NO: 2834
  REGION 1..442: note = gut metagenome

SEQ ID NO: 17220 - protein, 442 aa, unidentified; identical to SEQ ID NO: 9431
  REGION 1..442: note = Human gut metagenome

SEQ ID NO: 17221 - protein, 419 aa, unidentified; identical to SEQ ID NO: 4877
  REGION 1..419: note = Human gut metagenome

SEQ ID NO: 17222 - protein, 453 aa, Clostridium sp.; identical to SEQ ID NO: 14499

SEQ ID NO: 17223 - protein, 512 aa, unidentified; identical to SEQ ID NO: 7636
  REGION 1..512: note = Human gut metagenome

SEQ ID NO: 17224 - protein, 457 aa, unidentified; identical to SEQ ID NO: 5177
  REGION 1..457: note = Human gut metagenome

SEQ ID NO: 17225 - protein, 414 aa, unidentified; identical to SEQ ID NO: 4492
  REGION 1..414: note = Human gut metagenome

SEQ ID NO: 17226 - protein, 557 aa, unidentified; identical to SEQ ID NO: 3108
  REGION 1..557: note = Human gut metagenome

SEQ ID NO: 17227 - protein, 406 aa, unidentified; identical to SEQ ID NO: 2752
  REGION 1..406: note = Human gut metagenome

SEQ ID NO: 17228 - protein, 354 aa, unidentified
  REGION 1..354: note = Human gut metagenome
CGVDDGGLHVGIALVQKCKSKNKVVFKGTIEQRNDVKHLMEVRRNYRRYHRYHKRYRQARFDNRKSSKRKGRIAPSILQKRQATIRVINRLNKWINITNYWLEDVSIDIRVLTDGYKSYSWQYQKSNRLDENIRKATILRDGGKCMECGKSNCRLEVHHIKPRRRNGSNTLDNLITLCESCHQKTEGQEELYMDRYFSLLKSSDNKNLNYAQHVMIGKMWLRKQLSGLGVLYLTSGGDTANKRIDWNIEKSHTNDAVCITDLQPDTCDIKEWAIKPMRRQSKAKTDHVLGIHHRDLVEYTFKNGETHRGYVTALYPDQKAINFQSQTKHCKKVNARKCKLLWNYSKIYWFENAS

SEQ ID NO: 17229 - protein, 436 aa, unidentified
  REGION 1..436: note = Human metagenome
MTKTLTTQTTQACVLDQNGKPLMPTTRLGKVYRLLKTKKAHIVSYEPFTIQLDYEPNTHIIQPMTLGVDSGAIHSGYSVTNEHREYYNAEVIARNDISRNLSNRHMYRRTRRTRKTRYRKPRFNNRKNKKKGWLAPSLQQKIAVQLNEIDHLHRYFPIETIIVEVAEFDIQKIKNPDISGIEYQQGTLQGYNIRNYLLEKHGHKCFYCGKTVSDFEVEHMLPKSRGGSNRIDNLTLSCHDCNEKKGTLTAEEFIQQTLSAKKAVSKLKQLPNEKRLFKYMTYMNATRWALYDAINGTYRNVKMTYGYITKYNRIHAGLPKAHHIDAKCITGFLTIPSMSQTVVKVKMRRHNRQLHRASFSKGHIRKIACLPTTVFGFQLYDLVCFNNHRYYIKSRRSSGAFTLASVEGLKNEKRTYKKLTLLAHTNAYLTNRYINA

SEQ ID NO: 17230 - protein, 426 aa, Moorena sp.; identical to SEQ ID NO: 16898

SEQ ID NO: 17231 - protein, 442 aa, unidentified; identical to SEQ ID NO: 2903
  REGION 1..442: note = Human gut metagenome

SEQ ID NO: 17232 - protein, 535 aa, unidentified
  REGION 1..535: note = Human gut metagenome
MYRLITEAGIPLIPERLHDTKKKKGASRMSEYIYVLGMDGNPQMPTKRKRHVEQLLQTGRAHVFRQVPFTIQLTYKNQPVLQPVTIAEDPGRSNIGMAVVSLSGELLSAAVVQTRNKKIVKLMEKRKQHRRASRNGERKARQRLAKKCHTMVKAGSLMRKLPMYGKDKRARCNMIKNTEARFCNRKREDGWLTPSAEHLVRTHINLIHKMQKFLPITDVAIEINRFAFLSLEDPSISGVDFQNGPLKGYDDLNAAVEDLQDGHCLMCNSPIEHRHHIVPRSMQGSNTIGNIAGLCCKCHEMVHKDSAFEDSLKKKKAGLNKRYAAVSALNQAIPFICKRLEQEFGKEHVHYCSGRDTSMVRRSLGYHKTKEEQLHEVDAWGIAVLSLQQIPEKAPSFDHVHEILQFRRQDRSRIKAQTSRAYYHERKKIAKNRKKAEGQREDSLQEWRKRQVERYGEEQTRKMISQLKVKKSIRRYNRLDRLMPGAVFYYQGVRYVMRGQHCEGTYLQAVGMGSKDFPTKKCKIVVHNQGLVFVS

SEQ ID NO: 17233 - protein, 426 aa, Anoxybacillus sp.
MVFVLDTNKRPLAPCHEAVARKLLKQGKAAIYRRFPFTIILKKSVDESEIKATYRLKIDYGSRHTGLAILRGQEVVWLGQLDHRTDIKERIDKRRAFRRARRNRKTRYRKPRFLNRKRKEGWLPSSLESRVQNIQTWVNRLKKLCPIGYISYENAKFDTQLMRNPEINGVEYQQGTLQGYEVREYLLEKFGRKCCYCGKENVPLEVEHIIPKSRGGTDRVDNLCLACHDCNQRKGSKTAEEFGYPHIQKQVKETLKDTSAINSTRWKVYEVLKQTGLDVECGTGARTKMNRIRLDLPKTHYFDACCVGESTTNHLYFKTKEVLFIKAKGRGSRSRTNLDRYGFPRGYLARQKFFFGFQTGDMVKAVVPRGKYQGVWFGEVACRKTGSFDIKGKDGKRIAQGINYRYVQVIQRFDGYAYGKGVAELA

SEQ ID NO: 17234 - protein, 438 aa, unidentified; identical to SEQ ID NO: 12384
  REGION 1..438: note = Human gut metagenome

SEQ ID NO: 17235 - protein, 444 aa, unidentified
  REGION 1..444: note = Chlamydiae bacterium
MLVFVLNKQKKPLMPCSPAKARGLLKKGLAKVISKKSFTIKLLFGSSGYKQKIIAGMDTGSKIIGIAAIANGKVLYQSQTKLRGEEIKKKMDQRRMYRRSRRGRKLRYRKPRFLNRRASRAINRLAPSVKHKVLSHLREKKFIESILPVSMWIVETASFDIHKITNPKGVSKALGKGQSYQKGRMLDFYNVKQYVLNRDKYQCQMCKKKKGLKLHVHHIQFRSNSGSNSPDNLVTLCETCHDKLHKLKKEEAEKSSKKLQKRAQKPTKHATEVSILRSQLCKHFGNPGSSQAFEETFGYITKFNRESKNLPKAHHIDAICIATCGESFEMHNQNNTSDLFFRRYVSKGDYQQSRGIRSEVKIPTGKLFGLKKIDLVKTSKGVGFVKGKRSSGFFAISDINGTIISDSVNIKKTIDRIQARKAVLTWRSQFLPDLKDRVSLREKR

SEQ ID NO: 17236 - protein, 456 aa, unidentified; identical to SEQ ID NO: 4609
  REGION 1..456: note = Human gut metagenome

SEQ ID NO: 17237 - protein, 460 aa, unidentified
  REGION 1..460: note = Human gut metagenome
MVAVVDLFGKPLMPTNEYRARRLLKQKKAKIFGYRPFTIQLTERKSAEIQPIELCMDTGYIHIGISAKSERHEYLGMQIDTLTDEKLKRDDKRQYRRQRRNRKRYRAPRFDNRRRKEGWIAPSLEHKKEIHIDAIQRICKVMPITDITLEIGNFDTHVLKAVEEGKPLPQGSDYQHGERYGIATLREAVFLRDGYKCQCCEKSVKDGAILHVHHIKYRSQGGTNRMSNLITVCDKCHTQKNHKPGGKLWNWKPKLAEFKGASYMTSIRWTLYNEVTALLPNSSVHITYGAKTKESRRKLDIKKSHVNDAYVMGLFCPKHRTKPVYFKKKRRNNRVLEKFYDAKYIDSRDGKKQSGQELFNGRINRNHRKDSENLHLYRKQKVTKGKRSIRNKHYPIQPHDILLYQKKKYENAGCHNNGSRVILLPEKKSVALKQLTIYQYAGGYYRVPYESNKKEERTGS

SEQ ID NO: 17238 - protein, 419 aa, unidentified
  REGION 1..419: note = Human gut metagenome
MVYVISQDGKPLMPCSNPIARLLLKQGKAKAKCREPFTIKLIYETTDYTQDLTLGIDTGSGTIGTAVSKNNGDIVYMSEVVVRNDITDKMAQRAKYRRNRRNRKTRYRKARWLNRSNSIKKDRFSPTMQSKLHSHVREIEYIQSILPITEMVFETGQFDMHLMKNPSLANSKVRHWGYQKGTNYGFENTKAMVLNRDNYTCQCCKGKHKDSKLEVHHVIFRSQGGSNEESNLITLCHTCHKNLHSGKVNLKLKGKMKGNLKYATQMNSICKQLFRLYPNAIETFGYVTKANRLHLGVDKEHYYDACIIATQGNAFNIKSNLYKKKCVSDGDFQKTKGIRSEQSIVTDKIWGFRKFDKVCYFGNDYFIKGRMSTGYAILMDIDGNKIDFSTMPRGYKTPKLSNCKRITARSTVMMQVEVV

SEQ ID NO: 17239 - protein, 431 aa, unidentified
  REGION 1..431: note = metagenome
MPNKVYVINKHGRPLMPCSPAKARHLLDAGKAKVKKRTPFTIQLVYGSSGYTQEVILGVDAGSKTIGMSASTTKEELLSAEVKPRNDVVDLLSTRREFRRARRNRKTRYRKPRFDNRVRSKHKGWLAPSVEVKIQEHITSIKRVCRILPVSKVVVETAEFDLQLLKAIADGKPVPQGEDYQKGEMYGHYNVRQYVLWRDNYTCQCCGTHPSKKKEVRLHVHHLESRKVGGDAPDNQVTLCESCHEKLHKGLIAEKDFKKRKRKSTRDATFMGIMRKTLMQRLCSELPIPVVKTRGYITKATREKLLVLPKSHTNDALAIAQGKRGFNVGYLPEIAQIDKIYTIRPVRHHNRQLHKATILKGGIRKSNQAEKYVFGYRLFDKVQFNGQDCFIWGRRTSGYFVVKTIDGKVIHNSASFKKLNLVERASNYLIA

SEQ ID NO: 17240 - protein, 442 aa, unidentified; identical to SEQ ID NO: 2834
  REGION 1..442: note = Human gut metagenome

SEQ ID NO: 17241 - protein, 362 aa, unidentified
  REGION 1..362: note = coral metagenome
MRVFVLNSNRQPLDPCKPARARILLSTGKAKVYRRYPFTIILTEEIQEPITHGSQLKIDPGAKTSGLAIVQGNRIVWGGELTHRGFQIRDALTSRRQLRCARRNRKTRYRKPRFLNRSRPEGWLAPSLMSRVHNILTWVKKLTRLCPIAGISQELVRFDTQKLQNPEISGIEYQQGTLYGYELREYLLEKWNRTCAYCGTTGTQLEIEHIKPLSKGGSNRVSNLAIACHSCNQSKSAQEIEQFLSGKPDVLKRVLSQAKRPLTDAAAVNTTRWKLYHELKSIGLPVEVGSGGLTKFNRCRQNLPKTHWLDAANVGKVDTLIIEGYQPLLIAAKGHGTRQICRTNKYGFPIRYCSRTKIHKGF

SEQ ID NO: 17242 - protein, 527 aa, Actinomadura sp.
LATFRTGEPTHRPVLLQRAALESGLADTPRIGNETGPRHPSRKGGGAGAGHVRGETTGTSPGASGVTPNPSVGEQRREAHRVFVLDGQGVPLQPCHPARARRLLASGRAVVARHTPFVIRLKDRLAAESQVDGVQVGIDPGSRHTGISVFTSQEGERRGRYSIQLDHRGAQIHKRVGQRAAYRRRRRSAKLRYRAPRFLNRQRPDGWLAPSLGHRVDTTVSWADRLTRWAPVRVLHVERVAFDTHLLSAGRPLEGTEYQQGTLCGYQAREYLLEKWGRVCVYCGAVDVPLNVDHIHPRSEGGSDRISNLTLACVPCNRAKGDQPVQRFLARRPAVLARILAQAKTPLRDAAAINATRWRLWRALDSRFPGQVRIGSGARTKWNRTQSGLPKSHTFDALCVGGSDAVTVTAYPADVLVIACTGRGTHCRTSPDKYGFPRLRLPRSKNVHGFQTGDLVKAIVPAGKKAGSHLGRVAVRTTGWFDITGGRGTVQGISHRHVRLLQRGDGYGYTIRPENTVPMYGPKEGIR

SEQ ID NO: 17243 - protein, 420 aa, unidentified; identical to SEQ ID NO: 7011
  REGION 1..420: note = Human gut metagenome

SEQ ID NO: 17244 - protein, 408 aa, unidentified; identical to SEQ ID NO: 4826
  REGION 1..408: note = Human gut metagenome

SEQ ID NO: 17245 - protein, 461 aa, Moorena sp.
MRVYVINKNGNPLMPCKPAKARHLLRNGKAKVIKRKPFAIQLLWDCEENIQEVRCGIDKGCKVTGIACAKSNGRLRLTVGNGRILFSANIKHRNPVALQQKDGSTKTFMNVRAERRKGRRNRHCWHRKPRFNNRASSKRSGKLPPTIKMNVMEVVRVVRKIDLLISHIIVEDVQIDVRRLSDPDVKGSEYQQSNRLDENLRIACLIRDNFTCQKCSKKNTQLEAHHIVWVSKSGKDSIYNLITLCESCHDKVHKTGESGKVKKKGGEVFTGMDGFSDQTAQRTMQGKNLMYQELEKIALLSTVYGYQTASFRKACSYEKEHWIDAVCITNLETDEFIPPDKENHYQIWFRAKQTRRIFDTQPTKGGVIKQWQKYKGLASNRKNCVLVDKRDKNFVLPLGYTFYTKGDVISISGLETEIASISGKGKGFYYWIYQPDGNRKYASVSHQKVKLIEYAKTINYI

SEQ ID NO: 17246 - protein, 396 aa, unidentified; identical to SEQ ID NO: 4508
  REGION 1..396: note = Human gut metagenome

SEQ ID NO: 17247 - protein, 512 aa, unidentified; identical to SEQ ID NO: 6207
  REGION 1..512: note = Human gut metagenome

SEQ ID NO: 17248 - protein, 408 aa, unidentified
  REGION 1..408: note = Human gut metagenome
MVYVQDINGKPMMPTTRHGKVRRLLKDKKAVVVNLCPFTIKLMYVTSDYKQEIVLGVDAGTKHVGLSATTKSKELYSSEVILRNDIVDLLSTRRELRRSRRNRLRYRKPRFDNRIKSKRPGWVAPSVKYKVDAHIRVIDNVCSILPISRIVIEVAQFDTQKINNPNISGKEYQEGDQLGFWNVREYVLARDGHKCQHCKGKSKDPVLNVHHIESRKTGGDSPSNLITLCETCHKEYHKGNIDLKIKRGSSLRDAAVMGIMKWRLYEELKSKYDNIFMTFGYVTKYNRIKHGIEKSHVFDAFVISKNFDAIRLGYYYKVRLVRRHNRQIHKQKIPKGGIKRPNQSPFEVFGFRLFDRVMFENSYYFIFARRKTGSFNIRDIDGKNQRDITYKKLKLSRCKRFMVQKEMD

SEQ ID NO: 17249 - protein, 239 aa, unidentified
  REGION 1..239: note = Human metagenome
MTNDYKPYKWQYQKSNRLDENLRKAAIIRDNCKCQECGKTNCRLEVHHIRARKYSGADTIGNLITLCSKCHDKTKGKEKNFEDKYFKIINSKSKRFDYAMHVMQGKNYLRSKISELGLLHLTNGGETANKRIEWDIEKSHSNDAICIADSIPDSCNIKEWTIKPMRRKSKAKTDNVLGVKHRDLVSYTYKNGETHTGYVTALYPEQLALNFQSKTKHCKKVNARKCKLLWQFNKIYWLE

SEQ ID NO: 17250 - protein, 408 aa, unidentified; identical to SEQ ID NO: 5302
  REGION 1..408: note = Human gut metagenome

SEQ ID NO: 17251 - protein, 409 aa, Moorena sp.
MPTTPQKAKKLLKQGKANVYKLTPFTVQLQYPTGENKQDISLGVDAGTKNIGLSATTEDNVLFEGEVKLRTDIQELLATRRSARSVRRSRKTRYRQPRFLNRKKDQGWLAPSVQNKVNIHLKVVNLVHTLLPVKNIIIEVAQFDTQKIKNPSISGDLYQKGDQLGFWNIREYVLFRDQHICQYCKGKKKDNILNVHHIESRRTGGDSPDNLLCLCETCHKEIHRQGKEHLFKRKSATLRDASQMTAMRWFIYNKGKEIYPHLRWTYGFQTKSTRIMSGLEKDHAVDARCISGNPLAKVSRNSYLFKQVRENNRQLHKFTINKGGTRKSNKAETYVKGFQIFDRVLFGGKECFVFGRRKSGYFDLRTLEGESIHKSASFKKLHVVEKANTLLVQLRIRRKEVKAADSSHD

SEQ ID NO: 17252 - protein, 490 aa, unidentified; identical to SEQ ID NO: 3566
  REGION 1..490: note = Human gut metagenome

SEQ ID NO: 17253 - protein, 420 aa, unidentified; identical to SEQ ID NO: 16129
  REGION 1..420: note = Human gut metagenome

SEQ ID NO: 17254 - protein, 394 aa, Desulfobacterium sp.; identical to SEQ ID NO: 12029

SEQ ID NO: 17255 - protein, 512 aa, unidentified; identical to SEQ ID NO: 10560
  REGION 1..512: note = Human gut metagenome

SEQ ID NO: 17256 - protein, 428 aa, unidentified
  REGION 1..428: note = Human gut metagenome
LKVFVLNMRGQPLMPCSPAKARHLLKAGKAVVKRRTPFTIQLRIATGETKQNVTLGVDAGAKHVGLSAATEKEEVFASEVELRQDITGLLAARLSLRRERRQRKTRYRAPRFLNRVRSKHNGWLPPSVENRIQAHLSRIDAICGLLPVTKIVIETASFDIQKIKHPDVEGTDYQQGDQLGFWNVREYVLFRDGHVCQHCHGHAKDKILNVHHLESRQTGGDAPNNLITLCERCHKACHAGKIKLKVKRGQSFREEAFMGIMRWTLLDRVRKAHPGLPVENTYGYLTKNTRITQGLPKAHCVDAYCIAGNLKAVRRGVHLYQRQVRKHNRQIHKCTVLSKTLKDGTKIGYRKLNQTPHLVKNFRLFDKVRCLGQTGFIFGRRSSGYFDVRRLDGVKISSCINYRKLTLLEKRGTCLTELRKEDGASSPV

SEQ ID NO: 17257 - protein, 286 aa, unidentified; identical to SEQ ID NO: 16765
  REGION 1..286: note = Human gut metagenome

SEQ ID NO: 17258 - protein, 385 aa, unidentified
  REGION 1..385: note = Human gut metagenome
LRALDPGSRETGAAVVRDDEKKRHHALAFFVIKHRGGAIRDELKARSAFRRRRRSQNFRCRSPRFLNRVKPKGWLPPSLRHRVETTLSFVRRMCRYLPVSGIAAELVKFDSQKLQTPEVSGIEYQQGTLFEYEVREYLLEKFGRKCVYCGAEGVPLNIDHVVPRAKGGSNRVSNLVLACVSCNQKKGARSLEDFLKGKPEVLARVRRELKTPLRDAAAVNATRWVLFNELKATGLPVETGSGALTKFNRHAFGVEKEHWLDALCVGRLNGAVTRKGLNVLEIRCMGRGSRQRTRLTKYGFPRGYLMRQKCVHGFATGDMVEANVPKGKKAGLWRGRVAVRVSGSFNIQTPKGVIQGVGWKHCRLISHNDGYGYAWLGHAPHSSPA

SEQ ID NO: 17259 - protein, 489 aa, Streptomyces sp.; identical to SEQ ID NO: 14134

SEQ ID NO: 17260 - protein, 459 aa, unidentified; identical to SEQ ID NO: 10972
  REGION 1..459: note = Peptococcaceae bacterium

SEQ ID NO: 17261 - protein, 442 aa, unidentified; identical to SEQ ID NO: 7529
  REGION 1..442: note = Human gut metagenome

SEQ ID NO: 17262 - protein, 506 aa, unidentified
  REGION 1..506: note = Human gut metagenome
VLRPRYQYPTRWYPSREQGSGNGCLSGEENTDLEQEVSGTLSKGDHSHPGEQDFCVPAITIQGGPAMSVFVVGLNGCRLMPTSERKARLLLKHGKASVYRKVPFTIKLNYKTGSTTQSGYLGIDTGSQHIGVSVVREDGTVLHKKEIGLRDSMSKRKLMQSRASSRRGRRHRKTRYRHPKWRPKAKRVYCEIPDRKGRHWKKKEITFASKRAKGWLPPSLQSKTDHHIWWIKKLQDLLPEGYRLSIELGRFDPARLKDPEIHGELYQKGPQYDYENVRAYVLNRDRYTCQVCGKKGGKLHVHHILYRSHGATDDPQYMATVCSDCHNTENHQQGGILYQWMQKQKKFTRGLRDATFMNILRKRLIEAFPGATFTYGNITKADRERLRLPKSHGNDATAIAIVKTGIMTVKDKEPVIYIQQVRRKKRSLHEETPRKGRKESNRKASRYDKNTKAVTVTKRKNKKKITITGCLFDRVELNGKKGWISGFTDKSCYKIYGRKPSGLPLG

SEQ ID NO: 17263 - protein, 442 aa, Deinococcus sp.; identical to SEQ ID NO: 5259

SEQ ID NO: 17264 - protein, 363 aa, unidentified
  REGION 1..363: note = Human gut metagenome
MVYVQDIDGKPMMPTTRHGKVRRLLKDNKAVVVNTCPFTIKLTYKTSDYKQEIVLGVDAGTKHVGLSATTKSKELYSGEVILRNDVVELLSTRRESRRARRNRLRYRKPRFENRVKSKRLGWVAPSVRHKVDAHIRVIDNICSTLPISRIIVEIAQFDTQKIKNPDISGNEYQEGDQLGFWNVREYVLARDGHKCQHCKGKSKDPILNVHHIESRKTGGDSPSNLITLCETCHKEYHKGNIDLKVKRGKSLRDAAVMGIMKWKLYEELKSRYPNVSMTFGYITKYNRIKYGIEKSHTSDAFVISRNFNAKRIERQYLKRLIRRHNRQIHKMKILKGGKKKNNQAPFEVFGFRLFDKVLYNNEI

SEQ ID NO: 17265 - protein, 430 aa, Vibrio sp.; identical to SEQ ID NO: 8414

SEQ ID NO: 17266 - protein, 400 aa, unidentified
  REGION 1..400: note = Human gut metagenome
AKVKKRTPFTIQLVYGSSGYTQEVILGVDAGSKTIGVSASTKKEELFAANVIPRNDVVDLLSTRREFRRARRNRKTRYRKPRFDNRVRSKHKGWLAPSVEVKIQDHIAAIRRVCGILPVSKVVVETAEFDLQLLKAVAEGKPVPQGEDYQHGEMYGHYNVRQYVLWRDGYTCQCCGAHATQKKEVRLHVHHLESRKVGGDAPDNQVTLCESCHKKLHKGLIEAKDFKKRKRRPTRDATFMGIMRATLLQRLRSELPIPVIETRGYITKATREKLLVLPKSHTNDALAITQGKHGFNVGYLPGIVQSDKTYTIRPVRHHNRQLHKATILTGGIRKANQAEKYVCGFRLYDKVLYNGIECFVWGRRTSGSFLLRALDGTKVKDGAGHRILTLLERSSNYLIA

SEQ ID NO: 17267 - protein, 515 aa, unidentified
  REGION 1..515: note = Human gut metagenome
MTALEEKLSKTEYIYVLGFDGKPQMPTRRKRHVLKLLKTGRARIAEDIPFTIRLTYRNAPVLQPVTLAEDPGRTNIGAAVLSPLGDLLFAAVIETRNKEIKKLMADRKKSRQASRRGERKARQRLAKRYGSMVKSGMVMRKLPMYAADRFVTCKFIRNTQARFCNRKRCPDWITPTVQHLVQTHLNIIRKISRYLPVTDIAFEVNRFAFIHMENPKAMGVDFQNGPLKGYDDVKEAICTQQHGKCLMCKKPIAHFHHIVPRSRGGSDTIQNLAGLCPECHTKVHTDTTFRKDFDRKKSGQLKKYGALSALNQAVPFICKKLLEEYGEEHVHFCGGLDTSLIRTALGFEKTKKNQMHEVDAYCIGLAALEVNEVETPAFDHTFQIRQFRRQDRSIIHHQTGRSYYQGKEKVAQNRKPGFEQKTTALSQWYKEQIRIHGEKEAEKLRSQLRVEKSSRHYNDMDRFLPGAVFLYEGKRYVLSGRITNGKYLRACGQGMKNFPAAECTFIRHNAGLVFI

SEQ ID NO: 17268 - protein, 475 aa, unidentified
  REGION 1..475: note = Human gut metagenome
MVITLDKNKRPLGFMSERRCRILLEKKRAVLYRYFPTIVILKDVDARKLSGLSSYRIKIDPGAKYTGIAIVMDDTNEFMYAMQIEHRGEQIKKNLDTRRGARRNRRSRETGYRRPKWGNRCTAKEQRQSYDSRRDENWLPPSVKSTADNIISWIRRLCRWINITNCSIESVRFDTQLMENPEIEGVEYQQGTLYGYEVKEYLLEKYGHTCQYCGGKSNDPILEWEHMLPRSRGGSDRLKNAALACHNCNQDKGNHTLEEWQTILQDRIPKESGKQKELDQIRQKFVQQVMEGKTPVKGLRYAAWVNSSRRYSQRHLYLRFPELECSSGGRTKYKRNVLKYPKEHHYDALCGGEIPEDGFVDRTHGYYLYAKATGRGTRLREQINQCGVIIRKWMDRSKTAFGFQTGDLVVADVPKDTNYKYKGHFSGRVMIRKSGSFDIRTLSGELVTVNAKFCRLLQNNSGYQMMIKRAIPLGN

SEQ ID NO: 17269 - protein, 410 aa, unidentified
  REGION 1..410: note = Human gut metagenome
MPCSPAKARLLLKEKKAIVKRRTPFTIQLTIATGETKQPVGLGVDAGYKHVGLSASTDKAELYASQVELRQDITDLLSARRALRRARRNRKTRYRAPRFNNRIRTKRKGWLAPSVENRINAHLSRIEAVLRLLPVTKITVETASFDMLLLKNPDIAGKEYQEGEQLGFWNVREYVLFRDGHVCQHCYGRSKDPVLNVHHLESRRTGGDSPGNLITLCETCHEALHRGEIALKTKRGHSFRAEAFMGMMRWEVLNRLKASHSELEVNNTYGYRTKHARIVNGIDKSHCADAFCIAGNLGAERLCEFFFQKQTRRNNRQIHKLSILKGRNQAPFEIKGFRLFDKVACKGEESFIFGRRSSGYFDVRKLDGTRISAGISYKKLRLLEKRRTYLTEIRKEEALPPLPEGRGLRA

SEQ ID NO: 17270 - protein, 425 aa, unidentified
  REGION 1..425: note = Human metagenome
MVFVLDRSKKPLDMISHAKARILLKNRLAVVHKIYPFTIRLKDNSCVGKDKAYTVKLDPGSRTTGIAIVDDANKVVILAELEHRGHVIKKKLDQRKAARRSRRNRKTRYRESRFLNRTRPEGWLAPSIKSRADNVINFICKYKKLINISKVMIEYVSFDVAQMSSNTKLWGNGYQQGPLYQNKLRSFIFSRSNGKCVYCGAKATDIDHVIPRANGGTNSTYNLVASCRACNQMKSNLSLKEFGKLMGKNYSHLEPKKLPKDAAIVQSARNYMVKEITKLVTDTTTHDAWLTKYNRNELGLPKEHYYDALSVGEIPSKFNFSTDKVLQISAKGRGSRQMCRVNKYGFPRASAKASKSVEGFQTGDIVKAVVPSGSKEGVYLGRVAVRSNRCFDIQTKTKTIEGIWHKHFHIIQRGDGYLYNYKKIL

SEQ ID NO: 17271 - protein, 512 aa, unidentified
  REGION 1..512: note = Human gut metagenome
MSTVYVLNKDGKPLMPTTRGGHVRHLLKEQKARVVRTNPFTIQLLYETDNLVQPLYLGIDPGRTNIGVAVVKTDGTAVFTAHLETRNKEIPKLMKKRKDSRRARRTNGRRCRRQRRAKANGTISKKCVKQTTAQNGSVSKRAKEIGVIKRHLPGCEKEVLCIGIKNKEAKFSNRVRPEGWLTPTANQLLQTHINLVKKIQKFLPISDVVLEINKFAFMRLDNPNVQKWQYQQGPLYQKASLEEAVSEMQEHHCLFCKKPIDHYHHVVPQHKNGSNTIGNIVGLCAKHHDLVHKDTTWQKKLAKKKTGLNKKYGALSVLNQIIPALTKELSSLFSKHFFATNGKSTYDYRAAHGVSKDHWLDAYCIACSVLPNDVCDSDINNRVPYELKQFRRHDRRALHKENMSRVYTLNGKSVATNRHKATEQTTDSLEEFRQCQPDDVCKLKVKEHHPEYRNPKRNFPGCVFLVGKHTHVIQGTSGSHNGKADGYYDTNGNSYSSGKCKFVAKNEGIVFT

SEQ ID NO: 17272 - protein, 421 aa, Butyrivibrio sp.; identical to SEQ ID NO: 3710

SEQ ID NO: 17273 - protein, 431 aa, unidentified
  REGION 1..431: note = Human gut metagenome
MDAWDIIVVLNKRGKPLMPCSPAKARLLLKEKKAIVKRRTPFTIQLTIATGESKQPVSLGVDAGYKHVGLSASTEKAELYASEVELRQDVSDLLSARRALRQSRRNRKTRYRAPRFDNRIRTKRKGWLAPSVENRINAHLSRIEAVLRLLPVTKITVETASFDLQLLKNPDISGKEYQEGEQLGFWNIREYVLCRDGHVCQHCYGRSKDPVLNVHHLESRRTGGDSPGNLITLCETCHKALHRSEITLKTKRGQSFRAEAFMGIMRWEVLNRLKLSHPELEVNNTYGYRTKHARIANGIAKSHCADAFCIAGNLGAERLGEFFFQKQTRRNNRQIHKLSILKGGIRKRNQAPFEVKGFRLFDKVACQGEEGFIFGRRSSGFFDVRKLDGTCISAGISYKKLHLLEKRRTYLTEIRKEEALPPLPEGRGLRA

SEQ ID NO: 17274 - protein, 393 aa, unidentified
  REGION 1..393: note = Human gut metagenome
LQFYRKEHGIMQYVYVLNKHGEPLMPCFPGKARLLLKQQKACVVKRTPFTIKLLYGSAGYKQPITLGVDAGSKHVGLSASTEKRELYREEFTPRSDVAELLSTRKQNRRSRRNRKTRYRAPRFDNRVHSKHKGWLAPSVEVKIQEHITVIKHICRILPISLVRVETAEFDTQRLKAMLAGKPLPVGTDYQLGEMYDEYNVRQYVLKRDHYTCQCCGAHNTAKKVVKLHVHHLESRKTGGNAPGNLITLCATCHENLHKGKVTLDGKERGKPLRDAAFMGIMRKTLTARLKEELPIPVQGTYGYITKMSREQNDIKKSHTNDARCISKHPLAEPCSVCYRTKAIRHHNRQTHKANFSKGGYRKRSQTPYIVEGYRLWDKVLYKGQECFVSGRRS

SEQ ID NO: 17275 - protein, 429 aa, Moorena sp.; identical to SEQ ID NO: 6772

SEQ ID NO: 17276 - protein, 512 aa, unidentified
  REGION 1..512: note = Human gut metagenome
MSTVYVLNKDGKPLMPTTRCGHVRRLLKEQKAQVVTSKPFTIQLLYETDDVVQPLYLGIDPGRTNIGVAVVKTDGTAVFTAHLETRNKEIPKLMQGRKKARHARRTNGRRCHRQRRAKANGTISKKCVKQATAQNGSVSKRANEIGVIKRHLPGCEKEVLCIGIKNKEAKFSNRTRPEGWLTPTANQLLQTHINLVKKIQKFLPISDVVLEINKFAFMRLDNPNVQKWQYQQGPLYQKASLEEAVSEMQEHHCLFCKNTIDHYHHVVPQHKNGSNTIGNIVGLCAQHHDLVHKDTSWQEKLAKKKTGLNKRYGALSVLNQIIPALTKELSSLFPKHFFATNGKSTYDYRAAHGVSKDHWLDAYCIAGSVLPNDACDNNINNHVPYELKQFRRHDRRALHKENMGRVYTLNGKSVATNRHKAIKQTTDSLEEFRQRQPNDVCKLKVKEHHPEYRNPKRNFPGCVFLVGKHTHVMQGTSGSHNGKADGYYDTNGNSYSSGKCKFVAKNKGIVFA

SEQ ID NO: 17277 - protein, 309 aa, unidentified; identical to SEQ ID NO: 11513
  REGION 1..309: note = Clostridiaceae bacterium UBA2240

SEQ ID NO: 17278 - protein, 431 aa, unidentified
  REGION 1..431: note = Human gut metagenome
MPNKVYVINKHGRPLMPCSPAKARHLLDAGKAKVKKRTPFTIQLVYGSSGYTQEVILGVDAGSKTIGMSASTTKEELLSAEVKPRNDVVDLLSTRREFRRVRRNRKTRYRKPRFDNRVRSKHKEWLAPSVEVKIQEHITAIRRVCGILPVSKVVVETAEFDLHLLKAIADGKSVPQGEDYQKGEMYGHYNVRQYVLWRDNYTCQCCGAHATKKKEVRLHVHHLESRKVGGDAPDNQVTLCESCHEKLHKGLIAEKDFKKRKRKSTRDATFMGIMRKTLMQRLCSELPIPVVKTRGYITKATREKLLVLPKSHTNDALAIAQGKRGFNVGYLPEIAQIDKIYTIRPVRHHNRQLHKVTILKGGIRKSNQAEKYVFGYRLFDKVQFNGQDCFIWGRRTTGIFTIKTINGKMIKDGISFKKLKLVEKSTSYLIA

SEQ ID NO: 17279 - protein, 413 aa, unidentified; identical to SEQ ID NO: 11958
  REGION 1..413: note = Human gut metagenome

SEQ ID NO: 17280 - protein, 424 aa, unidentified; identical to SEQ ID NO: 3351
  REGION 1..424: note = Human gut metagenome

SEQ ID NO: 17281 - protein, 419 aa, unidentified; identical to SEQ ID NO: 5271
  REGION 1..419: note = Human gut metagenome

SEQ ID NO: 17282 - protein, 413 aa, Moorena sp.
MMIKVYVINKNGNPLMPCKPAKARKLLRDGKAKPVKRVPFTIQLTWDCEENLQPVIIGIDKGSKITGFSAIANDEILVSGYINHRRDVTQKMEARAANRRQRRNRLWHRPPRFNNRSSSKRSGRLPPSGKANADEVIRVINTLPLPITSVIIEDVLIDIAKLNDPTLAGKDYQKSNRLHENLTKATLLRDDFRCQQCHVKNTRLEVHHIKPSSEGGKNTIKNLITLCSKCHSHIHSGKIRLKTKGVSGFEDKIAQRTMQGKHYLEMNIRKKYDFERVYGYQTAEFRKELGLPKDHDSDALAIATLGTGKRIRFHRDNFYTINFRPVQTRRRYHDLPVNGAGRVKYQLNEDSEGFRKGDIVLVKNRYVKQVNSIYSTGALAFKRVKGEPGSSIPKNCQLLERQSSIVFYSIKCH

SEQ ID NO: 17283 - protein, 413 aa, unidentified; identical to SEQ ID NO: 2636
  REGION 1..413: note = Human gut metagenome

SEQ ID NO: 17284 - protein, 377 aa, unidentified
  REGION 1..377: note = Human gut metagenome
MVYVLDQNGQPLMPTSRHGKVRRMLQSGQAKVVNRCPFTIQLNYEAGHQIQEISLGIDAGSKHIGVSATTKAKVLYEADVELRNDMVELLSSRRELRRGRRNRKTRYRKPRFQNRGRKDGWLAPSIKQKIETHMTVISKVCKILPIRKIIAETASFDIQKIRNSEIQGAEYQQGDQLGFWNVREYVLFRDNHTCQCCHGKSKDKILNVHHIESRKAGGNAPNNLITLCETCHTGYHQETVKLPAEIKRGMSFKDATFMGIMRWTFYEDLKRKYEPFGISVSNTYGYITKHTRIEHDLPKEHYIDARCISGNPDALSNGEVYYQKKIRCHNRQIHKLTILKGGIRKKNQANYLVKGFRLFDVVKARGTHWYIHGRRTN

SEQ ID NO: 17285 - protein, 462 aa, unidentified
  REGION 1..462: note = Human gut metagenome
MSVLVIGRNGRALMPTNPRKARLLLKKKTASVVCRHPFTIQLLYKTGCATQEGCIGIDTGSQHIGVGITCGDKVILKDEHALRSSMEKRSLLATRAVMRRGRRYRKVRYRKPKWRHHTKRMYFEKANRRGQHWRKVKTTTQSPRSKGWLPPSLQSKCDHHFRIIDRYLKYLPDPITRNLVIEAGRFDMARMNDPTIHGEMYQRGPMYDAENLRAYIFARDNYQCACCKAKAGTTRKADGTTVKLVAHHILFRSRGATDNPKYIISVCDHCHTTKAHQPGGILYSWMENNKKVARGLRDATFMNILRKRLFARYPQAAFTYGNITAADRKKLRLPKSHANDAVAISLFGKEASTVKNICQTMHYKQIRKSKRSLHEAIPRKGRKNPNTKAVRNKKNTTQVNGFKLWDSVLADGKKLFICSFTGTSAYLIDKNGCYISQPGKTYKQWPLSKLKRLHPNGNWLMA

SEQ ID NO: 17286 - protein, 424 aa, unidentified
  REGION 1..424: note = Human gut metagenome
MASMQYVYVLNKHGEPLMPCSPGKARLLLKQQKACVVKRTPFTIKLLYGSAGYKQLVALGIDAGSKHVGLSASTEKRELYREEFTPRNDVVELLSTRRQNRRSRRNRKTRYRAPRFDNRVHSKHKGWLAPSVEVKIQEHITVIKRICRILPITLVRVETAEFDTQRLKAMLKGKPLPVGTDYQLGEMYDEYNVRQYVLKRDNYTCQCCGAHPTEKKPIRLHVHHIESRHVGGNAPNNLITLCVACHKALHEGKITLDKGKKRGKPLRDAAFMGIMRNTLLARLKDELNIPVKQTYGYITKLLREKNKIPKSHVNDARCIAKAPNAKPCDTMLYTRALRHHNRQIHKAKILKGGIRKKNQAPYLVKGFRLWDKVRYNGEECFITGRRSSGYFALKKYDGTVISNSASYKKLMLLEAATNYITERS

SEQ ID NO: 17287 - protein, 442 aa, unidentified; identical to SEQ ID NO: 7213
  REGION 1..442: note = Human gut metagenome

SEQ ID NO: 17288 - protein, 415 aa, Bacillus sp.; identical to SEQ ID NO: 2431

SEQ ID NO: 17289 - protein, 432 aa, unidentified
  REGION 1..432: note = Cyanobacteria bacterium UBA8543
MFVFVLDTNKKPLNATHPARARRLLKSGRASVLKRYPFTIILHDRQVETSTINEHRLKIDPGAKTTGLAIVQNSTVMWAAQLTHRGLAIRDAITARRMVRRSRRNRKTRYRVARFNNRRRASGWLPPSLDSRIANILTWVRRLSKLCPITAISQELVRFDLQKIQNPEITGLQYQQGELAGYEIREYLLEKFNRRCVYCSATDTQLEIEHVNPKSKGGSNRVSNLTIACVPCNQAKGNQDIRDFLAGKPDILARVLAQIKKPLADAAVVNTTRWALHEQLKAIDLPVETGTGGQTKYNRCRQNLPKTHWLDAACVGDSTPARLKILVTNPVLIKAEGWGSRQMVNTDFIGFPLINKEGKQATKSRSPIQFGYRTGDIVKAIVPTGKHKGVHIGKVTIRKSGAFDLVSKGIKRQSIRWKHCTPLHRKDGYSYA

SEQ ID NO: 17290 - protein, 411 aa, unidentified; identical to SEQ ID NO: 6901
  REGION 1..411: note = Human gut metagenome

SEQ ID NO: 17291 - protein, 485 aa, unidentified; identical to SEQ ID NO: 6696
  REGION 1..485: note = IscB polypeptide

SEQ ID NO: 17292 - protein, 420 aa, unidentified; identical to SEQ ID NO: 3546
  REGION 1..420: note = Human gut metagenome

SEQ ID NO: 17293 - protein, 448 aa, unidentified; identical to SEQ ID NO: 5196
  REGION 1..448: note = Fermentation metagenome

SEQ ID NO: 17294 - protein, 442 aa, unidentified; identical to SEQ ID NO: 2903
  REGION 1..442: note = Human gut metagenome

SEQ ID NO: 17295 - protein, 405 aa, Desulfotomaculum sp.; identical to SEQ ID NO: 4568

SEQ ID NO: 17296 - protein, 424 aa, Moorena sp.
MSNFVFLLDANKRPLDPIHPGAARHLLNQGKAAVFRRYPFTIILKECCQDVPVCGLELKLDPGSKVTGIAIKQGNKIIFGAELQHRGHQIKDALLSRRQLRRVRRNRLTRYRKARFLNRTRPKGRLAPSLSHRVLTIITWVRKFQRLAPITSIVQELVRFDLQLMQNPEISGVEYQQGELQGYEVRQYLLEKWGRKCAYCGVENVPFEVEHIQPRSKGGSDRISNLALACHPCNEAKGNQDIRDFLASKSDVLSRILKQAKSPLKDAAVVNSTRWALFNALKTTGLPVTTGTGGQTKFNRTRFNLPKAHWLDAACVGNIKILKLLTKKPLLIAAKGHGTRQMCGTDKYGFPTRHKSRVQIHKGFQTGDIVRARVTAGKKIGSYVGRVLCRASGSFDITTTTGRVAGISHKYCKAIHRKDGYSYA

SEQ ID NO: 17297 - protein, 424 aa, unidentified; identical to SEQ ID NO: 10419
  REGION 1..424: note = Human gut metagenome

SEQ ID NO: 17298 - protein, 456 aa, unidentified; identical to SEQ ID NO: 6454
  REGION 1..456: note = Human gut metagenome

SEQ ID NO: 17299 - protein, 431 aa, unidentified
  REGION 1..431: note = Human gut metagenome
MPNKVYVINKHGRPLMPCSPAKARHLLDEGKAKVKKRTPFTIQLVYGSSGYIQEVILGVDAGSKTIGISASTKKEEVFAADVTPRNDVVDLLSTRREFRRARRNRKTRYRKPRFNNRVRSKHKGWLAPSVEVKIQEHITSIKMVCRILPVSKVVVETAEFDLQLLKAIEEGKPVPQGEDYQQGEMYGHYNVRQYVLWRDNYPCQCCGAHLTKKKEVRLHVHHLESRKVGGNAPGNLVTLCDRCHEKLHKGLITEKDLKKRKHRSTRDATFMGIMRKTLMQRLCSELPIPVAETRGYITKATREKLLVLPKSHTNDALAIAQGKQGFNVGYLPGIVQIDKICTIRPVRHHNRQLHKATILKGGIRKSNQAEKYVFGYRLFDKVQFNGQDCFIWGRRTSGYFVVKTIDGKVIHNSASFKKLRLVERASNYLIA

SEQ ID NO: 17300 - protein, 415 aa, Bacillus sp.; identical to SEQ ID NO: 5390

SEQ ID NO: 17301 - protein, 442 aa, unidentified; identical to SEQ ID NO: 2807
  REGION 1..442: note = Human gut metagenome

SEQ ID NO: 17302 - protein, 418 aa, unidentified; identical to SEQ ID NO: 10916
  REGION 1..418: note = Human gut metagenome

SEQ ID NO: 17303 - protein, 529 aa, unidentified; identical to SEQ ID NO: 6786
  REGION 1..529: note = Human gut metagenome

SEQ ID NO: 17304 - protein, 473 aa, unidentified; identical to SEQ ID NO: 3562
  REGION 1..473: note = uncultured beta proteobacterium

SEQ ID NO: 17305 - protein, 430 aa, Oribacterium sp.; identical to SEQ ID NO: 14849

SEQ ID NO: 17306 - protein, 453 aa, Moorena sp.; identical to SEQ ID NO: 4050

SEQ ID NO: 17307 - protein, 451 aa, unidentified; identical to SEQ ID NO: 3061
  REGION 1..451: note = Human gut metagenome

SEQ ID NO: 17308 - protein, 333 aa, unidentified
  REGION 1..333: note = Human gut metagenome
MSTSVFVLDKKHRPLMPCRPARARRLLRAGRARVVKRFPFVIRLVDRTVEQSEVQPVLIKLDPGSRETGAAVVRDDEKKRHHALAFFVIKHRGGAIRDALKARSAFRRRRRSQNFRCRSPRFLNRVKPKGWLPPSLRHRVETTLSFVRRMCRYLPVSGIATELVKFDSQKLQNPEVSGVKYQQGTLFEYEVREYLLEKFGRKCVYCGAEGVPLNIDHVVPRAKGGSNRVSNLVLACVSCNQKKGARSLEDFLKGKPEVLARVRRELKTPLRDAAAVNATRWVLFNELKATGLPVETGSGALTKLNRHAFGVEKEHWLDAPGGVLRRPEDLPYL

SEQ ID NO: 17309 - protein, 512 aa, unidentified
  REGION 1..512: note = Human gut metagenome
MSTVYVLNKNGKPLMPTTRCGHVRRLLKEQKARAVASKPFTIQLLYETDDVVQPLYLGIDPGRTNIGVAVVKADGTAVFTAHLETRNKEIPKLMKKRKDSRRARRTNGRRCRRQRRAKANGTLSKKCVKQTTAQNGSVSKRAKKIGVIKRHLPGCEKEALCIGIKNKEAKFNNRTRPEGWLTPTANQLLQTHINLVKKIQKFLPISDVVLEVNKFAFMRLDNPNIQKWQYQQGPLYQKASLEEAVSEMQEHHCLFCKNTIDHYHHVVPQHKNGRNTIDNIVGLCTKHHDLVHKETAWQEKLAKKKTGLNKKYGALSVLNQIIPALTKELSSIFPKHFFVTTGKSTYDYRAAHGVSKDNWLDAYCIACSVLPNDVCNSSINNRVPYELKQFRRHDRRALHKENMSRVYTLNGKKVATNRHKATEQTADSLEEFRQNHPDDVCKLKVKENHSEYRNPKRNFPGCVFLVGKRTHVMQGTSGSHNGKADGYYDTNGNSYSSGKCKFVAKNEGIVFA

SEQ ID NO: 17310 - protein, 413 aa, unidentified
  REGION 1..413: note = Prevotellaceae bacterium UBA1710
MVYILDINNKPLMPSERHGHVRKLLREGRACVVCRTPFTIRLNYVTTSYVQEVSLGINAGTKHIGVSATTSQKELFASEVVLRSDITDLLSTRREQRRTRRNRLRYRKPRFNNRKRPEDWHAPSVQNRVDAHLKVISKVHKLLPVSKTTIEVAQFDTQKIKDPSVSGEEYQQGEQMGFWNVREYILARDGHKCQHCHGKSKDPILNVHHLESRKTGGNAPNNLITLCETCHKDYHKGKFELKIKRGTSLRDAAVMNIMRWAVYNQAREEFPDVHFTYGYITKNTRIRKGLEKSHAVDARCISGNPMSEPLGNYFLQKQIRRHNRQIHKANLLKGGRKKLNQAPYLVKGFRLFDKVLYNGIECFVFGRRASGSFDIRKLDGTKIHPGINYKKLKLLETRKTILTSKESRISSHA

SEQ ID NO: 17311 - protein, 432 aa, unidentified
  REGION 1..432: note = Human oral metagenome
MVFVLNRSKKPLDMISNAEARILLRKKLAVIHKMYPFTIRLRNNSCGSKDRAYTVKLDPGSKHTGVAIVDNKDSVVMLAELEHRGSVVKKKLDSRRVVRHHRRQRKTRYREARFDNRVKPKGWLAPSVKSRADNVINFIKKCKKFLNITKVEIERVSFNVSQMSSETKLYGVDYQQGPLYQKKLRDFIFSRSNGKCSYCGAKAEEIDHIIPRSNGGTNSTYNLVAACKSCNQMKSNLSLKEFGKLVGKDFSKIKPKALPKDAAIVQSARNYMVKEISKFVADTTTHDAWLTKYNRNELGLSKEHYYDALSVGNLQDYKFLTDKVLQISAKGRGSRQMCRVDKFGFPRTSAKASKSVKGFQTGDIVKAIVPKGLKREGEYLGRVIVRSNGGFNIETNKETIQGIGYKYCSIVQRGDGYSYNHKERNRVSVAKI

SEQ ID NO: 17312 - protein, 415 aa, unidentified; identical to SEQ ID NO: 3582
  REGION 1..415: note = Human gut metagenome

SEQ ID NO: 17313 - protein, 404 aa, unidentified
  REGION 1..404: note = Archaeon SCG-AAA382B04
MSNQKVFVQDRSGEPLMPTKPAKARHLLEKGKAEVVERMPFTIQLNYKIKGKKNREKTTLGIDAGYSKVGFSVVTENKELIAGEMELRDDISRKLEQRMKYRKNRRSRNTRYRKPRFDNRSEEDWLAPSIKHKKNTHIKLVEKLKEILPIDEVVMEVAKFDQQKMQNPEICGKEYQQGTLKEYNIKNYLLEKFDYECAYCGKGGVPLEVEHIVPKSRGGTDRVSNLAISCHKCNQEKSDQTAEEFGHPKVQEKAENTLKETAFMNQVRWKIVNELGCNHTFGHITKKKRIELGLEKSHINDAFIIAGGKNQERAEPYIVEQNRRNNRLIQTNRKGYGRSIRRERYDLQPGDLVEVEKKGLVHSVKGVFNYGKWVRLVNRWGEKVNSSIKEVSLLKYGAGLQFSL

SEQ ID NO: 17314 - protein, 442 aa, unidentified; identical to SEQ ID NO: 15850
  REGION 1..442: note = Human gut metagenome

SEQ ID NO: 17315 - protein, 442 aa, unidentified
  REGION 1..442: note = Human gut metagenome
MATVKQSTHHLPFGRVFIRRNLFMVYVISQDSKPLMPCSNPIARLLLKQGKAKVKKCEPFTIKLTYETTDYTQDLILGVDTGSGTIGTAVSKDNGDIVYMSEVVVRNDITDKMTQRTKYRRNRRNRKTRYRKARWLNRSNSIKKDRFSPTMQSKLHSHVREIEYIQSILPITEMVFETGQFDMHLMKNPSLANLKVRPWGYQKGANYGFENTKAMVLNRDNYTCQCCKGKHKDSKLEVHHIVFRSQGGSDEESNLITLCHTCHKDLHSEKINPELSGKVKGNLKYATQMNSIRKQLFRLYPNAIETFGYVTKANRLHLGVDKEHYYDACTIATQGNAFNVKSNLYKKKCVSDGDFQKTKGIRSEQPIVTDKICGFRKFDKVRYFGNDYFIKGRMSTGYAILMDIDGNKIDFSTMPRGYKTPKLSNCKRITARSTVMTQVKVV

SEQ ID NO: 17316 - protein, 428 aa, unidentified; identical to SEQ ID NO: 4606
  REGION 1..428: note = Human gut metagenome

SEQ ID NO: 17317 - protein, 406 aa, unidentified; identical to SEQ ID NO: 7798
  REGION 1..406: note = Human gut metagenome

SEQ ID NO: 17318 - protein, 431 aa, unidentified
  REGION 1..431: note = Human gut metagenome
MPDKVYVISRLVHPLMPCSPAKARHLLDDKKAKVVKRMPFTIRLLYGSTKYIQPIILGVDAGSKTIGLSASTAKGEVFAAEVMPRNDVVENLSTRREFRRARRNRTTRYRKPRSDNRVRSNHERWLAPSVKVKIQEHITSIKRVCTILPISKVVIETAEFDLQLLKAIQEGKPIPEGEDYQKGEMYGSYNVCQYVLWRDNYTCICCGVRGTPKNPVRLHVHHFESRKYGGNAPDNHGTLCDDCHKKFHLGIIADVKLKTRRRQSTRDAAFMGIMRKTLMWRLRTELFIPVAETKGYITKATREKLLVLPKSHTRDALAIAQGRHGFSIKEYAYVEPANHIYTVRPVRHHNRQLHKASILKGGIRKRNQASKYVFGFRLYDKVLYQGKACFVWGRRTSGTFLLRTIDGIKVKDGVSYRNLTLLERSSNYLIA

SEQ ID NO: 17319 - protein, 415 aa, unidentified; identical to SEQ ID NO: 3582
  REGION 1..415: note = Human gut metagenome

SEQ ID NO: 17320 - protein, 512 aa, unidentified; identical to SEQ ID NO: 9909
  REGION 1..512: note = Human gut metagenome

SEQ ID NO: 17321 - protein, 431 aa, unidentified
  REGION 1..431: note = Human gut metagenome
MPNKVYVINKHGRPLMPCSPAKARHLLDAGKAKVKKRTPFTIQLVYGSSGYTQEVILGVDAGSKTIGVFASTKKEELFAANVIPRNDVVDLLSTRREFRRARRNRKTRYRKPRIDNRVRSEHKGWLAPSVEVKIQEHITSIKRACRILPVSKVVVETAEFDLQMLKAIADGKPVPQGEDYQKGEMYGHYNVRQYVLWRDNYTCQCCGAHATKKKEVRLHVHHLESRKVGGDAPDNQVTLCESCHEKLHKGLIAEKDFKKRKRRSTRDATFMGIMRKTLMQRLCSELPIPVIETRGYITKATREKLLVLPKSHTNDALAIAQGKRGFNVGYLPEIAQIDKIYTIRPVRHHNRQLHKAAILKGGIRKSNQAGKYVFGYRLFDKVQFNEQDCFIWGRRTTGIFTIKTINGKMIKDGISFKKLKPVEKSTGYLIA

SEQ ID NO: 17322 - protein, 515 aa, unidentified; identical to SEQ ID NO: 3339
  REGION 1..515: note = Human gut metagenome

SEQ ID NO: 17323 - protein, 419 aa, Moorena sp.
MPNYVFVIDTNKQPLNPIPPKKARRLLDKGKAAVFRMYPFTIILKTAIDNPIVSPCQIKIDPGSKTTGFALVQNNQIIWGMELEHRGGLIKKKLESRKAVRHRRRNRHTRYRKPRFFNRKRSEGWLPPSLEHRVSTIETWVKRLTKFCPVNEIWVERVKFDTQKMQNPEINGIQYQQGELAGYEVREYLLEKWGRECTYCGKQSVPLQIEHIHPKSFGGSNRVSNLCLACEKCNQRKGNKPIEEFLKKKPSLLQKIKTKAKQPLKDAAAVNATRNKLVKVLQNIKFVVTGTGAQTKYNRTRLGLPKEHWIDAACVGDIGTLVLKTSQPLLVTCKGQGGRQKAALNKYGYPVRHNPLKPIKGWVTGDIAKHQRLGIGKVTPRSKGSFGFTPLGMKGYKSCNPQDISAIHRKDGYTYSFCK

SEQ ID NO: 17324 - protein, 414 aa, unidentified
  REGION 1..414: note = Human metagenome
MPCSPAKARLLLKEKKAIVKRRTPFTIQLTIATGETKQPVGLGVDAGYKHVGLSASTDKAELYASQVELRQDITDLLSARRALRRARRNRKTRYRAPRFNNRIRTKRKGWLAPSVENRINAHLSRIEAVLRLLPVTKITVETASFDMLLLKNPDIAGKEYQEGEQLGFWKVREYVLFRDGHVCQHCYGRSKDPVLNVHHLESRRTGGDSPGNLITLCETCHEALHRGEIALKTKRGHSFRAEAFMGMMRWEVLNRLKASHSELEVNNTYGYRTKHARIVNGIDKSHCADAFCIAGNLGAERLCEFFFQKQTRRNNRQIHKLSILKGGIRKRNQAPFEIKGFRLFDKVACKGEESFIFGRRSSGYFDVRKLDGTRISAGISYKKLRLLEKRRTYLTEIRKEEALPPLPEGRGLRA

SEQ ID NO: 17325 - protein, 442 aa, unidentified; identical to SEQ ID NO: 2903
  REGION 1..442: note = Human gut metagenome

SEQ ID NO: 17326 - protein, 442 aa, Sutterella sp.
MSTTVFVLDKKHRPLMPCRPARARRLLRAGRARVVKRFPFVIRLVDRTVEQSEVQPVLIKLDPGSRETGAAVVRDDGKKRHHALAFFVIEHRGGAIRDALKARSAFRRRRRSQNLRCRSPRFLNRVKPKGWLPPSLRHRVETTLSFVRRMCRYLPVSGIATELVKFDSQKLQNPEVSGVEYQQGTLFEYEVREYLLEKFGRKCVYCGAEGVPLNIDHVVPRAKGGSNRVSNLVLACMSCNQKKGARSLEDFLKGKPKVLARVRRELKTPLRDAAAVNATRWVLFNELKATGLPVETGSGALTKLNRHAFGVEKEHWLDALCVGRLNGVVTRKGLNVLEIRCMGRGSRQRTRLTKYGFPRGYLMRQKCVHGFATGDMVETNVPKGKKAGLWRGRVAVRVSGSFNIQTPKGVIQGVGWKHCRLISHNDGYGYAWLGHAPHSSPA

SEQ ID NO: 17327 - protein, 433 aa, unidentified
  REGION 1..433: note = Human oral metagenome
MFVYVLDRNGQPLMPTKRFGKVRRMLRDKKAKVVKSCPFTIRLLYEPETKIVQEVVLGVDTGSKHVGVACVGNNKVLYQSQVELRDDIKKKMDSRRMYRRSRRNRKTRYRKPRFLNRGNSTKKNRYCPTIVSKCYGHEREIEFCKKILPIKNTILETAKFDTQLMEKPWLQEYKWAYQRGVNYGYANAREHALVRDKYTCQCCGKKNCRVEAHHIVFRSKNGSNDLENYITLCEDCHKAVHLGEVDLKLKGKRKSTLRYATQMSVIRSMLLKKYPNAIETSGFVTKANRENLGIGKEHYLDACVIASGGLGFKPLDVLYQKKCVPSQSRILTKGIRGVQKIPTGKVHGFKRYDKVKYRGAICFIKARRIRGDFVLMDICNNTLDFRSVGGVKNPSHKSLRRIHARSGTICDMKYLRERMCNCGFKKTRITEVN

SEQ ID NO: 17328 - protein, 406 aa, unidentified
  REGION 1..406: note = Human oral metagenome
MPTERFGKVRRLLKEKRAKVIRSCPFTIKLLYEPETNAVQEVTLGQDTGSKYVGTACIANDKVLYQSEVILRDDIKKKMDSRRIFRRNRRRRKTRYRKVRFLNRANSTKKERLPPSVKSKVQSHIDEIEFCKKILPISKIVLEVSQFDTALMKNPSLINDKVKRWGYQKGFNYRYSSRREAVIHRDNYTCQCCSKKHVRFEVHHIIFRSQGGSDDESNLITLCKECHDAIHSGILVLTKKPKKLNLKYATLMSIIRSQLLKIYPDAIETIGFVTKTNRENLNLSKEHYIDACVIAGGGKKFKLNDIIYQKRRVAKGDYKLTRGSRSQQKLPVGKIQGFRKFDKVKYLKQEYFIKSRMSTGYAKLMDIFSITIDFSYMPKGKKTPKLLNLERISARSTCLCASQRII

SEQ ID NO: 17329 - protein, 444 aa, unidentified; identical to SEQ ID NO: 9029
  REGION 1..444: note = Human metagenome

SEQ ID NO: 17330 - protein, 442 aa, unidentified; identical to SEQ ID NO: 4522
  REGION 1..442: note = Human gut metagenome

SEQ ID NO: 17331 - protein, 470 aa, unidentified; identical to SEQ ID NO: 2825
  REGION 1..470: note = Human gut metagenome

SEQ ID NO: 17332 - protein, 436 aa, Acrocarpospora sp.; identical to SEQ ID NO: 15397

SEQ ID NO: 17333 - protein, 481 aa, unidentified
  REGION 1..481: note = Human gut metagenome
MWTTVLRGEKPYGRSSALPVRECVSIAKKRRHHMVAVLSKTGIRLMPTSSYRARKLLAKKKAVICMYRPFTIRLTERETGDVQPVELAVDTGYFHVGNSLKTAKHELAAVEIRTLMDEKQRYDDRRRYRRMRRSRLRYRAMRFDNRRRPEGWLALSIQGRMEQNLAFLRRVLSVVPVTRIVMEMGQFDTQVLKAVEEGRPLPEGTDYQQGERYGIATLREAVFTRDNYTCQCCKKTIHDGVILHVHHIVYRSQGGTNRMGNLITVCEKCHTPKNHKPGGKLYKWKPTVKSFKGATFMTAVRWIMYRFVKECFPDVDVRITYGAKTKLQRRALDITKSHVNDAYAMGDFHPKHRARPVILQKKRRNNWILEKFYDAKYIDTRDGSQKTGQQLFNGRTNRNHNTDTENLRLYRGMKLSKGKRAIRTTRYKIQPHDILVYQGQEMEASGCHNKGTRVMTIAKKSLPIGKVRVRRYSGGYYAVAE

SEQ ID NO: 17334 - protein, 413 aa, unidentified
  REGION 1..413: note = hypersaline lake metagenome
MDYVISKDGKPLMPTKRYGKVRRLLKQKLAKVVKREPFTIQLLYDTTDYTQDVVVGIDIGSKTVGVSAVSEKEELFSAEVILRTNIKDLLLERKGYRHHRRYRKRRYRKARFLNRRRPEGWLPPSINWKANAHVRIVKFLSKILPISKVAVEIAPFDTQKIVNPDIKGKEYQEGPQKGFWDVREYCLWRAGYKSEISGKKGVLEVHHIIPRSKGGTDNPSNLIVLTAEEHEAIHEGKLKIPKSKLEKIKILKDASHVSTIGWFIVNRLKENQYNVNVTYGSITKAKRVEIGLEKTHRNDAFVIAGGNRSIKRVNRWYIGKFFRRQNRSLHKANPIKGGKRPNKSIGRAYGFKTYDKVEYQGKAYLITALRNRGDFSLGSLTVGRILDHVRHKKLRLLEHAKTLIFMEHKETTI

SEQ ID NO: 17335 - protein, 416 aa, unidentified; identical to SEQ ID NO: 6623
  REGION 1..416: note = Human gut metagenome

SEQ ID NO: 17336 - protein, 406 aa, unidentified; identical to SEQ ID NO: 6079
  REGION 1..406: note = Human gut metagenome

SEQ ID NO: 17337 - protein, 427 aa, unidentified; identical to SEQ ID NO: 11922
  REGION 1..427: note = Human gut metagenome

SEQ ID NO: 17338 - protein, 415 aa, unidentified
  REGION 1..415: note = Human gut metagenome
MVYVLANDGQPLMPTERHGKVCRMLKSGMAKVVKKCPFTIQLQYESERNVQPVSLGVDAGSKHIGISATTKTKVLYESDVELRDDIVKLLATRRQLRRSRRSRKTRYRPVRFDNRKRKEGWLAPSIRQKIGSHLTVVANACKILPINQIIVETASFDIQKIKDPEIQGIEYQQGEQMDFWNIREYVLFRDGHTCQCCKGKSKDKVLNVHHIESRKTGGNAPNNLITLCETCHKGYHNGTVTLPKNIKRGMKFKDAAFMGIMRWTFYNTLKEQYEPDIPVSMTYGYLTKNTRIEHGLPKEHYIDARCISGNPDAVSDGTYYYQKKVRCHNRQIHKQTILKGGIRKSNQAEYLVKGYRLFDKVRYQGREYFIFGRRKSGFFDIRTLSGEKVNKGSISVKKLTFADTRKNYLIERRTV

SEQ ID NO: 17339 - protein, 456 aa, Halomonas sp.; identical to SEQ ID NO: 6315

SEQ ID NO: 17340 - protein, 544 aa, unidentified
  REGION 1..544: note = Human gut metagenome
MKQKKQKVMVYILNKKGKPLMPTTRCGHVRKLLDSKKAVVVNSNPFTIRLKYDTPNGVQDVFAGIDSGRENIGSGVSNEDGDCLYLGELRTSNKSIKMKMTERVGFRRERRKHDRQNKQRKARKDHTEIQNGKDDICRATISCKSVQISYPTAEESVTHKIIRGKEGKFANRHRDGDWITPSARQLVQMHMNDLKSICKILPISHVTLERVAFDFQKLENENIKAWEYGKGKLYGYDSPEEYIHDVQDGKCLVCGKPHIDYLHHIIPRSKGGSDKVSNIAGLCYDCHYGPIGVHNCQDTQDRLPELKNEVNKQYKVSLLNSVMPVLIEEIDKFCKANSIMFSICEGHDTAKVRDMYDLQKDHCLDGFAISLVGRNVKSVDVMPDRIHQKQRYKKKSKNIIQKRNYREYYDDKKLVAINRHKGTDQKADSLEEYMNTYAETHTADECKNQFESLTVKPARRTYTFHKEGRICPFHIGDKVRYEKKNKIKGNTKVDTFICECIYFSKDENKAKVEHNKTKSKKMKFCRAIESGCIPYIDYIKLALI

SEQ ID NO: 17341 - protein, 408 aa, unidentified; identical to SEQ ID NO: 5302
  REGION 1..408: note = Human gut metagenome

SEQ ID NO: 17342 - protein, 421 aa, unidentified; identical to SEQ ID NO: 4801
  REGION 1..421: note = Human gut metagenome

SEQ ID NO: 17343 - protein, 465 aa, unidentified; identical to SEQ ID NO: 8665
  REGION 1..465: note = Human gut metagenome

SEQ ID NO: 17344 - protein, 413 aa, unidentified; identical to SEQ ID NO: 3220
  REGION 1..413: note = Human gut metagenome

SEQ ID NO: 17345 - protein, 450 aa, unidentified
  REGION 1..450: note = Human gut metagenome
MCWLTALKHIHLILNFNKEVPCMVYVLDIDGQPLMPTARHGKVRRLLNSHLAKVVKRCPFTIQLLYQSTKETQPISLGVDAGSRHIGLVATTEQKVVYQEELIPRNDVVKLLSAKRALRRSRRNRKTRYRKPRFNNRVHSKHKGWLAPSVEVKIQEHITAIKRICQILPISEIHVETAEFDLQRLKAAAAGNPLPVGTDYQLGEQYDFYNTRQYVLHRDRYTCQCCGTHDKDIKLHVHHIESRQIGGNAPNNLITLCEHCHKSLHAGKIILPKGKKRGKSYRDAAFMGIMRKTLLERLKKEVNVPVTETCGYITKYWREKVGLEKSHINDAICISKHPYAKPLDTYYLTKAVRHHNRQIHKVKFIKGGIRKRNQAPYLVKGFRLFDKVLYRSKEYFIFARRATGFFNIRTLGGTSVNNGSISYKKLRIQDTANAYLTEMKKEIKVIPYMN

SEQ ID NO: 17346 - protein, 487 aa, unidentified
  REGION 1..487: note = Human gut metagenome
MYRHRSDVHPNPPLCDNASLEAEVKPKDAADSNRQRPWGRMHYSPSGERTACFGIAVIPKKGETAMQYVYVVGSNGKPLMPCSPAKARKLLKTKSAAVLQRTPFTIKLLHHAGGYKQPITLGVDAGSKHIGLSACTETKELYKEELTPRNDVVKLLSKRRECRRGRRHRKTRYRTPRFNNRVRSKHKGWLAPSVEVKIQEHITAIHHICRRLPVTKIVVETAEFDTQRLKAMLEGKPLPVGTDYQRGEMYDEYNVRQYILKRDNYTCQHCGKRGSAEKGVKLHVHHLETRQTGGNAPNNLITLCKDCHTALHDGEITLKQGKKKRGKPLRDTAFMGIMRKTLLSSLRKEVDIPVVETQGYITKLLREENHIPKSHTNDARCIAGYPNAQPCDTTYHTKAIRHHNRKIHKTNILKGGVRKLNQAPYKVFGFRIWDKVKYKGQECFITGRRSSGYFALKKLDGTTISNSAKYKEIQFLEPANHYIIERS

SEQ ID NO: 17347 - protein, 439 aa, Lactobacillus sp.
MITTKEESCSKCAHIYKSFEFFKLNRNSSQKCRKLLQAGRAKVIKKEPFTIQLLFSSTGYKQHVSIGVDSGQHHIGLAVTSQDKVLFSLRQDVKKLLDTRRSYRRGRRNRNTRYRSPCFLNRTKPSGWLPPSIASKIHHNINWIQRIQAVMPKAELHIEVGKFDMAKMKQPDITGLGYQQGDKYGYETTKQYVLDRDNYTCQICHGKTKDPELKIHHIIYRSNGGTNQVSNLLTVCATCHTQANHQPGGKLYALLAKKFQSYRSLKGATFMNILRRRLFKAFPEAKFQYGAQTTLDRAKLDLPKAHYNDAVTISGIQKIAQRPTAVVMFHQFRKKKCSLHEATARKGRKIPNIMSKRNAKNKKFSKGFYLNDYVQLPDGQKGNVSGFSGKIKCFVKAGDGYYLAISSKYKHINLSILKVIRHQNNWNVTEIEVKTHQMA

SEQ ID NO: 17348 - protein, 420 aa, Methanobrevibacter sp.; identical to SEQ ID NO: 2392

SEQ ID NO: 17349 - protein, 420 aa, unidentified
  REGION 1..420: note = Human gut metagenome
MQYVYVLNKHGEPLMPCSPGKARLLLKQQKACVVKRTPFTIKLLYGSTGYKQPITLGVDAGNKHVDLSASTEKREFYCEEFTPRNDVVDLLSTRKQSRRSRRNRKTRYRAPRFDNRVHSKHKGWLAPSVEVKIQEHITIIKRICRILPITLVRVETAEFDTQRLKAMLEGKPLPVGTDYQLGEMYDEYNVRQYVLKRDHYTCQCCGAHTTTKKTVKLHVHHLESRKVGGNAPSNLITLCTTCHDALHKGKVSLDGKERGKPLRDAAFMGIMRKALMARLREELPIPVQGTYGYITKMRREQNDIKKSHVNDARCISKHPLAEPCSVCYRTKAIRHHNRQTHKANFSKGGIRKRSQMPYVVEGYRLWDKVLYKEQECFVSGRRASGSFTLKKLDGTRISKGVTFKKLRLLEPATNYLIERM

SEQ ID NO: 17350 - protein, 352 aa, unidentified; identical to SEQ ID NO: 16775
  REGION 1..352: note = Human gut metagenome

SEQ ID NO: 17351 - protein, 279 aa, unidentified
  REGION 1..279: note = Human gut metagenome
VVVETAEFDLHLLKAIADGKPVPQGEDYQKGEMYGHYNVRQYVLWRDNYTCQCCGTHPSKKKEVRLHVHHLESRKVGGDAPDNQVTLCESCHEKLHKGLIAEKDFKKRKRKSTRDATFMGIMRKTLMQRLCSELPIHVVETRGYITKATREKLLVLPKSHINDALAIAQGKHGFNVGYLPGILQIDMIYTIRPVRHHNRQLHKATILKGGIRKSNQTEKYVFGYRLFDKVQFNGQDCFIWGRRTTGIFTIKTINGKMIKDGISFKKLKPVEKSTGYLIA

SEQ ID NO: 17352 - protein, 414 aa, unidentified; identical to SEQ ID NO: 2588
  REGION 1..414: note = Human gut metagenome

SEQ ID NO: 17353 - protein, 424 aa, Moorena sp.
MFVFVLNSSRKPLNPTHPARARKLLKTGKAAVFKRYPFTIILKEEVPEPNNQQLRIKIDPGAKTTGIAILRNESVLWGAELTHRGGQIRSALTCRRQLRRSRRNRKTRYRQPRFNNRCRQEGWLPPSLISRVENILTWVKRLCRLSPIAHISTELVRFDPQIIQNPEISGIEYQQGTLAGYELREYMLEKWHRRCVYCGATDTKLEIEHIVAKSKGGSNRVSNLTLSCRKCNQKKGNKPIEQFLENNPLLLKSILSQAKRSLADTAAVNATRWKLFNGLKELGIPVETGTGGRTKYNRCRQNLPKTHWLDAANVGHSTPDTLKILVSRPMRIKATGHGNRQMCGTNAFGFPIRHRSNTKKHFGFQTGDIVKAVVTKGKKVGSYIGRVLCRATGSFDITTATGRVAGISHKYCSFVHRSDGYSYQ

SEQ ID NO: 17354 - protein, 493 aa, unidentified; identical to SEQ ID NO: 3154
  REGION 1..493: note = Human gut metagenome

SEQ ID NO: 17355 - protein, 400 aa, unidentified
  REGION 1..400: note = Human gut metagenome
MIPMKRSLTAKETVTITSMLFGMFFGAGNLIFPAKMGVDAGSKHIGISATTEKHELYREEATPRNDVVDLLSARRAFRRSRRNRKTRYRAPRFDNRVHSKHKGWFAPSVEVKIQEHITLIEHVCRILPVTLVRVETAEFDTQRLKAMLEGKPLPVGTDYQLGEMYDEYNVRQYVLKRDNYTCQCCGAHSTKTKGVKLHVHHIETRRTGGNAPNNLITLCTACHKALHAGKVTLDGKKRGKPLKDAAFMGIMRKTLMERLRKELKIPVQGTYGYITKCLREKNGIPKSHTNDARCISKNPLAIPCDTCYYTKAVRHHNRQLHKATILKGGIRKANQAPYIVKGYRLWDKVSCNGTECFITGRRTSGYFALKKLDGTVVSNSISYKKLRLLEAATNYITERK

SEQ ID NO: 17356 - protein, 431 aa, unidentified
  REGION 1..431: note = Human gut metagenome
MPNKVYVINKHGRPLMPCSPAKARHLLDEGKAKVKKRTPFTIQLVYGSSGYTQEVILGVDAGSKTIGMSASTTKEELLSAEVKPRNDVVDLLSTRREFRRARRNRKTRYRKPRFDNRVRSKHKGWLAPSVEVKIQEHITAIRRVCGILPVSKVVVETAEFDLQLLKAIADGKPVPQGEDYQQGEMYGHYNVRQYVLWRDGYTCQCCGAHATKKKEVRLHVHHLESRKVGGDAPDNQVTLCESCHEKLHKGLIAEKDFKKRKRKSTRDATFMGIMRKTLMQRLCSELPIPVIETRGYITKATREKLLVLPKSHTNDALAIAQGKQGFNVGYLPGIVQINKIYTIRPVRHHNRQLHKATILKGGIRKSNQTEKYVFGYRLFDKVQFNGQDCFIWGRRTTGIFTIKTINGKMIKDGISFKKLKLVEKSTSYLIA

SEQ ID NO: 17357 - protein, 430 aa, unidentified
  REGION 1..430: note = Human gut metagenome
MPKVYVLNRHGRPLMPCTPAKARHLLDAGKAKVRHRTPFTIQLLYGSTGYTQEVILGVDAGSKTIGLSAATETEELFSAEVKPRNDVVELMSARRQFRRARRNRTTRYRKPRFDNRVRSKHKGWLAPSVEVKIQEHMTAIRRACAILPVSKVVVETAEFDLQLLKAVAEGKPVPQGEDYQKGEMYGHYNVRQYVLWRDSYTCCICGVHGSVRKGVPLHVHHLESRRVGGDAPDNLVTLCTACHDKLHKGIIMVADIKKSKRRSTRDATFMGIMRMTLLRRLREQLPVPVVETRGYITKATREKLLVLPKSHTNDALAIAHGPQGFRAEYLPNIRQADRLYTIRPVRHHNRQLHKATILKGGVRKANQAEKYICGFRLYDKVLYNGIECFVWGRRTSGSFLLRQLNGEKVKDGVSYKHLKLLERSQSYLVA

SEQ ID NO: 17358 - protein, 477 aa, unidentified
  REGION 1..477: note = Human gut metagenome
MWLNSSEGKEQCCIHGNLGITLGKDSHSLRRGQFCQSLTVTTTRKETTSMYVYVLNQHGEPLMPCSPRKARTMLRDHKATVVRRTPFTIRLLHRSSEYRQDITLGVDAGSKFIGLSACTENKELFAAEVKPRNDVVDLLSTRRELRRSRRNRKTRYRAARFNNRVHSKHKGWLAPSVEVKIQEHITAIKRTCAILPISMVIVETAEFDTQRLKAMLEGKPLPVGTDYQLGEMYDEYNVRQYALKRDNYTCQCCGIQSTDKAPVKFAVHHKESRHVGGNAPNNLITLCEKCHRRLHAGVITLEEGKRKRGKSFRDAAFMGIMRKTLMRRLRSELSIPVKETYGYITKLLRETHSIQKSHVNDARCIARVPNAQPSDTLYRIRTVRNHNRQLHKANPIRGGIRKRNQAPYEVFGFRLWDKVLFSGRECFITGRRASGYFALKDFDGKKVHASASHKVLTVVESATSYLIERRTAVSSRG

SEQ ID NO: 17359 - protein, 416 aa, unidentified
  REGION 1..416: note = Human gut metagenome
MVYVLDKNGQPLMPTDRHRKVRLMLQSGQAKVIKRCPFTIQLNYDSGHQTQEISLGIDAGSKHIGVSATTKIKVLYEADVELRNDIVDLLSSRRELRRGRRNRKTRYRQAKFNNRRRGNGWLAPSIRQKIGTHLTVVENICKILPISRIMVETASFDIQKIKNTDIQGAEYQQGDQLGFWNIREYVLFRDNHTCQCCKGKSKDKILNVHHIESRKTGGNAPNNLITLCEICHTGYHKGAVQLPKTVKRGMRFKDAAFMGIMRWAFYEALKQQYEPVGTPVHNTYGYITKHTRIAYNLPKEHYVDARCISGNPEASSNGEYYYQKKVRCHNRQIHKLTVLKGGIRKQNQATYLVKGYRLFDKVSYQGKGYFVFGRRQSGFFDIRTLSGEKVNKGSLSCKKLKFIATRTYYLTERRAV

SEQ ID NO: 17360 - protein, 422 aa, unidentified
  REGION 1..422: note = metagenome
MFVYIINKDGEPLMPCRPQKARKLVKTGKAVIVRYEPFTLKLKFGSSGYKQPVTLGIDAGSVHIGASASTKKQELYASETILRSADGKASIVNLLAKRRELRRSRRNRKTRYRKARFQNRTHRKQKGWLAPSIEQKIESHLALVERLHRILPIQKIVVEVAQFDIQKIKNPDISGKGYQQGEQSGWKNVREYVLFRDQHTCQCCKGKSGDPVLNVHHIESRKTGGNAPNNLITLCKTCHQKYHQGKITLPKSIHRGMRFKDAAFMGIMRWAFYRRLREQYKDAHLTYGYQTKDTRIAHHLEKTHTTDAYCIAGNIQAKRIDTEYLRKQVRRHNRKIHREVPAKGNIRKRAQAGHLVKGFALNDTVRAKGALWFIRGLRTKGSFVLKHLDGKKLEIVPSKIQFVAHNHSYLVERREVAFPSAL

SEQ ID NO: 17361 - protein, 431 aa, unidentified
  REGION 1..431: note = Human gut metagenome
MPNKVYVINKHGRPLMPCSPAKARHLLDAGKAKVKKRTPFTIQLVYGSSGYTQEVILGVDAGSKTIGMSASTTKEELLSAEVKPRNDVVDLQSTRREFRRARRNRKTRYRKPRFDNRVRSKHKGWLAPSVEVKIQEHITAIKMVCRILPVSKVVIETAEFDLQLLKAIEEGKPVPQGEDYQKGEMCGHYNVRQYVLWRDDYTCQCCGTHATKKKEVRLHVHHLESRKVGGDAPDNQVTLCESCHEKLHKGLITAKDFKKRKRRSTRDATFMGIMRKTLMQRLCSELPIPVIETRGYITKATREKLLVLPKSHINDALAIAQGKQGFNVGYLPEILQIDKIYTIRPVRHHNRQLYKATILKGGIRKSNQTGKYVFGYRLFDKVQFNGQDCFIWGRRTTGIFTIKTINGKMIKDGISFKKLKLLEKSTSYLIA

SEQ ID NO: 17362 - protein, 333 aa, unidentified
  REGION 1..333: note = Human gut metagenome
TLRQSRRNRKTRYRAPRFDNRIRTKRKGWLAPSVENRINAHLSRIGAILRLLPVTKITVETASFDTQLLKNPDISGKEYQEGEQLGFWNVREYVLFRDGHACQHCHGRSKDPVLNVHHLESRRTGGDSPGNLLTLCETCHKALHRREIKLKTKRGQSFRAEAFMGIMRWEVLNRLKASHPELEVHNTYGYRTKHTRIVNGIDKSHCADAFCIAGNLGAKRLGEFFFQKQTRRNNRQIHKLSILKHGLRKRNQAPFEVKGFRLFDKVVCQGEEGFIFGRRSSGSFDVRKLDGTRISAGISYKKLRLLEKRRTYLKEIRKEEALPPLPEGRSLRA

SEQ ID NO: 17363 - protein, 420 aa, Geobacillus sp.; identical to SEQ ID NO: 4984

SEQ ID NO: 17364 - protein, 424 aa, unidentified
  REGION 1..424: note = Human gut metagenome
MRVFVLNMRGEPLMPCTQRKARLLLKKRKAVIYKYNPFTIQLTYATGETKQDCHIGIDTGSKYIGVAITSEDKVLFKGEIELRQDVKSNLDKRRMYRRDRRNRKTRHRQSRFLNRKRTDKWLPPSLQNRINHTFHWIDTFSRLVPSPKLHIEVGKFDAAKMINPEINGVDYQHGQTYGFFDERYFVFARDKYTCQCCGKSKDKILQTHHIIYRSNGGTNRVDNLITVCTDCHTSENHKKGGVFYKWQEQRKKVKQYKEPPFMNTLRKRIFVKYPNAVITYGSKTTPKRKEMGLDKTHYNDAIVISGVCKINENSEEWLLIKQFRKKKRSLHEATARKGRKIPNRNQVRNSKNTPCYQGFFLNDKVSVLGKSGYITGFTSNGAYIKDNANNYITLPNKTYKQVGISKLRLEHHNNNWQYMVKTAV

SEQ ID NO: 17365 - protein, 429 aa, unidentified
  REGION 1..429: note = Human oral metagenome
MLVYVLDMNGQPLMPTHNGAKVRVLLKQKRAKVVSKCPFTIKLLYESTSFTQPLTLGVDTGSKYVGSAVINDNTSEILYESQLELRDDIKSKMDRRRQFRRARRNKLRYRPVRFNNRKSSKRKNRYSPTLISKFQGHVGEIKFINSILPISSIVLEVGEFDPQLLQDSTLAYRKWGYQKGELYQQDNFKQAAKARDGYKCQCCGKKNCRLEVHHLIPRSRGGSDKLANLITLCTDCHHLAHSSEEQLLAFQKKFGKKAKGTLRYATQMNVLRHMLQREYCEAELTYGFITKDVCRVFGLEKSHMIDACCIASRGVLFKNKNSNKYKKKCVPKGDYARTGVHGRKFVILPKGKIAGFRRYDKVLYNNKEYFVAGRRVKGYIYLIDIDNNRVQTERTRRSTGEKYMSKVEIKVTTVKKIVGARGCVCTRIF

SEQ ID NO: 17366 - protein, 512 aa, unidentified; identical to SEQ ID NO: 4446
  REGION 1..512: note = Human gut metagenome

SEQ ID NO: 17367 - protein, 413 aa, Clostridium sp.; identical to SEQ ID NO: 4134

SEQ ID NO: 17368 - protein, 197 aa, unidentified
  REGION 1..197: note = Human gut metagenome
MQYVYVLNKHGEPLMPCSPRKARLLLKQKKACVVKRTPFTIKLLYGSTGYKQPITLGVDAGSKHIGISAATEKYELYCEEATPRNDVVDLLSARRAFRRSRRNRKTRYRAPRFNNRVHSKHKGWLAPSVEVKIQEHITLIKRVCRILPVTFVRVETAEFDTQALEGNACWKASSCRNRLSAWRDVRRIQCPSVCLKA

SEQ ID NO: 17369 - protein, 502 aa, unidentified; identical to SEQ ID NO: 2616
  REGION 1..502: note = Human gut metagenome

SEQ ID NO: 17370 - protein, 414 aa, unidentified
  REGION 1..414: note = Human gut metagenome
MPCSPAKARLLLKEKKAIVVRRTPFTIQLTIATGESKQPVSLGVDAGYKHVGLSASTEKAELYASEVELRPDVSDLLSARRTLRQSRRNRKTRYRAPRFDNRIRTKRKGWLAPSVENRINAHLSRIGAILRLLPVTKITVETASFDTQLLKNPDISGKEYQEGEQLGFWNVREYVLFRDGHACQHCHGRSKDPVLNVHHLESRRTGGDSPGNLLTLCETCHKALHRREIKLKTKRGQSFRAEAFMGIMRWEVLNRLKASHPELEVHNTYGYRTKHTRIVNGIDKSHCADAFCIAGNLGATRLGEFFFQKQTRRNNRQIHKLSILKHGLRKRNQAPFEVKGFRLFDKVVCQGEEGFIFGRRSSGSFDVRKLDGTRISAGISYKKLRLLEKRRTYLKEIRKEEALPPLPEGRSLRA

SEQ ID NO: 17371 - protein, 431 aa, Escherichia sp.; identical to SEQ ID NO: 3801

SEQ ID NO: 17372 - protein, 415 aa, unidentified; identical to SEQ ID NO: 5047
  REGION 1..415: note = Human gut metagenome

SEQ ID NO: 17373 - protein, 423 aa, Moorena sp.
MVFVLDKHKKPLMPCTPKKARLLLSRQRAVVHRRYPFVIRLKDRRLEESVVQPLVLKIDPGSKTSGMAVARVEAAPQGEIHHAVHLAEVGHRGQQVHAAMGARARARRRRRSAHLCYRPPRFENRTRSKGWLPPSLCSRIGNVLTWARRYGHWTPITRLEVERVTFDLHLMQNPEIAGIEYQRGELAGWELRAYLLEKFQHRCVYCHRSEVPFEIDHQIPRSRGGSNRASNLVLSCHDCNAAKGHQTAAEFGHPEVGAQAKIPLKDAAAVNATRYALVLALEALSLPIGTWSGGRTRWNRDRFGLPKTHALDALCVGELAGVHARTLRTLRISASGRGQYCRTLFTRHGFPRGYLMRQKQVNGVQTGDLVLAVVPPPYQAQGTHKGRVAVRKSRFFRINGVDSIPARCCTVLQRSDGYEYAFV

SEQ ID NO: 17374 - protein, 431 aa, unidentified; identical to SEQ ID NO: 4306
  REGION 1..431: note = Human gut metagenome

SEQ ID NO: 17375 - protein, 420 aa, unidentified; identical to SEQ ID NO: 5953
  REGION 1..420: note = Human gut metagenome

SEQ ID NO: 17376 - protein, 424 aa, unidentified; identical to SEQ ID NO: 3232
  REGION 1..424: note = Human gut metagenome

SEQ ID NO: 17377 - protein, 457 aa, Scytonema sp.; identical to SEQ ID NO: 6260

SEQ ID NO: 17378 - protein, 422 aa, unidentified; identical to SEQ ID NO: 7962
  REGION 1..422: note = Human gut metagenome

SEQ ID NO: 17379 - protein, 428 aa, Moorena sp.; identical to SEQ ID NO: 4771

SEQ ID NO: 17380 - protein, 369 aa, unidentified
  REGION 1..369: note = Human gut metagenome
VDTGSGTIGTAVSNDNSDIVYMSEVIVRNDIMDKMTQRRKYRKNRRGRKTRYRKARWLNRANSTKTDRFSPTMQSKLHSHVKEIEYIKSILPITTMVFETGQFDTHLMKNPNLANPKVKHWGYQKGVNYGFENTKAMVLNRDNYTCQCCKGKHKDSKLEVHHIIFRSQCGSDEESNLITLCHTCHKDLHSGKINPKLKGGVKGTLKYATQMNSIRKQLFRIYPYAIETFGYVTKANRLVLGIDKEHYYDACTIATQGNIFTVKSNLYKKKCVSDGDFQKTKGIRSEQPIVTDKICGFRKFDKVRYFGNDYFIKGRMSTGYAILMDIDGNKADFSAMPKGYKTPKMVKLKRIEARTTWMITTVEVTPNIA

SEQ ID NO: 17381 - protein, 431 aa, unidentified
  REGION 1..431: note = Human gut metagenome
MPNKVYVINKHGRPLMPCSPAKARHLLDEGKAKIKKRTPFTIQLVYGSSGYTQEVILGVDAGSKTIGMSASTTKEELLSAEVKPRNDVVDLQSTRREFRRARRNRKTRYRKPRFDNRVRSKHKGWLAPSVEVKIQEHITSIKMVCRILPVSKVVIETAEFDLQLLKAIADGKPVPQGEDYQKGEMYGHYNVRQYVLWRDGYTCQCCGAHATKKKEVWLHVHHLESRKVGGDAPDNQVTLCESCHEKLHKGLIAEKDFKKRKRKSTRDATFMGIMRKTLMQRLCSELPIPVIETRGYITKATREKLLVLPKSHTNDALAIAQGKQGFNVGYLPEIAQIDKIYTIRPVRHHNRQLHKAAILKGGIRKSNQVGKYVFGYRLFDKVQFNEQDCFIWGRRTTGIFTIKTINGKMIKDGISFKKLKLAEKSTSYLIA

SEQ ID NO: 17382 - protein, 447 aa, unidentified; identical to SEQ ID NO: 5937
  REGION 1..447: note = Human gut metagenome

SEQ ID NO: 17383 - protein, 427 aa, Moorena sp.
LLLQRGRAVVVRLAPFTIRLKDRVGGETQPLRLKLDPGSKTTGIALVRETETVDPETGEVERTAHVLWLGELEHRGQAIHKALETRRNFRRSRRYRKTRFRAPRFLNRTRSEGWLPPSLQHRIDTPTSWVTRLQRLAPITAISQERVRFDTQIMQNPEISAVEYQQGTLAGYEVREYLLEKFHRTCAYCGAKDVPLEIEHIVPRSRGGSNRPSNLTLACRPCNRKKADKPIEVFLALKPEVLKRIQAQAKAPLRDAAAVNATRWALFAALKATGLPIETGSGGRTKYNRSRLDIPKTHALDAVCVGQVDQVQNWNRPVLAIQATGRGAYCRTRAFKNGFPRGYLIRHKRVRGFQTGDWVRAEVPKGKKAGIHVGRVAVRATGSFNVQMPGKTIEGISYRYCRLLQRADGYGYAFQPKPQTEIAKWAA

SEQ ID NO: 17384 - protein, 451 aa, unidentified; identical to SEQ ID NO: 12558
  REGION 1..451: note = Human gut metagenome

SEQ ID NO: 17385 - protein, 417 aa, unidentified
  REGION 1..417: note = Human gut metagenome
MPCSPAKARLLLKEKKASVKRRTPFTIQLTIATGEARQPVTLGVDSGYKHIGLSATTEKAELYASQVELRQDITDLLSARLALRRSRRSRKTRYRAPRFDNRVASKRKGWLAPSVENRIAAHMSRVEAVMRVLPVTAITVETAAFDTQLLKNPDIAGEAYQQGEQLGFWNVREYVLFRDGHVCQHCRGKYKDPILNVHHIESRRTGGDAPNNLITLCETCHKAFHRGEIKLKVKRGKSFKAETFMGIMRWTLFERLKKAHPELRVRNTYGYLTKHKRISHGIAKSHCADAYCIADNLGAKRLEGFFFQKQTRKHNRQIHKLSILKGGLRKKNQAPYEVKGFRLFDKVICKGEEAFIFGRRTSGSFDVRRLDGTRISAGINYKKLRLLEPRTTYLTEFRKEAALPHLHECRGFRAEFL

SEQ ID NO: 17386 - protein, 415 aa, Bacillus sp.; identical to SEQ ID NO: 2431

SEQ ID NO: 17387 - protein, 446 aa, unidentified
  REGION 1..446: note = Human gut metagenome
VPAYRIKHITKKEAPYMVYVLDIDGQPLMPTSRHRKVRKLLNSHLAKVVKRCPFTIQLLYQSTKETQPVSLGVDAGSRHIGLAATTEQKVVYQEELVPRNDVVKLLSARRALRSSRRSRKTRYRKPRFNNRVHSKHKGWLTPSVEVKIQEHITAIKRICQILPISDIHVETAEFDLQRLKAMEEGRPLPVGTDYQLGEQYDFYNTRQYVLHRDEYTCQCCGTHDNNVKLHVHHIESRQTGGDAPNNLITLCEHCHKLLHAGKTILPKGKKRGKSYRDATFMGIMRKTLLERLKKEIDVPVEGTYGYITKYWRERAGLEKSHINDAICISKHPYARPLETYYLTKAVRHHNRQIHKTKFSKGGIRKRNQAPYLVKGFRLFDKVLYQESYFIFGRRITGYFDIRTLDGTKVNKGSTSYKKLRIQDTAEAYLTEVRAIPHMNEFTCVLA

SEQ ID NO: 17388 - protein, 415 aa, unidentified
  REGION 1..415: note = Human gut metagenome
MVYVISKDGNPLMLLKQGKAQVKKREPFTIKLNYETTNYLQNLTLGVDTGSRTIGTAVSNDNGDILYMSEVVVRNDITEKMTQRAKYRRNRRNRKTRYRKARWLNRANSIKNDRFSPTMRSKLYSHVKEIECIKSILPITQMVFETGQFDTHLMKNPSLANPRIRRWGYQKGPNYGYENTKAMVLNRDNYTCQCCKGKHKDSKLEIHHIVFRSKGGSDEASNLITLCHTCHKDLHSGKINTKLKGRIKGNLKFATQMNTIRKQLFRLYPNAIETFGYITKANRLQLGVNKEHYYDACTIATQGNRFTIKSNLYKKKCISDGDFQQTKGICSKQPIVTNKIHGFRKFDKVRYLGKNYFIKGRMSTGYAVLMDINGKKADFSNMPKGFKTPKMANFKRIEARTTWMTTTVVLTSNIA

SEQ ID NO: 17389 - protein, 384 aa, Lactobacillus sp.; identical to SEQ ID NO: 15843
  REGION 334..337: note = misc_feature - Xaa can be any naturally occurring amino acid

SEQ ID NO: 17390 - protein, 289 aa, Parasutterella sp.; identical to SEQ ID NO: 15206

SEQ ID NO: 17391 - protein, 475 aa, Blautia sp.; identical to SEQ ID NO: 4128

SEQ ID NO: 17392 - protein, 433 aa, unidentified
  REGION 1..433: note = Fermentation metagenome
MVYVLSQDGKPLMPTERHGKVRHMLRDGQAKAVKAKPFTIQLTYETTTYTQPITLGVDAGYQNVGLSAVSKKKELFSAECELLKGQAERNKERVMYRRQRRSRLRHRKPRFNNRRKPDGWLAPSMQHKLDSHIRLINKAKSILPITETIIEVANFDIQKIKNPDIQGVEYQQGEQFGHYNIREYIFFRDDYTCQFCGRKNLPLEMHHIGYWKKDKTDRPSNLATACVKCHKPENHKKGEILWGWQPKLKPFKAETFMTTVRWKIVDALNCKHTYGYITKNNRIALKLPKSHTNDAFCIAGGITQKRAETLIITQTRRNNRSLEKFYDAKYIDTRTGKNVSGQELNNGRRTRNKNLNTENLHKHRGQKTAKGRRNIRRQRYFYQPNDLVIYKGKKYQVAGVQNRGTYIRLKCLKKVPRIDLVQPYRFIKGLSIA

SEQ ID NO: 17393 - protein, 431 aa, unidentified
  REGION 1..431: note = Human gut metagenome
MPDKVYVISRLGHPLMPCSPAKARHLLDDKKAKVVKRMPFTIRLLYGSTKYIQPIILGVDAGSKTIGLSASTAKEEVFAAEVMPRNDVVENLSTRREFRRARRNRTTRYRKPRSDNRVRSNHERWLAPSVKVKIQEHITSIKRVCTILPISKVVIETAEFDLQLLKAIQEGKPIPEGEDYQKGELYGSYNVCQYVLWRDNYTCICCGVRGTPKNPVRLHVHHFESRKYGGNAPDNHGTLCDDCHKKFHLGIITDVKLKTRRRQSTRDAAFMGIMRKTLMWRLRTELFIPVAETKGYITKATREKLLVLPKSHTRDALAIAQGRHGFGIKEYAYVEPANHIYTVRPVRHHNRQLHKASILKGGIRKRNQASKYVFGFRLYDKVLYQGKACFVWGRRTSGTFLLRTIDGIKVKDGVSYRNLTLLERSSNYLIA

SEQ ID NO: 17394 - protein, 396 aa, unidentified; identical to SEQ ID NO: 4508
  REGION 1..396: note = Human gut metagenome

SEQ ID NO: 17395 - protein, 511 aa, unidentified
  REGION 1..511: note = Human gut metagenome
MATVYVLNKDSKPLMPTTRCGHVRYLLKEKKARVVRANPFTIKLLYETDDVVQPLYLGIDPGRTNIGVAVAKGDGTAVFTAHLETRNKEIPKLMAKRKEYRQGRRHYRRCKRQRRAAAHGTLSKRCKKQDTAQGSNISERAQKIGVFERNLPGCEKPVLCIGIKNKEARFNNRVRPAGWLTPTANQLLLTHINFVKKICKFLPISDVVLEINKFAFMQLDNPNIQKWQYQQGPLYQKASLEEAVSEMQEHHCLFCKQSIVHYHHVVPQSENGSDTIGNIVGLCTKHHDLVHKDTAWQKKLAKKKTGLNKKYGALSILNQIIPALTKELSSLFPKHFFATNGKSTHDYRAAHDVSKDHWLDAYCIACSILPNDTCDKNINGRVPYKLKQFRRHDRRALHKENMSRVYTLDGKKVATNRHKAIKQTTDSLEEFRQRQPNDVCKLKVKEHHPEYRNPERNFPGCVFLVGKHTHVMQGTSGSHNGKADGYYDTNGNSYPSGKCKFVAKNKGIVFA

SEQ ID NO: 17396 - protein, 425 aa, unidentified; identical to SEQ ID NO: 3148
  REGION 1..425: note = Human gut metagenome

SEQ ID NO: 17397 - protein, 429 aa, unidentified
  REGION 1..429: note = IscB polypeptide
LNAVFVVDQNRKPQNPVHPAKARMLLDGQRAAVLRMFPFTIILKEVIADQPRTLRVSVDPGSRKTGIVLVEESSNRVVWAGEIEHRGLTIKKRMDARRTIRRSRRSRKTRHREPRFLNRTRPGSWLPPSLSSRVVNVETWIRRLSRWSPVGSISMELVKFDTQLMDNAEISGVEYQQGELQGYEVREYLLEKWSRNCVYCGVMGVPLQVEHITPRSRGGTNRVSNLAISCRDCNIEKGTMTAEEFGHPKIQEQAKRPLKDAAAVNATRWALFHRLKQTGLPLEVGTGGRTKFNRTRQGYPKAHWIDAACVGESGSKVRLDPSQTILAIGAKGWGSRQSCRMDRFGFPRTGPKGSRIIHGFRTGDLVKAMVLKGKFIGTHLGRVAIRATGSFTIDGVTTTSWKNCQIVQRVDGYSCSHSHSKENGNSSHD

SEQ ID NO: 17398 - protein, 406 aa, Moorena sp.; identical to SEQ ID NO: 11666
  SITE 406: note = misc_feature - Xaa can be any naturally occurring amino acid

SEQ ID NO: 17399 - protein, 442 aa, unidentified
  REGION 1..442: note = Human gut metagenome
MSTSVFVLDKKHRPLMPCRPARARRLLRAGRARVVKRFPFVIRLVDRTVEQSEVQPVLIKLDPGSRETGAAVVRDDEKKRHHALAFFVIKHRGDAIRDALKARSAFRRRRRSQNFRCRSPRFLNRVKPKGWLPPSLRHRVETTLSFVRRMCRYLPVSGIATELVKFDSQKLQNPEVSGVKYQQGTLFEYEVREYLLEKFGRKCVYCGAEGVPLNIDHVVPRAKGGSNRVSNLVLACVSCNQKKGARSLEDFLKGKPEVLARVRRELKTPLRDAAAVNATRWVLFNELKATGLPVETGSGALTKLNRHAFGVEKEHWLDALCVGRLNGVVTRKGLNALEIRCMGRGSRQRTRLTKYGFPRGYLMRQKCVHGFATGDMVEANVPKGKKAGLWRGRVAVRVSGSFNIQTPKGVIQGVGWKHCRLISHNDGYGYAWLGHAPHSSPA

SEQ ID NO: 17400 - protein, 417 aa, unidentified
  REGION 1..417: note = IscB polypeptide
MQKVYVQNKDGEPLMPTERYGAVRGWLRDNKAIVVQLTPFTIRLNLDCDNHKQEVIVGLDTGAINVGCSAVSGNRCLYASETKLRTDISKKMQRRAMYRRTRRTRKLRYRPARFDNRKSKRQLPPSLQSKMESTVKVVKQLAEILPISKVMVEIAKFDTQKLQNPEIKGKEYQNGVTEGYDNVRAYVFERDKYTCQICMKREGILQTHHIKQRKDCGSDRPENMVTVHKDCHSAFHKGLIQHKFRKPKEYCMATQVTILKDFIVKELRKEFDVEITFGHITKRNRKRLNLPKSHCFDAISICNPKKIERITHIFKRRCITQRRYQITKGIRSEKRLPNGDLFGFSVWDKVRLPNKQVGFIKGRRSSGFFDVCDIDGNNISHSIKYTNLQRLCGNNVMEASVSPPTTKVMGIRNAKVL

SEQ ID NO: 17401 - protein, 408 aa, unidentified; identical to SEQ ID NO: 6729
  REGION 1..408: note = Human gut metagenome

SEQ ID NO: 17402 - protein, 413 aa, unidentified; identical to SEQ ID NO: 11796
  REGION 1..413: note = Human gut metagenome

SEQ ID NO: 17403 - protein, 465 aa, unidentified; identical to SEQ ID NO: 3856
  REGION 1..465: note = Human gut metagenome

SEQ ID NO: 17404 - protein, 431 aa, unidentified; identical to SEQ ID NO: 6230
  REGION 1..431: note = metagenome

SEQ ID NO: 17405 - protein, 477 aa, unidentified
  REGION 1..477: note = Human gut metagenome
MKTHKSVLVIGMNGIGLMPTTPRKARVLLEEGKAEVYRKTPFTIKLLYKTGSATQDIVLGIDTGSQHIGVAVVTDNTVQLKDEHVLRTTMEKRQLNEKRAAARRNRRYRKTRYRKPKFKPHTKHVYKEMTTTRHGHETHWHKVKNEFGTNRDPGWLPPSIQQKVDHHIQIISRYQEALPVRTKTRIEIGRFDMQKIRNPEIEGVQYQLGRMYYFENVKAYVLAKYNYQCPICGRKFGSKRKDGTTVKIRMHHRDYVSNGATNNPDSFIPVCECCHSAEEHAEGGKLDKLMNDSKKSLRGMRDMTFMNILRRRIWNAFPDAEYTYGNITNADRKWLGLPKTHANDAVSVAMHEWIQQTGLREVTDVPYTTVYKEVRKKKRSLHEMNPRKGRSRPNTDAVRNSKNTKSVTNRSGTFCLYDKIKYMGQIGWITGFSGKNTAYIKNKYDQYITGKADKYKNIPLGDVRILERNNQWISYTI

SEQ ID NO: 17406 - protein, 413 aa, unidentified
  REGION 1..413: note = Human gut metagenome
LKVFVLNMRGQPLMPCSPAKARHLLKAGKAVVKRRTPFTIQLRIATGETKQNVTLGVDAGAKHVGLSATTEKEEVFASEVELRQDITGLLAARLSLRRDRRHRKTRYRAPRFLNRVRSKHKGWLAPSVENRIQAHMSRIDAVCRLLPVTKIVIETASFDVQKIKNPTIEGTDYQQGDQLGFWNVREYVLFRDGHVCQHCHGRSRDKILNVHHLESRKTGGDAPNNLITLCETCHKAYHAGKIKLKVKRGQSFRAEAFMGIMRWTLLDRVRKTHPKLPVENTYGYLTKHKRIALGLPKTHCADAFCIAGNLKALRRGDFLFQQQTRKHNRQIHRCSILKGGVRKLNQAPFLVKGFRLFDKVRIGGQIGFVFGRRVRGIFNIRRLDKTVIGTDINCKKLSLLETRKTFLTELRKE

SEQ ID NO: 17407 - protein, 460 aa, unidentified
  REGION 1..460: note = Human gut metagenome
MGGRKPIYLQEEKRMVAVLNKNGKPLMPTSEYRARRMLKSGKAVICNYRPFAIRLLNNKTEDIQEIEYCMDTGYLHIGNSVKSEKHEYLALQVDTLENERVKHDTCRAYRRARRNRKRYRKPRFDNHKRPEGWLTPSLQHKVMIHLYWLQKICQFIPVQRIVLEMGQFNTQVLKAVAEGKPLPEGVDYQHGERYGTDTLREAVFTRDQHTCQCCGRSIKDRAILHAHHIRYRSEGGSNAMGNLVTVCEKCHTPANHKPGGKLYGWKPKLPSFKGATYMTTVRWILYGQVKALFPDKDVRITYGAETKRSRLNRNLEKTHVNDAYSMGDYHPKHRGKPVYLKKKRRNNRCLEKFYDAKYIDSRDGKIKSGQQLSNGRNDRNHKKDSENLHPYRREKHKKGRRSIRRQHYRIQPGDKVLFRGEVYIAKGCHDKGARVMLYPGKSVAMGKVRVRTYAGGYISV

SEQ ID NO: 17408 - protein, 504 aa, unidentified; identical to SEQ ID NO: 3854
  REGION 1..504: note = Human gut metagenome

SEQ ID NO: 17409 - protein, 470 aa, unidentified; identical to SEQ ID NO: 2825
  REGION 1..470: note = Human gut metagenome

SEQ ID NO: 17410 - protein, 450 aa, unidentified; identical to SEQ ID NO: 14896
  REGION 1..450: note = Cyanobacteria bacterium UBA8543

SEQ ID NO: 17411 - protein, 451 aa, Paraburkholderia hospita; identical to SEQ ID NO: 2390

SEQ ID NO: 17412 - protein, 450 aa, Moorena sp.; identical to SEQ ID NO: 2935

SEQ ID NO: 17413 - protein, 456 aa, unidentified; identical to SEQ ID NO: 4609
  REGION 1..456: note = Human gut metagenome

SEQ ID NO: 17414 - protein, 465 aa, unidentified
  REGION 1..465: note = IscB polypeptide
MQKLGERKTYTPRNTSLVPCSVTRSLNREETLSEMSLKTSSNNPEVNLRQHTCGLKDKVYVKSVDGQVLMPCSNAKARHLLESGKAKVVRKYPFQIQLLFVCENKVQDVVLGVDTGYENIGFSAVSGKEELLGGTMKLENKMSSRLLEKKMYRRGRRNKLWYREARFNNRVKKGWLAPSVERRINTHVELVKRICKLLPISKVNVEGANFDIQRIENPNVEGKGYQQGSLYDYENVKAFVVAREEGKCQLCGREYDDNGWHLHHIIPRGQGGTDRPKNQALLHNKCHDKLHNQKLYKKLKKEKQYKAETFMSTTRLKILERISKIHPNVNISYGYETKVKRIEQGLEKIHSNDAFIIADGTEQVRSKEYILEQKKRNNRVLQLNRNRYKPSIRKQRSVIQPKDIFWVNGIKYIAKGMFNYGKYILYGDVKKKEYFKIEKVEKYFNINSWQFIPRLKAGVFLPQRG

SEQ ID NO: 17415 - protein, 441 aa, unidentified
  REGION 1..441: note = Human metagenome
MTKTATQKVIQVCVLDQNGQPLMPTQRLGKVYRLLKSKKAHIVAYEPFTVQLDYEPKTHIIQPLTLGVDSGAIHSGYSLANEHREYYNAEVIARDDISKNISDKRMYRRNRRARKTRYRKPRFNNRKNKGEGWIPPSLEQKVEVQVKEIKHLHKYFPIKDIIIEVAEFDIQKIVNSDISGKEYQQGTLQGYNIRNYLIEKYNHKCFYCDKEVSAFEVEHMIPKARNGSNRIDNLTLSCPDCNQKKGTLTAEEFIRQTLSPQKAAQKLRQLPKTKKLLKYMAHMNATRWVLYNTIKEIYNSVSLTYGYITKHNRINAGLPKAHHIDAKCITGFSTVPSFEVTVVKTKKRRHNRQLHRATFSKGHVRKVATLPRFVHGFQLYDIILFNNHRYYIKSRRSSGYFTIVSLEGLNNSKRSYKKLTFLAHTNAYLINHYVNDKIKKC

SEQ ID NO: 17416 - protein, 465 aa, unidentified; identical to SEQ ID NO: 3603
  REGION 1..465: note = Human gut metagenome

SEQ ID NO: 17417 - protein, 262 aa, unidentified
  REGION 1..262: note = Human gut metagenome
MSVAVMSKTGMRLMPTSEYRARKLLKSKKATVYRYNPFTIQLTERETGDVQTVELCMDTGYLHIGTSVKSEKHEYLGVQIDTLTDEKQKHDACRMYRRQRRSRKRYRQSRFNNRKRSDGWIAPSLEHKKDIHIQTISRICNAMPITNITLEMGNFDTQVLKALEENRPLPQGTDYQHGERYGIATLREAVFARDKYTCQCCRKTIADGAILHVHHIIYRSRGGTNRMSNLATIDVILLQIISQVVGCTTGNQRLRRSKVQHS

SEQ ID NO: 17418 - protein, 420 aa, unidentified
  REGION 1..420: note = Human gut metagenome
MQYAYVLNKRDEPLMPCSPGKARILLKQQKACVVKRTPFTIKLLHGSAGYKQPITLGVDAGSKHVGLSASTEKRELYSEEFTPRNDVVELLSTRRQNRRSRRNRKTRYRAPRFNNRVHSKHKGWLAPSVEVKIQEHITVIKRICRILPITLVRVETAEFDTQRLKAMLAGKPLPVGTDYQLGEMYDEYNVRQYVLKRDNYTCQCCGAHTTAKKTVKLHVHHLESRKVGGNAPSNLITLCTTCHNNLHKGKITLDGKKRGKTLRDAAFMGIMRNTLLTRLRNELNIPVQNTYGYITKLLREQNDIKKSHVNDARCISKHPLAKPCSICYRTKAIRHHNRQIHKAKILKGGIRKANQAPYIVKGFRLWDKVLYNEQECFISGRRSSGYFALRKFDGTTITNSISFKKLRLLEPATNYLIERK

SEQ ID NO: 17419 - protein, 371 aa, Moorena sp.; identical to SEQ ID NO: 16860

SEQ ID NO: 17420 - protein, 452 aa, Lactobacillus sp.; identical to SEQ ID NO: 5473

SEQ ID NO: 17421 - protein, 323 aa, unidentified; identical to SEQ ID NO: 7431
  REGION 1..323: note = Cyanobacteria bacterium UBA11369

SEQ ID NO: 17422 - protein, 415 aa, unidentified; identical to SEQ ID NO: 6843
  REGION 1..415: note = Human gut metagenome

SEQ ID NO: 17423 - protein, 400 aa, unidentified
  REGION 1..400: note = Human gut metagenome
LQDYYLSKAKQKLRSEPFTIKLTYETTNYTQGLTLGVDTGSGTIGTAVSKDNGDIVYMSEVVVRNDITDKMTQRAKYRRNRRNRKTRYRKARWLNRASSIKKDRFSPTMQSKLHSHVREIEYIQSILPVTEMVFETGQFDMQLMKNPSLANPKVRPWGYQKGANYGFENTKAMVLNRDNYTCQCCKGKHKDSKLEVHHIVFRSQGGSDEESNLLTLCHTCHKDLHSGKINPKLSGKVKGNLKYATQMNSIRKQLFRFYPNAIETFGYVTKANRLHLGVDKEHYYDACTIATQGNAFNVKSNLYKKKCVSDGDFQKTKGIRSEQPIVTDKICGFRKFDKVRYFGNDYFIKGRMSTGYAILMDIDGNKIDFSTMPRGYKTPKLSNCKRITARSTVMTQVKVV

SEQ ID NO: 17424 - protein, 327 aa, unidentified
  REGION 1..327: note = Human gut metagenome
RKQNRRSRRYRKTRYRAPRFDNRVHSKHKGWLAPSVEVKIQEHITVIKRICKILPISLVRVETAEFDTQRLKAMLAGKPLPVGTDYQLGEMYDEYNVRQYVLKRDHYTCQCCGAHNTAEKVVKLHVHHLESRKTGGNAPSNLVTLCTTCHKNLHKGKVTLDGKERGKPLRDAAFMGIMRKTLMARLKEELPIPVEGTYGYITKMRREQNDIKKSHTNDARCISKHPLAEPCSVCYRTKAIRHHNRQTHKANFSKKGIRKRSQMPYLVEGYRLWDKVLYKEQECFVSGRRSSGSFTLKKLDGTSVSKGVTFKKLRLLEPATNYLIERM

SEQ ID NO: 17425 - protein, 430 aa, unidentified; identical to SEQ ID NO: 4504
  REGION 1..430: note = Human gut metagenome

SEQ ID NO: 17426 - protein, 416 aa, unidentified; identical to SEQ ID NO: 4039
  REGION 1..416: note = Human gut metagenome

SEQ ID NO: 17427 - protein, 454 aa, unidentified
  REGION 1..454: note = Human gut metagenome
LDTVAVISASGKKLMPTNSYRARRLLKSKRAVIYRYRPVFTIKLVDRTNGYTQPIEYKCDTGYQNIGISICSDTKEFVNEQRDLLKDEVKRHSDSRKYRRTRRNRLRYRKKRFDNRRGMISKDGFAPSIRNKRDVHVRLYEEYYKVFPITKAVFEMGQFDTQVLKAVEAGLPVPEGTDYQHGEQYGYATLREAVFARDSYTCICCGKSAIKDGVKLRIHHIGYLSGDRSNRMANLGSVCENCHTSKNHKPGGKLYNLKPKLKTFKGATFMTMVRYSMVKQLKAATPDVDIKVTYGAATKLARRVLSVKKTHSNDAYCMGEFHPKHRSNFKHYRKCRRNSRVLSRFYDAKYRDLRDSSVKTGSQLSCGRTNRKISRHTELDEHIYRAHKISKGRVSTRRQHYSLRPGDKVLYDGKVYFVTGMQNNGTCVKLTNGKVCSLKKVCVLQHCNAWTAVI

SEQ ID NO: 17428 - protein, 458 aa, Halomonas sp.; identical to SEQ ID NO: 3786

SEQ ID NO: 17429 - protein, 421 aa, unidentified
  REGION 1..421: note = Bioreactor metagenome
MLVFVKNKHGENLMPCKPSKARKLLKQKKAKIISYKPFTIQLLYGSSGYKQPVTLGVDLGSKHIGIAVTSEDKVLIKGEIELRDDIKENLDIRRQYRRSRRYRKTRYRKPRFNNRKRPEDWLPPSIQSRIDNTFRWIDNFINLLPSPKLCIEVGKFDVQKMMNPDIEGVEYQQGETYGYYDVRYYVFARDNYTCQVCKKKGKILQTHHIVYKSKGGTDRPSNLITVCTDCHTHKNHQEGGIFYKWMMEKKKMPSYKETPLMNIMRRRVFEKYPEANIVYGSYTTIRRKELGLEKTHYNDAIAITGIESIKHNPDNYFKIKQFRKKKRSLHEAIPRKGRKEPNRTQKRNSKNTKYRNGFYLNDKVKVFGKVGFITGFTNGGAYIQDIEGNYITIPNKSYKQVSFKYIEFINHNNNWQFISHL

SEQ ID NO: 17430 - protein, 408 aa, unidentified
  REGION 1..408: note = Human gut metagenome
MSTCVCVLSNSGERLMPTFRLGKVRRLLKDGKAKIVKHHPFTIQLLYDSKTNTQPIEICEDVGYNYIGISVKSESHEYVSAQYDTLQDEKEHHDDCRKMRRARRNRLRYRKPRFDNRKRSEGWLAPSLEHKKQLNISLIERYVSVIPITRATVEVGSFDTILLQAIQKGKSKPEGVDYQKGPRYNLATLREAVFYRDNYTCQVCGRKIADGAILHMHHMFYWKGRHGYQLDELVTACEKCHTPANHQKGGKLFGFGEDKEFANLSGAAFMNAVRWQIVDALHATYGKEFVTITYGAMTKEKRIILGIEKTHNNDAYAMGDYHPVHRCVFRHYQKRRRNNRVLEKFYDATYIDARTGNKAKGKELFNGRINRNHKKDSENFHKYRSKKVSKGRRSIRRQRYAIQPYDTV

SEQ ID NO: 17431 - protein, 467 aa, unidentified
  REGION 1..467: note = Groundwater metagenome
MAVFVLDRHGKALMPCTEKRAKLLLARNRARVHRILPFSIRLIDRKASSCDFQALRIKLDPGSKTTGMALVRELDGGIAVLNLFELIHRGRQISDALTARKNMRCHRRTANLRYRQPRFLNRGNQQSGWLAPSLQHRIDTTMAWVSRLSKLAPISAISQELVKFDLQQMESPEISGVEYQQGTLLGYEVREYLLEKFNRTCVYCDAKDTPLQIDHLHPKANGGTNRISNLALACGPCNQRKAAQDINLFLVKDPTRLKRILTQVKKPLKDAAAVNSTRWALFNALKTTNLPVEIASGGKTKYNRSRLNIPKTHALDAVCVGNVDSIESWDKPTLNIKSMGRGCYQRTRLTASGFPRGYLTRIKNIQGFQTGDMVKATVTKGKKIGTYSGRVAVRASGNFNIQTTTEVIQGISHRYCQIVQRGDGYGYSQTGAINGNRRGQVGSRARIARQSALTFSALMPVFHAQIL

SEQ ID NO: 17432 - protein, 414 aa, unidentified
  REGION 1..414: note = Human gut metagenome
MPCSPAKARLLLKEKKAIVKRRTPFTIQLTIATGETKQPVGLGVDAGYKHVGLSASTDKAELYASQVELRQDITDLLSARRALRRARRNRKTRYRAPRFNNRIRTKRKGWLAPSVENRINAHLSRIEAVLRLLPVTKITVETASFDMLLLKNPDIAGKEYQEGEQLGFWNVREYVLFRDGHVCQHCYGRSKDPVLNVHHLESRRTGGDSPGNLITLCETCHEALHRGEIALKTKRGHSFRAEAFMGMMRWEVLNRLKASHSELEVNNTYGYRTKHARIVNGIDKSHCADAFCIAGNLGAERLCEFFFQKQTRRNNRQIHKLSILKGGIRKRNQAPFEIKGFRLFDKVACKGEESFIFGRRSSGYFDVRKLDGTRISAGISCKKLRLLEKRRTYLTEIRKEEALPPLPEGRGLRA

SEQ ID NO: 17433 - protein, 432 aa, Sharpea sp.; identical to SEQ ID NO: 6688

SEQ ID NO: 17434 - protein, 430 aa, unidentified; identical to SEQ ID NO: 4504
  REGION 1..430: note = Human gut metagenome

SEQ ID NO: 17435 - protein, 457 aa, unidentified; identical to SEQ ID NO: 5177
  REGION 1..457: note = Human gut metagenome

SEQ ID NO: 17436 - protein, 446 aa, Pseudomonas sp.; identical to SEQ ID NO: 9324

SEQ ID NO: 17437 - protein, 480 aa, unidentified
  REGION 1..480: note = Human gut metagenome
LYTKPLDNIGEGSLPPSGEINLKGMTFMVYVKSIDGKALMPTSNAKARKLLKQKKAKVVSLRPFVVKLTYKTKTEYIQKLNLGVDSGYSNIGFSVIDAKQEYIVGEVKLLEGMKKRLLEKASYRRIRRSRLRYRKARWNNRVKSKKKGWLAPSLKHKLDTHIKFIDYLKNILPIEKITIEVANFDIQKMKDDLISGIDYQNGDMFGFWNVREFVLHRDGHKCQNPNCKHKDKKEQILKVHHIRYRSEGGSDRPENLITLCSKCHIPANHKKGKFLYDWCVNGKKVRGFKDATFMSMIRWYLVNELKSKHNNVSITYGYITKNHRIQNGIEKSHLNDAFAITKGTNQARTKDRFLVIQDRLKNRSLEKFYDSKIIDIRTGKKVSGGDLSCGRSTRNKNLNTENLRKYRGAKISKGQRRIRKQKYFYQPNDLVKYDGKVYTVKGTQNEGKYIALKEIKKVPKVELLIPYVFKKGLNWSYGLC

SEQ ID NO: 17438 - protein, 518 aa, Actinomadura sp.; identical to SEQ ID NO: 5776

SEQ ID NO: 17439 - protein, 442 aa, Methanococcoides sp.
VLALLNLSISGREEDGFRCWLLQYLIRITLKTGGYNILNVYVLNKDKKPLMPTSPVIARLLLKNKKAKVVRKTPFTIKLLYETTEHKQPVIAGMDTGSRTIGCAAIANDEVIYQSEVQLRTDISKKMTQRASYRRTRRNRITRYRPARFDNRGKKGKIAPSIKSKVDSHLREKRFVEAIVPVTKWKVELASFDIHKIVNPEIKGKQYQEGNQKGFYNVKAYVLDRDNYTCQHCKGKSKDKHLECHHIIFQSNGGSDALENMIVLCNTCHKELHDGKFSINEQVSRTKYATEIGIIKSQLGRFDWQFESTFGYETKYKREKVMELPKTHYNDAIAICCKEDQNINLADTVYFKKHVSKGDYQQTKGKRSEKKIPTGKLFGLRKFDLIKTMKGIGFVKGKRSSGYFAICDIFNKTIHNSVGVKTKCTRIQARTTTLVQPQMLTI

SEQ ID NO: 17440 - protein, 305 aa, Lactobacillus sp.
  SITE 211: note = misc_feature - Xaa can be any naturally occurring amino acid
MPCRPRKARLLLKSGKAFVVKKYPFTIQLKYGSYGYKQKVSLGVDTGQRHIGFAVVSQDKVLHQSEVELRQDVHTNLYTRKIYRRGRRNRKTRYRQARFLNRVHGKRDGLWLPPSVKSKVSHNIAWIKRYLAVLPNPDLHIEVGKFDMAKMVNPDISGKQYQEGSLKDWKNYEYYVLARDEYTCQLCHKHGEGVKLVVHHIVYRSQGGTDXRKRIMTAFPEASFQYGSQTYVDRKNLLLPKGHFMDAIAISGIKSVGQLSDTVTMISQFRKKKRSLHEATARKGRKQPNMSSKRNEKNTKYACGL

SEQ ID NO: 17441 - protein, 430 aa, unidentified; identical to SEQ ID NO: 11913
  REGION 1..430: note = Human gut metagenome

SEQ ID NO: 17442 - protein, 425 aa, unidentified; identical to SEQ ID NO: 8945
  REGION 1..425: note = metagenome

SEQ ID NO: 17443 - protein, 474 aa, Thermincola sp.; identical to SEQ ID NO: 2975

SEQ ID NO: 17444 - protein, 426 aa, unidentified; identical to SEQ ID NO: 5603
  REGION 1..426: note = Human gut metagenome

SEQ ID NO: 17445 - protein, 447 aa, unidentified
  REGION 1..447: note = Human gut metagenome
VPAYRIKHITKKEVPYMVYVLDIDGQPLMPTSRHRKVRKLLNNHLAKVAKRCPFTIQLLYQSTKETQPVSLGVDAGSRHIGLAATTEQKVVYQEELVPRNDVVKLLSARRALRSSRRSRKTRYRKPRFNNRVHSKHKGWLAPSVEVKIQEHITAIKRICQILPISDIHVETAEFDLQRLKAMEEGRPLPVGTDYQLGEQYDFYNTRQYVLHRDEYTCQCCGTHDNNVKLHVHHIESRQTGGDVPNNLITLCEHCHKLLHAGKTIIPKGKKRGKSYRDATFMGIMRKTLLERLKKEIDVPVEGTYGYITKYWRERAGLEKSHIHDAVCISKYPYAKPLDIYYLTKTVRHHNRQIHKSNFSKGGIRKRNQAPYLVKGFRLFDKVLYQGKSYFIFGRRATGFFDIRTLNGAKVNKGSISYKKLRIQDTANAYLKEIKAIPHMNKFTCVLA

SEQ ID NO: 17446 - protein, 419 aa, unidentified; identical to SEQ ID NO: 6987
  REGION 1..419: note = Human gut metagenome

SEQ ID NO: 17447 - protein, 451 aa, unidentified
  REGION 1..451: note = Human gut metagenome
VTTILKTCFAAFNLAKVVVLMDAWDIIVVLNKRGKPLMPCSPAKARLLLKEKKAIVKRRTPFTIQLTIATGESKQPVTLGVDAGYKHVGLSASTEKAELYASEVELRQDVSDLLSARRALRQSRRNRKTRYRAPRFNNRLRTKRKGWLAPSVENRINAHLSRIEAVLRLLPVTKISVETASFDMQLLKNPDIAGKEYPEGEQLGFWNVREYVLCRDRHVCQHCYGRSKDPVLNVHHLESRRTGGDSPGNLITLCETCHKALHRGDITLKAKRGQSFRAEAFMGIMRWEVHNRLRALHPGIEVSNTYGYRTKHARIANGIAKSHCADAFCIAGNLGAERLCEFFFQKQTRRTNRQIHKLSILKGGIRKRNQAPFEVKGFRLFDKVACQGEEGFIFGRRSSGFFDVRKLDGTRISAGISCKKLHLLEKRRTYLTEIRKEEALPPLPEGRGLRA

SEQ ID NO: 17448 - protein, 445 aa, unidentified; identical to SEQ ID NO: 10136
  REGION 1..445: note = Microcoleaceae bacterium UBA9251

SEQ ID NO: 17449 - protein, 512 aa, unidentified; identical to SEQ ID NO: 5549
  REGION 1..512: note = Human gut metagenome

SEQ ID NO: 17450 - protein, 447 aa, Scytonema sp.; identical to SEQ ID NO: 2680

SEQ ID NO: 17451 - protein, 512 aa, unidentified; identical to SEQ ID NO: 9077
  REGION 1..512: note = Human gut metagenome

SEQ ID NO: 17452 - protein, 417 aa, unidentified
  REGION 1..417: note = Human gut metagenome
MPCSPAKARLLLKEKKAIVKRRTPFTIQLTIATGESKQPVTLGVDSGYKHIGLSATTEKAELYASQVELRQDITDLLSARLALRRSRRNRKTRYRAPRFNNRVASKHKGWLAPSVENRIAAHLSRVEAVMRVLPVTAITVETAAFDTQLLKDPDIAGGAYQQGEQLGFWNVREYVLFRDGHVCQHCRGKSKDPVLNVHHIESRRTGDDAPNNLITLCETCHKAFHRGEIELKVKRGKSFKAETFMGIMRWTLFERLKKAHPELSVRNTYGYLTKHKRISHGIAKSHCADAYCIADNLGAKRLEGFFFQKQTRKHNRQIHKLSILKGGLRKKSQAPYEVKGFRLFDKVICKGKEAFIFGRRTSGSFDVRRLDGTRISAGISYKKLRLLEPRTTYLTEFRKEAALPPLHKCRGFRAEFL

SEQ ID NO: 17453 - protein, 426 aa, Actinomadura sp.; identical to SEQ ID NO: 6782

SEQ ID NO: 17454 - protein, 432 aa, Moorena sp.; identical to SEQ ID NO: 16355

SEQ ID NO: 17455 - protein, 431 aa, unidentified
  REGION 1..431: note = Human gut metagenome
MPNKVYVINKHGRPLMPCSPAKARHLLDEGKAKIKKRTPFTIQLVYGSSGYTQEVILGVDAGSKTIGMSTSTKKEEVFAVDVTPRNDVVDLMSTRREFRRARRNRKTRYRKPRFDNRVRSKHKGWLAPSVEVKIQEHITSIKRACRILPVSKVVIETAEFDLQLLKAIADGKPVPQGEDYQKGEMYGHYNVRQYVLWRDGYTCQCCGAHTTKKKEVRLHVHHLESRKTGGDAPGNLVTLCDSCHEKLHKGLITEDDFKKRKRRSTRDATFMGIMRKTLMQRLCSELPIPVVKTRGYITKATREKLLVLPKSHTNDALAIAQGKRGFNVGYLPEIAQIDKIYTIRPVRHHNRQLHKATILKGGIRKSNQTEKYVFGYRLFDKVQFNGQDCFIWGRRTTGIFTIKTINRKMIKDGISFKKLKPVEKSTSYLIA

SEQ ID NO: 17456 - protein, 427 aa, Moorena sp.; identical to SEQ ID NO: 5140

SEQ ID NO: 17457 - protein, 235 aa, unidentified
  REGION 1..235: note = Human gut metagenome
LKVFVLNMRGQPLMPCSPAKARHLLKAGKAVVKRRTPFTIQLRIATGETKQNVTLGVDAGAKHVGLSATTEKEEVFASEVELRQDITGLLAARLSLRRDRRHRKTRYRAPRFLNRVRSKHKGWLAPSVENRIQAHMSRIDAVCRLLPVTRIVIETASFDVQKIRNPEVEGTGYQQGDQLGFWNVREYVLFRDSHVCQHCHGHSKDKILNVHHLESRQTGGDAPNNLITLCETCHK

SEQ ID NO: 17458 - protein, 415 aa, unidentified; identical to SEQ ID NO: 6534
  REGION 1..415: note = Human gut metagenome

SEQ ID NO: 17459 - protein, 419 aa, Moorena sp.
MQNYIFIIDTNKQPLNPISPKKARRLLEKGKAAVFRMYPFTIILKTAIDNPTISPCQIKIDPGSKKTGFALVQDDQVIWGMELEHRGGLIKKKLDYRGAARRGRRNRNTRYRKPRFLNRKRPKGWLTPSLEHRILTIQTWVKRLIKFCPVNEIWVERVKFDTQKMQNPEINGVEYQQGELAGYEVREYLLEKWGRECAYCGKQNIPLQIEHIHPKSKGGSDRVSNLCLACEKCNQRKGNKPIEEFLKKKPSLLQKIKTKAKQSLKDPAAVNATRNKLVKVLRRMKPVVTGTGAQTKYNRTKLGFPKEHWIDAACVGDIKPLSLRTTQPLLVNCKGQGGRQKAALNKYGYPIRHNPLKPIKGWMTGDIARHQKLGIGKVTPRSKGSFGFTPLGMKGYKSCKSQDISAIHRKDGYIYSFCK

SEQ ID NO: 17460 - protein, 451 aa, unidentified; identical to SEQ ID NO: 5203
  REGION 1..451: note = Human gut metagenome

SEQ ID NO: 17461 - protein, 402 aa, unidentified
  REGION 1..402: note = Human gut metagenome
CRRQRRAKANGTISKKCVKQDTAQSKNPSKRAKEIGVIKRHLPGCKKDVLCVGIKNKEAKYTNRARLEGWLTPTANQLLQTHINLVKKIQKFLPISDAVLEVNKFAFMRLDNPNIQKWQYQQGPLYQKGSLENAVSEMQEHHCLFCEKPIEHYHHVVPKSENGSNTIANIVGLCAEHHNLVHKDVAWQEKLVEEKTGLNKKYGALSVLNQIIPALTKELSFLFPKHSFMTNGKSTHDYRAAHGISKDHWLDAYCIACSVLPIDVCDSTINNCVPYELKQFRRHDRRALNNENMNRVYTLNDKVVATNRHKATEQEAASLEEFRKEHPNDVCKLKVKEHHPTYRNMNRNYPGSVFLVGKQIHVMQGIASSKDGKATKYNDTRATTIAAGKCKFVAKNSGILFV

SEQ ID NO: 17462 - protein, 493 aa, unidentified; identical to SEQ ID NO: 2644
  REGION 1..493: note = Human gut metagenome

SEQ ID NO: 17463 - protein, 411 aa, unidentified; identical to SEQ ID NO: 2606
  REGION 1..411: note = Human gut metagenome

SEQ ID NO: 17464 - protein, 431 aa, unidentified; identical to SEQ ID NO: 4463
  REGION 1..431: note = Human gut metagenome

SEQ ID NO: 17465 - protein, 442 aa, unidentified
  REGION 1..442: note = metagenome
MSTSVFVLDKKHRPLMPCRPARARRLLRAGRARVVKRFPFVIRLVDRTVEQSEVQPVLIKLDPGSRETGAAVVRDDEKKRHHALAFFVIKHRGGAIRDALKARSAFRRRRRSQNFRCRSPRFLNRVKPKGWLPPSLRHRVETTLSFVRRMCRYLPVSGIAAELVKFDSQKLQNPEVSGVKYQQGTLFEYEVREYLLEKFGRKCVYCGAEGVPLNIDHVVPRAKGGSNRVSNLVLACVSCNQKKGARSLEDFLKGKPEVLARVRRELKTPLRDAAAVNATRWVLFNELKATGLPVETGSGALTKFNRHAFGVEKEHWLDALCVGRLNGAVTRKGLNVLEIRCMGRGSRQRTRLTKYGFPRGYLMRQKCVHGFATGDMVEANVPKGKKAGLWRGRVAVRVSGSFNIQTPKGVIQGVGWKHCRLISHNDGYGYAWLGHAPHSSPA

SEQ ID NO: 17466 - protein, 428 aa, unidentified
  REGION 1..428: note = Human gut metagenome
LKVFVLNMRGQPLMPCSPAKARHLLKAGKAVVKRRTPFTIQLRIATGETKQNVTLGVDAGAKHVGLSATTEKEEVFASEVELRQDITGLLAARLSLRRDRRHRKTRYRAPRFLNRVRSKHKGWLAPSVENRIQAHMSRIDAVCRLLPVTKIVIETASFDIQKIKDPSVEGTDYQQGDQLGFWNVREYVLFRDGHVCQHCHGRSKDKILNVHHLESRQTGGDAPNNLITLCETCHKAYHAGKIKLKVKRGQSFRAEAFMGIMRWTLLDRVRKAHPGLPVENTYGYLTKHTRIPHGLPKTHCVDAYCIAGNLKAVRRGVYLHQRQMRKHNRQIHKFTVLSKRLEDGTKIGYRKLNQSPYLVHSFRLFDKVRCLGQIGFIFGRRSSGYFDVRRLDGVKLSPSISWRKLTLLEKRSTYLTELRKQDGASSPV

SEQ ID NO: 17467 - protein, 465 aa, unidentified; identical to SEQ ID NO: 3070
  REGION 1..465: note = Human gut metagenome

SEQ ID NO: 17468 - protein, 418 aa, unidentified; identical to SEQ ID NO: 4327
  REGION 1..418: note = Human gut metagenome

SEQ ID NO: 17469 - protein, 458 aa, Scytonema sp.
MMMTNSIFVLSKNGKILKPTTPVRARILQAQGKARKLRLFPFTLILESMVDENVEPYLELRLDPGSKLTGITLVDLKKNEVVWAMELEHRGLAINMEMIKRAGVRGSRRTRRLRYRKKRFDRKKPLGWLAPSLRHRLLTTQTWIKRLLKIAPIKSIAIESVKFDLQKLETPDIEGIEYQQGTLFGYTLREALLEHWGRECVYCGKTDVPLQIEHIHSRSQGGSDRFSNLTLSCEKCNQKKGNQPVEQFLQDKPEILKKIKSHQKQSLSDASAVNSTRKAIFEMAQQFGLPVISGDGASTKMIRIQSQLPKLHWIDSACVGTSEIVKLRICQPLRVTCKGHGTRQVQRVNAKGFPAIASIKKNHITGKKEVKLVSRNQKYTHATAGDYVICNLLKDRKHVRAGIYRARVKTPTPKGVEVLINGHRIAVDRQYVKLIHRSDGYEYSFTTIDQDLLRFSAI

SEQ ID NO: 17470 - protein, 472 aa, unidentified; identical to SEQ ID NO: 4432
  REGION 1..472: note = Human gut metagenome

SEQ ID NO: 17471 - protein, 420 aa, unidentified
  REGION 1..420: note = Human gut metagenome
MQYVYVLSKHGEPMMPCSPGKARLLLKQQKACAVRRTPFTIKLLYGSAGYKQPITLGVDAGSKHVGLSASTEKRELYREEFTPRNDVVELLSTRRQNRRSRRNRKTRYRAPKFDNRVHSKHKGWLAPSVEVKIQEHITIIKRICKILPISLVRVETAEFDTQRLKAMLAGKPLPVGTDYQLGEMYDEYNVRQYVLKRDNYTCQCCGAHTTAKKLVKLHVHHLESRKTGGNAPSNLVTLCTTCHKNLHKGKVTLDGKERGKPLRDAAFMGIMRKTLMARLKKELPIPVQGTYGYITKMRREQNDIKKSHTNDARCISKHPLAEPCSVCYRTKAIRHHNRQTHKANFSKKGIRKRSQMPYLVEGYRLWDKVLYKEQECFVSGRRSSGSFTLKKLDGTSVSKGVTFKKLRLLEPATNYLIERM

SEQ ID NO: 17472 - protein, 512 aa, unidentified
  REGION 1..512: note = Human gut metagenome
MSTVYVLNKDGKPLMPTTRCGHVRRLLKEQKAQVVTSKPFTIQLLYETDDVVQPLYLGIDPGRTNIGVAVVKIDGTAVFTAHLETRNKEIPKLMQGRKKARRARRTNGRRCRRQRRAKANGTISKKCVKQATAQNGSVSKRAKKIGVIKRHLPGCEKEVLCIGIKNKEAKFSNRARPEGWLTPTANQLLQTHINLVKKIQKFLPISDVVLEINKFAFMRLDNPNVQKWQYQQGPLYQKASLEEAVSEMQEHHCLFCKKPIAHYHHVVPQSENGSNTIGNIVGLCTKHHDLVHKDTTWQKKLTKKKTGLNKKYGALSVLNQIIPALMKELSSLFPKRFFATNGKSTYDYRAAHGVSKDHWLDAYCIACSVLANDVCDSNINSHVPYELKQFRRHDRRALHKENMSRVYTLNGKSVATNRHKAIKQTTDSLEEFRQRQPNDVCKLKVKEHHPEYRNPKRNFPGCVFLVGKHTHVMQGTSGSHNGKADGYYDTNGNSYSSGKCKFVVKNEGIVFT

SEQ ID NO: 17473 - protein, 507 aa, unidentified
  REGION 1..507: note = Human gut metagenome
MSEYIYVIGMDGDPQMPTKRKRHVEKLLQTGRARVFRQVPYTIQLTYKNQPVLQPVTIAEDPGRSNIGMAVVSLSGELLSAAVVQTRNKEIVKLMEKRKLHRRASRNGERKARQRLAKRCHTMLKAGFLMRKLPMYRKDKRVKCLVIRNTEARFCNRKREDGWLTPSAEHLVRTHINLIHKMQKFLPITDVAIEINRFAFLSLEDPSISGVDFQKGPLKGYDDLNAAVEDLQDGHCLMCDSPIEHRHHIVPRSMQGSNTIGNIAGLCYKCHERVHKDARFEDRLKKKKAGLDKRYAAVSALNQAIPFICKRLEQEFGKEHVHYCSGRDTAMVRRSFGYYKTKEEQLHEVDAWCIAVLSLQQVPEKAPEFDHVHEILQFRRQDRSIINAQTSRRYYHEGKKIAKNRKKAEGQREDSLQEWRKRQVERYGEEQTRKMISQLKVKKSIRRYNRLNRLMPGAVFYYQGVRYVMRGQHCEGTYLQAVGMGSKDFPAKKCKIVANNEGLVFVS

SEQ ID NO: 17474 - protein, 512 aa, unidentified
  REGION 1..512: note = Human gut metagenome
MPTVYVLNKDGKPLMPTTRCMHVRHLLKNGKARVVKSKPFTIQLLYETDDVVQPLYLGIDPGRTNIGVAVVKADGAVVFTAHLETRNKEVPKLMKKRKESRCARRTNGRRCRRQRRAKTNGTISKKCVKQTTAQNGSVSKRAKEIGVIKRHLPGCEKDVLCIGIKNKEAKFTNRARPEGWLTPTANQLLQTHINLVKKIQKFLPISDVVLEVNKFAFMQLDNPNIQKWQYQQGPLYQKGSLENAVSEMQEHHCLFCEKPIEHYHHVVPKSENGSNTIANIVGLCTEHHNLVHKDATWQKKLAKEKVGLVKKYSALSVLNQIIPALTKEMNSLFPKHFFVTNGKSTYDYRTAHGVSKDHWLDAYCIACSVLPNDVCDSNINSHVPYELKQFRRHDRRVLHKANMSRVYTLNGKTVATNRHKAIKQTTDSLEEFRQSHPGDVCKLKVKEHHPAYRNLNRNYPGSVFLVDGQVHVMQGVSGSHNGKADGYYNTNGNAYPYYKCKFVVKNEGIVFA

SEQ ID NO: 17475 - protein, 442 aa, unidentified
  REGION 1..442: note = Human gut metagenome
MSTSVFVLDKKHRPLMPCRPARARRLLRAGRARVVKRFPFVIRLVDRTVEQSEVQPVLIKLDPGSRETGAAVVRDDGKKRHHALAFFVIKHRGGAIRDALKARSAFRRRRRSQNLRCRSPRFLNRVKPKGWLPPSLRHRVETTLSFVRRMCRYLPVSGIAAELVKFDSQKLQTPEVSGIEYQQGTLFEYEVREYLLEKFGRKCVYCGAEGVPLNIDHVVPRAKGGSNRVSNLVLACVSCNQKKGARSLEDFLKGKPEVLARVRRELKTPLRDAAAVNATRWVLFNELKATGLPVETGSGALTKFNRHAFGVEKEHWLDALCVGRLNGAVTRKGLNVLEIRCMGRGSRQRTRLTKYGFPRGYLMRQKCVHGFATGDMVEANVPKGKKAGLWRGRVAVRVSGSFNIQTPKGVIQGVGWKHCRLISHNDGYGYAWLGHAPHSSPA

SEQ ID NO: 17476 - protein, 499 aa, Acidithiobacillus sp.; identical to SEQ ID NO: 11760

SEQ ID NO: 17477 - protein, 452 aa, Moorena sp.; identical to SEQ ID NO: 3322

SEQ ID NO: 17478 - protein, 428 aa, unidentified; identical to SEQ ID NO: 5055
  REGION 1..428: note = Human gut metagenome

SEQ ID NO: 17479 - protein, 453 aa, Lactobacillus sp.; identical to SEQ ID NO: 4050

SEQ ID NO: 17480 - protein, 512 aa, unidentified
  REGION 1..512: note = Human gut metagenome
MSTVYVLNKDGKPLMPTTRGGHVRHLLKEQKARVVRTNPFTIQLLYEADNLVQPLYLGIDPGRTNIGVAVVKTDGTAVFTAHLETRNKEIPKLMQGRKKARRARRTNGRRCRRQRRAKANGTISKKCVKQATAQNGSVSKRANEIGVIKRHLPGCEKEVLCIGIKNKEAKFSNRTRPEGWLTPTANQLLQTHINLVKKIQKFLPISDVVLEINKFAFMRLDNPNVQKWQYQQGPLYQKASLEEAVSEMQEHHCLFCKNTIDHYHHVVPQSENGSNTIGNIVGLCTKHHDLVHKDTSWQEKLAKKKTGLNKRYGALSVLNQIIPALTKELSSLFPKHFFATNGKSTYDYRAAHGVSKDHWLDAYCIAGSVLPNDACDNNINNHVPYELKQFRRHDRRALHKENMGRVYTLNGKSVATNRHKAIKQTTDSLEEFRQRQPNDVCKLKVKEHHPEYRNPKRNFPGCVFLVGKHTHVMQGTSGSHNGKADGYYDTNGNSYSSGKCKFVVKNEGIVFT

SEQ ID NO: 17481 - protein, 424 aa, unidentified
  REGION 1..424: note = Human gut metagenome
MRVFVLNMRGEPLMPCSQRKARLLLKSIKAVIYKYNPFTIQLTYATGEAKQDCHIGIDTGSKHIGVAITSEDKVLWKCEIELRQDVKSNIDAKRIYRRSRRSRKIRYRKPRFLNRKRNDEWLPPSLQNRINHTFHWIDTLSSLIPKPILHIEVGKFDTAKMINPEIHGVDYQHGQTYGFFDERYYVFARDNYTCQCCGKSKNKILNTHHIIYRSNGGTDRVDNLITVCTDCHTSQNHKKGGIFYKWQEQHKKVKQYKEPPFMNTLRKRIFAAYPSAEITYGAETTPKRKAMKLDKTHYNDAIIISGINEINENPEEWLLIKQFRKKKRSLHEATARKGRKTPNRNQVRNCKNVPYYKGFYLNDKVSIFGKSGHVTGFTTSGAYVKDDNGNYITLPNKSYKQVSINKMRLKCHNNNWQYMTKRAV

SEQ ID NO: 17482 - protein, 477 aa, Moorena sp.
MWLNSSEGKEQCCIHGNLEITLGKDSHSLRRGQFCQSLTVTTTRKETTSMYVYVLNQHGEPLMPCSPRKARTMLRDHKATVVRRTPFTIRLLHRSSEYKRDITLGVDAGSKFIGLSACTESKELFAAEVKPRNDVVDLLSTRRELRSSRRSRKTRYRAARFNNRVHSKHKGWLAPSAEVKIQEHITAIKRTCAILPISMVIVETAEFDTQRLKAMLEGKPLPVGTDYQLGEMYDEYNVRQYVLKRDNYTCQCCGIQSTDKAPVKFAVHHKESRRIGGNAPNNLITLCEKCHRLLHAGVITLEEGKRKRGKSFRDAAFMGIMRKTLIQRLRNELSVPVKETYGYITKLLRETHAIQKSHVNDARCIARVPDAQPSDTLYRIRAVRHHNRQLHKVNPIKGGIRKRNQAPYKVFGFRLWDKVLFNGQECFITGRRVSGYFALKNFDGKKVHTGAPYTALTIVESSTSYLIERRTAVSSRG

SEQ ID NO: 17483 - protein, 447 aa, unidentified
  REGION 1..447: note = Human gut metagenome
MKVFVIGMTGKRLCPTSPSKAKKLLKTGKAHVYRRVPFTIRLDYKTGGSAPPLKLGIDTGEQHIGTAVCNDATVFCKSEIELIKSMEKKKRLEKRKIYRRSRRYRKTRYRHPKFRFRTKRIYVEGGYRKRKGGKMVLRHWKKVPNTVMTNRHEGWLPPSIESKVKHHIDWINRYMDVLPDGTMLGIEVARFDIARMKDPSIRGELYQFGRMYGRENTKAYVLAKFDYTCPICKKKFDRDRKPRMHHVTMRKNAATDNPDEYAPVCVLCHSGEEHLPGGVLDKLAKECRRREYREPTFMNILRRRLFETYPEAEFTYGNITNADRKMLGLEKTHANDAVSIAMHGAKKVIDCEDTVYYRQVHRKKRSLHEATPRKGKKEPNHTAKRNVKNVPYVGKFHINDKVKGPDGNIEYLLHMRKTETMENGHTMTDQIKEVVDASHADLAKNKE

SEQ ID NO: 17484 - protein, 219 aa, unidentified
  REGION 1..219: note = Human gut metagenome
LQFYRKEHGIMQYVYVLNKHGEPLMPCPPGKARILLKQQKAYVVKRTPFTIKLLYGSAGHKQPVTLGVDAGSKHVGLSASTETHELYCEEFTPRNDVVELLSTRRQNRRSRRYRKTRYRAPRFNNRVHSKHKGWLAPSVEVKIQEHITVIKRICRILPITLVRVETAEFDTQRLKAMLAGKPLPVGTDYQLGEMYDEYNVRQYVLKRDNYTCQCCGAHT

SEQ ID NO: 17485 - protein, 469 aa, Moorena sp.
LDVFVVDRHGKPLMPCHPARARQLLRQRRAVIHRHVPLVIRLKDRRWEECSVQPVRVKLDPGSKTTGVAIVRESNAVDPDTGEVQRQTTVLALIELVHRGRQISEALTARRQMRRRRRRSLRYRAPRFLNRSKPKGWLAPSLQHRVDTTMAWVTRLSRWAPVTALSSELVRFDMQQMQNPEIEGVEYQQGTLAGYEVREYLLEKWGRKCVYCDAAQTPLQIEHLQPRARSGSNRISNLALACGPCNLKKAAQPLDAFLAKDPLRLARIQAQAQRPLRDAAAVNATRWALAGTLKGTGLPLELASGGRTKYNRSRFEIPKTHALDAACVGDVDEVTKWQQPTLQVNCTGRGSYQRTRLDKYGFPRGYLMRQKSIKGFQTGDRVRAVVPASSKKAGMYTGRVAVRASGSFNIQTGSEVVQGISYKYCRLIQRGDGYSYTRIASLKGVAGTGHVNHAALSLPALKGEVSRAK

SEQ ID NO: 17486 - protein, 417 aa, unidentified
  REGION 1..417: note = Human gut metagenome
MPCSPAKARLLLKEKKAIVKRRTPFTIQLTIATGEAKQPVTLGVDSGYKHIGLSATTEKAELYASQVELRQDITDLLSARLALRRSRRSRKTRYRAPRFNNRVASKRKGWLAPSVENRITAHMSRVEAVMRVLPVTAITVETAAFDTQLLKNPDIAGAAYQQGEQLGFWNVREYVLFRDGHVCQHCRGKSKDPILNVHHIESRRTGGDAPNNLITLCETCHKAFHRGEIKLKVKRGKSFKAETFMGIMRWTLFERLKKAHPELSVRNTYGYLTKHKRISHGIAKSHCADAYCIADNLGAKRLEGFFFQKQTRKHNRQIHKLSILKGGLRKKNQAPYEVKGFRLFDKVICKGEEAFIFGRRTSGSFDVRRLDGTRISAGINYKKLRLLEPRTTYLTEFRKEAALPPLHKCRGFRAEFL

SEQ ID NO: 17487 - protein, 457 aa, unidentified; identical to SEQ ID NO: 5177
  REGION 1..457: note = Human gut metagenome

SEQ ID NO: 17488 - protein, 406 aa, unidentified
  REGION 1..406: note = Human gut metagenome
LRVFVLNKRGKPLMPCSPAKARLLLKEKKAIVVRRTPFTIQLTIATGESKQPVSLGVDAGYKHVGLSASTEKAELYASEVELRKDITDLLSARRALRQSRRNRKTRYRAPRFDNRIRTKRKGWLAPSVENRINAHLSRIEAVLRLLPITKITVETASFDMQRLKNPDISGKEYQEGEQLGFWNVREYVLFRDGHVCRHCHGRSKDPVLNVHHLESRRTGSDSPDNLITLCETCHKALHRGEITLKAKRGQSFRAQAFMGIMRREVLNRLKASYPELKVHETYGYLTKHARIANGIVKSHGADAFCIAGNLGAESSANSSSRSRLAETTGRFTNFPSSKGAFESAIRHPLRPKASVFLIRLPAREKKASFSAVDHPGLLMYESSTAPAFQPASAARSCVCWKRDEPI

SEQ ID NO: 17489 - protein, 425 aa, Clostridium sp.; identical to SEQ ID NO: 2429

SEQ ID NO: 17490 - protein, 424 aa, unidentified; identical to SEQ ID NO: 11329
  REGION 1..424: note = Human gut metagenome

SEQ ID NO: 17491 - protein, 238 aa, unidentified
  REGION 1..238: note = Human gut metagenome
MYDEYNVRQYVLKRDNYTCQCCGAHPTEKKPVRLHVHHLESRHVGGNAPSNLITLCVACHKALHEGKITLDKGKKRGKPLRDAAFMGIMRNTLLARLKDELNIPVKQTYGYITKLLREKNKISKSHVNDARCIAKAPNAKPCDTMLYTRALRHHNRQIHKAKILNGGIRKKNQAPYLVKGFRLWDKVRYNGEECFITGRRSSGYFALKKYDGTVISNSASYKKLMLLEAATNYITERS

SEQ ID NO: 17492 - protein, 413 aa, unidentified; identical to SEQ ID NO: 2636
  REGION 1..413: note = Human gut metagenome

SEQ ID NO: 17493 - protein, 465 aa, unidentified
  REGION 1..465: note = IscB polypeptide
MQKLGERKTYTPRNTSLVPCSVTRSLNREETLSEMSLKTSSNNPEVNLRQHTCGLKDKVYVKSVDGQVLMPCSNAKARHLLESGKAKVVRKYPFQIQLLFVCENKVQDVVLGVDTGYENIGFSAVSGKEELLGGTMKLENKMSSRLLEKKMYRRGRRNKLWYREARFNNRVKKGWLAPSVERRINTHVELVKRICKLLPISKVNVEGANFDIQRIENPNVEGKGYQQGSLYDYENVKAFVVAREEGKCQLCGREYDDNGWHLHHIIPRGQGGTDRPKNQALLHNKCHDKLHKQKLYKKLKKEKQYKAETFMSTTRLKILERISKIHPNVNISYGYETKVKRIEQGLEKIHSNDAFIIADGTEQVRSKEYILEQKKRNNRVLQLNRNRYKPSIRKQRSVIQPKDIFWVNGIKYIAKGMFNYGKYILYGDVKKKEYFKIEKVEKYFNINSWQFIPRLKAGVFLPQRG

SEQ ID NO: 17494 - protein, 506 aa, unidentified
  REGION 1..506: note = Human gut metagenome
MSTVYVLNKDGKPLMPTTRGGHVRHLLKEQKARVVRTNPFTIQLLYETDNLVQPLYLGIDPGRTNIGVAVVKTDGTAVFTAHLETRNKEIPKLMQGRKKARRARRTNGRRCRRQRRAKANGTISKKCVKQATAQNGSVSKRANEIGVIKRHLPGCEKEVLCIGIKNKEAKFSNRTRPEGWLTPTANQLLQTHINLVKKIQKFLPISDVVLEINKFAFMRLDNPNVQKWQYQQGPLYQKASLEEAVSEMQEHHCLFCKNTIDHYHHVVPQSDNGSNTIGNIVGLCTKHHDLVHKDTSWQEKLAKKKTGLNKRYGALSVLNQIIPALTKELSSLFPKHFFATNGKSTYDYRAAHGVSKDHWLDAYCIAGSVLPNDACDNNINNHVPYELKQFRRHDRRALHKENMGRVYTLNGKSVATNRHKAIKQTTDSLEEFRQRQPNDVCKLKVKEHHPEYRNPKRNFPGCVFLVGKHTHVMQGTSGSHNGKADGYYQTKAGKAHDFNRGRCQMN

SEQ ID NO: 17495 - protein, 470 aa, Thermoanaerobacterium sp.; identical to SEQ ID NO: 6736

SEQ ID NO: 17496 - protein, 502 aa, unidentified; identical to SEQ ID NO: 2616
  REGION 1..502: note = Human gut metagenome

SEQ ID NO: 17497 - protein, 818 aa, unidentified
  REGION 1..818: note = Human gut metagenome
LVWNVQAPWDVHPSPTLCGLCLKVLRGRNGDADKKPIPTLTKDENRPSGRTTGLRAEQAEPAGIRKGDTLKVFVLNMRGKPLMPCSPAKARHMLKAGKAVVVRRTPFTIKLTIATGETKQDVTLGVDAGARHVGISATTEKEEVFASEAALRQDITGLLADRLAFRRARRNRKTRYRSPRFNNRVRSKHKGWLASSVENRIQAHMSRIDAVCRLLPVTKIVIETASFDIQKIKDPSVEGTDYQQGDQLGFWNVREYVLFRDGHVCQHCHGRSKDKILNVHHLESRQTGGDAPNNLITLCETCHKAYHAGKIKLKVKRGQSFRAEAFMGIMRWTLLDRVRKAHPGLPVENTCGYLTKNTRITPGLPKAHCVDACCIAGNLKAVRRGVCLHQRQMRKHNRQIHKCTILLQTLEDGTKIGYRKLNQTPHMVKNFRLFDKVRCLGQTGFIFGRRSSGCFDVRRLDGVKLSSGISYRKLTLLEKRGTHLTELIKEDGASSSVRRQRFLRRVSMNKPCTYLLSALMASAVLAPVAALAADKSELEVRMEAAQKVLADRSYYERWSPEAALKTVEDAKAANEAGSARQKEIDGALDVMKDWCHTRFLANACIKDARDLHHEREKEIRSVRLKADEMIRLDRVEQRRARQESQKQNVKQPMKLGGSTESPESRSESRAEEVKTKQSRAEERRALEEANVRAYEEKQARAARKAEERHDPIRVKSRVKAPSSPIEGHLGRTAADVEAGRAEAAERMAQEDANIAAFNAKQAEAKKRLEEAEATAAERKASREARQANFNKTLEERRAAQKRYEESRENKDSGLKKYF

SEQ ID NO: 17498 - protein, 423 aa, Arthrospira sp.; identical to SEQ ID NO: 5991

SEQ ID NO: 17499 - protein, 450 aa, Clostridium sp.; identical to SEQ ID NO: 10517

SEQ ID NO: 17500 - protein, 507 aa, unidentified; identical to SEQ ID NO: 17473
  REGION 1..507: note = Human gut metagenome

SEQ ID NO: 17501 - protein, 442 aa, unidentified; identical to SEQ ID NO: 3791
  REGION 1..442: note = Human gut metagenome

SEQ ID NO: 17502 - protein, 451 aa, Moorena sp.; identical to SEQ ID NO: 15900

SEQ ID NO: 17503 - protein, 413 aa, unidentified; identical to SEQ ID NO: 5705
  REGION 1..413: note = Human gut metagenome

SEQ ID NO: 17504 - protein, 333 aa, unidentified
  REGION 1..333: note = Oil field metagenome
MWTYRYIADLFPKGDLRMVYVLSKDETPLMPTKRHGKVKHLLREGKAKVVRNKPFTIQLTYDTTHYTQPITLGIDSGHKYIGFSAVTGKEELLSGEVELRDDISELIKEKVMYRRIRRSRLRYREPKFDNRVSSRKETPRKGFKEGWLAPSIKHKLDTHIRFIEFIKKILPITDIIIEVAKFDTQKIKNPEIKGKEYQQGEQRDFYNLREYILYRDNYTCQLCGKSNVPLEVHHIGFWKGDRTNRPSNLITLCTKCHDPKNHLKGGKLYGMEPVQKPLKEATFMTTVRWKLVDMLGCGYTYGYITKVRRIALNLDKTHYNDAFVLQVELIKEE

SEQ ID NO: 17505 - protein, 447 aa, unidentified; identical to SEQ ID NO: 5937
  REGION 1..447: note = Human gut metagenome

SEQ ID NO: 17506 - protein, 408 aa, unidentified; identical to SEQ ID NO: 6548
  REGION 1..408: note = gut metagenome

SEQ ID NO: 17507 - protein, 452 aa, unidentified; identical to SEQ ID NO: 12783
  REGION 1..452: note = metagenome

SEQ ID NO: 17508 - protein, 409 aa, Moorena sp.
MRVYVKNLNGNPLMPCKPAKARKLLRDGKAKVVNRCPFTIKLQWDCEENVQDVTLGIDKGSYLTGISCVGNGKILMSGEVHHRTDIKDKMDARRANRRKRRSRKWYREKRFLNRASSKRSGRLPPSIKAQSEEVIRVVRKIPLPISHIVVEDVQVDIARLNNPLTIGKAYQKSNRLDENLRIATLLRDGYQCTQCEKKNIQLDAHHIIWKEDGGKDTIQNLITLCKSCHDKVHRGKLKLDVEGVSGFFDQIAQRTMQGKTYLYEKLSQIAKFKKVFGYQTSAYRKSLSLPKTHDIDALCVAILETGEVITVSRENFYKINFRPRQTRRQYHDLPRKGVGRVRYQVNCELEGFRKGDIVRVKGKWVKQINSIYSNGYLAFARVDGEPTAAKPKDCKLLKRGQTVIWEKAV

SEQ ID NO: 17509 - protein, 440 aa, Microcoleus sp.
MKPSRSELYPEREDIMSNFVFIIDANKRPLTPIHPGFARRLFKQKKAAIYRKFPFTLILKESRSDLTVPDLQLKIDPGSRVTGFAILNGAKVIWAAELTHRGQAIKNALLSRSQLRRVRRNRHTRYRQPRFLNRTCPQGWLAPSLQHRVETTLTWVNKLIKFAPTNSITQELVRFDLQQLAHPEISGIEYQQGTLLGYEVREYLLEVWERKCAYCGIKNVPLQVEHIHPKAKGGSNRISNLCLACDTCNNNKGTQDIKQFLAKKPDVLKRIQAQRKRPLKDATAVNSTRWTLLNRLKETGLPVATGSGGRTKFNRTRLQLPKSHWLDAACVGKVEELNVLTSQPLLIKAMGHGTRQMCGTDKFGFPIRHKSRKQIHFCFQTGDIVSATVTAGKKIGCYTGRVLCRASGSFDIATTTGRVAGISHKYCRAIHKKDGYSYGF

SEQ ID NO: 17510 - protein, 419 aa, unidentified
  REGION 1..419: note = Human oral metagenome
MLVYVLKQNGQPFMPTSRFGKVRRLLKEKKAKVVRREPLTIKLLYEPETNMVQECYCGVDTGSKHVGVAVVGNDKVLYQSQTELRDDITRKMERRRDFRQNRRFRKTRYRKCRFLNRRNSIKKDRLPPSVKHKVQAHIDEIEFCKKILPMSDLILEVSQFDTALMKNPSLINEKVRHWGYRQGFNYGYSSRRSAILHRDNYTCQCCGKKNCRLEVHHINFRSNGGTDDEENLITLCKECHKGVHAGTVVLNKKPKKNKSLKHATHMSIIRSQLLKKYPDAIETFGFVTSENRSHLHLEKDHYIDACVIASGGLEFEPSATVYYKRRMSKGEYQLIRKCCGKEYVCKGKILGFKSFDKVEYFGVKCFIWKRRNNGYATLGDIFNNILDFSYLPRGYKTPKMALLKRISSRKTVNIICCTR

SEQ ID NO: 17511 - protein, 414 aa, unidentified
  REGION 1..414: note = metagenome
MPCSPAKARLLLKEKKAIVKRRTPFTIQLTIATGETKQPVSLGVDAGYKHVGLSASTEKAELYASEIELRQDITDLLSARHELRRARRNRKTRYRGPRFDNRIRTKRKGWLAPSVENRINAHLSRIEAVLRLLPVTKITVETASFDLQLLKNPDISGKEYQEGEQLGFWNIREYVLCRDGHVCQHCYGRSKDPVLNVHHLESRRTGGDSPGNLITLCETCHKALHRGEITLKAKRGQSFRAEAFMGIMRWEVHNRLRALHPGIEVSNTYGYRTKHARIANGIAKSHCADAFCIAGNLGAERLCEFFFQKQTRRNNRQIHKLSILKGGIRKRNQAPFEVKGFRLFDKVACQGEEGFIFGRRSSGFFDVRKLDGTRISAGISYKKLHLLEKRRTYLTEIRKEEALPPLPEGRGLRA

SEQ ID NO: 17512 - protein, 415 aa, unidentified; identical to SEQ ID NO: 6883
  REGION 1..415: note = Human gut metagenome

SEQ ID NO: 17513 - protein, 393 aa, Geobacillus sp.
LFVYIINKHGKPLMPCSPRKARLLLKQKKAKVVRRTPFTIQLLYGSSGYKQPVSLGVDMGTRHVGISATTKKDVLFEAEAQLRTDIVELLAIRRQFRRSRRNRKTRYREARFLNRRKPEGWLPPSIQHKINSHIKLIDLVHNILPVTSVTIEVAAFDTQKLKNLNIRGVEYQQGEQMGFWNVREYVLYRDNHTCQYCKGKKKDPVLQVHHIESRKTGGDSPDNLITLCKTCHHEIHEKGLEHIFQRKRPPMRDASQMTAMRWAMFSRIREKYSHANITYGYITKCIRIANGLSKSHMVDARCISGDPLAKPSGTVYLLKFVRKNNRQLHKATILKGGKRKSNKAPRFVKGFQLFDKVVYERKECFIFGRRSSGYFDLRLLDGTKVHASASWKS

SEQ ID NO: 17514 - protein, 428 aa, unidentified
  REGION 1..428: note = Human gut metagenome
LKVFVLNMRGRPLMPCSPAKARHLLKAGKAVVRRRTPFTIQLRIATGETKQSVTLGVDAGAKHVGLSAATEKEEVFAPEVELRQDITGLLAARLSLRRERRQRKTRYRAPRFLNRVRSKHKGWLAPSVENRIQAHLSRIDAICGLLPVTKIVIETASFDIQKIKHPDVEGTDYQQGDQLGFWNVREYVLFRDGHVCQHCHGHAKDKILNVHHLESRQTGGDAPNNLITLCERCHKACHAGKIKLKVKRGQSFREEAFIGIMRWTLLDRVRKAHPGLPVENTYGYLTKNTRITLGLPKAHCVDAYCIAGNLKAVRRGVHLYQRQVRKHNRQIHKCTVLSKTLKDGTKIGYRKLNQTPHLVKNFRLFDKVRCLGQTGFIFGRRSSGYFDVRRLDGVKLSSGISYRKLTLLEKRSTYLTELRKEDGASSPV

SEQ ID NO: 17515 - protein, 442 aa, unidentified; identical to SEQ ID NO: 2903
  REGION 1..442: note = Human gut metagenome

SEQ ID NO: 17516 - protein, 429 aa, Parasutterella sp.; identical to SEQ ID NO: 4241

SEQ ID NO: 17517 - protein, 484 aa, Deinococcus sp.
VTRRPAKRVNDLKLHTDECLASLSLCGSKRTKPPGNSPHFETNRHFNSRRNLHGACAQGTHMSSRAFVLNPDHSPLMPCTAKRARMLLTAGRAAVWRRYPFTIILKETSGTQSQPLALKIDPGSKTTGMALVLDGKNGKRCIWGAELTHRGRAIKLKLLARRALRSSRRSRKLRYRPARFLNRTRPAGWLPPSLMHRVLTTLSWARKIDRSTMMDSIAMELVSFDMQKMESPDIRGVEYQRGTLLGTEIRAYLLNKWDGLRAYCGKEGREVEHLTPRSRGGSDRVSNLVLSCRACNEKKGNQELGEFLAKKPAILRKIQTQQKAGLHDTAAVNATKTRLLGELRQFGCPFPLGIGAQTSFNRQAQEYDKAHWIDAACVGESGAAVAVQRRKPLLIKSMGRGNRQVCGTDRYGFPVRHRTHQKVFFGFQTGDIVRAVVTVGKKAGTYTGRVSVRATGSFRLPQVDSIHHRFFSTLHKGDGYGYSF

SEQ ID NO: 17518 - protein, 518 aa, unidentified; identical to SEQ ID NO: 6562
  REGION 1..518: note = Human gut metagenome

SEQ ID NO: 17519 - protein, 457 aa, unidentified
  REGION 1..457: note = Human gut metagenome
MDAVAVISASGKPLMPTNPMRARKLIKKGKAVIYKYRPLFTIRLTERTDGDIQTIEYCCDTGYQHIGLSIKSRKHEYVNEQRDLLPNETERHNDSRKYRKARRRRKLRHRACRRDNRHDNQICKDGYAPSIRNKRDQHISLYRSYTEILPVERAVFEMGQFDTQVLKAIEKGEPLPQGKDYQHGERYGYATLREAVFARDDYTCICCGKNAFKDKRILCIHHLGFRIGDRTNRLANLATVCTKCHTPKNHQPKGKLYNLKPELKDFKGATFMTMVRWDMLDKLKVVSKDIQVDVTYGAATKEARRDLKIKKSHANDAYCMGSFHPSHRTDLKRYEKCRRNNRVLSKFYDATYIDIRDGKKKKANALGCNRTKRRESRRSEKNERIYRGKKVSKGRIVLRTKRAVIRPGDIVYVGKKKYIVASSKNLGAQLKLADGSLLTTSKVTKIIHCGGWKTVTL

SEQ ID NO: 17520 - protein, 417 aa, unidentified; identical to SEQ ID NO: 16366
  REGION 1..417: note = Human gut metagenome

SEQ ID NO: 17521 - protein, 475 aa, unidentified; identical to SEQ ID NO: 4985
  REGION 1..475: note = Human gut metagenome

SEQ ID NO: 17522 - protein, 438 aa, Clostridium sp.; identical to SEQ ID NO: 4933

SEQ ID NO: 17523 - protein, 557 aa, unidentified
  REGION 1..557: note = Human gut metagenome
MIYNLGSTRERGFMKQKKQKVMVYILNKKGKPLMPTTRCGHVRKLLDSKKAVVVNSNPFTIRLKYDTPNGVQDVFAGIDSGRENIGSGVSNEDGDCLYLGELRTSNKSIKMKMTERVGFRRERRKHDRQNKQRKARKDHTEIQNGKDDICRATISCKSVQISYPTAEESVTHKIIRGKEGKFANRHRDGDWITPSARQLVQMHMNDLKSICKILPISHVTLERVAFDFQKLENENIKAWEYGKGKLYGYDSPEEYIHDVQNGKCLVCGKPHIDYLHHIIPRSKGGSDKVSNIAGLCYDCHYGPIGVHNCQDTQDRLPELKNEVNKQYKVSLLNSVMPVLIEEMDKFCKANSIMFSICEGHDTAKVRDMYDLQKDHCIDGFAISLVDRNVKSVDVMPDRIHQKQRYKKKSKNIIQKRNYREYYDDKKLVAINRHKGTDQKADSLEEYMNTYAETHTADECKMHFESLTVKPARRTYTFHKEGRICPLHIGDKVRYEKKNKIKGNTKVDTFICEGIYFSKDENKAKVEHNKTKSKKMKFCRAIESGCIPYIDYIKLALI

SEQ ID NO: 17524 - protein, 420 aa, unidentified
  REGION 1..420: note = Human gut metagenome
MQYVYVLNKHGEPLMPCSPRKARLLLKQKKACVIKRTPFTVKLLHGSAGYKQPVTLGVDAGSKHIGISATTEKHELYREEATPRNDVVDLLSARHAFRRSRRNRKTRYRAPRFDNRVHSKHKGWLAPSVEVKIQEHITLVEHVCRILPVTLVRVETAEFDTQRLKAMLEGKPLPVGTDYQLGEMYDEYNVRQYVLKRDNYTCQCCGAHSTKTKGVKLHVHHIETRRTGGNAPNNLITLCTACHKALHAGKVTLDGKKRGKPLKDAAFMGIMRKTLMERLRKELKIPVQGTYGYITKCLREKNGIPKSHTNDARCISKNPLAIPCDTCYYTKAVRHHNRQLHKATILKGGIRKANQAPYIVKGYRLWDKVSCNGTECFITGRRTSGYFALKKLDGTVVSNSISYKKLRLLEAATNYITERK

SEQ ID NO: 17525 - protein, 480 aa, unidentified; identical to SEQ ID NO: 2726
  REGION 1..480: note = Human gut metagenome

SEQ ID NO: 17526 - protein, 435 aa, unidentified
  REGION 1..435: note = Human gut metagenome
MRYVYVLDQEGKPLMPTCRFGKVRRMLKSGQAKAVSTLPFTIRLTYKPKTQSRQAVVVGFDPGRTNIGLAAVREDGTCLYRAHCTTRNKEIAKLMKDRLASRRASRRGERLARKRLAKKFHTTAKKLLKRILPGCKEPLAVKDIINTEARFNNRLRPQGWLTPSATQLLRTHLNLLKKIQKILLVTDVVVELNRFAFMQLDTPGVCKKNIDFTHGALYGTDGLHAAIREQQQGRCLLCGYREIEHFHHIIPRSKLGSNTIANLAGLCEKCHELVHKNAAAAEKLQEFKSGLEKKYGGTSVLNQIIPALMRTLSERFSGHAYATTGWQTKQFREDHELEKDHDIDAYCIAASILQQITTNISVESYEILQFRKHSRANIHHQTERTYKLGKELVAKNRHKRMDQKTDSLQEWYEDMFAKYGEKQANKLRSKLTVQK

SEQ ID NO: 17527 - protein, 502 aa, unidentified; identical to SEQ ID NO: 2616
  REGION 1..502: note = Human gut metagenome

SEQ ID NO: 17528 - protein, 507 aa, unidentified
  REGION 1..507: note = Human gut metagenome
MSEYIYVLGMDGNPQMPTKRKKHVEKLLQTGRARIFRHIPYTIQLTYENDPVLQPITLAEDPGRSNIGMAVVSLSGELLSAAVVQTRNKEIVKLMEKRKQHRRASRNGERKARQRLAKKCHTMLKVGSLMRKLPMYGKDKRVKCLVIRNTEARFCNRKRKDGWLTPSAEHLVRTHINLIHKMQKFLPITDVAIEINRFAFLSLEDPSVSGVDFQKGPLKGYDNLNAAVEDLQDGHCLMCDRPIEHRHHIVPRSMQGSNTIENIAGLCCKCHEKVHKNAAFEKRLKKKKAGLDKRYAAISVLNQAIPFICKQLEQEFGKEHVHYCSGKDTAMVRRSFGYHKTKEEQLHEVDAWCIAVLSLQQIPEKAPEFDHVYKIMQFRRQDRSRIKAQTSRTYYYDGKKVAKNRKKAEGQKEDSLQEWRECHVTLYGEEQARKMISQLKVRKSIRRYNRLDRLMPGAVFYYKGTRYVMRGQHNKGQYLQAVGMGSKDFPVKDCKIVAQNEGLVFVS

SEQ ID NO: 17529 - protein, 432 aa, Moorena sp.
LSVFVLDRRGLPLMPCSEKRARLLLARGRARVHRVVPFVIRLTDRLARNSRFQPLRLKLDPGSKTTGMALVLEKADAGVGVLNLFELVHRGRQISEALMQRSRFRRRRRGANLRYRAPRFNNRTRRTGWLAPSLQHRIETTMSWFRRIQRWVPFSALSMELVRFDMQAMQNPEIAGVEYQQGVLFGYEVREYLLEKWGRRCAYCDAQGVPLQIEHVLAKARGGSNRVSNLTLGCEPCNLDKGAQDVREFVKEKARLARILAKAKAPLRDAAAVNTTRWVLLNALKTTDLTVEAGSGGRTKWNRTRLGLPKTHALDAACVGTVQAIFGWQRPTLELKCSGRGSYQRTRLTAHGFPRGFLVRQKRIHGFQTGDRVRATVPTGKKAGTHVGRVAVRATGNFNIQTPQGVVQGIAHRHCTMVQPADGYGYATRAIK

SEQ ID NO: 17530 - protein, 377 aa, unidentified
  REGION 1..377: note = Human gut metagenome
LFGSAGYKQPITLGVDAGSKHVGLSASTEKRELYSEEFTPRSDVVELLSTRRQNRRSRRNRKTRYRVPRFDNRVHSKHKGWLAPSVEVKIQEHITVIKHICKILPISLVRVETAEFDTQRLKAMLAGKPLPVGTDYQLGEMYDEYNVRQYVLKRDHYTCQCCGTHNTAKKVVKLHVHHLESRKVGGNAPSNLITLCTTCHDALHKGKVSLDGKERGKPLRDAAFMGIMRKALMARLREELPIPVQGTYGYITKMRREQNDIKKSHVNDARCISKHPLAEPCSVCYRTKAIRHHNRQTHKVNFSKKGIRKRSQMPYLVEGFRLWDKVLYKGQECFVSGRRASGSFTLKKLDGTRISKGVTFKKLRLLEPATNYLIERM

SEQ ID NO: 17531 - protein, 421 aa, unidentified; identical to SEQ ID NO: 16601
  REGION 1..421: note = Human gut metagenome

SEQ ID NO: 17532 - protein, 453 aa, unidentified; identical to SEQ ID NO: 6494
  REGION 1..453: note = Human gut metagenome

SEQ ID NO: 17533 - protein, 428 aa, unidentified
  REGION 1..428: note = Ruminococcaceae bacterium UBA3753
MVYIIGKNGQPLMPTTRHGKVKHLLKEGKAKVVKKCPFVIKLLYDTDYFVQNCVHGQDTGASVHGNAVYDENGNILYLSKVFVRNDITDKMLQRSKYRKNRRSRKTRYRKPRFLNRKNSIKKNRFSPTMVSKFHSHIKEIEFIKSILPIKTTVLETANFDTHLLKNPSLANPKIKPWGYQKGTNYGFENTKKFVLHRDRYTCQCCKGKHKDSKLEVHHIVFRSMGGSDDESNLITLCHTCHKNLHDGKINTKFKGKKKGNLKYATQMNSIRKQLLKSYPEAIETYGFVTKANRLSLNIEKDHHIDACVIASGGKEFTIKTDTVFIKKDIAKGDYQKTKGIRSEQKLNTGKIQGFKKFDKVSYFGSEYFIKGRMSTGFAVLMDIEGKKIDFSYFPKGFKTPKLKNCKRISARTSQLIFKERKNVIHPIT

SEQ ID NO: 17534 - protein, 512 aa, unidentified
  REGION 1..512: note = Human gut metagenome
MSTVYVLNKDGKPLMPTTRCGHVRHLLKEQKARVVTSKPFTIQLLYEADDVVQSLYLGIDPGRTNIGVAVVKADGTAVFTAHLETRNKEIPKLMKKRKESRRARRTNGRRCRRQRRAKANGTISKKCVKHDTAQNGSVSKRAKEIGVIKRHLPGCEKDVLCIGIKNKEAKFSNRTRPEGWLTPTANQLLQTHINLVKKIQKFLPISDVVLEINKFAFMRLDNPNVQKWQYQQGPLYQKANLEETVSEMQEHHCLFCKKKIDHYHHVVPQHKNGSNTIDNIVGLCTQHHDLVHKDATWQKRLAKKKTGLNKKYGALSVLNQIIPALTKELSSLFPKHFFVTNGKSTYDYRAAHGVSKDHWLDAYCIACSVLPNDVCDKNINSRVLYELKQFRRHDRRALNNENMSRVYTFNGKMVATNRHKATEQTTDSLEEFRQRQPNDVCNLKVKEHHPTYRNMNRNYPGSVFLVGNQVHVMQGIASSKDGEATTYKDTNANSIAAGKCKFVAKNSGILFV

SEQ ID NO: 17535 - protein, 502 aa, unidentified; identical to SEQ ID NO: 8882
  REGION 1..502: note = gut metagenome

SEQ ID NO: 17536 - protein, 456 aa, unidentified
  REGION 1..456: note = Human gut metagenome
VWLTQTACDIGEGFLPSSEERAAFYWLLIYGKEHGIMQYVYVLNKHGEPLMPCSPGKARLLLKQQKACVVKRTPFTIKLLYGSTGYKQSITLGVDAGSKHVGLSASTEKRELYCEEFTPRNDVVDLLSTRKQNRRSRRNRKTRYRAPRFDNRVHGKHKGWLAPSVEVKIQEHITVIKRICRILPITLVRVETAEFDTQRLKAMLAGKPLPVGTDYQLGEMYDEYNIRQYVLKRDNYTCQCCGAHTTAKKVVKLHVHHLESRKVGGNAPSNLITLCTTCHNNLHKGKITLDGKKRGKTLRDAAFMGIMRNTLLTRLHNELNIPVQNTYGYITKLLREQNDIKKSHVNDARCISKHPLAEPCSVCYHTKAIRHHNRQIHKAKILKGGIRKANQAPYIVKGFRLWDKVLYNGQECFISGRRSSGYFALRKLDGTAITNSISFKKLQLLEPATNYLIERM

SEQ ID NO: 17537 - protein, 414 aa, unidentified
  REGION 1..414: note = Human gut metagenome
MPCSPAKARLLLKEKKAIVVRRTPFTIQLTIATGEAKQPVSLGVDAGYKHVGLSASTEKAELYASEVELRQDVSDLLSARRALRQSRRSRNTRYRAPRFDNRIRTKRKGWLAPTVENRINVHLSRIETVLRLLPVTKITVETASFDTQLLKNPDIAGKEYQKGEQLGFWNVREYVLFRDGHVCQHCHGRSKDPVLNVHHLESRRTGGDSPGNLITLCETCHKALHRGEIKLRAKRGQSFRAETFMGIMRWGVLNRLKASHPKLEVHNTYGYRTKHARIANGIAKSHCADAFCIAGNFGAKRLGEFFFQKQTRRNNRQIHKLSILKHGLRKRNQAPFEVKGFRLFDKVVCQGEEGFIFGRRSSGSFDVRKLDGTRISAGISYKKLRLLEKRRTYLKEIRKEEALPPLPEGRSLRA

SEQ ID NO: 17538 - protein, 413 aa, unidentified
  REGION 1..413: note = Human gut metagenome
LKVFVLNMRGKPLMPCSPAKARHMLKAGKAFVVRRTPFTIKLTIATGETKQDVTLGVDAGARHVGISATTEKEEVFASEVALRQDITGLLADRLAFRRARRNRKTRYRAPRFNNRVRSKHKGWLAPSVENRIQAHMSRIDAVCRLLPVTKIVIEAASFDVQKIKNPTIEGTDYQQGDQLGFWNVREYVLFRDGHICQHCRGRSKDPILNVHHLESRKTGGDAPNNLITLCETCHKAYHAGKIKLKVKRGQSFRAEAFMGIMRWTLLDRVRKTHPKLPVENTYGYLTKHKRIALGLPKTHCADAFCIAGNLKALRRGDFLFQQQTRKHNRQIHRCSILKGGVRKLNQAPFLVKGFRLFDKVRIGGQIGFVFGRRVRGTFNIRRLDKTVIGTDINCKKLSLLETRKTFLTELRKE

SEQ ID NO: 17539 - protein, 424 aa, unidentified
  REGION 1..424: note = gut metagenome
MVYVLSKEGTLLMPTNRHGKVRHLLDAGEAKAVKRCPFTIQLLYQSTTYTQDITLGVDAGSKIIGLSASTEKKELYASETKLRTDITDLLSVRRQFRRTRRNRKTRYRKARFNNRVHAKHKGWLAPGIEAKIGTHFRAVRDVCRILPVTEIIVETASFDIQKIKALENGEPVPEGTDYQEGDQLGFWNVREYVLWRDGYKCRCCNGKSKDQVLNVHHIESRKTGGDAPNNLATLCGYCHKQYHKGTILLPKSVRRGNSFRDAAFMGIMRWTFYNRLKEQYPRVAMTYGYITKNTRIRNNLPKTHYVDARCIAGHPQAEPLDVYYFQKKVRCHNRQIHKANILKGGKKKRNQAEYLVKGYRLYDRVRYQNREYYVFGRRASGFFDIRALGGNKVNKGSVSCKKLRFLEPRKTMLIERRMQEQEAV

SEQ ID NO: 17540 - protein, 328 aa, unidentified
  REGION 1..328: note = Human gut metagenome
RRNRKTRYRAPRFDNRIRTKRKGWLAPSVENRINAHLSRIETVIRLLPVTKISVETTSFDMQLLKNSDIAGKEYQEGEQLGFWNVREYVLFRDGHVCQHCHGRSKDPVLNVHHLESRRTGGDSPGNLITLCETCHKELHRGEITLKAKRGQSFRAETFMGIMRWEVLNRLKASHPKLEVQNTYGYRTKHARIVNGIAKSHCADAFCIAGNLGAERLGEFLFQKQTRRNNRQIHKLSILKGGIRKRNQVPFEVKGFRLFDKVACKGEEGFVFGRRSSGYFDVRKLDGTRISAGISYKKLRLLEKRQTYLTEIRKEEALPPLPEGRGLRA

SEQ ID NO: 17541 - protein, 427 aa, Moorena sp.; identical to SEQ ID NO: 15964

SEQ ID NO: 17542 - protein, 431 aa, unidentified; identical to SEQ ID NO: 4463
  REGION 1..431: note = Human gut metagenome

SEQ ID NO: 17543 - protein, 413 aa, unidentified
  REGION 1..413: note = Human gut metagenome
MTNYAFVLDANNKQLTPTKEQKAWFLIRKKRATLVSKYPMVIQLKKKIPDKEICKDEVRCGIDDGGLHVGVALVQKCHTRNKVIFKGVIEQRNDVKHLMDVRRGYRRYHRYHKRYRPARFNNRNSSKREGRIAPSILQKRQATTRVINQLNKWINITNYWLEDVAIDIRALTDGYKPYRWQYQKTNRLDENIRKAVILRDGCKCMECGKSNCRLEVHHIKPKRLKGSNTLGNLITLCAKCHQKTESVEELYMDRYFALLNSSDNKNLNYAQHVMIGKKWLREQLSNLGMLYLTNGGDTANKRIDWDITKSHSNDAICITDLKPDTCEIKEWAIKPMRRQSKAKTDNVLGIKHRDLVEYTFRNGKTHRGYVTALYPEQNAINFQSPTKHCKKVNARKCKVLWKYSKIYWLDNVS

SEQ ID NO: 17544 - protein, 380 aa, unidentified
  REGION 1..380: note = Human gut metagenome
MSTGLRAEQAEPAGIRKGDTLKVFVLNMRGKPLMPCSPAKARHMLKAGKAVVLRRTPFTISLTVATGETKQGVTLGVDAGAEHVGISATTEKEEVFASEVELRQDIKGLMADRLAFRRARRNRKTRYRAPRFDNRVRSKHKGWLAPSVENRIQAHISRIEAVCRVLPITKIVIETASFDIQKIKNPEVEGTDYQQGDQLGFWNVREYVLFRDGHVCQHCRGRSKDPILNVHHLESRKTGGDAPNNLITLCETCHKAYHAGKIKLKTRRGTPFRAEAFMGIMRWTLLERVRKAHLELPVENTYGYLTKHKRIVLGLPKTHLRRRLLHCGKSECAATRRIPLPAADAQAQPSDPQVFDSQGWSAKTPPGAVPCQGLPPFRQG

SEQ ID NO: 17545 - protein, 432 aa, Lactobacillus sp.; identical to SEQ ID NO: 6011

SEQ ID NO: 17546 - protein, 470 aa, unidentified; identical to SEQ ID NO: 2825
  REGION 1..470: note = Human gut metagenome

SEQ ID NO: 17547 - protein, 448 aa, Clostridium sp.
MVYVISINNKPLMPTSNAKARILLKQKKAKVKELKPFTIQLTYKTETEYTQEITLGIDSGYNNIGFSAIINNKELIVGELKLLQGMKERLLEKARYRKIRRSRLRYRKPRWNNRIKSKQKGWLAPSLQHKLDSHIKFINYLYSIVPITKCIVEIANFDIQKIKNPDIQGDEYQQGEQLGFWNLREYILHRDNHKCQNPNCKNKSKEKILEIHHIKYRSLGGTNSPSNMITLCNKCHTSPNHKKGKFLWDWCQEGKKVRGFKDATFMSMIRWYLVNELKEKYSNIGFTYGYITKNHRIKDSIEKSHYNDAFCIAKGVNQTRNNKIYEVKQSRRNNRSLEMFYDSKYIDIRTGEKVSGGDLNNGRRTRNKNYNTKNLHQYRGEKISKGQRRIRTQKHFYQPNDLVKYNGKVYSVRGTQNKGKYIRLNEIKKVPRIDLIKPYKFNKGIVWC

SEQ ID NO: 17548 - protein, 410 aa, Bacillus sp.; identical to SEQ ID NO: 12232

SEQ ID NO: 17549 - protein, 414 aa, unidentified; identical to SEQ ID NO: 2588
  REGION 1..414: note = metagenome

SEQ ID NO: 17550 - protein, 362 aa, unidentified; identical to SEQ ID NO: 8489
  REGION 1..362: note = Human gut metagenome

SEQ ID NO: 17551 - protein, 420 aa, unidentified; identical to SEQ ID NO: 9880
  REGION 1..420: note = Human gut metagenome

SEQ ID NO: 17552 - protein, 415 aa, unidentified; identical to SEQ ID NO: 3582
  REGION 1..415: note = Human gut metagenome

SEQ ID NO: 17553 - protein, 442 aa, Gemella sp.
MFCIDNRETHIPSTTLARRKILRKEGYPEMENIKKEYCFVVDKNNKPLAPTKMNKGWYLIRKGKAILKSMYPMVIQLEKKIKTNKNDKSYIVCGIDDGSIHVGLAIVQKCPTKNKVVFKETIEQRQDVKHLMDVRRGYRHYHRYHKRYKPMRFNNRSSSKRIGRLAPSIKQKKDSILRVLYQLNKLINIKEYYLEDVCIDIRAMTDDYKPYKWQYQKSNRLDENLRKAAIIRDNYKCQECGKSNCKLEVHHIQARKYSGADTIGNLITLCSKCHQKTEGKEQDFEDKYFKIIGSKPKRFDYAMHVMQGKNYLRSKISELGLLHLTNGGETANKRIEWNIEKSHSNDAICITNSIPDSCNIKEWTIKPMRRKSKAKADNVLGIKYRDLVSYTYKNGETHTGYVTALYPKQLALNFQSRIKHCKKVNARKCRLLWQFNKIYWLE

SEQ ID NO: 17554 - protein, 432 aa, unidentified; identical to SEQ ID NO: 6070
  REGION 1..432: note = Human gut metagenome

SEQ ID NO: 17555 - protein, 400 aa, unidentified; identical to SEQ ID NO: 3267
  REGION 1..400: note = Human gut metagenome

SEQ ID NO: 17556 - protein, 270 aa, unidentified
  REGION 1..270: note = gut metagenome
LQLLKAIADGKPVPQGEDYQQGEMYGHYNVRQYVLWRDNYTCQCCGTHPSKKKEVRLHVHHLESRKVGGDAPDNQVTLCESCHEKLHKGLIAEKDFKKRKRKSTRDATFMGIMRKTLMQRLCSELPIPVIETRGYITKATREKLLVLPKSHTNDALAIAQGKQGFNVGYLPGIVQINKIYTIRPVRHHNRQLHKATILKGGIRKSNQTEKYVFGYRLFDKVQFNEQDCFIWGRRTTGIFTIKTINGKMIKDGISFKKLKPVEKSTGYLIA

SEQ ID NO: 17557 - protein, 443 aa, Anoxybacillus sp.; identical to SEQ ID NO: 13210

SEQ ID NO: 17558 - protein, 413 aa, unidentified; identical to SEQ ID NO: 3220
  REGION 1..413: note = Human gut metagenome

SEQ ID NO: 17559 - protein, 431 aa, unidentified
  REGION 1..431: note = Human gut metagenome
MPNKVYVINKHGRPLMPCSPAKARHLLDAGKAKVKKRTPFTIQLVYGSSGYTQEVILGVDAGSKTIGMSASTTKEELLSAEVKPRNDVVDLLSTRREFRRARRNRKTRYRKPRFDNRVRSKHKGWLAPSVEVKIQEHITSIKRVCRILPVSKVVIETAEFDLQLLKAIEEGKPVPQGEDYQQGEMYGHYNVRQYVLWRDGYTCQCCGAHATKKKEVRLHVHHLESRKVGGDAPDNQVTLCESCHEKLHKGLIAEKDFKKRKRRSTRDATFMGIMRKTLMQRLCSELPIPVIETRGYITKATREKLLVLPKSHTNDALAIAQGKQGFNVGYLPGIVQINKIYTIRPVRHHNRQLHKATILKGGIRKSNQTEKYVFGYCLFDKVQFNGQDCFIWGRRTTGIFTIKTINGKMIKDGISFKKLKPVEKSTGYLIA

SEQ ID NO: 17560 - protein, 428 aa, Enterococcus sp.; identical to SEQ ID NO: 4335

SEQ ID NO: 17561 - protein, 398 aa, unidentified
  REGION 1..398: note = Human gut metagenome
GRPLMPTTRHGKVRRLLKSKKATVVNLCPFTIRLLYDTTGYKQEITLGVDTGTKHVGLSATTKSKELYASEVILRSDVVDLLSTRRELRKIRRYRLRYRKPRFMNRIKSKKRGWIAPSIRQKIDSHIRIIGFVYSILPVSKLIIEVAQFDTQKIKNPEISGKEYQEGEQLGFWNVREYVLARDEHKCQHCKGKSKDPVLNVHHIESRKTGGDSPSNLITLCKTCHKEFHKGNIKLKVNRGESLRDAAVMGIMKWELYDELKSLYPNVKMTFGYITKYNRINHGIEKSHVSDAFVISRNFDSERLGYYYKRKLVRRHNRQIHKMKAPKGGNKRMNQSPFKVFGFRLFDKVMFQGKERFIYARRLRGIFNIRDINGENKKDISYKKLEYVSHGLISIVAG

SEQ ID NO: 17562 - protein, 456 aa, unidentified
  REGION 1..456: note = Human gut metagenome
MSTCVCVLSNSGERLMPTFRLGKVRRLLKDGKAKIVKHHPFTIQLLYDSKTNTQPIEICEDVGYNYIGISVKSQSHEYVSAQYDTLQDEKACHDSCRKLRRSRRNRLRYRKPRFDNRKRSEGWLAPSLEHKKQLNIRLIERYVSVIPITHATVEVGSFDTMLLQAIQKGESKPEGVDYQKGPRYNLATLREAVFYRDNYTCQVCGRKIADGAILHMHHMFYWKGRHGYQLDELVTACEKCHTPANHQKGGKLFGFGEDKEFANLSGAAFMNAVRWQIVDALHATYGKEFVTITYGAMTKEKRIILGIEKTHNNDAYAMGDYHPVHRCVFRHYQKRRRNNRVLEKFYDATYIDTRTGNKAKGKELFNGRISRNHKKNSEDLHKYRSKKVSKGRRSIRRQRYAIQPYDTVRLESKTYITSGCHNKGTRLLIPANGKSKSVAISKVQIVCHAGAWIQII

SEQ ID NO: 17563 - protein, 458 aa, unidentified
  REGION 1..458: note = Human gut metagenome
MSVFVVGLNGCRLMPTSERKARLLLKQGKAFVEQKVPFTIRLNYKTGSTTQLGYLGIDTGSQHIGVSVVREDGTVLHKEEIGLRDSMSKRKLLEAKASLRRGRRYRKTRYRHPKWRPKTKRVYCEVPDRKGRHWQKKKITFTSKRPKGWLPPSLQSKTDHHIRWIKKLQDLLPEGYRLSIELGRFDPARMKNPEIHGDLYQKGPQYDYENVRAYVLDRDRYTCQICKKKGGKLHVHHILYRSHGATDDPQYMVTVCSDCHSAQNHLPGGILYQWMQEQKRFSRGLRDATFMNILRKRLIRAFPEAVFTYGNVTKVDREKLKLPKSHGNDATAIALVKTGITAVKDKESVICIQQVRRKKRSLHEETPRKGRKEPNRTAARNNKNTKAVTVTKRQNKKKVSMTGCLFDRVELNGKKGWIFGFTGKSCYVKDADDQYLSTSPKYKQVSLSNSYFCIYLAK

SEQ ID NO: 17564 - protein, 465 aa, unidentified
  REGION 1..465: note = Human gut metagenome
MVIALDRHKKPLGFVTERRCRKLLEVRRAVFYRHYPAVIILKDVDARNIYKLPSYRIKIDPGAVHTGIAIVCNETNEVMYFLQIEHRGSEVKKALITRKQTRRNRRSRETRYRRCKFKNGGDFDSSRKNGWLPPSVKSTADNVIHWVEKLCRYINITECSFEAVRFDSQLMDNPEIGSEEYQQGTLSGYELREYLMEHFRHTCQYCGGESGDPVLEWEHKIPRSRGGSDSVKNASLACSCCNRDKGNRTLEEYLEDSKHISPKGKSEKALNEARISHISGILEKGTIYGSNRYSAWVNSTRRYIEKYLFLMFDDVECCSGGRTKYNRIKLKLPKDHHYDALCVGSVPKEGYTDRTNSYVLYVKATGRGTRFRGQCNSCGVITVKYKNNSKRKFGFQTGDIVQLNKPKGKDTGQYTGKVAVRSSGSFDLIRKGCKRITANYKYFRMMQYSDGYEYLGPLRPIPHSA

SEQ ID NO: 17565 - protein, 476 aa, unidentified
  REGION 1..476: note = Human gut metagenome
LEAADTEGVSHPGLPGKYKNKGGQLMSVAVISKTGERLMPTSEYRARKLLKSGKAIKYSYHPFTIQLTERESGDVQPIELCVDTGYIHIGISVKSEKHEYLAEQIDTLTDERSRHDACRMYRRQRRSRKRYRQPRFNNRKRNDGWIAPSLEHKKNIHIQAISHICKVMPVTDITLEMGNFDTQVLKAREEGKPLPQGADYQHGERYGIATLREAVFARDGYTCQCCGRTIKNDAILHVHHIVYRSQGGTNRMSNLITVCDKCHTPANHKKGGKLYNWKPKIASFKGAAYMTAIRWKLYNEVKTLFPDIDIHITYGAETKERRRAFDINKSHVNDAFVMGQFHPKHRSKPICYKKKRRNNRCLEKFYDAKYIDSRDGKKRSGQELFNGRISRNHKKDSENLHQYRLQKVTPGRRAIRKQHYPIQPHDIIVYNGNKIEVSGCQHKGTRVVFSKTKKSVQISKIKLFKYAGGYSKSVFN

SEQ ID NO: 17566 - protein, 420 aa, unidentified; identical to SEQ ID NO: 6507
  REGION 1..420: note = Human gut metagenome

SEQ ID NO: 17567 - protein, 526 aa, unidentified
  REGION 1..526: note = Human gut metagenome
LLRQERFIVKEVANMSTVYVLNKDGKPLMPTTRGGHVRHLLKEQKARVVRAKPFTIQLLYETNDVVQPLYLGIDPGRTNIGVAVVKANGTAVFTAHLETRNKEIPKLMQDRKKARRARRTNGRRCRRQRRAKANGTISKKCVKQTTAQNGSVSKRAKDIGVIKRRLPGCEKDVLCIGIKNKETKFTNRTRPEGWLTPTANHLLQTHINLVKKIQKFLPISDVVLEVNKFAFMRLDNPNIQKWQYQQGPLYKKESLESAVSEIQEHHCLFCKKPIDHYHHVVPQHKNGSNTIGNIVGLCAKHHDLVHKDSAWEKKLAKKSTGLYKKYGALGVLNQIIPTLTNELSSLFPKHSFVTNGKSTYDYRAAHGVSKDHWLDAYCIACSVLPSNVCDSNINNHMPYELKQFRRHDRRVLNNENMNRVYTLNNKAVAINRHKAKDQKTVSLEEFRKEHPDDVCKLKVKEHHPTYRNMNRNFPGSVFLVGKQIHVMQGIASSKDGKATKYNDTSATAIAAGKCKFVAKNTGILFV

SEQ ID NO: 17568 - protein, 456 aa, unidentified; identical to SEQ ID NO: 11534
  REGION 1..456: note = Human gut metagenome

SEQ ID NO: 17569 - protein, 431 aa, unidentified
  REGION 1..431: note = gut metagenome
MPNKVYVINKHGRPLMPCSPAKARHLLDAGKAKVKKRTPFTIQLVYGSSGYTQEVILGVDAGSKTIGVSALTKKEELFAANVIPRNDVVDLLSTRRESRRARRNRKTRYRKPRFDNRVRSKHKGWLAPSVEVKIQEHITSIKRACRILPVSKVVVETAEFDLQLLKAIADGKPVPQGEDYQKGEMYGHYNVRQYVLWRDNYTCQCCGAHATKKKEVRLHVHHLESRKTGGDAPGNLVTLCDSCHEKLHKGLIAEKDFKKRKRRSTRDATFMGIMRKTLMQRLCSELPIPVIETRGYITKATREKLLVLPKSHTNDALAIAQGKQGFNVGYLPGILQIDKIYTIRPVRHHNRQLHKAAILKGGIRKSNQAGKYVFGYRLFDKVQFNEQDCFIWGRRTTGIFTIKTINGKMIKDGISFKKLKLVEKSTSYLIA

SEQ ID NO: 17570 - protein, 353 aa, unidentified
  REGION 1..353: note = Human gut metagenome
LKGLSRTCGSLRFKEKTLKVFVINKRGKPLMPCKPAKARHLLRDGKARVVRRTPFTIQLTIATGENVQPIHLGVDAGSKHIGLSATTEKEELFSSEVELRKDITDLLSSRREMRRARRNRKTRYRAPRFDNRVHAKNKGWLAPTLENKISAHLSRIKAIRAILPVSRITIEVASFDIQKIKNPEIEGEQYQQGEQLGFWNVREYVLFRDGRKCCHCHGKSKDPILNVHHIESRKTGGDAPNNLITLCETCHKAYHAGKIQLTAKRGEKFTDATHMGIMRWELFKRAKEANLGIPVKTTFGYITKVRRIQFGIAKTHCADAFCIAGNLNAKRLGEYGEFQKFEKRGVGRHDHSP

SEQ ID NO: 17571 - protein, 346 aa, Arthrospira sp.; identical to SEQ ID NO: 6643

SEQ ID NO: 17572 - protein, 585 aa, unidentified; identical to SEQ ID NO: 14765
  REGION 1..585: note = Human gut metagenome

SEQ ID NO: 17573 - protein, 426 aa, Calothrix sp.
MHTNYVFLLNADKSPLGMIHPARARELQDKKKAAVFRRYPYVLILRNQVNSVIKACILKIDPGSKWTGFAIQMGSSIILRMELEHRGEIIKLDLEKRAGFRRGRRSRNLRYRMERSGRRKKEGWLPPSLRHRLLTVETWIKRFMRYCPIITIEIEQVRFDTQKMNNPEIKGVEYQQGELMGYEVRQYLLEKWGNECTYCGVKNVPLEVEHVKPKSKGGSDRVSNLTLACHCCNQKKGDKDVSEFVSDKAKLDIILSQAKTPLKDAAAVNSTRFAIVETAKKLCDNVKCWTGGRTKFNRFKQGFEKSHSIDAACVGESGSNIKIKTQQPLIVVCKGHGSRQARRVNKYGFPAVQKAKAVFTHATAGDLVRVVLDSDRKNVTKGKYIARVKTPTKKAVEVVINGKRVEISSMKNVSFIQRSDGYAYSF

SEQ ID NO: 17574 - protein, 448 aa, Chromatium sp.; identical to SEQ ID NO: 5440

SEQ ID NO: 17575 - protein, 512 aa, unidentified; identical to SEQ ID NO: 7153
  REGION 1..512: note = Human gut metagenome

SEQ ID NO: 17576 - protein, 393 aa, unidentified
  REGION 1..393: note = Candidatus Poribacteria bacterium
MSKVPVLDTHKNVLEPCHPAVARRLLRKGEASVYKRYPFTLILKREVSSSQTTDYTLSIDPGSKCTGMAITDSENHIVALFELHHRSAAIKKGLSDRAGYRRSRRTRKLRYRQARFDNRSRKAPVLTPDGWKYQSFGQSSKGWVAPSLMSRVFNIHTWVSRLSKIYPITQLAVEHVKFDTQLMENPEISGVAYQRGTLYEAEVWEYLLEKFGRKCYYCGAKDVPLKKEHIFPKAKGGTNRVSNLTVSCKSCNQEKGNKHPDELEGNLGKRVQSALKAAKKPLKDATSVNTIRWKIVETLKATGLPVIYGTGGKTKWHRKQACLPKTHYYDAACVASVPKSPVAPLSVLAIHAVGYGHRRDLGNYQTVQSAPGFKRPYKRLEQGEASRNSIPLR

SEQ ID NO: 17577 - protein, 438 aa, unidentified; identical to SEQ ID NO: 6587
  REGION 1..438: note = Fermentation metagenome

SEQ ID NO: 17578 - protein, 442 aa, Sutterella sp.; identical to SEQ ID NO: 11369

SEQ ID NO: 17579 - protein, 451 aa, unidentified; identical to SEQ ID NO: 5203
  REGION 1..451: note = Human gut metagenome

SEQ ID NO: 17580 - protein, 512 aa, unidentified
  REGION 1..512: note = Human gut metagenome
VSTIYVLNKDGKPLMPTTRCGHVRYLLKEKKARVVASKPFTIQLLYETDNVVQFLYLGIDPGRTNIGVAVVKADGTAVFTAHLETRNKEIPKLMQDRKKARRARRTNGRRCRRQRRAKANGTISKKCVKQTTAQNGSVSKCAKEIGVIKRHLPGCEKEVLCIGIKNKEAKFNNRARPAGWLTPTANQLLQTHINLVKKIQKFLPISDVVLEVNKFAFMQLDNPNIQKWQYQQGPLYQKGSLENAVSEMQEHHCLFCEKPIEHYHHVVPQSENGSNTIANIVGLCTEHHNLVHKDATWQKKLAKEKVGLVKKYGALSVLNQIIPALTKEMNSLFPKHFFVTNGKSTYDYRTAHGVSKDHWLDAYCIACSVLPNDVCDSNINSHVPYELKQFRRHDRRVLHKANMSRVYTLNGKTVATNRHKAIKQTTDSLEEFHQSHPGDVCKLKVKEHHPAYRNLNRNYPGSVFLVDGQVHVMQGVSGSHNGKADGYYNTNGNAYPYYKCKFVVKNEGIVFA

SEQ ID NO: 17581 - protein, 406 aa, unidentified; identical to SEQ ID NO: 6445
  REGION 1..406: note = Human gut metagenome

SEQ ID NO: 17582 - protein, 451 aa, unidentified
  REGION 1..451: note = Human gut metagenome
MPVAVISKTGERLMPTSEHRARKLLKSGKAIKYSYHPFTIQLAERESGDVQPIELCMDTGYIHIGISVKSEKHEYLAEQIDTLTDEKARHDACRMYRRQRRSRKRYRQPRFNNRKRNDRWIAPSLEHKKSIHIQAILRICKVMPVTDITLEMGNFDTQVLKAREEGKPLPHGADYQHGERYGIATLREAVFTRDDYKCQCCGRTIKDGAILHVHHIKYRSQGGTNRMSNLITVCDKCHTPANHKQGGKLYNWKPKIASFKGATYMTTIRWKLYNEVKALFPDIDIHITYGAETKERRRALDIDKSHVNDAFVIGQFHSKHRSEPICYKKKRRNNRCLEKFYDAKYIDSSDGKKRSGQELFNGRISRNHKKDSENLHQYRLQKVTPGRRAIRRQHYPIQPHDIIVYNGNKIEVLGCQHKGTRVVFSKTKKSVQISKIKLFKYAGGYSKSVFN

SEQ ID NO: 17583 - protein, 515 aa, Actinoplanes sp.; identical to SEQ ID NO: 2821

SEQ ID NO: 17584 - protein, 383 aa, unidentified
  REGION 1..383: note = Human gut metagenome
MRVFVFNMRGRPLMPCSQRKARLLLRENKAKIYKYHPFTIQLTYTTGETKQDCHIGIDTGSKYIGAAVRSEDKVFWKGEIELRQDIRSNLDTKRIYRRSRRNRKTRYRKPRFLNRKRRDEWLPPSLQSRINHTFHWIDTLSSLVPNPILHIEVGKFDVAKMINPEIHGVDYQHGQTYGFFDGRYFVFARDNYTCQCCGKSKNKILNTHHIIYRSNGGTNRVDNLITVCTDCLTSQNHRKGGIFYQWQEQHKKVKQYKEPPFMNTLRKRIFVAYPDAEITYGSETTPKRKAMKLDKTHYNDAIVISGINEIKENPEEWLLIKQFRKKKRSLHELPPVREEKSQTEIRRVTVRIRLIIKDFILTIRFQFLERVDILQDLRAMRHI

SEQ ID NO: 17585 - protein, 423 aa, unidentified; identical to SEQ ID NO: 8242
  REGION 1..423: note = Human gut metagenome

SEQ ID NO: 17586 - protein, 474 aa, unidentified; identical to SEQ ID NO: 9173
  REGION 1..474: note = Mouse gut metagenome

SEQ ID NO: 17587 - protein, 432 aa, unidentified; identical to SEQ ID NO: 6070
  REGION 1..432: note = Human gut metagenome

SEQ ID NO: 17588 - protein, 451 aa, Moorena sp.; identical to SEQ ID NO: 3199

SEQ ID NO: 17589 - protein, 504 aa, unidentified; identical to SEQ ID NO: 3854
  REGION 1..504: note = Human gut metagenome

SEQ ID NO: 17590 - protein, 240 aa, unidentified
  REGION 1..240: note = uncultured cyanobacterium
MSKVFVLDTQKRQLDPIHPAQARQLLRNKKAAIFKRFPFTIVLCEKCNTKKGTKDIKNFLKKDPAKLAKILSQAKRPLADAASVNSTRWALFRVLQETGLPVETGSGGLTKFNRVQQGLEKTHWIDSACVGKSTPKLVVKGIKPLLITTNGHGSRQSCRTDKFGFPNRHVPREKIHFGFQTGDIVKAVVTTGKKVGNYVGKVAIRSSGSFNISTKNGLIQGISHKFCKRIHAKDGYSYAQ

SEQ ID NO: 17591 - protein, 424 aa, Moorena sp.; identical to SEQ ID NO: 6694

SEQ ID NO: 17592 - protein, 419 aa, Lyngbya sp.; identical to SEQ ID NO: 2658

SEQ ID NO: 17593 - protein, 512 aa, unidentified
  REGION 1..512: note = Human gut metagenome
MSTVYVLNKDGKPLMPTTRCGHVRHLLKEQKARVVTSKPFTIQLLYETDDVVQPLYLGIDPGRTNIGVAVVKTDGTAVFTAHLETRNKEIPKLMQGRKKARRTRRTNGRRCRRQRRAKANGTISKKCVKQTTAQNGSVSKRAKEIGVIKRHLPGCEKDVLCVGIKNKEAKFSNRTRQEGWLTPTANQLLQTHINLIKKIRKFLPISNVVLEINKFAFMRLDNPNIQKWQYRQGPLYQKASLEEAVSEMQEHHCLFCKKSIVHYHHVVPQSENGSDTIGNIVGLCTKHHDLVHKDTAWQKKLAKKKTGLNKKYGALSVLNQIIPALTKELSSLFPKHFFATNGKSTYDYRAAHSVSKDHWLDAYCIACSVLANDVCDSNINSRVPYELKQFRRHDRRALNNENMSRVYTLNGKVVATNRHKATKQTTDSLEEFRQNHSDDVCKLKVKEHHPTYRNMNRNYPGSVFLIGKQVHVMQGIAGSKNGEATTYKDTNANSIAAGKCKFVAKNSGILFV

SEQ ID NO: 17594 - protein, 408 aa, unidentified
  REGION 1..408: note = Human gut metagenome
LKVFVLNMRGKPLMPCSPAKARHMLKAGKAFVVRRTPFTIKLTIATGETKQDVTLGVDAGARHVGISATTEKEEVFASEVALRQDITGLLADRLAFRRARRNRKTRYRAPRFNNRVRSKHKGWLASSVENRIQAHMSRIEAVCRLLPVTKIVIETASFDIQKIRNPEVEGTGYQQGDQLGFWNVREYVLFRDGHICQHCRGRSKDPILNVHHLESRKTGGDAPNNLITLCETCHKAYHAGKIKLKVKRGQSFRAEAFMGIMRWTLLDRVRKTHPKLPVENTYGYLTKHKRIALGLPKTHCADAFCIAGNLKALRRGDFLFLQQTRKHNRQIHKCSILKGGVRKLNQAPFLVKGFRLFDKVRIGGQIGFVFGRRVRGTFNIRRLDKTVIGTDINCKKTESSRNTQNFFD

SEQ ID NO: 17595 - protein, 430 aa, unidentified; identical to SEQ ID NO: 3252
  REGION 1..430: note = metagenome

SEQ ID NO: 17596 - protein, 410 aa, unidentified
  REGION 1..410: note = Clostridiaceae bacterium UBA5742
  REGION 76..93: note = misc_feature - Xaa can be any naturally occurring amino acid
LVYVLSKNGNPLMPTSRHGKVKHLLKDGKAKVVRRTPFTIQLLYDSPEYTQPITLGVDSGSKVVGLSATTEKKELXXXXXXXXXXXXXXXXXXRRNRLRYRMERFLNRTASKKEGWLAPSVKHKVDSHLKVIENVHRILPISRIVIETASFDIQKIRNPEISGTEYQQGEQLGFWNIREYVLWRDNHECQHCHGKSKDRILNVHHKESQKTGGDSPGNLVTLCETCHKSYHAGRIQLKLTPNKSYRDASFMGIMRWYVYNSLKELYPEVSMTYGYITKTNRIMNNIEKTHSADAYCISGNMNAIRSNETYNQAFKRKYNRQIHKANFLKGGKKKLNQSEYEVKGFRLFDHVRYKDEDCFIFGRRTSGYFDLRKLDGSVVHRSASFKELKLLKRQNTILIERKGCNGVLLS

SEQ ID NO: 17597 - protein, 378 aa, Moorena sp.
LLYGSSGYKQDVILGVDAGSKTIGLSATTENREVFSAEVELRTDIVDLLSTRRMLRRSRRNRKTRYRQSRFLNRKKPEGWVAPSVQNKIDTHIKVVKMVHDILSITKVIVEVAQFDIQKIKNPDILGEDYQQGEQLGFYNVREYVLFRDKHTCQYCNGKSKDPVLNVHHIESRKSGGNSPDNLITLCETCHRKYHKGEIELKVKRNSSFRDAASMNIMRWAFYNKLKELYSNVSLTFGYITKNVRIKHNLEKSHRIDARCISGNPSTKESDCWYFFKQVRKQNRQLHKTNPKKGIRRENKAPGYVHGYQLFDKVEYLDRECFVFGRRSSGYFDLRTLDGEVVSRSASVGKLKLVERASSLLCERREASFLTGLKHGVS

SEQ ID NO: 17598 - protein, 417 aa, unidentified
  REGION 1..417: note = Human gut metagenome
MPCSPAKARLLLKEKKAIVKRRTPFTIQLTIATGEAKQPVALGVDSGYKHIGLSATTEKAELYASEVELRQDITDLLSARLALRRSRRSRKTRYRAPRFNNRVASKRKGWLAPSVENRIAAHMSRVEAVMRVLPVTAITVETAAFDTQLLKNPDIAGEAYQQGEQLGFWNVREYVLFRDGHVCQHCRGKSKDPILNVHHIESRRTGGDAPNNLITLCETCHKAFHRGEIKLKVKRGKSFKAETFMGIMRWTLFERLKKAHPELRVRNTYGYLTKHKRISHGIAKSHCADAYCIADNLGAKRLEGFFFQKQTRKHNRQIHKLSILKGGLRKKNQAPYEVKGFRLFDKVICKGEEAFIFGRRTSGSFDVRRLDGTRISAGISCKKLRLLEPRTTYLTEFRKEAALPPLHECGGFRAEFL

SEQ ID NO: 17599 - protein, 406 aa, unidentified; identical to SEQ ID NO: 2703
  REGION 1..406: note = Human gut metagenome

SEQ ID NO: 17600 - protein, 423 aa, Arthrospira sp.; identical to SEQ ID NO: 16080

SEQ ID NO: 17601 - protein, 502 aa, unidentified; identical to SEQ ID NO: 2616
  REGION 1..502: note = Human gut metagenome

SEQ ID NO: 17602 - protein, 471 aa, Moorena sp.
MKSDSLRGNSEEIRTTRRLPEFFPKGFSYMNVVYVLSPERAPLMPCRPVIARLLLKEGKAKVVHRTPFTIKLSAQPGDVYTQPLTLGIDTGSAVIGSAVADEFGKVVYLSQVQARNDIVKTMKQPATSRRNRRSRKTRYRPARWLNRKNSRKKGRFSPTMRSKIEAHLREIRFVKSLLPIQSMVLETGTFDPHALKNPAVLQNKWLYQKGINYGYANTRAYVLTRDSYTCQHCKGKSKDKRLEVHHLVFRSQNGSDEEANLVTLCKPCHDGLHAGSIRLKRTGKKKGTLLHATQMNSIRIQLLKHTQAEETWGFVTKEHRRLSGLPKEHVFDAAIIATRGKNPTFGTTTVIEKRCLPDGDYQQTKGKHSEQRITTGKIAGFRKFDKIRYRGCEYFIKGRMATGYAVLMDLSGSSVDLKPTPKFDKMKRVRARSSWIIHQKHISSFLSSFSDFCRQVPEKLLIRSSIFESQG

SEQ ID NO: 17603 - protein, 465 aa, unidentified; identical to SEQ ID NO: 4641
  REGION 1..465: note = Human gut metagenome

SEQ ID NO: 17604 - protein, 424 aa, unidentified; identical to SEQ ID NO: 3351
  REGION 1..424: note = Human gut metagenome

SEQ ID NO: 17605 - protein, 404 aa, unidentified
  REGION 1..404: note = Human gut metagenome
LLKEKKAIVKRRTPFTIQLTIATGESKQPVTLGVDAGYKHVGLSASTEKAELYASEVELRQDVSDLLSARRALRQSRRNRKTRYRAPRFNNRLHTKRKGWLAPSVENRINAHLSRIEAVLRLLPVTKITVETASFDMQLLKNPDIAGKEYQEGEQLGFWNVREYVLFRDGHVCQHCYGRSKDPVLNVHHLESRRTGGDSPGNLITLCETCHKALHRGDITLKAKRGKSFRAEAFMGIMRWEVHNRLRALHPGIEVSNTYGYRTKHARIANGIAKSHCADAFCIAGNLGAERLGEFFFQKQTRRNNRQIHKLSILKGGIRKRNQAPFEVNGFRLFDKVACKGEEGFIFGRRSSGSFDVRRLDGTRISAGISYKKLRLLEKRQTYLTEIRKEEALPPLPEGRGLRA

SEQ ID NO: 17606 - protein, 413 aa, unidentified; identical to SEQ ID NO: 11796
  REGION 1..413: note = Human gut metagenome

SEQ ID NO: 17607 - protein, 398 aa, Desulfobacter sp.
LSVFVLDTNKKPQNPVHPAKARLLLTEGKAAVFRQFPFTIILKETVLNVASNPLRIKIDPGSRETGIAVINDDTGEIVFAMELRHRGQQIKNNLESRRAIRRSRRNRKTRYRKPRFDNRTRAEGWLPPSLKSRVHNIETWVKRLCRFCNIQAISMELVRFDMQKIQNPEISGVAYQQGELMGYEVREYLLEKWDRTCAYCGKTDIPLEIEHIVPKSKGGSNRVSNLTLACTACNRKKGNKSLEQFLLKKPRLLKRIQKQSGVPLKDAGAVNTTRWDLFRTLKKNGLPVETGSGGLTKFNRTTRGLHKTHWLDAACVGESTPEKMFQIDKTVLIVKADGHGSRQMCRVNKFGFPRTTAKSTEKKSQRLSDGRHCQGGCHFRQKGRNVHRTCRCQKKRIV

SEQ ID NO: 17608 - protein, 436 aa, unidentified
  REGION 1..436: note = Human gut metagenome
MPCHPARARKLLKKGRARVHKVFPFTIRLTDRELENSSVQPMLVKIDPGSKETGIALVREEKNKGHHALYFINLQHRGQQIRNAVYKRRCLRRSRRSRNLRYRSPRFLNRRRAEGWLAPSLQHRADSILSWVSRLRKIAPVERISQELVKFDTQLIQNSKIEGIEYQQGELVGYELREYLLEKFGRKCIYCGADNVPLNIDHVIPKSKGGSNRVSNLVLACVQCNQKKGSRSIEEFLKDKPEVLRQIKNQLKQPLKDAASVNATRWKLFNKLKSTGFPFEVGSGALTKFNRKKFGIPKAHWLDALCVGNVPSVTNWRNLNVLNIQCCGRGAYQRTRTDKYGFPRGICMRQKKVYGFSTGDMVKAIIPKGKKKGVYVGKVAVRKTGSFNLQTSGQTIQGISYRYCRLITHSDGYSCSWKSCPIPPRVETRGILGEVR

SEQ ID NO: 17609 - protein, 432 aa, Thiorhodovibrio sp.
MNTVFVLSNTKKPLMPTRPARARRLLRDKKAAVYRMYPFTIILKDRADGETQPIEAKFDPGSKTTGIALVAEFPQQGRVVLWAANLHHRGDSIRKRLADRRAIRRGRRNRKTRYRQARFLNRKKPQGWLAPSLKSRVANVENWLQKIVNRAPIVTVAVETARFDMQKMQNPEISGVEYQQGELAGYELREYLLEKWNRTCAYCDAQHVPLEIEHIVSRSKGGSDRVSNLTLACHDCNQKKGNQPLEVFLAHDPKRLARIKAHAKAPLKDAAAINAIRYAIGNALKKFGLPVSFWSGGRTKKNRISQGYTKDHWIDAACVGETGAAVHIPDGMRPLIITATGRGQRQVTRVNKFGFPCAKAKTGKTVNGIRTGDIVKLIQPKGKYAGEYCARVTAIKNSDQRISITINRKQTWFASKLAHIMQRGDGYAYAYA

SEQ ID NO: 17610 - protein, 421 aa, Lactobacillus sp.; identical to SEQ ID NO: 12317
  REGION 302..327: note = misc_feature - Xaa can be any naturally occurring amino acid

SEQ ID NO: 17611 - protein, 465 aa, unidentified; identical to SEQ ID NO: 3856
  REGION 1..465: note = Human gut metagenome

SEQ ID NO: 17612 - protein, 408 aa, unidentified; identical to SEQ ID NO: 4810
  REGION 1..408: note = Human gut metagenome

SEQ ID NO: 17613 - protein, 582 aa, unidentified
  REGION 1..582: note = Human gut metagenome
MYLDGVFGHLKDAGTCRYSSSLQHRRVYAKSRKTIPGQCLGLQPMRKNCFFVGRYCPTLIRRQHLANLKLIDTLLEKTEYIYVLGADGKPQMPTNRKVRVRSLFKSGLAKIVDTVPFTIRLLYENNAVLQPITLAEDPGRTNIGVAVLTQFGDLVFSAVVETRNKDIKKLMSDRKAHRQASRCGERKARQRLAKKHGSMIKSGMIMRKLPRYAADKFVTCKFIKNTEARFCNRKRIPDWLTPTVNHLVETHINIIRKISKYIPVTDIAVEVNRFAFMQMENPETTGIDFQNGPLKGFNDVKAALRVQQHGKCLMCKNDISDFHHIVPRSKGGSDNIQNQVGLCPKCHKKAHTNENFKQKLADKKVGLLKKYGALSALNQAVPFICKSLLEIYGKDHVHFCTGKDTSLIRTGLGYEKTKDNQMHEVDAYCIGLAAVGADIVNLPKFENIYKIKQFRRQDRSIINYQRERTYYLDGKKIATNRKPRFEQKKDAFSDWYSKRVKSDGKEQADKLTGRVTVKKSIRGYNSKNRLMPGTIFYYNGKRLVLTGQLTGGKYYRAYGDSKTNYPAAKCQVYKQNEGLVFV

SEQ ID NO: 17614 - protein, 446 aa, unidentified; identical to SEQ ID NO: 2319
  REGION 1..446: note = Wastewater metagenome

SEQ ID NO: 17615 - protein, 424 aa, Moorena sp.
MRVFVLDKNKKPLDPCKPARARILLKQGRAKVFRRYPFTIIMGDLEELECVTHNHQIKLDPGSQTTGLAIVQEKVVVWGAELTHRGLQIRDGLTSRRKLRRSRRNRKTRYRQPRFLNRKRPDGWLAPSLMSRVYNIITWVKKLTRFCPITGISQELVRFDTQKMENPEISGTEYQQGTLYGYEVREYLLSKWNRQCAYCGVTDTQLEVEHIKPKSKGGSDRVSNLAIACRKCNQIKGNQEIEQFLSGKPDVLNRILSQAKRPLVDGAAVNSTRWKLYNELKALGLPIETGSGGLTKYNRCRQNLPKTHWLDAANVGEVDTLYIESYQPLLISAKGHGTRQMCRTNKFGFPTRYVPRFKFVKGFQTGDIAKAVVTKGKKIGTYTGRIATRKTGSFNISTKHELVQGISHKYCSIVHRKDGYSYSF

SEQ ID NO: 17616 - protein, 453 aa, unidentified
  REGION 1..453: note = Human gut metagenome
MLMAVAVVSRTGVPLMPTSPYRARKLLASGKAEKYGYDPFTIRLTERETGDTQPVELCMDTGYIHIGVSVKSEKHEYLALQIDTLTDEKKKHEKCREKRRNRRSRKRYRKPRFDNRKRDKGWLAPSLEHKKEIHVRAAERICRVVPVTDITMEMGNFDTQVLKAREEGRPLPQGTDYQQGERYGTATLREAVFSRDNYTCLCCGRTMKDGAYFHVHHIRYRSQGGTDRMANLATVCEKCHTPANHQPGGKLYNWKPEIKSFKGATFMTAVRWQMYREIKEKIPDVSIHLTYGAATKERRRALDIEKSHVNDAFVMGRFHPGHRARPELYIKKRRNNRVLESFYDARYIDSRDGKRKSGKELFNGRISRNHKKDSENLHKYRLRKVSKGKRSIRKKHYPIQPHDILVYCGRKYETAGCHNLGTGAILLPERKSIAVSKLKIYRYSGGYYKAEFN

SEQ ID NO: 17617 - protein, 419 aa, unidentified; identical to SEQ ID NO: 3670
  REGION 1..419: note = Human gut metagenome

SEQ ID NO: 17618 - protein, 439 aa, Lactobacillus sp.
MEGVQTMQNRVFVINKHGKALMPCKPRKARILLRDGKAKVLKKEPFTIQLLYGSTGYKQDVSIGIDSGQRHIGLAVTSQDKVLFQGEVELRQDVKKLIDTRRIYRRSRRNRKTRYRKARFLNRIASKKDNWLPPSVASKVNHNINWIKRLLSVLPKADLHIEVGKFDMQKMKNPAINGEGYQQGDLYGYQTVKQFVLARDNYTCQVCKKKGGKLKIHHIIYRSLGGTNTIDNLITVCSKCHTTKNHQSGILAKWCKDKKKVNKSYKGATFMNILRRRLFTSFPQAKFQYGAWTTLQRVDLELTKSHYNDAVAISGIKKIKAKPTSIMMFKQFRKKKRSLHEATARKGRKTPNITSKRNARNTKYAKGFWLNDYVRIKDSNKKGYISGFSQSSCYIKDIFGNYLTTSDRYRKVALSKLDRLSHHNNWQKQAITEKQYAMG

SEQ ID NO: 17619 - protein, 408 aa, unidentified; identical to SEQ ID NO: 5302
  REGION 1..408: note = Human gut metagenome

SEQ ID NO: 17620 - protein, 512 aa, unidentified; identical to SEQ ID NO: 5549
  REGION 1..512: note = Human gut metagenome

SEQ ID NO: 17621 - protein, 424 aa, unidentified
  REGION 1..424: note = uncultured Phascolarctobacterium sp
MLVYVLNKYGHPLMPTERCGKVRRMLKVGLAKVIKRCPFTIQLNYDTTNIVQEVTLGIDAGSKTIGLSATTENKELFASNVVLRNDIVDLLSTRRELRRSRRNRKTRYRKARFNNRKRDDRWLAPSIRQKIQTHLSVIGKVYRILPIRKIIVEVASFDIQKIKNPDISGVEYQQGEQLYFWNVREYVLFRDGHQCQCCSGKSKDKILNVHHIEGRKTGGDAPNNLITLCETCHNGYHNGTVKLPKTIKRGMAFRDAAFMGIMRWAFYEKLKETYPNVHLTYGYLTKNIRITNKLPKEHYIDAKCISRNPLAEPLGYMFYQKKVRCHNRQIHKTKILSRNRRKLNQAPYLVNGFHLFDKVRFNNQECFVFGRRTSGYFDLRLLDGTKIHASASSKKLILIQKSSSFLIERRAALPPMTEVTGIRA

SEQ ID NO: 17622 - protein, 431 aa, unidentified; identical to SEQ ID NO: 3235
  REGION 1..431: note = gut metagenome

SEQ ID NO: 17623 - protein, 258 aa, unidentified
  REGION 1..258: note = Human gut metagenome
LKVFVLNMRGQPLMPCSPAKARHLLKAGKAVVKRRTPFTIQLRIATGETKQNVTLGVDAGAKHVGLSAATEKEEVFASEVELRQDITGLLAARLSLRRDRRHRKTRYRAPRFLNRVRSKHKGWLAPSVENRIQAHMSRIDAVCRLLPVTKIVIETASFDIQKIKDPSVEGTDYQQGDQLGFWNVREYVLFRDGHVCQHCHGRSKDKILNVHHLESRQTGGDAPNNLITLCETCHKAYHAGKIKLKVKRGQSFRAEAFM

SEQ ID NO: 17624 - protein, 423 aa, Moorena sp.
MRVFVLNKNRQPLDPCKPARARILLSVGKAKVYRRYPFTIILTEEVKQPITHDHQLKIDPGAKISGLAIVQGKRVIWGSELTHRGFQIQEALTSRRQLRRSRRNRKTRYRKPRFLNRTRSKGWLAPSLTSRVQNILTWVKKLSRFCPVTGISQELVRFDTQKLQNPEISGIEYQQGTLYGYELREYLLEKWNRKCAYCGATGTQLEIEHIKPLSKGGSNRVSNLTIACHPCNQAKSNQDIELFLSNKPSILKRILSQSLRPLADAASVNSTRCTLYYELKSIGLPVEVGSGGLTKFNRCRQNLPKTHWLDAANVGKVETLIIEVTLPLAISAKGHGTRQLCRTNKYGFPTRHCSRIKFHKGFQTGDIVRAVVTKGKKIGTYVGRVATRKSGSFNISTKSGLVQGISHKYCKFIHRKDGYAYAN

SEQ ID NO: 17625 - protein, 210 aa, unidentified; identical to SEQ ID NO: 11041
  REGION 1..210: note = Human gut metagenome

SEQ ID NO: 17626 - protein, 413 aa, unidentified
  REGION 1..413: note = Human gut metagenome
MTSYAFVLDANGKQLAPAKEQKAWFLIRKKRAALVSKYPMVIQLKKEIPENEICKDEIRCGIDDGGLHVGIALVQKCKSKNKVVFKGTIEQRNDVKHLMEVRRNYRRYHRYHKRYRQARFDNRKSSKRKGRIAPSILQKRQATIRVINRLNKWINITNYWLEDVSIDIRVLTDGYKSYSWQYQKSNRLDENIRKATILRDGGKCMECGKSNCRLEVHHIKPRRRNGSNTLDNLITLCESCHQKTEGQEELYMDRYFSLLKSSDNKNLNYAQHVMIGKMWLRKQLSGLGVLYLTSGGDTANKRIDWNIEKSHTNDAVCITDLQPDTCDIKEWAIKPMRRQSKAKTDHVLGIHHRDLVEYTFKNGETHRGYVTALYPDQKAINFQSPTKHCKKVNARKCKLLWKYSKIYWFENAS

SEQ ID NO: 17627 - protein, 462 aa, unidentified; identical to SEQ ID NO: 15460
  REGION 1..462: note = Human gut metagenome

SEQ ID NO: 17628 - protein, 465 aa, unidentified
  REGION 1..465: note = Human gut metagenome
MSTCVCVLSNSGERLMPTFRLGKVRRLLKDGKAKIIKHHPFTIQLLYDSKANTQPIEICEDVGYNYIGISVKSQSHEYVSAQYDTLQDEKACHDSCRKLRRTRRNRLRYRKPRFDNRKRGEGWLAPSLKHKKELNVNVVKMYCAVMPITHATVEVGSFDTMLVKAIQEGKAIPEGADYQKGPRYNLATLREAVFYRDNYTCQVCGRKVADGAILHMHHMFYWKGRHGNSLSELITVCEKCHTPANHQKSGKLYGFGENVKFADLSGAAFMNTVRWQIVNELYAAFGKDFVTVTYGAMTKEKRIALHLEKSHNNDAYAMGSFHPVNRCAFEHYEKVKRNNRILEKFYDSQYIDTRTGELTNGKSLFNGRISRSHKKDSENLHKYRGKRICKGHRALRRKKLALNPGDLVSLNGEILVVHGTHTKKNGSVNVEFKTPSRSGKKSASLKKLKIVKTSNLMHSAWTKVA

SEQ ID NO: 17629 - protein, 470 aa, unidentified; identical to SEQ ID NO: 2825
  REGION 1..470: note = Human gut metagenome

SEQ ID NO: 17630 - protein, 454 aa, Microcoleus sp.
MQNYVFVIDQNKQALNPIPPARARELLTKQKAAVFRMYPFTIILKHVVGNPSPKPLIIKLDPGSKFTGIAILDGENVIWAAQWEHRAWQIKNALESRRLLRRSRPNRKTRYRQSRFDNRKRPTGWLPPSLIHRVLTIETWVKRLCRYAPIAQIAMELVKFDTQKLQNPEVNGVEYQQGELAGYEVREYLVEKWGRKCSYGDSEGLPLQVEHIHPRSKGASNRVSNLTLSCERCNIKKGTKPVKEFLTKNPARLEKILQQAKQQLKDAGAVNSTGWALFRTLKNILPITTGTGGQTKYNRTRVKLPQQHWIDATCVGEIETIKLVTQQPLRIKPTGWGTRQMCATDRYGFPSRHRERNQIHFGFRTDDIASSVVTKGKKVGEDVGVYCVAKQAVLILPRDSAGYPALATDFVRQFIKRMVTPMRFRRYGRWLKPLAPEFLPPLKREGFQTSGRFW

SEQ ID NO: 17631 - protein, 408 aa, unidentified
  REGION 1..408: note = Human gut metagenome
MVYVQDIDGKPMMPTTRHGKVRRLLKANKATVVNLCPFTIRLTYATSGYKQEIVLGVDAGTKHVGLSATTKSKELYSSEVILRSDIVELLSTRRELRRTRRNRLRYRKPRFGNRVKSKHHGWVAPSVRHKIDAHIRVIDNICSTLPISRIIVEIAQFDTQKIKNPDISGNEYQEGDQLGFWNVREYVLARDGHKCQHCKGKSKDPILNVHHIESRKTGGDSPSNLITLCETCHKEYHKGNIDLKVKRGKSLRDAAVMGIMKWKLYEELKSRYPNVSMTFGYITKYNRIKYGIEKYHISDAFVISKNFNALRLEYHYKVRLVRRHNRQIHKQKVLKGGAKKPNQSPFEVFGFRLFDRVMFEGNYYFIFGRRKSGSFNIRDINGGNQRNVTYKKLKLSIGKRFMIQKEMN

SEQ ID NO: 17632 - protein, 480 aa, unidentified
  REGION 1..480: note = metagenome
LYTKPLDNIGEGSLPPSGEINLKGMTFMVYVKSIDGKALMPTSNAKARKLLKQKKAKVVSLRPFVVKLTYKTKTEYIQKLNLGVDSGYSNIGFSVIDAKQEYIAGEVKLLEGMKKRLLEKASYRRIRRSRLRYRKARWNNRVKSKKKGWLAPSLKHKLDTHIKFIDYLKNILPIGKITVEVANFDIQKMKDDLISGIDYQNGDMFGFWNMREFVLHRDGHKCQNPNCKHKDKKEQILKVHHIRYRSEGGSDRPENLITLCSKCHTPVNHKKGKFLYDWCVNGKKVRGFKDATFMSMIRWYLVNELKSKHNNVSITYGYITKNHRIQNGIEKSHLNDAFAITKGTNQARTKDRFLVIQDRLKNRSLEKFYDSKIIDIRTEKKVSGGDLNCGRSTRNKNLNTENLRKYRGAKISKGQRRIRKQKYFYQPNDLVKYDGKVYTVKGTQNEGKYIALKEIKKVPKVELLIPYVFKKGLNWSYGLC

SEQ ID NO: 17633 - protein, 446 aa, unidentified
  REGION 1..446: note = Human gut metagenome
LVSGQLIMVWEAIQTRRIKPHDIGEGILRRHAAGTVSFPVLCKNRKETLMSVLVIGRNGRALMPTNPRKARLLLKKKTASVVCRHPFTIQLLYKTGCATQKGSIGIDTGSQHIGVGITCGDKVILKDEHALRSSMEKRSLLATRAVMRRGRRYRKVRYRKPKWRHHTKRMYFEKANRRGQHWRKVKTTTQSPRSKGWLPPSLQSKCDHHFRIIDRYLKYLPDPITRNLVIETGRFDMARMNDPTIHGEMYQRGPMYDAENRRAYIFARDNYQCACCKAKAGTTRKADGTTVKLVAHHILFRSRGATDNPKYIISVCDHCHTTKAHQPGGILYSWMENNKKVARGLRDATFMNILRKRLFARYPQAAFTYGNITAADRKKLRLPKSHANDAVAISLFGKEASTVKNICQTMHYKQIRKSKRSLHEAIPRKGRKNPNTKAVRNKKNTT

SEQ ID NO: 17634 - protein, 425 aa, unidentified
  REGION 1..425: note = Human gut metagenome
MVYVVANDGQPLMPTERHGKVCRMLRSGMAKVIKKCPFTIQLQYESERNVQPVSLGVDAGSKHIGISATTKAKVLYESDVELRDDIVKLLATRRQLRRSRRSRKTRYRPARFDNRKRKEGWLAPSIRQKIGSHLTVVANVCKILPINQIIVETASFDIQKIKNPEIQGIEYQQGEQMDFWNVREYVFFRDGHTCQCCKGRSKDKILNVHHIESRKIGGNAPNNLITLCETCHKGYHNGTVILPKNIKRGMQFKDAAFMGIMRWAFYNALKEQYEPAIPVSMTYGYLTKNTRIEHGLLKEHYIDARCISGNPDAVSDGTYYYQKKVRCHNRQIHKQTILKGGIRKSNQAEYLVKGYRLFDKVRYHGREYFIFGRRKTGFFDIRTLSGEKVNKGSISVKKLTFADTRKNYLIERRTVLKMVANSSPA

SEQ ID NO: 17635 - protein, 414 aa, Parasutterella sp.; identical to SEQ ID NO: 5012

SEQ ID NO: 17636 - protein, 557 aa, Blautia sp.; identical to SEQ ID NO: 7395

SEQ ID NO: 17637 - protein, 303 aa, Anoxybacillus sp.
  SITE 303: note = misc_feature - Xaa can be any naturally occurring amino acid
MVFVLDTNKRPLAPCHEAVARKLLKQGKAAIYRRFPFTIILKKSVDESEIKATYRLKIDYGSRHTGLAILRGQEVVWLGQLDHRTDIKERIDKRRAFRRVRRNRKTRYRKPRFLNRKRKEGWLPSSLESRVQNIQTWVNRLKKLCPIGYISYENAKFDTQLMRNPEINGVEYQQGTLQGYEVREYLLEKFGRKCCYCGKENVPLEVEHIIPKSRGGTDRVDNLCLACHDCNQRKGSKTAEEFGYPHIQKQVKESLKDASAINSTRWKAYEVLKQTGLDVECGTGARTKMNRIRLDLPKTHYFX

SEQ ID NO: 17638 - protein, 457 aa, unidentified; identical to SEQ ID NO: 9139
  REGION 1..457: note = Human gut metagenome

SEQ ID NO: 17639 - protein, 536 aa, unidentified; identical to SEQ ID NO: 8176
  REGION 1..536: note = Human gut metagenome

SEQ ID NO: 17640 - protein, 417 aa, unidentified
  REGION 1..417: note = Human gut metagenome
MPCSPAKARLLLKEKKAIVKRRTPFTIQLTIATGEAKQPVTLGVDSGYKHIGLSATTEKAELYASQVELRQDITDLLSARLALRRSRRSRKTRYRAPRFDNRVASKRKGRLAPSVENRIAAHMSRVEAVMRVLPVTAITVETAVFDTQLLKTPDIAGAAYQQGEQLGFWNVREYVLFRDGHVCQHCRGKSKDPILNVHHIESRRTGGDAPNNLITLCETCHKAFHRGEIELKIKRGKSFKAETFMGIMRWTLFERLKKAHPELNVHNTYGYLTKHKRISHGIAKSHCADAYCIADNLSAKRLKGFFFQKQTRKHNRQIHKLSILKGGLRKKNQAPYEVKGFRLFDKVICEGEEAFIFGRRTSGSFDVRRLDGTRISAGISYKKLRRLESRTTYLTEFRKEAALPPLHKCRGFRAEFL

SEQ ID NO: 17641 - protein, 431 aa, unidentified
  REGION 1..431: note = Human gut metagenome
MPNKVYVINKHGRPLMPCSPAKARHLLDAGKAKVKKRTPFTIQLVYGSSGYTQEVILGVDAGSKTIGVSASTKKEELFAANVIPRNDVVDLLSTRREFRRARRNRKTRYRKPRFDNRVRSKHKGWLAPSVEVKIQEHITSIKRVCRILPVSKVVIETAEFDLQLLKAIADGKPVPQGEDYQQGEMYGHYNVRQYVLWRDGYTCQCCGAHATKKKEVRLHVHHLESRKVGGDAPDNQVTLCESCHEKLHKGLIAEKDFKKRKRKSTRDATFMGIMRKTLMQRLCSELPIPVIETRGYITKATREKLLVLPKSHTNDALAIAQGKQGFNVGYLPGILQIDKIYTIRPVRHHNRQLHKATILKGGIRKSNQTEKYVFGYRLFDKVQFNGQDCFIWGRRTTGIFTIKTINGKMIKDGISFKKLKLVEKSTSYLIA

SEQ ID NO: 17642 - protein, 464 aa, Actinomadura sp.; identical to SEQ ID NO: 6755

SEQ ID NO: 17643 - protein, 369 aa, unidentified
  REGION 1..369: note = Human gut metagenome
VDTGSGTIGTAVSNDNSDIVYMSEVIVRNDITDKMTQRRKYRKNRRGRKTRYRKARWLNRANSTKTDRFSPTMQSKLHSHVKEIEYIKSILPITTMVFETGQFDTHLMKNPNLANPKVKHWGYQKGVNYGFENTKAMVLNRDNYTCQCCKGKHKDSKLEVHHIIFRSQGGSDEESNLITLCHTCHKDLHSGTINFKLKGKLKGNLKYATQMNSIRKQLFMIYPDAIETFGYVTKANRLVLGIDKEHYYDACTIATQGNIFTVKSNLYKKKCVSDGDFQKTKGIRSEQPIVTDKICGFRKFDKVRYFGNNYFIKGRMSTGYAVLMDIDGNKADFSAMPKGYKTPKMVKLKRIEARTTWMITTVEVTPNIA

SEQ ID NO: 17644 - protein, 423 aa, Moorena sp.; identical to SEQ ID NO: 17624

SEQ ID NO: 17645 - protein, 465 aa, Thiorhodovibrio sp.
MNTNFVFVLDTDRRPLSPCRPARARELLRKGKAAVFRRYPFTIILKRAIPDATPTPCQVKLDPGSKTTGLALVQGEKVIWGGELHHRGHQIKERLASRAALRRGRRNRLRYRKPSYRTKAQINNAKATYARKRAAGWLPPSLQHRIETTMTWVNRLMRFAPVGELTQELVRFDMQRMENPEVSGVEYQQGELAGYELKEYLLQKWGRKCAYCGKENVPLEVEHIHCRSKGGTDRVSNLTLSCVPCNQKKGNRPIEEFLKNKPDVLKRVLAQARRPLKDAAAVNATRWALFHRLNATGLPVTVGTGGQTKFNRKRFGIDKAHWKDAACVGDMAAITFATDTALDITCKGQGGRQKAVVDRYGYPKQHRPLKPIHGWRSGDIARCNGQVGRISPRARGSFELRPFSGGKPFSRPMRQFERLHVTSIRLDEVYAEKRRYFAAVTNRFSQQQFNNRRGCVCQKNIPLWQ

SEQ ID NO: 17646 - protein, 473 aa, Moorena sp.
VSGLDLPNSKEEGKERAIDNIGEGNHTSFKEDWLYISQLFTKRRFKMKKLVYVVNKNEKPLMPCKASKAKKLLKNEKAEVFEYEPFTIKLKFGASGYKNKVVLGIDTGSSNIGIAAVCGNRVLFQAEAKTKTSLIVDRMTKRASYRRTRRNRKTRYRKPRFDNRKRKDGWLPPSIQENVEMHIKMIKMVNKILPVTKIIIETAQFDTHALKEGKYKLNNFEYQKGPLYKEENLKMYIRKRDKYLCQMPKCKEEKGVLECHHIIPRRKGGTNKPENLILLCEKCHKKITGKEEQFIDIFYSITKGKRINTKDFARTQAGKTKIVELAKTIAPVEQTIGAITKVDRKKIGLPKTHYNDAVAIASQGRKIKTLNYYYKFVNKGRGQYQLRKGIRSQMIAQSPEREIEGFKRWDKVKVIDTGEIGFINRKRTSGQFGISDIEGKTIYGSKTFRKLKKISSGKSILCEMKKIPKGGLK

SEQ ID NO: 17647 - protein, 428 aa, unidentified; identical to SEQ ID NO: 7211
  REGION 1..428: note = Human gut metagenome

SEQ ID NO: 17648 - protein, 470 aa, unidentified; identical to SEQ ID NO: 8190
  REGION 1..470: note = Human gut metagenome

SEQ ID NO: 17649 - protein, 413 aa, unidentified
  REGION 1..413: note = IscB polypeptide
VDLRLPAGGPKAITPVFVLSRDGSPLMPCKPAKARHLVRDGRAKIVRRSPFTIQLLWDCERNIQPITLGIDPGYENIGFSAVTDQKELISGEVKLRSNMSKKLADRKMYRQTRRSRLWHREPRFNNRISSKKPGWLAPSIRHKLDSHIRLVEQIKKLLPISKVTVEVSNFNIQKIKNPNIQGIDYQKGEQLSFWNVREYVLHRDNHTCQKCKGKSKDKVLQVHHIRGKKEGATDRPEELLTVCKTCHRRHHKGIDLIPIKEIKDFKPETFMSTIRWKLIDLLTCNYTYGYITKHNRINLGLEKTHANDAFCIANGNGQFRTDPFNVIQKRKNIRRLQQNRRGHGISVRRRRHTYQSYDLVKVKSKVISIGGESGASVYFWDETGKEKSIIIKKLDDWHVNARTLVWRKKLKIA

SEQ ID NO: 17650 - protein, 458 aa, unidentified
  REGION 1..458: note = Human gut metagenome
MSTCVCVLSNNGERLMPTFRLGKVRRLLKDGKAKIVKHHPFTIQLLYDSKTNTQPIEICEDVGCNYIGISAKSKSHEYVSAQYDTLQDEKEHHDDCRKMRRTRRNRLRYRKPRFDNRKRGEGWLAPSLRHKKELNVNVVKMYCAVMPITYATVEVGSFDTMLVKAIQEGKVIPEGADYQKGPRYNLATLREAVFYRDNYVCKVCGRKATEGAILHMHHMFYWKGRHGNSLDELLTVCEKCHTPANHQKGGKLYGFGEDVKFADLSGAAFMNAVRWQIVNALYATYGKEFVTITYGAMTKEKRIALQLEKTHNNDAYAMGEFHPSCRCKFRHYQKRRRNNRVLEKFYDATYIDTRTGNKAKGKELFNGRISRNHKKDSENLHKYRAHKITKGRRSIRSKHYDIQSGDTVLYAGRKCITTGCFNKGKWLRIPVGSTAKSVAISKVKLINHVGAWKKGSSI

SEQ ID NO: 17651 - protein, 528 aa, unidentified
  REGION 1..528: note = Human gut metagenome
LKVFVLNMRGQPLMPCSPAKARHLLKAGKAAVRRRTPFTIQLRIATGETKQSVTLGVDAGAKHVGLSAATEKEEVFASEVELRQDITGLLAARFSLRRERRQRKTRYRAPRFLNRVRSKHKGWLAPSVENRIQAHMSRIDAICGLLPVTKIVIETASFDIQKIKHPDVEGTDYQQGDQLGFWNVREYVLFRDGHVCQHCHGHAKDKILNVHHLESRQTGGDAPNNLITLCETCHKACHAGKIKLKVKRGQSFRAEAFMGIMRWTLLDRVRKAHPGLPVENTYGYLTKNTRITLGLPKAHCVDAYCIAGNLKAVRRGVYLHQRQVRKHNRQIHKCTVLSKTLKDGTKIGYRKLNQTPHLVKNFRLFDKVRCLGQTGFIFGRRSSGYFDVRRLDGVKISSCISYRKLTLLEKRSTCLTELRKEDGASSPCLKTEVSAPNFYETLPSARRHAHECDPRSWHGRCRRRQVRRRPPRRHGSDVRSLPRPRQGQSRHARHQDVHAVPQHEGPRREDEGRQADESARLPALSGPA

SEQ ID NO: 17652 - protein, 423 aa, Arthrospira sp.; identical to SEQ ID NO: 3193

SEQ ID NO: 17653 - protein, 414 aa, unidentified
  REGION 1..414: note = Human gut metagenome
MPCSPAKARLLLKEKKAIVKRRTPFTIQLTIATGESKQPVTLGVDAGYKHVGLSASTEKAELYASEVELRQDITDLLSARRALRQSRRNRKTRYRAPRFNNRLHTKRKGWLAPSVENRINAHLSRIEAVLRLLPVTKITVETASFDLQLLKNPDISGKEYQEGEQLGFWNVREYVLFRDRHVCQHCYGRSKDPVLNVHHLESRRTGGDSPGNLITLCETCHKALHRGEITLKAKRGQSFRAEAFMGIMRWEVHNRLRALHPGIEVSNTYGYRTKHARIANGIAKSHCADAFCIAGNLGAERLGEFFFQKQTRRNNRQIHKLSILKGGIRKRNQAPFEVKGFRLFDKVACQGEEGFIFGRRSSGFFDVRKLDGTRISAGISCKKLHLLEKRRTYLTEIRKEEALPPLPEGRGLRA

SEQ ID NO: 17654 - protein, 393 aa, Anoxybacillus sp.; identical to SEQ ID NO: 13407
  SITE 393: note = misc_feature - Xaa can be any naturally occurring amino acid

SEQ ID NO: 17655 - protein, 512 aa, unidentified
  REGION 1..512: note = Human gut metagenome
MSTVYVLNKDGKPLMPTTRCGHVRHLLKEQKARVVTSKPFTIQLLYEADDVVQSLCLGIDPGRTNIGVAAVKADGTAVFTAHLETRNKEIPKLMKKRKESRRARRTNGRRCRRQRRAKANGTISKKCVKNDTAQNGSVSKRAKDIGVIKRRLPGCEKDVLCIGIKNKETKFTNRTRPEGWLTPTANQLLQTHINLVKKIQKFLPISDVVLEINKFAFMRLDNPNVQKWQYQQGPLYQKANLEETVSEMQEHHCLFCKKKIDHYHHVVPQHKNGSNTIDNIIGLCTQHHDLVHKDATWQKRLAKKKTGLNKKYGALSVLNQIIPALTKELSSLFPKHFFVTNGKSTYDYRAAHGVSKDHWLDAYCIACSVLPNDTCDKTINSRVPYELKQFRRHDRRALNNENMSRVYTFNGKMVATNRHKATEQTTDSLEEFRQRQPNDVCNLKVKEHHPTYRNMNRNYPGSVFLVGNQVHVMQGIAGSKDGEATTYKDTNANSIAAGKCKFVAKNSGILFV

SEQ ID NO: 17656 - protein, 419 aa, unidentified; identical to SEQ ID NO: 5032
  REGION 1..419: note = Human gut metagenome

SEQ ID NO: 17657 - protein, 431 aa, Escherichia coli; identical to SEQ ID NO: 10059

SEQ ID NO: 17658 - protein, 412 aa, unidentified
  REGION 1..412: note = Human gut metagenome
MIYVQNSNGQPLMPTENHAKVRILLKQNKAVVVKRCPFTIKLTYKSTNYTQSVTLGIDAGSKHIGVSATTEDKEIYASDVELRNDIVKLLSNRRECRHSRRNRKTRYRKARFNNRKRGGGWLAPSIKEKIGTHLKVVNDVCKLVPVTKIIVETASFDIQKIKNPDIEGADYQQGEQLGFWNVREYVLCRDGHVCQCCKGKSKDPVLNVHHIESRKTGGNAPNNLITLCETCHKGYHKGTVKLPDEIKRGMKFNDAAFMGIMRWAFYGELKKRYPDVSLTYGYLTKNTRIRNGLPKEHYVDARCISGHPLAKPLSEVFYMKKVRCHNRQIHKCGILKGGVRKCNQSAYIVKGFRLFDRVKAKGREWYIHGKRTNGAFVLKCLNGSRLEIAPSKIRFISQQHNFITERRTLGQC

SEQ ID NO: 17659 - protein, 457 aa, Planktothrix sp.; identical to SEQ ID NO: 15536

SEQ ID NO: 17660 - protein, 472 aa, unidentified; identical to SEQ ID NO: 4432
  REGION 1..472: note = Human gut metagenome

SEQ ID NO: 17661 - protein, 420 aa, unidentified; identical to SEQ ID NO: 6212
  REGION 1..420: note = Human gut metagenome

SEQ ID NO: 17662 - protein, 442 aa, unidentified; identical to SEQ ID NO: 7529
  REGION 1..442: note = Human gut metagenome

SEQ ID NO: 17663 - protein, 414 aa, unidentified
  REGION 1..414: note = Human gut metagenome
MPCSPAKARLLLKEKKAIVVRRTPFTIQLTIATGETKQPVSLGVDAGYNHVGLSASTEKAELYASEIELRQDITDLLSARRALRQSRRNRKTRYRAPRFDNRIRTKRKGWLAPSVENRINSHLSRIEAVLRLLPVTKITVETASFDLQLLKNPNISGKEYQEGEQLGFWNIREYVLFRDGHVCQHCHGRSKDPVLNVHHLENRRTGGDSPGNLITLCETCHKELHRGEITLKAKRGQSFRAETFMGIMRWEVLDRLKASHPKLEVQNTYGYRTKHARIVNGIAKSHCADAFCIAGNLGAERLGEFLFQKQTRRNNRQIHKLSILKGGIRKRNQVPFEVKGFRLFDKVACKGEEGFIFGRRSSGFFDVRKLDGTRISAGISYKKLHLLEKRQTYITEIRKEKALPPLPEGRGLRA

SEQ ID NO: 17664 - protein, 428 aa, unidentified
  REGION 1..428: note = Human gut metagenome
LKVFVLNMRGQPLMPCSPAKARHLLKAGKAVVKRRTPFTIQLRIATGETKQNVTLGVDAGAKHVGLSATTEKEEVFASEVELRQDITGLLAARLSLRRDRRHRKTRYRAPRFLNRVRSKHKGWLAPSVENRIQAHMSRIDAICGLLPVTKIVIETASFDIQKIKDPSVEGTDYQQSDQLGFWNVREYVLFRDGHVCQHCHGRSKDKILNVHHLESRQTGGDAPNNLITLCETCHKAYHAGKIKLKVKRGQSFRAEAFMGIMRWTLLDRVRKAHPGLPVENTYGYLTKHTRITHGLPKTHCVDAYCIAGNLKAVRRGVHLYQRQVRKHNRQIHKCTVLSKTLKDGTKIGYRKLNQTPHLVKNFRLFDKVRCLGKTGFIFGRRSSGYFDVRRLDGVKLSSGISYRKLTLLEKRSTYLTELRKEDGASSPV

SEQ ID NO: 17665 - protein, 420 aa, unidentified; identical to SEQ ID NO: 14483
  REGION 1..420: note = Human gut metagenome

SEQ ID NO: 17666 - protein, 431 aa, Moorena sp.
MVYVLDIDGQPLMPTARHGKVRKLLNSHLAKVVKRCPFTIQLLYQSTKEIQPVSLGVDAGSKHIGLAATTEKKVVYQEELIPRNDVVKLLSARRVLRRSRRNRKTRYRKARFNNRVRSKHKGWLAPSVEVKIQEHITAIKNVCKILPVSEIHVETAEFDLQRLKAMEEGKPLPVGTDYQLGEQYDFYNTRQYVLHRDGYICQCCGTHDNDVKLHVHHIESRQTGGNAPNNLITLCEHCHKALHEGKIELPKGKKRGKSYRDAAFMGIMRNTLLERLKKEMDIPVIMTYGYITKCCREKAGLEKSHINDAICISKHPYAKPLDTYYLTKAVRHHNRQIHKANFSKGGIRKRNQTPYLVKGFRLFDRVLYQGKSYFIFGRRATGYFDIRTLDGIKVNKGSVSYKKLRIQDTAKAYLKEVRAIPHMNEFTCVLA

SEQ ID NO: 17667 - protein, 424 aa, unidentified; identical to SEQ ID NO: 8578
  REGION 1..424: note = Human gut metagenome

SEQ ID NO: 17668 - protein, 442 aa, unidentified; identical to SEQ ID NO: 11369
  REGION 1..442: note = Human gut metagenome

SEQ ID NO: 17669 - protein, 431 aa, Calothrix sp.
MEGLMSKIFVLDTNKKPLDPIHPAQARQLLRNKKAAIFRRFPFTIILKESRPNVEVSPLRLKVDPGAKYTGIALVNDSTGEVVFAAELKHRGFAIRDALTSRRQLRRGRRARKTRYRKPRFLNRTRPDGWLAPSLQSRIENIKTWVNKLCRFAPIVAISQELVRFDMQLMSNPDIQGKEYQQGTLAGYETREYLLEKLRRQCAYCGVKDVPLQVEHIHPRAKGGSNSITNLTLSCEKCNTKKGTKEIKEFLKKDPSRLEKILKQAKRPLADAAAVNTTRFALLRVLKATGLPVETASGGLTKFNRNQQTLEKTHWIDAACIGKSTPILNIKGVKPLLITANGHGSRQSCRTDKYGFPSRYVPRFKFVKGFQTGDIVKAVVTSGKKIGEYVGRVAVRTTGSFNISTSNELVQGISYKYCKAIHKKDGFAYSN

SEQ ID NO: 17670 - protein, 429 aa, Yangia sp.
MSNYVFVLDDGRRPLSPTSPARARQLLRDGKAAVFRRYPFTIILKRKVPDAKPAPVEVKIDPGSKTTGLALVQGGKVIWGGELTHRGHQIRERLQTRRERRRGRRNKLRYRKPRYMTKAQRNNADRKRGKGWLAPSLMHRVETIVTWTNKFRRYAPVGSISMELVRFDMQQMQNPEVSGVEYHQGELAGLEVKEYLLAKWDRKCAYCAAENRPLEVEHIQPRSRGGSNRVSNLTLACTKCNQKKGNRPVEEFLSGKTDLLARIMKQAKAPLRDAASVNSTRWYLFNALKKTGLPVTVGTGGRTKFNRKRLGWPKAHWLDAAAVGSVDTLTLRTDNPLLIEAKGHGGRQKGVFDKHGQPRRNKEGNVQIRPLKPIHGWRSGDIAKARGLMGRISPRTTGSFEIRAAGQKPRSFPAREFEAVHRNDGYGYQ

SEQ ID NO: 17671 - protein, 424 aa, unidentified
  REGION 1..424: note = Human gut metagenome
MRVFVFNMRGRPLMPCSQRKARLLLRENKAMIYKYHPFTIQLTYTTGETKQDCHIGIDTGSKYIGAAVRSEDKVFWKGEIELRQDIRSNLDTKRIYRRNRRNRKTRYRKPRFLNRKRRDEWLPPSLQSRINHTFHWIDTLSSLVPNPILHIEVGKFDVAKMINPEIHGVDYQHGQTYGFFDERYFVFARDNYTCQCCGKSKNKILNTHHIIYRSNGGTNRVDNLITVCTDCHTLQNHRKGGIFYQWQEQHKKVKQYKEPPFMNTLRKRIFVAYPDAEITYGSETTPKRKAMKLDKTHYNDAIVISGINEIKENPEEWLLIKQFRKKKRSLHEATARKGRKKPNRNQTRNSKNTPYYKGFYLNDKVSVFGKSGYITGFTSNAAYIKDENNDYITLPNKTYKQVSINKMELECHNNNWQYIIKNAV

SEQ ID NO: 17672 - protein, 436 aa, unidentified
  REGION 1..436: note = Human gut metagenome
VQHPRVAAKGETMRVFVKNMRGEPLMPCTQRKARLLLKAGKARICKYHPFTIQLDYATGETKQDCTIGIDTGSKNIGIAVRSEDKVLFKGEVELRQDVKSNLDTRRIYRRSRRNRKTRYRKPRFLNRKRPDTWLPPSLENRIRHTFRWIDVFCLLVPSPCLHIEVGKFDTAKMIDPKIQGVDYQHGQTYGYYDVRYFVFARDHYTCQVCGKSRDKILQTHHIRYRSNGGTDRADNLITVCTDCHTGRNHQKDGILYQWQEENKKVRSYKEPPFMNILRQRIFQRYPYAHITYGSETAQRRKKLCLGKTHYNDAIAISGIQTITEDPEEWLLIRQSRKKKRSLHEANPRKGRKKPNRTQERSSKNTPSYRNLYLNDKVSVLGRTGYISGFTNGGCYVKDTDGQYITLPGKTYKQVGIANVHRICHNNNWQYITKRAL

SEQ ID NO: 17673 - protein, 465 aa, unidentified; identical to SEQ ID NO: 3856
  REGION 1..465: note = Human gut metagenome

SEQ ID NO: 17674 - protein, 308 aa, unidentified
  REGION 1..308: note = Human oral metagenome
MRAKKWLPPSLQNRINHTFNWIDKFSALVPDPILHIEVGKFNTAKMINPDINGVDYQYGQTYGFFDERYFVFARDNYTCQVCGKSKGKILQTHHIIYRSNGGTDRVDNLITVCTDCHTSANHKKGGILYKWQAEHKKVKQYKEPPFMNVLRRRIFDKYPDAIITYGSETTPKRKEIGLEKTHYNDAIVISGIKAIKENPNEWLLIKQFRKKKRSLHEATARKGRKEPNRTQKRNSKNMPYYKGFWLNDKVFVLDQVGYITGFASYSAYIKNKNDEYITLPSKSYKQVGIASLKLLSHNNNWQYIRNAV

SEQ ID NO: 17675 - protein, 416 aa, unidentified; identical to SEQ ID NO: 4039
  REGION 1..416: note = Human gut metagenome

SEQ ID NO: 17676 - protein, 419 aa, Aneurinibacillus sp.; identical to SEQ ID NO: 4563

SEQ ID NO: 17677 - protein, 459 aa, Burkholderia sp.; identical to SEQ ID NO: 10761

SEQ ID NO: 17678 - protein, 408 aa, unidentified
  REGION 1..408: note = Human gut metagenome
MVFVLDRHHKPLMPCHPARARRLLGKGRARIHKLYPFTIRLVDRELKDSTVQPVVLKLDPGSKETGMALVREDETKTHHALYFVNLKHRGSEIKQSLLQRSSFRRSRRSRNLHYRAPRFLNRTRPQGWLAPSLQHRVDTTLSWVERLRKLAPVATLEMELVKFDTQKMQNPEIDGVAYQQGELAGFEVREYLLEKFGRKCIYCGAEGVPLNIDHIVPKSAGGSNRVSNLVLACVDCNQKKNNLPLEVFLKGDKAKINRIRSQLKTPLKDAASVNTTRWQLFEALKLTGQPLTTATGARTKYNRHQFGVPKEHWLDALCVGETAAVRGWQPLGVLVVKCTGRGAYKRTRLTKDGFPRGYLTRTKRFFGFGTGDMVVATVFASKKKGLLQRKSCSPQERQFCYSNCKQES

SEQ ID NO: 17679 - protein, 465 aa, Leptospirillum sp.
VQRKVRRRIRAGFCARQEKEAPDALPPGPGSGAFARGTGGGSQDRPVHHPAEGPDRGRNPAHSGQTRSRIEDHRARRGPGGRDGRGEDRPVLFQAEIHHRGSAIKKKLDQRRAFRRRRRSQLRYRTPRFDNRTRPDGWLPPSLRHRVDTTLAWVERLRRLVPVSELSQELVRFDMQKIENPEISGVEYQQGTLAGYEVREYLLEKWGGTCAYCGSENVPLEIDHIHPRSLGGSDRVSNLTLACRSCNLKKGNRPVGEFLAKTPERLSTILARAKAPLKDAAAVNATRLALFQALKATGLPVETASGGRTKWNRTRLVLPKTHALDAACVGKVDRIEGWNRPCLSVKATGRGSYRRTRLDAFGFPRGSLTRTKAHFGFQTGDRVMAIVTKGKKTGTYAGRVAVRSSGSFNIQTGSGVVQGISCKDCRLLQRADGYGYSIHPITEKGEAGEALSLPGMNAGVSRARG

SEQ ID NO: 17680 - protein, 450 aa, Clostridium sp.
MVYVINFEGKPLMPTTNAKARKLLKQKKATVKRVNPFIIQLLYKTDTEYIQTITLGIDSGYLNIGFSAITDSKELIVGEVKLLQGIKDRLLEKSQYRRIRRQRLRYRKPRWNNRKIRQGWLAPSLQHKLDTHVKFIDYLNTILPIRNIVLEVANFDIQKIKNPDISGVEYQQGEQMGFWNVREYVLHRDGHKCQNPNCKNKSKEQILEIHHIKYKSEGGSDAPSNLITLCNKCHTSPNHKKGKFLYDWCENGKKVRGFRDATFMSMIRWYLLEQLKEKYTNIKATYGYLTKNHRIEHGIEKSHFNDAFAIAKGVNQVRNLEIFKVEQSRLNNRSIEKFYDAKYIDNRTGEKVSASELNCGRRTRNKNLNSENLRVFRGQKISKGQRRIRKKKSLYQPNDLIKYESKVYTVKGSQNEGKYIALKEIKKVPNVKLIKPYIFKKGLNWSHGLC

SEQ ID NO: 17681 - protein, 420 aa, unidentified
  REGION 1..420: note = Human gut metagenome
MQYVYVLSKHGEPMMPCSPGKVRLLLKQQKACVVRRTPFTIKLLYGSAGYKQPITLGVDAGSKHVGLSASTEKRELYREEFAPRNDVVELLSTRRQNRRSRRNRKTRYRAPRFDNRVHSKHKGWLAPSVEVKIQEHITIIKRICKILPISLVRVETAEFDTQRLKAMLAGKPLPVGTDYQLGEMYDEYNVRQYVLKRDNYTCQCCGAHTTAKKLVKLHVHHLESRKTGGNAPSNLVTLCTTCHKNLHKGKVTLDGKERGKPLRDAAFMGIMRKTLMARLKKELPIPVQGTYGYITKMRREQNDIKKSHTNDARCISKHPLAEPCSVCYRTKAIRHHNRQTHKANFSKKGIRKRSQMPYLVEGYRLWDKVLYKEQECFVSGRRSSGSFTLKKLDGTSVSKGVTFKKLRLLEPATNYLIERM

SEQ ID NO: 17682 - protein, 323 aa, unidentified
  REGION 1..323: note = Human gut metagenome
TRYRAPRFDNRIRTKRKGWLAPSVENRINAHLSRIETVIRLLPVTKISVETTSFDMQLLKNSDIAGKEYQEGEQLGFWNVREYVLFRDGHVCQHCHGRSKDPVLNVHHLESRRTGGDSPGNLITLCETCHKALHRGEITLKAKRGQSFRAETFMGIMRWEVLDRLKASHPKLEVQNTYGYRTKHARISNGIAKSHCADAFCIAGNLGAERLGEFFFQKQTRRNNRQIHKLSILKGGIRKRNQAPFEVNGFRLFDKVACKGEEGFIFGRRSSGYFDVRKLDGTHISAGISYKKLRLLEKRQTYLTEIRKEEALPPLPEGRGLRA

SEQ ID NO: 17683 - protein, 470 aa, unidentified
  REGION 1..470: note = Human gut metagenome
MSVFVVGLNGCRLMPVSERKARLLLKGGKASIYRKVPFTIKLNYKTGSTVQPGYLGIDTGSQHIGVSVVQKDGTVLHKEEIGLRDSMSKRKLLESRASSRRGRRYRKTRYRHPKWKPKTKRTYNEKADRKGRHWKKQKNTFTSKRQAGWLPPSLQSKTDHHIQWIRKLLDLLPEGYRLSIELGRFDPARMKDPEIHGELYQKGPQYDYENVRAYVLDRDRYTCQICKKKGGKLHVHHILYRSHGATDDPQYMVTVCSDCHSAQNHLPGGILYQWMQEQKRFSRGLRDATFMNILRKRLIRAFPEAVFTYGNVTKVDREKLKLPKSHGNDATAIALVKTGITAVKDKESVICIQQVRRKKRSLHEETPRKGRKEPNRTAARNNKNTKAVTVTKRQNKKKVSMTGCLFDRVELNGKKGWISGFTGKSCYVKDADDQYLSTSPKYKQVSLSKLRILHHCGNWIIGAKKTLGKG

SEQ ID NO: 17684 - protein, 428 aa, unidentified; identical to SEQ ID NO: 14557
  REGION 1..428: note = Candidatus Thiomargarita nelsonii

SEQ ID NO: 17685 - protein, 494 aa, unidentified
  REGION 1..494: note = Human gut metagenome
MTMVYVQNKDGKPLMPTTRYCYVRLLLKEKKARVVCTTPFTIRLNYDTPDITQDLILGIDPGRTNIGVAVVKEDGQCVFSAHLETRNKDVPLLMKKRAAFRRNHCTLDRRRKRQRRAKAAGTTIADGSAERLLPGYEKPIVCHYIRNKKARFNNRKCPQGWLTPTANHLLQTHINLIAKVAKFLPITKVVVELNRFAFMAMDNPNIRRWEYQQGSLYGLGSVEDAVYAQQDGHCLFCKKPIDHYHHVVPRRKNGSETLANRCGLCAKHHALVHTDKAWAGKLVTQKEGMNKKYHALSVLNQIIPSLMEYLGDEMLYDVYATDGRSTKGFRIAKNLPKEHYTDAYCIACSILDTNIKVSAPVEPFELKQFRRHDRQACHQQRVDRKYYLDGKQVATNRHKAIEQKSNSLEEFRETYGDAAVSQLTVKPHPPQYKDMTRIMPGAVMNFCGAVGILLGSDGFHNGKPDYYKSTKEEKVRMRRCALLAQNAGMVFIPA

SEQ ID NO: 17686 - protein, 414 aa, unidentified; identical to SEQ ID NO: 8369
  REGION 1..414: note = Human gut metagenome

SEQ ID NO: 17687 - protein, 423 aa, Oscillatoria sp.; identical to SEQ ID NO: 5009

SEQ ID NO: 17688 - protein, 420 aa, unidentified; identical to SEQ ID NO: 7764
  REGION 1..420: note = Human gut metagenome

SEQ ID NO: 17689 - protein, 424 aa, unidentified; identical to SEQ ID NO: 3232
  REGION 1..424: note = Human gut metagenome

SEQ ID NO: 17690 - protein, 442 aa, unidentified; identical to SEQ ID NO: 3234
  REGION 1..442: note = Human gut metagenome

SEQ ID NO: 17691 - protein, 456 aa, Idiomarina sp.; identical to SEQ ID NO: 2773

SEQ ID NO: 17692 - protein, 422 aa, Methanosarcina sp.
  SITE 422: note = misc_feature - Xaa can be any naturally occurring amino acid
MLVFVINQNKKPLMPCKPSKARKLLQAGKAKVVRNTPFTIKLLFRSSGYTQPVTAGMDTGSKVVGCAAIANGKVLYQSEIYLRENVSKKMEQRKMYRRTRRSRKTRYRPARFDNRGNSKKEGRLAPSIRSKLEAHFREKRFVESLLPVTEWKVELASFDIHKITNPEVSGIGYQEGDLKGFYNIKAYVLDRDGYTCQHCRGKSKDSRLHCHHIVFRSQKGTDAPENLITLCETCHKALHNGEFKLSGKKSKTKHATEVGIIKSQIRKSGWNFAETFGYETKYRREQVLKLLKTHYFDAVAICCRDEQKVEVEESVFLKRNVSKGDYQQRTGKRSEKKIHTGKLFNLRKFDLVKTSKGIGFVKGKRSSGFFAISDMFGNKISDSVNVKKICERLRARTSTLIQQSRTGKFTHSSPELKTQGFX

SEQ ID NO: 17693 - protein, 407 aa, Succinivibrio sp.; identical to SEQ ID NO: 14790

SEQ ID NO: 17694 - protein, 432 aa, unidentified; identical to SEQ ID NO: 6070
  REGION 1..432: note = Human gut metagenome

SEQ ID NO: 17695 - protein, 431 aa, unidentified
  REGION 1..431: note = Human gut metagenome
MDAWDIIVVLNKRGKPLMPCSPAKARHLLKEKKAAVVRRTPFTIQLTIATGESKQPVSLGVDAGYKHVGLSASTEKAELYASEVELRQDITDLLSARRALRQSRRNRKTRYRAPRFDNRIRTKRKGWLAPSVENRINAHLSRIETVIRLLPVTKISVETTSFDMQLLKNSDIAGKEYQEGEQLGFWNVREYVLFRDGHVCQHCHGRSKDPVLNVHHLESRRTGGDSPGNLITLCETCHKALHRGEITLKAKRGQSFRAETFMGIMRWEVLDRLKASHPKLEVQNTYGYRTKHARISNGIAKSHCADAFCIAGNLGAERLGEFLFQKQTRRNNRQIHKLSIPKGGIRKRNQVPFEVKGFRLFDKVACKGEEGFIFGRRSSGYFDVRKLDGTHISAGISYKKLRLLEKRQTYLTEIRKEEALPPLPEGRGLRA

SEQ ID NO: 17696 - protein, 301 aa, unidentified
  REGION 1..301: note = Human gut metagenome
LYIKMTSCTCTVFPAYNYAKASSSQGKHNLLLRQERLIVKEVAYMSTVYVLNKDGKPLMPTTRCGHVRHLLKEQKARVVTSKPFTIQLLYEADDVVQSLCLGIDPGRTNIGVAAVKADGTAVFTAHLETRNKEIPKLMKKRKESRRARRTNGRRCRRQRRAKANGTISKKCVKNDTAQNGSVSKRAKEIGVIKRHLPGCEKDVLCIGIKNKEAKFSNRTRPEGWLTPTANQLLQTHINLVKKIQKFLPISDVVLEINKFAFMRLDNPNVQKWQYQQGPLYQKANLEETVSEMQEHHCLFCK

SEQ ID NO: 17697 - protein, 478 aa, unidentified
  REGION 1..478: note = Human gut metagenome
GTVSFPALCNNIKEALMSVLVIGQNGRALMPTTTRKARILLKENKASVVCRHPFTIHLRYKTGCATQEGSIGIDTGSQHIGVGVTCGNKVILKDEHELRSSMEKRSLMETRATMRRGRRYRKVRYRKPKWRHHTKRMYFEKANRKGQHWRKVKTTTQSPRPESWLPPSLQSKCDHHFRIIDRYLKCLPDSITKNLVIEVGRFDMARMNDPTIHGEMYQRGPMYDTENLRAYIFARDGYKCACCKAKAGSIRKKDGTSVKLIAHHIQFRSRGATDNPKYMISVCDHCHTTKAHQPGGILYSWMEKNKKVTRGLRDATFMNILRRRLFDRFPQAAFTYGNITAVDRKRLLLPKSHANDAVAISLFGKDVSVINATCQTLRYKQVRKSKRSLHEATPRKGRKEPNTKAIRNKKNTTHVNGFKLWDSVLANGQKLFICGFTGSSAYLVDQDGHYVSPPGKTYKQWTLSNLSRLHPNGNWLMA

SEQ ID NO: 17698 - protein, 451 aa, unidentified; identical to SEQ ID NO: 3061
  REGION 1..451: note = Human gut metagenome

SEQ ID NO: 17699 - protein, 423 aa, unidentified; identical to SEQ ID NO: 3951
  REGION 1..423: note = Human gut metagenome

SEQ ID NO: 17700 - protein, 465 aa, unidentified
  REGION 1..465: note = Human gut metagenome
MSTCVCVLSNNGERLMPTFRLGKVRRLLKDGKAKIVKPHPFTIQLLYDSKTNKQPIEICEDVGYNYIGISVKSESHEYVSAQYDTLQDEKEHHDDCRKMRRARRNRLRYRKPRFDNRKRDEGWLAPSLEHKKQLNISLIERYVSVIPITHATVEVGSFDTMLLQSIQKGEAKPEGADYQKGPRYNLATLREAVFYRDNYTCQVCGRKVADGAILHMHHMFYWKGRHGDSLNELLTVCEKCHTPANHQKGGKLYGFGENVKFADLSGAAFMNTVRWQIVNELYAAFGKDFVTVTYGAMTKEKRIALRLEKSHNNDAYAMGEFHPNCRCTFEHYEKVRRNNRILEKFYDSRYIDIRTGEIATGKELFNGRINRNHKKDSENLHRYRGKRTYAGHRALLRKKVNLNPGDLVSLNGEVLVVHSTHTNKKGAVNVEFKTPGKSGQKSASLKKLKIVKAADSMHSAWEKIS

SEQ ID NO: 17701 - protein, 499 aa, unidentified
  REGION 1..499: note = Wastewater metagenome
MLNISEQTDLGVLPQPRALEPALEDNPGVGTKLGAGEQTGVQHGRGERLSSHSASHGNAESSAVPVARGNACVFVLDKNGRPLSPTSPARARILLKKGRARVVRNTPFVIRLVDRLAKDSTVTPVDVGVDPGSRFTGISMFTTTRNGRVGLFSIEIQHRGNQIHKRMQQRANYRRRRRSKNLRYRAPRFNNRSRPAGWLPPSLQHRVDTVSSWVRRLQRWAPVEQVWFESTRFDTHLLSDPNVFGDGYQNGTLAGTEIREYLLAKWDHQCAYCDATNVPLNLDHVVPKARGGSDRVSNLVVACIPCSQRKDKQQVEEFLAHDPARLRRIKAQLKAPLRDAAAVQSTRNALLRASNALNVTVRTSTGGRTKWNRTRNNLPKTHTLDAICVGVFDRVSRVPIMVLVVKASGRGRYARTTPNKYGFPRHLSPRVKTVHGFQTGDHVKAIIPTGKHAGTYVGRVAVRTRGWFKINGVEVHHKRVTLLQRADGYGYSTRTEEIS

SEQ ID NO: 17702 - protein, 451 aa, unidentified
  REGION 1..451: note = Human gut metagenome
MSVAVISKTGERLMPTSEYRARKLLKSGKAVKHSYHPFTIQLTERKTGDVQPIELCMDTGYIHIGISVKSEKHEYLAEQIDTLTDERIRHDACRMYRRQRRGRKRYRKPRFNNRKRDKGWIAPSLKHKKDIHVQAISRINKVMPLTDITMEMGNFDTQVLKAKEEGKPLPQGACYRHGERYGTATLREAVFSRDGYKCQCCGRTIRDGAMLHVHHVKYRSQGGTNSMANLATVCDKCHTPKNHKPGGKLYNWKPKLPDFKGATFMTTIRWQLYNEVKSLFPDINVHITYGAATKEQRRELNIDKSHVNDAFAMGKFHPKHRANAVLYKKKRRNNRCLEKFYDAKYIDSRDGSKKTGQELFNGRINRNHKKDSENLHQYRLQKIKAGKRTIRKQHYSIQPHDIIMYKNRKRETSGCHCNGTRVVLLPDKKTAAIQKVKIYKYAGGYFKSAFN

SEQ ID NO: 17703 - protein, 422 aa, unidentified; identical to SEQ ID NO: 13732
  REGION 1..422: note = Human gut metagenome

SEQ ID NO: 17704 - protein, 496 aa, Oribacterium sp.; identical to SEQ ID NO: 14972

SEQ ID NO: 17705 - protein, 421 aa, unidentified
  REGION 1..421: note = Human gut metagenome
MRGQPLMPCSPAKARHLLKAGKAMVRRRTPFTIQLRIATGETKQSVTLGVDAGAKHVGLSATMEKEEVFASEVELRQDITGLLAARLSLRRERRHRKTRYRAPRFLNRVRSKHKGWLAPSVENRIQAHMSRIDAVCKLLPVTKIVIETASFDIQKIRNPTVEGTDYQQGNQLGFWNVREYVLFRDGHVCQHCHGHSKDKILNVHHLESRQTGGDAPNNLITLCETCHKAYHAGKIKLKVKRAQSFRAETFMGIMRWTLLDRVRKAHPGLPVENTYGYLTKNTRITLELPKTHCVDAYCIAGNFKAVRRGVYLYQRQVRKHNRQIHKCTVLSKTLKDGTKIGYRKLNQTPHLVKNFRLFDKVRCLEQTGFIFGRRSSGYFDVRRLDGVKLSSGISYRKLTLLEKRSTYLTELRNEDGASSPV

SEQ ID NO: 17706 - protein, 516 aa, unidentified
  REGION 1..516: note = Human gut metagenome
MTVLEELLSKTEYVYVLGTDGKPQMPSKRKRHILKLLNTGKARIVEKMPFTVQLKYKSTPILQPITLAEDPGRTNIGTAALSQLGDLIFSAVVETRNKEIKKLMSDRKAHRQASRRGERKARQRLAKKYNTMIKAGMIMRKLPQYAADKFVTCKFIRNTEARFCNRKRCQDWLTPTVNHLVQTHLNVVKKINKYLPITDIAIEVNRFAFIQMKNPDASGVDFQNGPLKGFDDIKAAIREQQHGKCLMCKNDIEHFHHIIQRSKGGSDTIKNLAGLCKKCHAKVHTDAEFQAKLKDKKEGLIKKYGALSALNQAVPFICKELLKIYGAEHVYFCTGKDTSLIRSSLGYEKTKENQMHEIDAYCIGLAALGVNHVKELPESINTYKIKQFRRQDRSAIHHQTERSYYLGKQKIATNRKPRFEQSGDALSDWYEKQVQRYGKREADKMLSAVTVKKSTRFYNVSNRLMPGTVFDYNGQRYVMSGQLTGGKYLREYGDTKTNYPVLKCRVLRKNEGLVFI

SEQ ID NO: 17707 - protein, 414 aa, unidentified; identical to SEQ ID NO: 2588
  REGION 1..414: note = Human gut metagenome

SEQ ID NO: 17708 - protein, 437 aa, Moorena sp.
MVFVLSSDQQPLDPCHPARARQLLRRGRARLVRRFPATIQLLDRTAAQSTTHGLRLKIDPGSRTTGLALVAEPTAPVVWAAELTHRSAAIRDALLARRGHRRQRRQRHTRYRPARFNNRRRPAGWLAPSLRSRVDHILTWLRRLRGVCPLTAISVELVRFDTQALVNPEITGVEYQQGELVGYEVREYLLEKWQRTCAYCGATGVPLQVEHLVPRSRRGSDRVSNLTLACEPCNQRKGSQTAAEYGFPQLMALAQRPLRDAAAVNSTRWALYASLQATGLPVEAGTGGRTKYNRTRLGWVKTHWQDAAAVGASTPERLRIVTPQVLQITATGRGLHSRTKLDKYGFPRLRLPRQKRFFGYQTGDMVEAIVTTGTKQGRYHPEGTRRVAVRASGSFNVTTAMGTVQGLHHRFFRLVQRADGYRYASQPTSRLLDPLTS

SEQ ID NO: 17709 - protein, 466 aa, Moorena sp.; identical to SEQ ID NO: 14539

SEQ ID NO: 17710 - protein, 421 aa, Moorena sp.
MNVVYVLSPDRVPLMPCSCAIARLLLKQGKAKVVRRTPFTIKMYTQPVDTHTQPLTLGIDTGSAVIGSAVSDECGNILYVSEGEVRNDIAQTMKNRATSRRNRRYRKTRYRPARWLNRRNSLKTGRFSPTMTSKTEAHLREIRFVQSLLPIQSIVLETGTFNPHALKHPAVLQNKWMYQKGINYGLANTKAYVLTRDGYVCQRCKGQSKDRRLEVHHIVFRSQQGSDEEANLLTLCKTCHEGLHAGTVTLKQKGKRKGNLLHATQMNSIRIQLLSRVEAIETWGFVTKEHRLLAGLPKEHIFDAAMIATRGNIPVFQTTEVLLKKCISDGDYQQTKGKHSQQRIPTGKIAGFRKFDKVRYLGVEYFIKGRMSTGYAILMDLSGNKLALKPTPKFDNMKRVSARSSWIINQKALPSFSSSPT

SEQ ID NO: 17711 - protein, 408 aa, unidentified; identical to SEQ ID NO: 8155
  REGION 1..408: note = gut metagenome

SEQ ID NO: 17712 - protein, 430 aa, unidentified
  REGION 1..430: note = Human gut metagenome
MPNKVYVINKHGRPLMPCSPAKARHLLDDGKAKVKKRTPFTIQLVYGSSGYTQEVILGVDAGSKTIGVSASTKKEELFAANVIPRNDVVDLLSTRREFRRARRNRKTRYRKPRFDNRVRSKHKGWLAPSVEVKIQEHITSIKRVCRILPVSKVVIETAEFDLQLLKAIEEGKPVPQGEDYQQGEMYGHYNVRQYVLWRDDYTCQCCGAHATKKKEVRLHVHHLESRKTGGDAPRNLITLCDSCHKKHHDGLITEDDFKKRKRRSTRDATFMGIMRKTLIQRLRAELTIPVAETRGYITKATREKLLVLPKSHTNDALAIAQGKRGFNVGYLPGIIQTDKIYTIRPVRHHNRQLHKATILKGGIRKSNQAEKYVFGYRLFDKVQFNGQDCFIWGRTTGIFTIKTINGKMIKDGISFKKLKLVEKSTSYLIA

SEQ ID NO: 17713 - protein, 457 aa, unidentified
  REGION 1..457: note = Human gut metagenome
VWLTQTTCDIGEGFQLSAKRERLLFSRQIFKKEHGIMQYVYVLNKHGKPLMPCSPGKARLLLKEGKARVVKRTPFVIKLLHGSAGYKQPVALGVDAGSRHVGLSACTEGRELYKEELSPRNDVVELLSVRRQYRRSRRNRKTRYRAPRFNNRVHSKHKGWLAPSVEVKIQEHITVIKRVCRILPIVLVRVETAEFDTQRLKAMLEGKPLPVGSDYQLGEMYDEYNVRQYVLKRDNYTCQCCGAHPAEKKPVRLHVHHIESRHVGGNAPNNLITLCAVCHKALHEGKITLGNGKKRGKPLRDAAFMGIMRNTLLARLKDELNIPVKQTYGYITKLLREENHVEKSHTNDARCIAKAPNAKPCDTMFRTRALRHHNRQIHKAKILKGGTRKKNQAPYLVKGFRLWDKVRYNGEECFITGRRTSGYFAIKKYDGTVISNSASYKKLTLLEAATNYITERS

SEQ ID NO: 17714 - protein, 415 aa, unidentified; identical to SEQ ID NO: 2744
  REGION 1..415: note = Human gut metagenome

SEQ ID NO: 17715 - protein, 283 aa, Parasutterella sp.; identical to SEQ ID NO: 14303

SEQ ID NO: 17716 - protein, 536 aa, unidentified; identical to SEQ ID NO: 4526
  REGION 1..536: note = Human gut metagenome

SEQ ID NO: 17717 - protein, 442 aa, unidentified; identical to SEQ ID NO: 4522
  REGION 1..442: note = Human gut metagenome

SEQ ID NO: 17718 - protein, 415 aa, unidentified
  REGION 1..415: note = Human gut metagenome
MVYVLDKNGQPLMPTDRHRKVRLMLQSGQAKVIKRCPFTIQLNYDSGHQTQEISLGIDAGSKHIGVSATTKIKVLYEADVELRNDIVDLLSSRRELRRGRRNRKTRYRQAKFNNRRRGNGWLAPSIRQKIGTHLTVVENICKILPISRIMVETASFDIQKIKNPDIQGAEYQQGDQLGFWNVREYVLFRDGHTCQCCKGKSKDKILNVHHIESRKTGGNAPNNLITLCEICHTGYHKGAVQLPKTVKRGMRFKDAAFMGIMRWAFYEALKQQYEPVALVHNTYGYITKHTRIEHNLPKEHYVDARCISGNPDAFPSGEYYYQKKVRCHNRQIHKLTILKGGIRKQNQATYLVKGYRLFDKVSYQGKGYFVFGRRQSGFFDIRTLSGEKVNKGSLSCKKLKFIATRTHYLTERRAV

SEQ ID NO: 17719 - protein, 424 aa, unidentified; identical to SEQ ID NO: 3434
  REGION 1..424: note = Human gut metagenome

SEQ ID NO: 17720 - protein, 521 aa, unidentified; identical to SEQ ID NO: 7054
  REGION 1..521: note = Human gut metagenome

SEQ ID NO: 17721 - protein, 416 aa, unidentified
  REGION 1..416: note = Human gut metagenome
MVYVLDKNGQPLMPTDRHRKVRLMLQSGQAKVIKRCPFTIQLNYDSGHQTQEISLGIDAGSKHIGVSATTKIKVLYEVDVELRNDIVDLLSSRRELRRGRRNRKTRYRQAKFNNRRRGNGWLAPSIRQKIGTHLTVVENICKILPISRIMVETASFDIQKIKNPDIQGAEYQQGDQLEFWNVREYVLFRDGHTCQCCKGKSKDKILNVHHIESRKTGGNAPNNLITLCETCHTGYHKGTVQLPKAIKRGMRFKDAAFMGIMRWAFYEALKQQYEPVGTPVHNTYGYITKHTRIAYNLPKEHYVDARCISGNPEASSNGEYYYQKKVRCHNRQIHKLTVLKGGIRKQNQATYLVKGYRLFDKVSYQGKGYFVFGRRQSGFFDIRTLSGEKVNKGSLSCKKLKFIATRTYYLTERRAV

SEQ ID NO: 17722 - protein, 437 aa, Moorena sp.
MRVFALDKNRKPLDPCHPARARILLKQGRAKVLRRYPFTIILGDLDIENCVTHFQQLKIDPGAKTTGLAIVQNHRVVWAAELTHRGFQIRDALTSRRQMRRSRRNRKTRYRQPRFLNRKKPEGWLPPSLMSRVHNILTWVKKLIRFCPIAGCSQELVRFDTQKMQNPKISGTDYQQGTLYGYELREYLLEKWHRTCAYCGATATPLEIEHIKPKSKGGSDRVSNLTIACHSCNQAKGNQEIEQFLSNKPSILKGILSQAKRPLADTAAVNATRWKLYNELKSTGLSVEVGSGGLTKYNRCRQNFPKTHWLDAANVGSVETLYVEDYQPLLITAKGHGTRQICRTDKFGFPKRHCSRIKIHKGFQTGDIAKAIVTKGKKIGTYVGRVATRATGYFNISTNNGLVQGISHRYCQAIHRKDGYSYQFHRASRCYPFSSPL

SEQ ID NO: 17723 - protein, 431 aa, unidentified; identical to SEQ ID NO: 15055
  REGION 1..431: note = Human gut metagenome

SEQ ID NO: 17724 - protein, 434 aa, Anoxybacillus sp.; identical to SEQ ID NO: 3421

SEQ ID NO: 17725 - protein, 419 aa, unidentified; identical to SEQ ID NO: 5032
  REGION 1..419: note = Human gut metagenome

SEQ ID NO: 17726 - protein, 512 aa, unidentified; identical to SEQ ID NO: 2990
  REGION 1..512: note = Human gut metagenome

SEQ ID NO: 17727 - protein, 515 aa, unidentified; identical to SEQ ID NO: 15926
  REGION 1..515: note = Human gut metagenome

SEQ ID NO: 17728 - protein, 426 aa, Anoxybacillus sp.
MVFVLDTNKRPLAPCHEAVARKLLKQGKAAIYRRFPFTIILKKSVDESEIKATYRLKIDYGSRHTGLAILRGQEVVWLGQLDHRTDIKERIDKRRAFRRARRNRKTRYRKPRFLNRKRKEGWLPSSLESRVQNIQTWVNRLKKLCPIGYISYENAKFDTQLMRNPEINGVEYQQGTLQGYEVREYLLEKFGRKCCYCGKENVPLEVEHIIPKSRGGTDRVDNLCLACHDCNQRKGSKTAEEFGYPHIQKQVKESLKDASAINSTRWKAYEVLKQTGLDVECGTGARTKMNRIRLDLPKTHYFDACCVGESTTNHLYFKTKEVLFIKAKGRGSHSRTNLDRYGFPRGYLARQKFFFGFQTGDMVKAVVPRGKYQGVWFGEVACRKTGSFDIKGKDGKRIAQGINYRYVQVIQRFDGYAYGKGVAELA

SEQ ID NO: 17729 - protein, 512 aa, unidentified; identical to SEQ ID NO: 14331
  REGION 1..512: note = Human gut metagenome

SEQ ID NO: 17730 - protein, 433 aa, unidentified
  REGION 1..433: note = Fermentation metagenome
MVYVISKNGKPLMPTERHGKVRILLKKKKAKVISRKPFTIRLLYDTKEYTQSAKLGIDSGYKYIGYSAVTKDKELISGEVELLSGQTERLKERAMYRNNRRNRLRHRKPRFNNRKRPKDWLAPSIQHKFDSHIRFINKLKEIVPISEVIIEVANFDTHKLKNFSISGKGYQEGEQQGFYNLREYILHRDGYTCQICGAENVPLEVHHIGYWKKDRSNRPANLMAICTKCHLPKNHQEGGKLWGLKPINKGFKETTFMSMVRWRLVNELGCKHTYGYITKSKRIELGLEKSHANDAFAIAGGENQARANMINFNQVRKNNRSLEKFYDAKYIDTRTGKKVTGKELSSGRKCRNKNFNDKNLRQYRGCKLSKGRRSIRKKRYFYQPSDLVKYNSRIYTVKGTQNKGKYVALKEIKKVPKVDLVEPYEFRSGFVAI

SEQ ID NO: 17731 - protein, 419 aa, unidentified; identical to SEQ ID NO: 3670
  REGION 1..419: note = Human gut metagenome

SEQ ID NO: 17732 - protein, 403 aa, unidentified
  REGION 1..403: note = Human gut metagenome
RCRRQRRAKANGTISKKCVKQDTAQSKNPSKRAKEIGIIKRRLPGYKKDVLCIGIKNKEAKYTNRTRPEGWLTPTANQLLQTHINLVRKMQKFLPISDVVLEVNKFAFMRLDNPDIQKWQYQQGPLYQKGSLENAVSEMQEHHCLFCDKPIDHYHHVVPQSENGSNTIANIVGLCAEHHNLVHKDAAWQKKLAEEKVGLNKKYGALSVLNQIIPALTNKLSVLFPKHFFVTAGKSTHDYRAAHGVSKDHWLDAYCIACSVLPSNVCDSNINNHMPYELKQFRRHDRRVLNNENMNRVYTLDNKAVAINRHKATEQEAASLEEFRKEHPNDVCKLKVKEHHPTYRNMNRNYPGSIFLVGKHVHIMQGIAGSKDGKATTYKDFNANSITASKCKFVAKNSGILFV

SEQ ID NO: 17733 - protein, 413 aa, unidentified; identical to SEQ ID NO: 3695
  REGION 1..413: note = Human gut metagenome

SEQ ID NO: 17734 - protein, 408 aa, unidentified; identical to SEQ ID NO: 13717
  REGION 1..408: note = Human gut metagenome

SEQ ID NO: 17735 - protein, 446 aa, Pseudomonas sp.; identical to SEQ ID NO: 10242

SEQ ID NO: 17736 - protein, 347 aa, unidentified
  REGION 1..347: note = Human gut metagenome
LPIYRKEHDIMQYVYVLNKHGEPLMPCSPGKARLLLKQQKAHVIKRTPFTIKLLYGSTGYKQPITLGVDAGSKHVGLSASTEKRELYREEFTPRNDVVDLLSTRKQNRRSRRNRKTRYRPPRFDNRVHSKHKGWLAPSVEVKIQEHITVIKRICRILPITLVRVETAEFDTQRLKAMLEGKPLPVGTDYQLGEMYDEYNVRQYVLKRDNYTCQCCGAHTTAKKAVKLHVHHLESRKMGGNAPGNLITLCITCHDALHKGKVSLDNKKRGKPMRDAAFMGIMRRTLMSRLREELPITVQGTYGYITKMQREQNDIKKSHVNDARCISKHPLAEPCSVCYRTKAIRHHN

SEQ ID NO: 17737 - protein, 422 aa, unidentified; identical to SEQ ID NO: 6184
  REGION 1..422: note = Human gut metagenome

SEQ ID NO: 17738 - protein, 456 aa, unidentified
  REGION 1..456: note = Human gut metagenome
MSTCVCVLSNSGERLMPTFRLGKVRRLLKDGKAKIVKHHPFTIQLLYDSKTNTQPIEICEDVGYNYIGISVKSESHEYVSAQYDTLQDEKEHHDDCRKYRRTRRNRLRYRKPRFDNRKRSEGWLAPSLEHKKQLNIRLIERYVSVIPITRATVEVGSFDTMLLQAIQKGESKPEGVDYQKGPRYNLATLREAVFYRDNYTCQVCGRKIADGAILHMHHMFYWKGRHGYQLDELVTVCEKCHTPANHQKGGKLFGFGENKEFANLSGAAFMNAVRWQIVNALYATYGKEFVTITYGAMTKEKRIILGIEKTHNNDAYAMGDYHPAHRCVFRHYQKRRRNNRVLEKFYDATYIDARTGNKAKGKELFNGRINRNHKKDSENFHKYRSKKVSKGRRSIRRQRYAIQPYDTVRLEGKTYITSGCHNKGTRLLIPANGKSKSVAISKVQVVCHAGAWIQII

SEQ ID NO: 17739 - protein, 519 aa, unidentified
  REGION 1..519: note = Human gut metagenome
MPEFIYILGMDGKPQMPTTRRRHVQKLLNTGRARIAEHVPFTIQLLYKNDPILQPVMLAEDPGRTNIGLTVLSLKGDLLLSAVTETRNKEITKLIDKRRACRRTSRNGERKARQRRAKRFGTTLKAGMLMRKLPKYDTDKFVTCKLIRNTESKFCNRKRPDGWLTPSARQLADTHINLIHKMQKYLPITDVAFEVNRFAFMLLKDPSVSGVDFQNGPLKGFDDLHDAVCELQDGTCLLCNRKIEHYHHIIPKSKNGSDTIDNIAGLCMCCHDKVHKNEKEAQRLQKKKKGLNKKYGALSVLNQAIPFICKRLEEEFGAEHVFYCTGRETAAVRNSFGYQKTKDNQLHEVDAWCIGILALGKIPKTLPDFSYTCRIRQFRRQDRSRIKAQTERTYKLEGKIVAKNRKKRTEQKTDSLEDWYQKQTALYGQKEADRMRSRLTAAKSQRRYNAPSRILPGTVFLYDGKRHVLSGQLTGGKYFRAVGDAKTNYPASKCRIVRKNEGLVFISQVITERVAVSHG

SEQ ID NO: 17740 - protein, 453 aa, Moorena sp.
MSFVFVVDTNRHPLDPVHPGRARLLLKEGKAAVLKRYPCTIVLTTSVEQPQLHPVRLKLDPGSKTTGIALVDDQRGTVLFAAELSHRGAAIKKALDGRRAIRRGRRARKTRYRKPRFDNRRRKAGWLAPSLESRVFNVLTWVGRLRALCPITAISMELVRFDLQQMEHPEIAGMHYQQGTLAGYEVREFLLEKWGRTCSYCGKKDTPLQVEHIAARARGGSDRVSNLCLACEPCNQRKGTQDIAVFLAKKPDLLKKIQAQAKAPLKDAAAVNSTRWTLFKRLEATGLPVECGSGGRTKFNRVSRGLEKAHWLDASCVGASTPEVLQVGQVKPLLIEATGHGRRQMCLSDRYGFPRTSAKKAKKVKNFQTGDLVRAVVTKGKKRGTYTGRVAVRATGSFNITTSQGTVQGIGSQYCQMLHQSDGYRYTVEERAEASAFLSSPCLKAGVSRKELR

SEQ ID NO: 17741 - protein, 411 aa, unidentified; identical to SEQ ID NO: 6244
  REGION 1..411: note = Human gut metagenome

SEQ ID NO: 17742 - protein, 420 aa, unidentified; identical to SEQ ID NO: 6507
  REGION 1..420: note = Human gut metagenome

SEQ ID NO: 17743 - protein, 428 aa, unidentified; identical to SEQ ID NO: 2743
  REGION 1..428: note = IscB polypeptide

SEQ ID NO: 17744 - protein, 417 aa, unidentified
  REGION 1..417: note = Human gut metagenome
MPCSPAKARLLLKERKAIVKRRTPFTIQLTIATGEAKQPVALGVDSGYKHIGLSATTEKAELYASEVELRQDITDLLSARLALRRSRRSRKTRYRAPRFDNRVASKREGWLAPSVENRIVAHMSRVEAVMRVLPVTAITVETAAFDTQLLKNPDITGAAYQQGEQLGFWNVREYVLFRDGHVCQHCSGKSKDPILNVHHIESRRTGGDAPNNLITLCETCHKAFHRGEIKLKVKRGKSFKAETFMGIMRWTLFERLKKAHPELSVRHTHGYLTKHKRISHGIAKSHCADAYCIAGNLGAMRLNSYLFQKQTRKHNRQIHKLSILKGGLRKKNQAPYEVKGFRLFDKVICKDEEAFIFGRRSSGSFDVRRLDGTRISAGISYKKLRLLEPRTTYLTEFRKEAALPPLHKCRGFRAEFL

SEQ ID NO: 17745 - protein, 223 aa, unidentified
  REGION 1..223: note = Human gut metagenome
MPNKVYIINKHGRPLMPCSPAKARHLLDAGKAKVKKRTPFTIQLIYGSSGYTQEVILGVDAGSKTIGMSVSTTKEELLSAEVKPRNDVVDLLSTRREFRRARRNRKTRYRKPRFDNRVRSKHRGWLAPSVEVKIQEHITSIKRVCRILPVSKVVVETAEFDLQLLKAIADGKPVPQGEDYQKGEMYGHYNVRQYVLWRDNYTCQCCGTHPSKKKEVRLHVHHL

SEQ ID NO: 17746 - protein, 417 aa, unidentified; identical to SEQ ID NO: 11472
  REGION 1..417: note = Human gut metagenome

SEQ ID NO: 17747 - protein, 535 aa, Streptomyces sp.; identical to SEQ ID NO: 4636

SEQ ID NO: 17748 - protein, 413 aa, unidentified
  REGION 1..413: note = Human gut metagenome
LKVFVLNMRGKPLMPCSPAKARHMLKAGKAFVVRRTPFTIKLTIATGETKQDVTLGVDAGARHVGISATTEKEEVFASEVALRQDITGLLADRLAFRRARRNRKTRYRAPRFNNRVRSKHKGWLAPSVENRIQAHISRIEAVCRLLPVTKIVIETASFDIQKIRNPEVEGTGYQQGDQLGFWNVREYVLFRDSHICQHCRGRSKDPILNVHHLESRKTGGDAPNNLITLCETCHKAYHAGKIKLKVKRGQSFRAEAFMGIMRWTLLDRVRKTHPKLPVENTYGYLTKHKRIALGLPKTHCADAFCIAGNLKALRRGDFLFQQQTRKHNRQIHKCSILKGGVRKLNQAPFLVKGFRLFDKVRIGGQIGFVFGRRVRGTFNIRRLDKTVIGTDINCKKLSLLETRKTFLTELRKE

SEQ ID NO: 17749 - protein, 421 aa, Clostridium sp.; identical to SEQ ID NO: 4238

SEQ ID NO: 17750 - protein, 427 aa, Moorena sp.
MQNYVFLLNADRTPLDMIHSARARELQSKGKAKVFRQVPYVLILQNQILNPVTKQYSIKIDPGAKWTGFALQCGDEILFRMEMQHRGDTIESNLLRRAGFRRGRRSRNLRYRKKRFNRTKPEGWLAPSLRHRLQTVETWIKRFIRYCPVTCIEIEQVRFDTQKLINPEIDGTEYQQGELMGYEMREYLLQKWGRKCAYCGVENVPLEVEHIHPKSKGGSDRVSNLTLACHTCNQAKGDQDVRDFLSGKPDLLNQILQQVKQPLKDAAAVNSTRFAIVRVAKTLCEKVNCWTGGRTKFNRCSQGLEKSHSIDAACVGASGESIKLKTNQPLIVMCKGHGNRQARRVNASGFPAVHNAKEVFHHVTAGDIVKVFISKDRKKVKAGIYTTRVKTPTKKGCEVLIDGNRISLKNMNDITFVHRNDGYGYGY

SEQ ID NO: 17751 - protein, 418 aa, unidentified; identical to SEQ ID NO: 4950
  REGION 1..418: note = Human gut metagenome

SEQ ID NO: 17752 - protein, 406 aa, unidentified; identical to SEQ ID NO: 6943
  REGION 1..406: note = Human gut metagenome

SEQ ID NO: 17753 - protein, 484 aa, Moorena sp.
VKPMQKLRKRNTYTPTDIPHVRSNCDSQLNSPEGRGSAARLKTSLNNPDAALTACEQAGQDLRVPAVYVQSKRGEPLMPTTPRKARRLLKEGRAVVVQRTPFTIRLLFATGEALQPVLLGVDGGYSHIGLSAISEKKELYCGEILLREDIVKLNAERREYRRNRRFRKTWYRKSRFLNRGKAGWIAPSLQNKLHAHLKAIETIGKILPLSQITVEIASFDIQKIQKMDIEGVDYQQGVQWGFANVRAYVLHRDHHTCQHCKGRSKESTLHVHHIESRQTGGDRPDNLITLCSSCHRDYHERNIALKVKRSPGFKAETFMTMIRRRLIDHLRKRKIPVTPTYGYITKEKRENLNMIKSHVNDAFVIAGGTKEKRALMSYFTKQVRKCNRKLFKGDRSHLPNKAPRCIQGFQRFDKVLWMGKECFIFGRRTSGYFDLRLLNGMKIHTSAKMRDLKILESARTFLTEKRRAHSSVSTSLSVSCANFL

SEQ ID NO: 17754 - protein, 406 aa, unidentified; identical to SEQ ID NO: 2752
  REGION 1..406: note = Human gut metagenome

SEQ ID NO: 17755 - protein, 552 aa, Streptomyces sp.; identical to SEQ ID NO: 12801

SEQ ID NO: 17756 - protein, 535 aa, unidentified; identical to SEQ ID NO: 6116
  REGION 1..535: note = Human gut metagenome

SEQ ID NO: 17757 - protein, 515 aa, Actinoplanes sp.; identical to SEQ ID NO: 2700

SEQ ID NO: 17758 - protein, 443 aa, Anoxybacillus sp.; identical to SEQ ID NO: 7070

SEQ ID NO: 17759 - protein, 406 aa, unidentified
  REGION 1..406: note = metagenome
MVYVQDIDGKPMMPTTRHGKVRRLLKANKATVVNLCPFTIQLTYKSTDHKQPVTLGIDAGAKHIGFSATTEKEELFACETTLRTDIVDLLSMRLQNRRTRRSRLRYRKSRFNNRGSSKKKGWVAPSVKQRIDSHLNEVNEIHKILPITKIVIEVAQFDTQKMKNHDISGADYQNGEQLGFWNVREYVLFRDGHKCSHCKGKSKDPVLNVHHLESRKTGGDSPSNLITLCESCHKAFHKGEIELKKKRGKSLRDAAVMGIMKWKLYEELKSRYDNVSMTFGYITKHNRIKYGIEKNHTSDAFVISRNFNAKRIERQYLKRLIRRHNRQIHKMKILKGGKKKNNQAPFEVFGFRLFDKVLYNNEICFIYGRRKSGNFNIRDFNGENPKDVSHKKFKLIRGKRHPIILK

SEQ ID NO: 17760 - protein, 337 aa, unidentified
  REGION 1..337: note = Human gut metagenome
SARRALRQSRRNRKTRYRAPRFDNRIRTKRKGWLAPSVENRINAHLSRIEAVLRLLPVTKITVETASFDLQLLKNPDISGKEYQEGEQLGFWNIREYVLCRDGHVCQHCYGRSKDPVLNVHHLESRRTGGDSPGNLVTLCETCHKALHRGEITLKAKRGQSFRAEAFMGIMRWEVQNRLKASHPELEVNNTYGYRTKHARIANDIAKSHCADAFCIAGNLGAERLGEFFFQKQTRRNNRQIHKLSILKGGIRKRNQAPFEVNGFRLFDKVACKGEEGFIFGRRSSGYFDVRKLDGTCISAGISYKKLHLLEKRRTYLTEIRKEKALPPLPGGSGLRA

SEQ ID NO: 17761 - protein, 459 aa, unidentified; identical to SEQ ID NO: 9971
  REGION 1..459: note = uncultured beta proteobacterium

SEQ ID NO: 17762 - protein, 447 aa, unidentified
  REGION 1..447: note = Human gut metagenome
VPAYRFKHITKKEAPYMVYVLDIDGQPLMPTSRHGKVRRLLNSHLAKVVKRCPFTIQLLYQSTKETQPVSLGVDAGSRHIGLSATTEREVVYQEELVPRNDVVKLLSARRALRSSRRSRKTRYRKPRFNNRVHSKHKGWLAPSVEVKIQEHITAIKRICQILPISDIHVETAEFDLQRLKAMEEGRPLPVGTDYQLGEQYDFYNTRQYVLHRDEYTCQCCGTHDNNVKLHVHHIESRQTGGDAPNNLITLCEHCHKSIHAGKMMLPKGKKRGKSYRDATFMGIMRKTLLERLKKEIDVPVEGTYGYITKYWREKAGLEKSHINDAICISKHPYARPLETYYLTKAVRHHNRQIHKTKFSKGGIRKRNQAPYLVKGFRLFDKVLYQGESYFIFGRRITGYFDIRTLDGTKVNKGSTSYKKLRIQDTAEAYLTEVRAIPHMNEFTCVLA

SEQ ID NO: 17763 - protein, 439 aa, unidentified
  REGION 1..439: note = IscB polypeptide
MVYVLSIDGKPLMPTNNAKARILLKNKKAKVKTTKPFTIQLLYVTTTYTQPITLGIDPGYSNIGFSAVTDKKELISGTVNLLQDVSKRLAERKMYRNFRRGRLRYRKCKNEKKKGKGWLAPSIVHKLDSHIRFVEKLKKILPITKVILEVANFDIQKINNPDISGKEYQEGNLYGFYNIRQYVFFRDDYKCQNPNCKNTDKQPILQEHHIIFKENGGTDKPDNLITLCTQCHTPENHKKGKFLYLWQTTKPKLQQYKAETYMSIVRWRLVNALVCDCTYGYITKSKRIELGLEKTHYNDAFVIANGSSQTRSIPITYKQVRRNNRELEKFYDAKYIDIRTREKVPANALNNGRRVRNKNKNSVNLRKYRGEKISKGYRALKKKKRYTYQRNDLVKYKGKIYRVLGNQGSTNGVVLEGKKYPSADKLTLYRFGKGFSCLL

SEQ ID NO: 17764 - protein, 453 aa, Lactobacillus sp.; identical to SEQ ID NO: 4050

SEQ ID NO: 17765 - protein, 406 aa, unidentified; identical to SEQ ID NO: 3980
  REGION 1..406: note = Human gut metagenome

SEQ ID NO: 17766 - protein, 406 aa, unidentified; identical to SEQ ID NO: 10802
  REGION 1..406: note = Human gut metagenome

SEQ ID NO: 17767 - protein, 451 aa, unidentified; identical to SEQ ID NO: 2436
  REGION 1..451: note = Human gut metagenome

SEQ ID NO: 17768 - protein, 432 aa, unidentified
  REGION 1..432: note = Human gut metagenome
MLTGLLAEQVDPAGIRKGDTLKVFVLNMRGKPLMPCSPAKARHMLKAGKAVVARQTPFTIKLTIATGETKQDVTLGVDAGAKHVGISATTEKEEVFASEVELQQDITGLLADRLAFRRSRRNRKTRYRAPRFDNRVRSKHKGWLAPSVENRIQAHISRIEAVCRVLPITKIVIETASFDIQKIKNPEVEGTDYQQGDQLGFWNVREYVLFRDGHVCQHCRGRSKDPILNVHHLESRKTGGDAPNNLITLCETCHKAYHAGKIKLKARRGTSFRAEAFMGIMRRTLLDRVRKAHPELSVENTYGYLTKHKRIALGLPKTHCADAFCIAGNLNALRRGDFLYQRQTRKHNRQIHKCSILKGGVRKLHQAPFLVKGFRLFDKVKCTGRIGIIFGRRSTGSFDVRTLDGTRLSADISSKKLTLLEKRTTFLTQLRK

SEQ ID NO: 17769 - protein, 404 aa, unidentified
  REGION 1..404: note = Human gut metagenome
MPNKVYVINKHGRPLMPCSPAKARHLLDAGKAKVKKRTPFTIQLVYGSSGYTQEVILGVDAGSKTIGMSASTTKEELLSAEVKPRNDVVDLLSTRREFRRARRNRKTRYRKPRFDNRVRSKHKEWLAPSVEVKIQEHITSIKRVCRILPVSKVVVETAEFDLQLLKAIADGKPVPQGEDYQKGEMYGHYNVRQYVLWRDNYTCQCCGAHATKKKEVRLHVHHLESRKVGGDAPDNQVTLCESCHEKLHKGLIAEKDFKKRKRKSTRDATFMGIMRKTLMQRLCSELPIPVIETRGYITKATREKLLVLPKSHTNDALAIAQGKRGFNVGYLPEIAQIDKIYTIRPVRHHNRQLHKAAILKGGIRKSNQTGKYVLGIVFLTKSNLTDRTASFGEEELPESLPLKR

SEQ ID NO: 17770 - protein, 428 aa, Moorena sp.; identical to SEQ ID NO: 8823

SEQ ID NO: 17771 - protein, 417 aa, unidentified; identical to SEQ ID NO: 15591
  REGION 1..417: note = Human gut metagenome

SEQ ID NO: 17772 - protein, 398 aa, Desulfobacter sp.; identical to SEQ ID NO: 17607

SEQ ID NO: 17773 - protein, 423 aa, Moorena sp.; identical to SEQ ID NO: 3576

SEQ ID NO: 17774 - protein, 415 aa, Bacillus sp.; identical to SEQ ID NO: 2431

SEQ ID NO: 17775 - protein, 418 aa, unidentified
  REGION 1..418: note = Human gut metagenome
MSTCVCVLSNSGERLMPTFRLGKVRHLLKDGKAKIVKHHPFTIQLLYDSKTNTQPIEICEDVGYNYIGISVKSQSHEYVSAQYDTLQDEKACHDSCRKYRRTRRNRLRYRKPRFDNRKRSEGWLAPSLEHKKQLNIRLIERYVSVIPITHATVEVGSFDTMLLQAIQKGKSKPEGVDYQKGPRYNLATLREAVFYRDNYTCQVCGRKIADGAILHMHHMFYWKGRHGYQLDELVTACEKCHTPANHQKGGKLFGFGEDKEFANLSGAAFMNTVRWQIVNALYATYGKEFVTITYGAMTKEKRIALQLEKTHNNDAYAMGDYHPACRCKFRHYQKRRRNNRVLEKFYDATYIDARTGNKAKGKELFNGRISRNHKKDSEDLHKYRSKKVSKGRRSIRRQRYAIQPYDTVRLESKSYITK

SEQ ID NO: 17776 - protein, 431 aa, unidentified; identical to SEQ ID NO: 6055
  REGION 1..431: note = Human gut metagenome

SEQ ID NO: 17777 - protein, 422 aa, unidentified; identical to SEQ ID NO: 5333
  REGION 1..422: note = Human gut metagenome

SEQ ID NO: 17778 - protein, 457 aa, unidentified; identical to SEQ ID NO: 15699
  REGION 1..457: note = Human gut metagenome

SEQ ID NO: 17779 - protein, 294 aa, unidentified
  REGION 1..294: note = Human gut metagenome
LLFYRKEHGIMQYVYVLNKHGEPLMPCSPGKARLLLKQQKACVVRRTPFTIKLLYGSAGYKQPITLGVDAGSKHVGLSASTEKRELYSEEFTPRSDVVKLLSTRKQNRRSRRYRKTRYRAPRFDNRVHSKHKGWLAPSVEVKIQEHITVIKRICKILPISLVRVETAEFDTQRLKAMLAGKPLPVGTDYQLGEMYDEYNVRQYVLKRDHYTCQCCGAHNTAEKVVKLHVHHLESRKTGGNAPSNLVTLCTTCHKNLHKGKVTLDGKERGKPLRDAAFMGIMRKTLMARLKEELP

SEQ ID NO: 17780 - protein, 417 aa, unidentified
  REGION 1..417: note = Human gut metagenome
MPCSPAKARILLKEKKAVVTRRMPFTIQLTIATGETKQPVTLGVDAGYKHVGLSVCTEKTELFASEVELRQDITDLLAARLQLRRARRNRKTRYRAPRFDNRVRSKHKGWLAPSVENRIDAHLSRIDAVLRILPVSKIIIETAAFDTQLLKNPGIEGEAYQQGEQLGFWNVREYVLFRDGHVCQHCHGKSKDPVLNVHHLESRRTGGDAPNNLITLCKTCHQALHHGEIKLKAKRGASFKAQTFMGIMRWNVLNRLKAMHPEIEIRNTYGYLTKHSRISHGIAKSHCADAYCIAGHLKAKRLDGYYFQKQTRRHNRQIHKLTILKGGLRKKNQAAYEIKGFRLFDKVKVFGEEGFIFGRRASGYFDVRKLDGKRISAGISCKKLTVVEKRKTYLTEYRKEAALPPLNEFRSFRADAL

SEQ ID NO: 17781 - protein, 483 aa, unidentified; identical to SEQ ID NO: 17192
  REGION 1..483: note = Human gut metagenome

SEQ ID NO: 17782 - protein, 428 aa, unidentified; identical to SEQ ID NO: 5143
  REGION 1..428: note = Human gut metagenome

SEQ ID NO: 17783 - protein, 467 aa, unidentified; identical to SEQ ID NO: 14958
  REGION 1..467: note = Human gut metagenome

SEQ ID NO: 17784 - protein, 431 aa, unidentified
  REGION 1..431: note = Human gut metagenome
MPNKVYVINKHGRPLMPCSPAKARHLLDEGKAKVKKRTPFTIQLVYGSSGYTQEVILGVDAGSKTIGVSASTKKEELFAANVIPRNDVVDLLSTRRESRRARRNRKTRYRKPRFDNRVRSKHKGWLAPSVEVKIQEHITSIKRVCRILPVSKVVVETAEFDLQLLKAIADGKPVPQGEDYQKGEMYGHYNVRQYVLWRDDYTCQCCGAHATKKKEVRLHVHHLESRKVGGDAPDNQVTLCESCHEKLHKGLIAEKDFKKRKRRSTRDATFMGIMRKTLMQRLCSELPIPVVETRGYITKATREKLLVLPKSHTNDALAIAQGKRGFNVGYLPGILQIDKIYTIRPVRHHNRQLHKAAILKGGIRKSNQAGKYVFGYRLFDKVQFNGQDCFIWGRRTTGIFTIKTINGKMIKDGISFKKLKLVEKSTSYLIA

SEQ ID NO: 17785 - protein, 462 aa, unidentified
  REGION 1..462: note = metagenome
LKKLSKRNTCTPTDASQVSGNCDRILNREETLSVSGLKTLDNRSEVNQSKHRKQDLRVPVYVLNMRGQPLMPTRAAKAKHLLKMGKAKVVKRTPFTIQLKYATGETKQEIILGIDSAFKTIGYSARTRTAELISGEVILRTDIPDKLKEKMMYRRGRRNRNTQYREPRFLNRSIPKGWFAPSIEHKINSHLELIEKIKKLLPITEIDVEVASFDTQKMQNPEISGIEYQQGELQGYEVREYLLEKFQRKCAYCGKTDIRLEIEHVTPSSKGGSDRVSNLTIACHKCNQKKGNKTAAEFGHPEIEALCKKSLKASAFMNTVRWELVKRLKNLYGKTAVNHTYGYITKKFRIYLGLEKSHVNDAFAISKGTDQERCRPHAVKQNRRNNRSLQLNRKGFKPSIRRERYKFQPHDLVRLNGQAYTVKGIFNYGAWIRLQNDNGKDINSNIKNVELITYGKGLQFGF

SEQ ID NO: 17786 - protein, 512 aa, unidentified
  REGION 1..512: note = Human gut metagenome
MSTVYVLNKDGKPLMPTTRGGHVRHLLKEQKARVVRAKPFTIQLLYETNDVVQPLYLGIDPGRTNIGVAVVKANGTAVFTAHLETRNKEIPKLMQDRKKARRARRTNGRRCRRQRRAKANGTISKKCVKQTTAQNGSVSKRAKDIGVIKRHLPGCEKEVLCIGIKNKEAKFSNCTRPEGWLTPTANQLLQTHINLVKKIQKFLPISDVVLEINKFAFMRLDNPNVQKWQYQQGPLYQKASLEEAVSEMQEHHCLFCKNTIDHYHHVVPQSENGSNTIGNIVGLCTKHHDLVHKDTSWQEKLAKKKTGLNKRYGALSVLNQIIPALTKELSSLFPKHFFATNGKSTYDYRAAHGVSKDHWLDAYCIAGSVLPNDACDNNINNHVPYELKQFRRHDRRALHKENMGRVYTLNGKSVATNRHKAIKQTTDSLEEFRQRQPNDVCKLKVKEHHPEYRNPKRNFPGCVFLVGKHTHVMQGTSGSHNGKADGYYDTNGNSYSSGKCKFVVKNEGIVFT

SEQ ID NO: 17787 - protein, 385 aa, unidentified
  REGION 1..385: note = Human gut metagenome
MFKAGLIMRKLPKFAADKFITCHYIRNTESRFCNRKRPDGWLTPTSRQLVETHINLIHKIQKYLPVTDIAMEVNRFAFLSLENPSVSGVNFQNGPLKGFDNLYDAVNELQHGKCLLCDKKIEHYHHIVPRSMNGSNTIGNIAGLCMECHDKVHKHASYQKKLNDVKKGLDKKRGALSALNQAVPFICKRLEAEFGKEHVSYCTGRDTAKMRNSFGFQKTKDNQMHETDAWCIGILALNKVPDVIPDFGQTYRIRQFRRQDRSFICYQTERVYKLDGVAVAKNRKKRTEQKTDSLEDWYNRQVALHGKKEADFMRSHLTAVKSKRRYNDLTRVMPGAVFMYNGECHVLSGQLTEGRYFRAVGNAKTNYPASKCKIIRHNEGLVFVY

SEQ ID NO: 17788 - protein, 341 aa, unidentified
  REGION 1..341: note = Human gut metagenome
TDLLSARRALRQSRRNRKTRYRAPRFDNRIRTKRKGWLAPSIENRINAHLSRIETVIRLLPVTKISVETTSFDMQLLKNSDIAGKEYQESEQLGFWNVREYVLFRDGHVCQHCHGRSKDPVLNVHHLESRRTGGDSPGNLITLCETCHKELHRGEITLKAKRGQSFRAETFMGIMRWEVLDRLKASHPKLEVQNTYGYRTKHARIVNGIAKSHCADAFCIAGNLGAERLGEFLFQKQTRRNNRQIHKLSILKGGIRKRNQVPFEVKGFRLFDKVACKGEEGFIFGRRSSGYFDVRKLDGTRISTGISYKKLRLLEKRQTYLTEIRKEEALPPLPEGRGLRA

SEQ ID NO: 17789 - protein, 465 aa, unidentified
  REGION 1..465: note = Human gut metagenome
MSTCVCVLSNSGERLMPTFRLGKVRRLLKDGKAKIVKHHPFTIQLLYDSKTNTQPIEICEDVGYNYIGISVKSEFHEYVSVQYDTLQDEKDCHDGCRRVRRSRRNRLRYRQARFDNRKRDDGWLAPSFEHKKELNVNVIKMYCKVMPITHAIVEVGSFDTMLVKAIEEGKATPESADYQKGPRYKLATLREAVFYRDNYTCQVCGRKANEGAILHVHHMFYWKGRHGNSLSELITVCEKCHTPANHQKGGKLYGFGEDIKFANLSGAAFMNTVRWQIVNVLYAAFGKPFVTFTYGAMTKEKRIALHLEKSHNNDAYAMGSFHPVNRCAFEHYEKVKRNNRILEKFYDSQYIDTRTGELTNGKSLFNGRISRSHKKDSENLHKYRGKRICKGHRALRRKKVALNPGDLVSLNGEILVVHGTHTKKNGSVNVEFKTPSRGGKKSASLKKLKIVKTSNLMHSAWTKVA

SEQ ID NO: 17790 - protein, 420 aa, unidentified
  REGION 1..420: note = Human gut metagenome
MQYVYVLSKHGEPMMPCSPGKARLLLKQQKACVVRRTPFTIKLLYGSAGYKQPITLGVDAGSKHVGLSASTEKRELYREEFTPRNDVVELLSTRRQNRRSRRNRKTRYRAPRFDNRVHSKHKGWLAPSVEVKIQEHITIIKRICKILPISLVRVETAEFDTQRLKAMLAGKPLPVGTDYQLGEMYDEYNVRQYVLKRDHYTCQCCGTHNTAKKVVKLHVHHLESRKTGGNAPSNLVTLCTTCHKNLHKGRVTLDGKERGKPLRDAAFMGIMRKTLMVRLKEELPIPVQGTYGYITKMRREQNDIKKSHTNDARCISKHPLAEPCSVCYRTKAIRHHNRQTHKANFSKKGIRKRSQMPYLVEGFRLWDKVLYKGQECFVSGRRSSGSFTLKKLDGTSISKGVTFKKLRLLEPATNYLIERM

SEQ ID NO: 17791 - protein, 545 aa, unidentified; identical to SEQ ID NO: 6325
  REGION 1..545: note = Human gut metagenome

SEQ ID NO: 17792 - protein, 431 aa, unidentified
  REGION 1..431: note = Human gut metagenome
MPNKVYVINKHGRPLMPCSPAKARHLLDAGKAKVKKRTPFTIQLIYGSSGYTQEVILGVDAGSKTIGMSVSTTKEELLSAEVKPRNDVVDLLSTRREFRRARRNRKTRYRKPRFDNRVRSKHKGWLAPSVEVKIQEHITSIKRVCRILPVSKVVIETAEFDLQLLKAIEEGKPVPQGEDYQQGEMYGHYNVRQYVLWRDGYTCQCCGAHATKKKEVRLHVHHLESRKVGGDAPDNQVTLCESCHEKLHKGLIAEKDFKKRKRKSTRDATFMGIMRKTLMQRLCSELPIPVVKTRGYITKATREKLLVLPKSHTNDALAIAQGKRGFNVGYLPEIAQIDKIYTIRPVRHHNRQLHKATILKGGIRKSNQTEKYVFGYCLFDKVQFNGQDCFIWGRRTTGIFTIKTINGKMIKDGISFKKLKLVEKSTSYLIA

SEQ ID NO: 17793 - protein, 358 aa, unidentified
  REGION 1..358: note = Human gut metagenome
TEKAELYASEVELRPDVSDLLSARRTLRQSRRNRKTRYRAPRFDNRIRTKRKGWLAPSVENRINAHLSRIGAILRLLPVTKITVETASFDTQLLKNPDISGKEYQEGEQLGFWNVREYVLFRDGHACQHCHGRSKDPVLNVHHLESRRTGGDSPGNLLTLCETCHKALHRREIKLKTKRGQSFRAEAFMGIMRWEVLNRLKASHPELEVHNTYGYRTKHTRIVNGIDKSHCADAFCIAGNLGAKRLGEFFFQKQTRRNNRQIHKLSILKHGLRKRNQAPFEVKGFRLFDKVVCQGEEGFIFGRRSSGSFDVRKLDGTRISAGISYKKLRLLEKRRTYLKEIRKEEALPPLPEGRSLRA

SEQ ID NO: 17794 - protein, 455 aa, unidentified
  REGION 1..455: note = metagenome
MVFVLDRHHKPLMPCHPARARRLLGKGRARIHKLYPFTIRLVDRELKDSTVQPVVLKLDPGSKETGMALVREDETKTHHALYFVNLKHRGSEIKPSLLQRRNFRRSRRSRNLRFRAPRFLNQTRLQGWLAPSLRHRVDTTLSWVERLRKLAPVATLEMELVKFDTQKMQNPEIDGVAYQQGKLAGFEVREYLLEKFGRKCIYCGAEGVPLNIDHIVPKSAGGSNRVSNLVPACVDCNQKKNNLPFEVFLKGDKAKINRIRSQLKTPLKDAASVNTTRWQLFEALKLTGLSLTTATGARTKYNRHQFGVPKEHWLDALCVGETAAVRGWQPLGVLVVKCTGRGAYKRTRLTKDGFPRGYLTRTKRFFGFGTGDMVVATVFAGKKKGSYKGRVAVRKSGSFAIQTASRKVDGISYRYCRLLSRADGYGYSWHSSKSLINSTKETALLPRINTQVSAP

SEQ ID NO: 17795 - protein, 447 aa, unidentified
  REGION 1..447: note = Human gut metagenome
VPAYRIKHITKKEVPYMVYVLDIDGQPLMPTSRHRKVRKLLNSHLAKVAKRCPFTIQLLYQSTKETQPVSLGVDAGSRHIGLAATTEQKVVYQEELVPRNDVVKLLSARRALRSSRRSRKTRYRKPRFNNRVHSKHKGWLAPSVEVKIQEHITAIKRICQILPISDIHVETAEFDLQRLKAMEEGRPLPVGTDYQLGEQYDFYNTRQCVLHRDEYTCQCCGTHDNNVKLHVHHIESRQTGGDVPNNLITLCEHCHKLLHAGKTIIPKGKKRGKSYRDATFMGIMRKTLLERLKKEIDVPVEGTYGYITKYWRERAGLEKSHIHDAVCISKYPYAKPLDIYYLTKTVRHHNRQIHKSNFSKGGIRKRNQAPYLVKGFRLFDKVLYQGKSYFIFGRRATGFFDIRTLNGAKVNKGSISYKKLRIQDTANAYLKEIKAIPHMNKFTCVLA

SEQ ID NO: 17796 - protein, 422 aa, unidentified
  REGION 1..422: note = Human gut metagenome
MQYVYVVGSNCKPLMPCSPAKARELLKSKSAAVLQRTPFTIKLLHHAGGYKQPITLGVDAGSKHVGLSACTDTEELYKEELTPRNDVVKLLSARRECRRGRRHRKTRYRAPRFNNRVHSKHKGWLAPSVEVKIQEHITAIHRICRRLPITKIVVETAEFDTQRLKAMLEGKPLPVGIDYKRGEMYDEYNVRQYVLKRDNYTCQHCGARGSAEKGIKLHVHHLETRQTGGNAPNNLITLCKDCHTALHDGKITLKLDKKKRGKPLRDSAFMGIMRKTLLSRIRKEVAIPVVETQGYITKLLREENHIQKSHTNDARCIAGCPKALPCDTTYHTKAIRHHNRKIHKTNILKGGVRKLNQAPYKVFGLRIWDKVKYKGQECFITGRRSSGYFALKKLGGTTISNSTNYKKIHFLEPANHYIIERS

SEQ ID NO: 17797 - protein, 419 aa, unidentified; identical to SEQ ID NO: 3670
  REGION 1..419: note = Human gut metagenome

SEQ ID NO: 17798 - protein, 365 aa, unidentified
  REGION 1..365: note = Human gut metagenome
LGVDADSKHVGLSASTEKRELYSEEFTPRSDVVKLLSTRKQNRRSRRYRKTRYRAPRFDNRVHSKHKGWLAPSVEVKIQEHITVIKRICKILPISLVRVETAEFDTQRLKAMLAGKPLPVGTDYQLGEMYDEYNVRQYVLKRDHYTCQCCGAHNTAKKVVKLHVHHLESRKTGGNAPSNLVTLCTTCHKNLHKGKVTLDGKERGKPLRDAAFMGIMRKTLMARLKEELPIPVQGTYGYITKMRREQNDIKKSHTNDARCISKHPLAEPCSVCYRTKAIRHHNRQTHKANFSKKGIRKRSQMPYLVEGFRLWDKVLYKGQECFVSGRRSSGSFALKKLDGTSISKGVTFKKLRLLEPATNYLIERM

SEQ ID NO: 17799 - protein, 420 aa, unidentified
  REGION 1..420: note = Human gut metagenome
MQYVYVLNKHGEPLMPCSPGKARILLKQQKACVVKRTPFTIKLLYGSAGYKQPITLGVDAGSKHVGLSASTEKRELYSEEFTPRNDVVELLSTRRQNRRSRRNRKTRYRAPRFNNRIHSKHKGWLAPSVEVKIQEHITVIKRICRILPITLVRVETAEFDTQRLKAMLAGKPLPVGTDYQLGEMYDEYNARQYVLRRDNYTCQRCGAHTTKKKTVKLHVHHLESRKTGGNAPSNLITLCVDCHKAFHAGKVKLDGKKRGKSLKDAAFMGAMRNTLLTRLRNELNIPVQNTYGYITKLLREQNDIKKSHVNDARCISKHPLAEPCSVCYRTKAIRHHNRQTHKANFSKKGIRKRSQMPYLVEGFRLWDKVLYKGQECFVSGRRSSGSFALKKLDGTSISKGVTFKKLRLLEPATNYLIERM

SEQ ID NO: 17800 - protein, 515 aa, Ruminococcus sp.; identical to SEQ ID NO: 2456

SEQ ID NO: 17801 - protein, 450 aa, Alkalispirillum sp.; identical to SEQ ID NO: 10898

SEQ ID NO: 17802 - protein, 456 aa, unidentified
  REGION 1..456: note = Human gut metagenome
MSTCVCVLSNSGERLMPTFRLGKVRRLLKDGKAKIVKHHPFTIQLLYDSKTNTQPIEICEDVGYNYIGISVKSQSHEYVSAQYDTLQDEKACHDSCRKLRRTRRNRLRYRKPRFDNRKRGEGWLAPSLEHKKQLNIRLIERYVSVIPITHATVEVGSFDTMLLQAIQKGKSKPEGVDYQKGPRYNLATLREAVFYRDNYTCQVCGRKIADGAILHMHHMFYWKGRHGYQLDELVTACEKCHTPANHQKGGKLFGFGEDKEFANLSGAAFMNAVRWQIVDALHATYGKEFVTITYGAMTKEKRIILGIEKTHNNDAYAMGDYHPVHRCVFRHYQKRRRNNRVLEKFYDATYIDTRTGNKAKGKELFNGRISRNHKKNSEDLHKYRSKKVSKGRRSIRRQRYAIQPYDTVRLESKTYITSGCHNKGTRLLIPANGKSKSVAISKVQVVCHAGAWIQII

SEQ ID NO: 17803 - protein, 429 aa, Parasutterella sp.; identical to SEQ ID NO: 4241

SEQ ID NO: 17804 - protein, 416 aa, unidentified
  REGION 1..416: note = Human gut metagenome
MVYVLDKNGQPLMPTDRHRKVRLMLQSGQAKVIKRCPFTIQLNYDSGHQTQEISLGIDAGSKHIGVSATTKIKVLYEADVELRNDIVNLLSSRRERRRGRRNRKIRYRQAKFNNRRRGNGWLAPSIRQKIGTHLIVVENICKILPISRIMVETASFDIQKIKNPDIQGAEYQQGDQLEFWNVREYVLFRDGHTCQCCKGKSKDKILNVHHIESRKTGGNAPNNLITLCETCHTGYHKGTVQLPKAIKRGMRFKDAAFMGIMRWAFYEALKQQYEPVGTPVHNTYGYITKHTRIAYNLPKEHYVDARCISGNPEASSNGEYYYQKKVRCHNRQIHKLTVLKGGIRKQNQATYLVKGYRLFDKVSYQGKGYFVFGRRQSGFFDIRTLSGEKVNKGSLSCKKLKFIATRTYYLTERRAV

SEQ ID NO: 17805 - protein, 420 aa, unidentified; identical to SEQ ID NO: 5136
  REGION 1..420: note = Human gut metagenome

SEQ ID NO: 17806 - protein, 420 aa, unidentified; identical to SEQ ID NO: 8301
  REGION 1..420: note = Human gut metagenome

SEQ ID NO: 17807 - protein, 378 aa, Moorena sp.; identical to SEQ ID NO: 2642

SEQ ID NO: 17808 - protein, 406 aa, unidentified
  REGION 1..406: note = Human gut metagenome
MVYVQDINGKPLMPTTRHGKVRRLLKDKKAVVVNLCPFTIKLTYVTSDYKQEIVLGVDAGTKHVGLSATTKSKELYSSEVILRNDIVDLLSTRRELRRTRRNRLRYRKPRFNNRIKSKRPGWTAPSVKYKIDAHIRVIDNVCSILPISRIVIEVAQFDTQKINNPEISGKEYQEGDQLGFWNVREYVLARDGHKCQYCKGKSKSKILNVHHLESRKTGGDSPSNLITLCETCHDDYHKGNIDLKIRRGKSLRDAAVMGIMKWRLYEELKSKYDRVFMTFGYVTKYNRIKHGIEKSHVSDAFVISKNINAKRIERQYLKRLIRRHNRQIHKMKILKGGKKKNNQAPFEVFGFRLFDKVLYNNKIFFVYGRRKSGNFNIRDFNGENPKDVSRKKFKLIRGKRHPIILK

SEQ ID NO: 17809 - protein, 544 aa, unidentified
  REGION 1..544: note = Human gut metagenome
MRQKKQKVMVYILNKKGKPLMPTTRCGHVRKLLDSKKAVVVNSNPFTIRLKYDTPNGVQDVFAGIDSGRENIGSGASNEDGDCLYLGELKTSNKSIKLKMTERAGFRKERRRHDRQNKQRKARKDHTEIQNGNADICRTAISCKSVQISYPAAEESVTHKIIRGKEGKFANRHRDEGWITPSARQLVQMHMNDLKSMCKILPISHVTLERVAFDFQKLENENIKVWEYGKGKLYGYDSPEEYIHDVQNGKCLVCGKPHIDYLHHIIPRSKGGSDKVSNIAGLCYDCHYGPMGVHNCQDTQDRLPELKNEADKQYKVSLLNSVMPVLIEEMDKFCKANSIIFSICEGHDTAKIRDMYGLQKDHCVDGFAISLVGRNVKSVDVMPDRIYQKQRYKKKSKNIIQKRNCREYYDGKKLVAVNRHKGTDQKADSLEEYMNTYAETHTADECKKHFESLTVKPARRTYTFHKEGRICPLHIGDKVRYEKKNKIKGNTKVDTFICEGIYFSKDENKAKVEHNKTKSKKMKFCRAIESGCIPYIDYIKLALI

SEQ ID NO: 17810 - protein, 443 aa, unidentified
  REGION 1..443: note = bioreactor sludge metagenome
LDAKSRFNISEGNFTPKGSAGMQNFVFVLDANKQPISPCHPSVARKLLRDRKAAVYRRFPFTIILKRAVDKPIVEPITVKVDPGSKTTGIALIQSNKVVFAAEVEHRGQAIKDALESRRAIRRGRRQRKTRYRQPRFLNRTKKKGWLAPSLKSRVDNLQTWLVRFLKLCNVRSISMELVRFDMQLMQDAEISGVEYQQGELAGYEVREYLLEKFNRKCCYCGKSDIPLEIEHITPKSRGGSNRVSNLCLACRSCNVSKGNQTATEFGFPNIQAHAKKPLKDAGAVNSVRWAIWRMFDASGLPVEVGTGGRTKFNRAQRAPAQNYPKAHWIDAACVGESGQAVKLCPEQKPLRIKAVGRQSRQMCRPNKFGFPRTASKQSRVVKGGFQTGDIVKAVLPSGKYVGTHIGAVAVRATGSFRVGKTDGISWKYCQRLHALDGYSYAN

SEQ ID NO: 17811 - protein, 458 aa, Lactobacillus sp.
LKGVGMMSEIKKVDYIYVVDSKGTPLMPTSRLGMVCRWLKTGQAKWFRNSRNTIQFVRPVTTNTQELTLGVDAGFHLGLSVVGNNRECYVSESLRKSEKDRITSRRESRRTRRNRLRYRKARFDNRRRKDGWLAPSIQHRLDFTIKEIKRLYMFLPITNLVVEVTPFDNQKLLNPDIQGWQYQKGKMYGFKTIKDYLLARDNYRDALDGKQYPASQLRVHHLVQRKDGGSNQPDNLVLLSDINHNQANHNNGILAKLKENRQKTIDYRGAYFMSILATRLSDYFDEYTTTQGYLTANLRQKYEIEKSHLNDAFVIAGGTDTTLRTNNVYSRQKLRNNNRVLQKFYDAKYIDSRDGKQKAGKELSSGRTRRSQELNYDNLRQFRKEKVKKGRVSIRRGHYQLRPHDVVLNTRTNRIETVKGVQNSGTVIKFQTGKTCSIKSVVSLYHVNGILEKKMENV

SEQ ID NO: 17812 - protein, 427 aa, unidentified
  REGION 1..427: note = Human gut metagenome
LRVFVFNKRGKPLMSCSPAKARLLLKEKKAIVVRRTPFTIQLTIATGESKQPVSLGVDAGYKHVGLSASTEKAELYASEVELRKDITDLLSARRALRQSRRNRKTRYRAPRFDNRIRTKRKGWLAPSVENRINAHLSRIEAVLRLLPITKITVETASFDMQRLKNPDISGKEYQEGEQLGFWNVREYVLFRDGHVCRHCHGRSKDPVLNVHHLESRRTGSDSPDNLITLCVTCHKALHRGEITLKAKRGQSFRAQAFMGIMRREVLNRLKASYPELKVHETYGYLTKHARIANGIVKSHGADAFCIAGNLGAERLGEFFFQKQTRRNNRQIHKLSILKGGIRKRNQAPFEAKGFRLFDKVACQGEEGFIFGRRSSGSFDVRKLDGTRISAGISCKKLRLLEKRRTYLTEIRKEEALPPLPEGRGLRA

SEQ ID NO: 17813 - protein, 414 aa, Selenomonas sp.; identical to SEQ ID NO: 10452

SEQ ID NO: 17814 - protein, 431 aa, unidentified
  REGION 1..431: note = Human gut metagenome
MPNKVYVINKHGRPLMPCSPAKARHLLDDGKAKVKKRTPFTIQLIYGSSGYTEEVILGVDAGSKAIGLSASTKKEELFAANVTPRNDVVDLLSTRREFRRTRRNRKTRYRKARFNNRVHSKHKGWLAPSVEVKIQEHITCIKRVCNILPVSKVVVETAEFDLQLLKAVEEGKPVPQGEDYQKGEMYGHYNVRQYVLWRDGYACQCCGAHSTKKKDVKLHVHHLESRKTGGDAPSNLITLCEDCHKKLHRGLISETDFKKRKRKSTRDAAFMGIMRNTLMQRLRCELSIPIVETRGYITKATREKLLVLPKSHTNDALAIAQGRQGFNVDYFPNIVQVDKIYMIRPVRHHNRQLHKATILKGGIRKANQARKYVFGFRLYDKVRYNNVECFVWGRRNRGEFLLRHLDGTKVKDGISYKRLKLLERSQSYLIA

SEQ ID NO: 17815 - protein, 515 aa, unidentified
  REGION 1..515: note = Human gut metagenome
MATVYVLNKDGKPLMPTTRCGHIRHLLKEKKARVVRTNPFTIKLVYETDDVVQPLYLGIDPGRTNIGVAVVKVDGTAVFTAHLETRNKEIPKLMAKRKEHRQGRRHYRRCKRQRRAAAHGTLSKKCKKQDTAQGGNISKRAQTIGVFERNLPGCEKSVLCIGIKNKEARFNNRVRPARWLTPTANQLLLTHVNFVKKICKFLPISDVVLEINKFAFMALDNPNIQKWQYQQGPLYQKGSLENAVSEQQDHHCLFCEKTIEHYHHVILRSENGSDTIANIVGLCAEHHDLIHKDDKLKEELAKKKQGLNKKYGALSVLNQIIPALTYELGSRFQGHFYVTTGKSTYDYRAAHSVSKDHWLDAYCIACSVLPDGCFDNTINSRVPYELKQFRRHDRQVCQQQNVKRKYYLDKKLVATNRHKAIKQETDSLEEYRNNGGTTDKLVVKEHKPTNKRLNRILPGALMAANGKLNVMVASRGLHNGIPDNYVFDNNSKAKPSKCTLINKNKGIVFVSNSVS

SEQ ID NO: 17816 - protein, 536 aa, unidentified; identical to SEQ ID NO: 4526
  REGION 1..536: note = Human gut metagenome

SEQ ID NO: 17817 - protein, 353 aa, Moorena sp.
  REGION 286..298: note = misc_feature - Xaa can be any naturally occurring amino acid
MLQDEKKRHDDRRKMRRARRNRLRYRKPRFDNRTASKKEGWLAPSLRNIRDQHIRIFERFLEVMPIVSATFEMGSFDVHAMHEFEATGTVLKGDDYQKGPRYGMNTLRKAVFYRDNYTCQVCGETADEGAILRVHHIGFETGDHTNRMSNLLTVCTKCHTSANHKPGGKLYDLKPRTKPFNGAAFMNAVRWQMFRTLKSTHPDLEWHMTYGAATQEARRVLHLEKSHANDAYAMGEFHPRRRTPFMHFQKLRRNNRILEKFFDAKYVDARDGKTKKGAELSCGRTXXXXXXXXXXXXXHYTLRPGDTVVIGGEKHRAKGVHNKGTYVVTDAKKSVPVKKVEKIIHAGGYMSVK

SEQ ID NO: 17818 - protein, 424 aa, unidentified; identical to SEQ ID NO: 3351
  REGION 1..424: note = Human gut metagenome

SEQ ID NO: 17819 - protein, 419 aa, Aneurinibacillus sp.; identical to SEQ ID NO: 4563

SEQ ID NO: 17820 - protein, 480 aa, unidentified
  REGION 1..480: note = Human gut metagenome
MKGENMVIALDRNKRPLGFMGERRCRILLERKRAVLYRYFPTIVILKDVDARKLSGLSSYRIKIDPGAKYTGIAIVRDDTNEFMYAMQIEHRGEQIKKNLDTRRNARGDRRSRETGYRRPKWGNQCTAKEQRQSYDSRRDENWLPPSVKSTADNIISWVRRLSRWINITNCSFESVRFDTQLMENPEIEGVEYQQGTLYGYEVKEYLLEKYGHTCQYCGGKSSDPILEWEHMIPRSRGGSDRLKNATLACHNCNQDKGNHTLEEWQTIFQDRLPKERGKQKELDQMRQKYVQQVMEGKAPLKGLRYAAWVNSSRRYSQRHLYLRFPELECSSGGRTKYNRNALGYPKEHHYDALCVGKIPEDGFVDWTHGYYLYAKATGRGTRLRGQLNGCGVIISKWKNRSKTAFGFQTGDLVVANVPKDTKYKYKGRFVGRVMIRKSGSFDIRTLSGELVTVNAKFCRLLQNNSGYQMMIKRAIPLGD

SEQ ID NO: 17821 - protein, 428 aa, unidentified
  REGION 1..428: note = Human gut metagenome
LKVFVLNMRGRPLMPCSPAKARHLLKAGKAVVRRRTPFTIQLRIATGETKQSVTLGVDAGAKHVGLSAATEKEEVFASEVELRQDITGLLAARLSLRRERRQRKTRYRAPRFLNRVRSKHKGWLAPSVENRIQAHMSRIDAICGLLPVTKIVIETASFDIQKIKHPDVEGTDYQQGDQLGFWNVREYVLFRDGHVCQHCHGHAKDKILNVHHLESRQTGGDAPNNLITLCETCHKAYHAGKIKLKVKRAQSFRAEAFMGIMRWTLLDRMRKAHSGLPVENTYGYLTKNTRITLGLPKTHCVDAYCIAGNLKAVRRGVCLHQRQVRKHNRQIHKCTVLSKTLKDGTKIGYRKLNQTPHLVKNFRLFDKVRCLGQTGFIFGRRSSGYFDVRRLDGVKISSCISYKKLTLLEKRSTCLTELRKEDGASSPV

SEQ ID NO: 17822 - protein, 442 aa, unidentified
  REGION 1..442: note = Human gut metagenome
MVTVQQSTHHLPFGRVFIRRNLFMVYVISQDSKPLMPCSNPIARLLLKQGKAKVKRREPFTIKLIYETTDYTQDLTLGVDTGSGTIGAAVSKDNGDIVYMSEVVVRNDITDKMTQRAKYRRNRRNRKTRYRKARWLNRSNSIKKDRFSPTMQSKLHSHVKEIEYIQSILPITEMVFETGQFDMHLMKDPSLANPKVRPWGYQKGTNYGFENTKAMVLNRDNYTCQCCKGKHKDSKLEVHHIVFRSQGGSDEESNLITLCHTCHKDLHSGKINLKLSGKVKGNLKYATQMNSIRKQLFRLYPNAIETFGYVTKANRLHLGVDKEHYYDACTIATQGNTFNVKSNLYKKKCVSDGDFQKTKGICSEQPIVTDKICSFRKFDKVRYFGKDYFIKGRMSTGYAILMDIDGNKIDFSTMPRGYKTPKLSNCKRITARSTVMTQVKVV

SEQ ID NO: 17823 - protein, 512 aa, unidentified
  REGION 1..512: note = Human gut metagenome
MSTVYVLNKDGKPLMPTTRGGHVRHLLKEQKARVVRTKPFTIQLLYETNDVVQPLYLGIDPGRTNIGVAVVKTDGTAVFTAHLETRNKEIPKLMQGRKKARRARRTNGRRCRRQRRAKANGTISKKCVKQTTAQNGSVSKRAKKIGVIKRHLPDCEKEVLCIGIKNKEAKFSNRTRQEGWLTPTANQLLQTHVNLVKKIQKFLPISDVVLEVNKFAFMQLDNPNVQKWQYQQGPLYQKANLEEAVSEMQEHHCLFCKKKIDHYHHVVPQHKNGSNTIDNIVGLCTKHHDLVHKETAWQEKLAKKKTGLNKKYGALSVLNQIIPALTKGLSSLFPKHFFVTTGKSTYDYRAAHDVCKDHWLDAYCIACSVLPNDVCDSNINSHVPYELKQFRRHDRRALHKENMNRVYTLNGKKVATNRHKAIEQTTDSLEEFRQRQPNDVCKLKVKEHHPEYRNPKRSFPGCVFLVGKQTHVMQGTSGSHNGKADGYYDTNGNSYPFGKCKFVAKSEGIVFA

SEQ ID NO: 17824 - protein, 436 aa, Ktedonobacter sp.
  REGION 331..344: note = misc_feature - Xaa can be any naturally occurring amino acid
MVFVLDRHKKPLMPCTPKRARLLLGRGRAVVHRVKPFVIRLRDRRVEDSTLQPLALKIDPGSKTTGIAVARVQETEEGEVHHAVFLFEVAHRGDKVQGAKQTQRNARRRRRSANLRHRAPRFANRGIPKGWLPPSLLSRIGNVLTWTGRCRRWVAVSRIDVERVRFDTQLLQHPEIAGVAYQQGTLAGWEARAYLLLKYAYRCAYCGKTDCAFELDHIVPRSRGGSNRVSNLCLACHACNQAKGDKTAAEWGHPEVEAQAKQALKDAAAVNATRFKLVEALQVFGLPIGTWTGGRTRWNRARFGIDKTHALDALCVGQMAAVSAARLKTLXXXXXXXXXXXXXXLPDTSETRPWLSDRRPGASSGPCSSQNGGNPSGTRAGAQKRIVSCRLRRWGWSGVLPDGAESRWVWVCACLTEKQVPHLPCPKQGMRHSSLL

SEQ ID NO: 17825 - protein, 552 aa, Streptomyces sp.; identical to SEQ ID NO: 10782

SEQ ID NO: 17826 - protein, 435 aa, Lactobacillus sp.; identical to SEQ ID NO: 9795

SEQ ID NO: 17827 - protein, 428 aa, Macromonas sp.; identical to SEQ ID NO: 15026

SEQ ID NO: 17828 - protein, 430 aa, unidentified; identical to SEQ ID NO: 7436
  REGION 1..430: note = Human gut metagenome

SEQ ID NO: 17829 - protein, 447 aa, unidentified
  REGION 1..447: note = Human gut metagenome
VPAYRFKHITKKEVPYMVYVLDIDGQPLMPTSRHGKVRRLLNSHLAKVVKRCPFTIQLLYQSTKETQPVSLGVDAGSRHIGLSATTEREVVYQEELVPRNDIVKLLSARRALRRSRRNRKTRYRKVRFNNCVHSKHKGWLAPSVEVKIQEHITAIKRICQILPISDIHVETAEFDLQRLKAMEEGRLLPAGTDYQLGEQYNFYNTRQYVLHRDEYTCQCCGTHDNNVKLHVHHVESRQTGGEAPNNLITLCEHCHKSIHAGKMMLPKGKKRDKSYRDAAFMGIMRNTLLERLRKEVNVPVTMTYGYITKYWREKAGLEKSHINDAICISKHPYARPLETYYLTKAVRHHNRQIHKTKFSKGGIRKRNQAPYLVKGFRLFDKVLYQGESYFIFGRRITGYFDIRTLDGTKVNKGSTSYKKLRIQDTAEAYLTEVRAIPHMNEFTCVLA

SEQ ID NO: 17830 - protein, 450 aa, Moorena sp.; identical to SEQ ID NO: 2935

SEQ ID NO: 17831 - protein, 424 aa, unidentified; identical to SEQ ID NO: 6692
  REGION 1..424: note = Human gut metagenome

SEQ ID NO: 17832 - protein, 535 aa, Streptomyces sp.; identical to SEQ ID NO: 6333

SEQ ID NO: 17833 - protein, 253 aa, unidentified
  REGION 1..253: note = Human gut metagenome
MVYVQDINGKPMMPTTRHGKVRRLLKDKKAVVVNLCPFTIKLMYVISDYKQEIVLGVDAGTKHVGLSATTKSKELYSSEVILRNDIVDLLSTRRELRRARRNRLRYRKLRFNNRIKSKRPGWTAPSVKYKIDAHIRVIDNVFSILPVSRIVIEVAQFDTQKIKNPNISGKEYQEGDQLGFWNTREYVLARDGHKCQYCKGKSKDKILNVHHLESRKTGGDSPSNLITLCETCHKEYHKGNIDLKIKRGSSLRD

SEQ ID NO: 17834 - protein, 442 aa, unidentified
  REGION 1..442: note = Human gut metagenome
MVTVQQSTHHLPFGRVFIRRNLFMVYVISQDSKPLMPCSNPIARLLLKQGKAKVKKCEPFTIKLTYETTDYTQDLILGVDTGSGTIGTAVSKDNGDIVYMSEVVVRNDITDKMTQRAKYRRNRRNRKTRYRKARWLNRASSIKKDRFSPTMQSKLHSHVREIEYIQSILPITEMVFETGQFDMHLMKNPSLANLKVRPWGYQKGANYGFENTKAMVLNRDNYTCQCCKGKHKDSKLEVHHIVFRSQGGSDEESNLITLCHTCHKDLHSEKINPELSGKVKGNLKYATQMNSIRKQLFRLYPNAIETFGYVTKANRLHLGVDKEHYYDACTIATQGNAFNVKSNLYKKKCVSDGDFQKTKGIRSEQPIVTDKICGFRKFDKVRYFGNDYFIKGRMSTGYAILMDIDGNKIDFSTMPRGYKTPKLSNCKRITARSTVMTQVKVV

SEQ ID NO: 17835 - protein, 413 aa, unidentified; identical to SEQ ID NO: 11242
  REGION 1..413: note = Human gut metagenome

SEQ ID NO: 17836 - protein, 426 aa, Moorena sp.; identical to SEQ ID NO: 8077

SEQ ID NO: 17837 - protein, 396 aa, unidentified; identical to SEQ ID NO: 4508
  REGION 1..396: note = Human gut metagenome

SEQ ID NO: 17838 - protein, 420 aa, unidentified
  REGION 1..420: note = Human gut metagenome
MQYVYVLSKHGEPLMPCSPRKARLLLKQKKACVVKRTPFTIKLLYGSTGYKQPITLGVDAGSKHIGISAATEKYELYCEEATPRNDVVDLLSARRAFRRSRRNRKTRYRAPRFNNRVHSKHKGWLAPSVEVKIQEHITLIKRVCRILPVTFVRVETAEFDTQRLKAMLEGKPLPVGTDYQLGEMYDEYNVRQYVLKRDNYTCQCCGAHPTKAKAVKLHVHHIETRRTGGNAPNNLITLCTACHKALHAGKVTLDGKKRGKPLKDASFMGIMRKTLMERLLKELKIPVQGTYGYITKYLREKHSIPKSHTNDARCISKNPLAIPCDTCYYTKAIRHHNRQLHKATILKGGIRKANQAPYTVKGYRLWDKVSYNGSECFITGRRTSGYFALKKLDGTVVSNSASYKKMRLLEVATNYITERR

SEQ ID NO: 17839 - protein, 443 aa, Anoxybacillus sp.; identical to SEQ ID NO: 5909

SEQ ID NO: 17840 - protein, 427 aa, unidentified
  REGION 1..427: note = Human gut metagenome
LRVFVRNKRGKPLMPCSPAKARLLLKEKKAIVKRRTPFTIQLTIATGESKQPVSLGVDAGYKHVGLSASTEKAELYASEVELRQDVSDLLSARRALRQSRRNRKTRYRAPRFNNRLRTKRKGWLAPSVENRINAHLSRIEAVLRLLPVTKITVETASFDLQLLKNPDISGKEYQEGEQLGFWNIREYVLCRDGHVCQHCYGRSKDPVLNVHHLESRRTGGDSPGNLITLCETCHKALHRGEITLKAKRGQSFRAEAFMGIMRWEVQNRLKASHPELEVNNTYGYRTKHARIANDIAKSHCADAFCIAGNLGAERLGEFFFQKQTRRNNRQIHKLSILKGGIRKRNQAPFEVNGFRLFDKVACQGEEGFIFGRRSSGYFDVRKLDGTCISAGISYKKLHLLEKRRTYLTEIRKEEALPPLPEGRGLRA

SEQ ID NO: 17841 - protein, 513 aa, Acrocarpospora sp.; identical to SEQ ID NO: 10445

SEQ ID NO: 17842 - protein, 371 aa, Moorena sp.
MVGLETFCRCRQAITTLAKGTLLFSILSEGGRRILFVYVLNKHGTPLMPCQPRKARILLRDGKAKVIQREPFTIQLLYGSSGYKQKISLGIDAGSKHVGASASTQKKELYASQTELRGADIVKLLSTKRELRRSRRNRKTRYRKSRFLNRVSRKRKGWLAPSIENKIAAHLRIVADICKMLPIFSITVETASFDIQKIKHPDIAGIEYQQGEQLGFWNVREYVLFRDGHTCQCCHGKSKDKILNVHHIESRKTGGDAPNNLITLCKTCHTGYHKGTVKLPKTIRRGMRFRDAAFMGIMRWAFYERLKKLYQNVHMTFGYITKNKRIENKIVKTHTADAFCIAGNLEAERLPYSFLQAQVRRTIARLTSRRF

SEQ ID NO: 17843 - protein, 402 aa, unidentified
  REGION 1..402: note = Human gut metagenome
GKAKVKKRTPFTIQLVYGSSGYTQEVILGVDAGSKTIGVSASTKKEELFAANVIPRNDVVDLLSTRREFRRARRNRKTRYRKPRFDNRVRSKHKGWLAPSVEVKIQEHITSIKRVCRILPVSKVVIETAEFDLQLLKAIEEGKPVPQGEDYQQGEMYGHYNVRQYVLWRDDYTCQCCGAHATKKKEVRLHVHHLESRKTGGDAPRNLITLCDSCHKKHHDGLITEDDFKKRKRRSTRDATFMGIMRKTLIQRLRAELTIPVAETRGYITKATREKLLVLPKSHTNDALAIAQGKHGFNVGYLPGILQIDKIYTIRPVRHHNRQLHKAAILKGGIRKSNQAGKYVFGYRLFDKVQFNEQDCFIWGRRTTGIFTIKTINGKMIKDGISFKKLKLVEKSTSYLIA

SEQ ID NO: 17844 - protein, 378 aa, Moorena sp.; identical to SEQ ID NO: 2642

SEQ ID NO: 17845 - protein, 493 aa, unidentified
  REGION 1..493: note = Human oral metagenome
LYLLDNRFLALVIAAIERYAADMNYVMEKVKDTPLDVLVSLKLCECQSRNYTNVLYRQQRNTCTIHDIGKTKNTPKGRFPEMENKIEYCFVIDKDNKPLAPTKVNKGWYLIRKGRAKLKSKYPMVIQLNKKVEFNENDKSYIICGIDDGSIHVGIAIVQKCSTKNKVVFKGIIEQRQDVKHLMDTRRRYRQYHRYHKRHRPMRFNNRSSSKKVGRLTPTIKQKKDAILRVLYQLNKWINIKEYYLEDVCIDIRAMTDDYKPYKWQYQKSNRLDENLRKATIIRDNYKCQECGKSNCKLEVHHIRARKYHGADTIGNLITLCFKCHDKTKGKEKDFEDKYFKIINSKPKRFDYAMHVMQGKNYLRNKISELGLLHLTNGGATANKRIEWNIEKSHSNDAICITNDIPDSCNIKEWTIKPMRRKSKAKTNNVLGIKHRDLVSYTYKNGEIHTGYVTALYPEQLVLNFQSKTKHCKKVNAQKCKLIWKFNKIYWLE

SEQ ID NO: 17846 - protein, 426 aa, Moorena sp.
MQNYVFVIDTNKQPLNPIPPKKARRLLNKGKAAVFRMYPFTIILKTAINNPTISPCQIKIDPGSKVTGFALVQNNQVIWGMELEHRGGLIKKKLESRSAVRRRRRNRNTRYRKPRFLNRKRPEGWLPPSLEHRILTIQTWVKRLIKFCPVNEIWVERVKFDTQKMQNPEISGIQYQQGELAGYEVREYLLEKWGRECTYCGKQSVPLQIEHIHPRSLGGSDSAKPTLRERVSNLCLACKKCNQRKGNKPIEDFLKKKPSLLQKIKSKAKQPLKDATAVNATRNKLVKVLQLIKVVVTGTGAQTKYNRTRLELPKQHWIDAACVGDIETLVLRTSQPLLVTCKGPGGRQKAALNKYGYPIRHNPLKPIKGWVTGDIAQHPLLGIGKVTPRSKGSFGFTPLGTKGYKSCKPQDISAIYRKDGYTYSFC

SEQ ID NO: 17847 - protein, 419 aa, Anoxybacillus sp.; identical to SEQ ID NO: 7669

SEQ ID NO: 17848 - protein, 512 aa, unidentified
  REGION 1..512: note = Human gut metagenome
MPTVYVLNKDGKPLMPTTRCMHVRHLLKNGKARVVKSKPFTIQLLYETDDVVQPLYLGIDPGRTNIGVAVVKADGAAVFTAHLETRNKEVPKLMKKRKESRCARRTNGRRCRRQRRAKTNGTISKKCVKQTTAQNGSVSKRAKEIGVIKRHLPGCEKDVLCIGIKNKEAKFTNRARPEGWLTPTTNQLLQTHINLVKKIQKFLPISDVVLEVNKFAFMQLDNPNIQKWQYQQGPLYQKGSLENAVSEMQEHHCLFCEKPIEHYHHVVPKSENGSNTIANIVGLCTEHHNLVHKDATWQKKLAKEKVGLVKKYSALSVLNQIIPALTKEMNSLFPKHFFVTNGKSTYDYRTAHGVSKDHWLDAYCIACSVLPNDVCDSNINSHVPYELKQFRRHDRRVLHKANMSRVYTLNGKTVATNRHKAIKQTTDSLEEFRQSHPGDVCKLKVKEHHPAYRNLNRNYPGSVFLVDGQVHVMQGVSGSHNGKADGYYNTNGNAYPYYKCKFVVKNEGIVFA

SEQ ID NO: 17849 - protein, 442 aa, unidentified; identical to SEQ ID NO: 2903
  REGION 1..442: note = Human gut metagenome

SEQ ID NO: 17850 - protein, 407 aa, unidentified; identical to SEQ ID NO: 3417
  REGION 1..407: note = Human gut metagenome

SEQ ID NO: 17851 - protein, 515 aa, unidentified; identical to SEQ ID NO: 4456
  REGION 1..515: note = Human gut metagenome

SEQ ID NO: 17852 - protein, 439 aa, Campylobacter sp.; identical to SEQ ID NO: 4429

SEQ ID NO: 17853 - protein, 466 aa, unidentified
  REGION 1..466: note = Human gut metagenome
MSEYIYVIGMDGDPQMPTKRKRHVEQLLQTGRARVFRQVPFTIQLTYKNEPVLQPVTIAEDPGRSNIGMAVVSLSGELLSAAVVQTRNKEIVKLMDKRKQHRRASRNGERKARQRLAKKCHTMVKAGSLMRKLPMYGKDKRVRCNVIKNTEARFCNRKREDGWLTPSAEHLVRTQINLIHKMQKFLPITDVAIEINRFAFLSLEDPSISGVDFQNGPLKGYDDLNAAVEDLQDGHCLMCNSPIEHRHHIVPRSMQGSNSIGNIAGLCCKCHERVHKDSAFEDSLKKKKAGLNKRYAAVSVLNQAIPFICKRLEQEFRKEHVHYCSGRDTSMVRRSLGYHKTKEEQLHEVDAWCIAVLSLQQIPEKAPSFDHVHEILQFRRQDRSRIKAQTSRAYYHERKKIAKNRKKAEGQREDSLQEWRKRQVERYGEEQTRKMISQLKVKKSIRRYNRLDRLMPGAVFYYQGVR

SEQ ID NO: 17854 - protein, 482 aa, unidentified
  REGION 1..482: note = Human gut metagenome
LVWNVQAPWDVYPSPTLCGLCLKVLRGRNGDADKKPIPTLTKDENRPSGRTTGLRAEQAEPAGIRKGDTLKVFVLNMRGKPLMPCSPAKARHMLKAGKAFVVRRTPFTIKLTIATGETKQDVTLGVDAGARHVGISATTEKEEVFASEVALRQDITGLLADRLAFRRARRNRKTRYRAPRFNNRVRSKHKGWLAPSVENRIQAHMSRIEAVCRLLPVTKIVIETASFDIQKIRNPEVEGTGYQQGDQLGFWNVREYVLFRDGHVCQHCHGRSRDKILNVHHLESRKTGGDAPNNLITLCETCHKAYHAGKIKLKVKRGQSFRAEAFMGIMRWTLLDRVRKTHPKLPVENTYGYLTKHKRIALGLPKTHCADAFCIAGNLKALRRGDFLFQQQTRKHNRQIHKCSILKGGVRTLNQAPFLVKGFRLFDKVRIGGQIGFVFGRRVRGTFNIRRLDKTVIGTDINCKKLSLLETRKTFLTELRKE

SEQ ID NO: 17855 - protein, 484 aa, Actinomadura sp.
MLGASPGVERVTPGSTAGEKVREGHPAAFVLDKHGVAVQPTTPARARMLLKKGRAVVARYTPFVIRLKDRTIGESQVDGVELGIDPGSRHTGITVFTDKDGNRRGLYGIDLVHRGGSIRDKMSQRAAYRRGRRSRNLRYRAPRFSNRTKPRGWLAPSLRHRVETTITWTARLARWAPVQAVHIERVAFDTHAISADRPLEGAEYQQGTLHGTEVREYLLAKWGRACAYCGATGVPLNIDHIRPRSRGGSNRVSNLCTACIPCNQAKGNRPVEDFLGQAPGQLSRILAQAEAPLRDAAAVNATRWALWRALHAAFPTVRTASGGRTKWNRTRVGLPKTHTLDALCVGHLNTIDRTPRTVLIAAATGRGAYTRTRTDRYGFPRLRLPRTKRFFGFATGDLVRATVPTGRWAGTHTGRVAVRSSGSHTVTTPAGAVKASHKNLALLQRGDGYAYTTKPEGAVINAAARQVRAPLGPWMPVRAFVPPD

SEQ ID NO: 17856 - protein, 427 aa, Moorena sp.; identical to SEQ ID NO: 2799

SEQ ID NO: 17857 - protein, 451 aa, unidentified; identical to SEQ ID NO: 9095
  REGION 1..451: note = Human gut metagenome

SEQ ID NO: 17858 - protein, 424 aa, unidentified
  REGION 1..424: note = Human gut metagenome
MRVFVLNMRGDSLMPCTQRKARILLKEGKAVIYKYNPFTIQLTHATGENTQDCHVGIDTGAKHVGVAITSEGKVLFKGEIELRQDVKSNLDTRRIYRRSRRNRKTRYRQPRFLNRRKADKWLPPSLQNRLDHTFHWIDTLRGLVPSPTLHIEVGKFDTAKMIDPEIHGVDYQHGQTYGFFDERYYVFARDNYTCQCCGKSKGKILQTHHIIYRSNGGTDRADNLITVCTDCHTSKNHQKGGILYMWQEQHKKVRQYKEPPFMNTLRRRIFAKYPDAAITYGSETTPKRKEKGLDKTHYNDAIIISGVQTISENPDEWLFIRQFRKKKRSLHEGTPRKGRKEPNRTQKRNSKNTPYYRGYHLNDKVRVLGKTGYISGFTGGAAYVKDSDNQYITLPNKSYKQVGISNLQHVCHNNNWQYITKTTA

SEQ ID NO: 17859 - protein, 478 aa, Pantoea sp.
VAVFVLDIHGKALMPCTEKRARLLLDRGRARVHRLLPMVVRLVDRQAGDCEFQPLRLKIDPGSKTTGLALVREVAAVDALTGEVQLGVAVLNLLELVHRGRQISEAMTVRRQMRRRRRSNLRYRAPRFLNRGGDKTGRLAPSLQHRVDTTMTWVRRIQRWAPVRAISSELVRFDMQALQNPEIDGIEYQQGTLFGYELREYLLEKWGRQCAYCGARNLPLQIEHIRARAHGGSNRASNLTLACACCNQKKAARSIEDFLSQDHKRLNAILAQAQKPLRDAAAVNATRWALANALQATGLPVELASGGRTKFNRSALGVPKTHALDAACVGQVHSIENWNSPTLALKAMGRGSYQRTRLDKFGFPRGYLMRSKRVHDFATGDMVRADVPKGLKAGVHTGRVAIRATGRFNIQLNQAGVSAVVQGIHYRHCRIVQRNDGYGYFLNPANHTKRDQVRPKASDASHPALYLPGMNAEVSRAL

SEQ ID NO: 17860 - protein, 376 aa, unidentified
  REGION 1..376: note = Human gut metagenome
MVYVLNIQGNPLMPCKEAKARRLLKNSLAKIIKRTPFTIQLLFECENKTQDITLGIDAGSKTIGVSASTEKQELYSAEVVLRNDIVDLISTKKQNRRTRRNRLRYRKPRFNNRIKFKKKGRLAPSVSQKIETHLNVIKKIHKILPISKIIVETASFDIQKIKNPNITGVEYQQGEQLGFWNVREYVLHRDGHTCQHCKGKSKDKILNVHHIESRKTGGDSPSNLITLCETCHKKYHNGEIKLKVKRGQSFRDSAFMGIMRWAFYEKLKETYQNVRMTFGYITKNTRISNNLPKEHCIDAYCIAGNLKAKLMDSYFYQIKKRCQNRQIHKANFLKGGRKKLNQAPYIVKGFRLFDKVSYQDKPYYIFGRRSSGAFDV

SEQ ID NO: 17861 - protein, 443 aa, unidentified
  REGION 1..443: note = Human gut metagenome
NIGEGSQPVERPRRQNLRVFVLNKRGKPLMPCSPAKARLLLKEKKAIVVRRTPFTIQLTIATGESKQPVSLGVDAGYKHVGLSASIEKAELYASEVELRKDITDLLSARRALRQSRRNRKTRYRAPRFDNRIRTKRKGWLAPSVENRINAHLSRIEAVLRLLPITKITVETASFDMQRLKNPDISGKEYQEGEQLGFWNVREYVLFRDGHVCRHCHGRSKDPVLNVHHLESRRTGSDSPDNLITLCETCHKALHRGEITLKAKRGQSFRAQAFMGIMRREVLNRLKASYPELKVHETYGYLTKHARIANGIVKSHGADAFCIAGNLGAERLGEFFFQKQTRRNNRQIHKLSILKGGIRKRNQAPFEAKGFRLFDKVACQGEEGFIFGRRSSGSFDVRKLDGTRISAGISCKKLRLLEKRRTYLTEIRKEEALPPLPEGRGLRA

SEQ ID NO: 17862 - protein, 426 aa, unidentified; identical to SEQ ID NO: 4206
  REGION 1..426: note = Bioreactor metagenome

SEQ ID NO: 17863 - protein, 423 aa, Moorena sp.
MPNFVFVLDTTKKPLNPVHPGQARRLLKEGKAAVFRRYPFTIILKEEVTESPENIIIKLDPGSKFTGIALVQNNQVIWGAELQHRGQQIKDNLTSRRQLRRGRRGRKTRYRQPRFLNRKRPKGWLPPSLQHRVETTLTWVKRLIRYCPINSLSVELVKFDLQKQEKPEISGVEYQHGTLYGWEVREYLLAKFNRICQYCGATDKPFEVDHIHPRSKGGSDRVSNLTLACHDCNQAKGNQDIKDFLKGKPDLINRILKQAKTPLKDAAAVNSTRWKLFNSLKELGLPVETGSGGLTKFNRKRLKIPKSHWQDAACVGKVPLNLVFKTNQPLLIKATGHGTRQRCRPNKFGFPKSHAPKAKFFQGFQTGDLVSASISKGKFAGQYTGRIAIRFRPSFVLQLPDKKFDVHPKYLTHIHRNDGYNYA

SEQ ID NO: 17864 - protein, 431 aa, unidentified
  REGION 1..431: note = Human gut metagenome
MPNKVYVINKHGRPLMPCSPAKARHLLDAGKAKVKKRTPFTIQLVYGSSGYTQEVILGVDAGSKTIGVSALTKKEELFAANVIPRNDVVDLLSTRREFRRARRNRKTRYRKPRIDNRVRSEHKGWLAPSVEVKIQEHITSIKRVCRILPVSKVVIETAEFDLQLLKAIADGKPVPQGEDYQKGEMYGHYNVRQYVLWRDDYTCQCCGAHATKKKEVRLHVHHLESRKVGGDAPSNLITLCDSCHEKFHKGIITAANLKKRKRRSMRDATFMGIMRKTLIQRLRAELTIPVAETRGYITKTTREKLLVLPKSHTNDALAIALGKHGFNVGYLPEIAQIDKIYTIRPVRHHNRQLHKAAILKGGIRKSNQAGKYVFGYRLFDKVQFNGQDCFIWGRRTTGIFTIKTINGKMIKDGISFKKLKLVEKSTSYLIA

SEQ ID NO: 17865 - protein, 415 aa, unidentified; identical to SEQ ID NO: 5395
  REGION 1..415: note = Human gut metagenome

SEQ ID NO: 17866 - protein, 451 aa, Marinobacter sp.; identical to SEQ ID NO: 8862

SEQ ID NO: 17867 - protein, 449 aa, Allochromatium sp.; identical to SEQ ID NO: 10301

SEQ ID NO: 17868 - protein, 455 aa, unidentified
  REGION 1..455: note = Human gut metagenome
LVWNVQAPWDVYPSPTLCGLCLKVLRGRNGDADKKPIPTLTKDENRPSGRTTGLRAEQAEPAGIRKGDTLKVFVLNMRGKPLMPCSPAKARHMLKAGKAFVVRRTPFTIKLTIATGETKQDVTLGVDAGARHVGISATTEKEEVFASEVALRQDITGLLADRLAFRRARRNRKTRYRAPRFNNRVRSKHKGWLAPSVENRIQAHISRIEAVCRLLPVTKIVIETASFDIQKIRNPEVEGTGYQQGDQLGFWNVREYVLFRDGHICQHCRGRSKDPILNVHHLESRKTGGDAPNNLITLCETCHKAYHAGKIKLKVKRGQSFRAEAFMGIMRWTLLDRVRKTHPKLPVENTYGYLTKHKRIALGLPKTHCADAFCIAGNLKALRRGDFLFQQQTRKHNRQIHKCSILKGGVRTLNQAPFLVKGFRLFDKVRIGGQIGFVFGRRVRGTFNIRRLDKT

SEQ ID NO: 17869 - protein, 413 aa, unidentified; identical to SEQ ID NO: 2636
  REGION 1..413: note = Human gut metagenome

SEQ ID NO: 17870 - protein, 418 aa, unidentified; identical to SEQ ID NO: 16412
  REGION 1..418: note = Human oral metagenome

SEQ ID NO: 17871 - protein, 415 aa, unidentified; identical to SEQ ID NO: 10513
  REGION 1..415: note = Human gut metagenome

SEQ ID NO: 17872 - protein, 456 aa, Coprobacillus sp.; identical to SEQ ID NO: 12190

SEQ ID NO: 17873 - protein, 512 aa, unidentified; identical to SEQ ID NO: 4446
  REGION 1..512: note = Human gut metagenome

SEQ ID NO: 17874 - protein, 382 aa, unidentified
  REGION 1..382: note = Human gut metagenome
VCRIPFTIQLDYDTTDYTQPISLGIDAGSKHIGISATTSEKELYAADVELRNDIVEKLSTRREQRRTRRSRLRYRKARFNNRVSSKRKGWLAPSIENKIQTHLTVVEKIHKFLPITNIVVETASFDIQKIKNPSISGVEYQQGEQLDFFNVREYILFRDGYTCQHCKGKSKDKILNVHHIESRKTGGDSPNNLITLCETCHKAYHRGEFELNVKRGKSFRDSAFMGIMRWSLYDRLKNIYPNVNMTFGYITKNTRITNNLPKEHYVDARCISGNPVAKPLGYYFYQKKVRCQNRQIHKANFLKGGRKKLNQAPFLVKGFRLFDLVEYQKDLYYIFGRRSSGSFDIRKLDGTKVKKGSISCKHLRLIDKRKSILTEKRMQVNL

SEQ ID NO: 17875 - protein, 478 aa, Lactobacillus sp.; identical to SEQ ID NO: 16509

SEQ ID NO: 17876 - protein, 448 aa, Sarcina sp.
MPTFNIKKVRRFLGCGKAEIFRHHPFTVRLLYAESLDVQSVEMCIDAGDGHIGISVISRKHEFAHSQYDPLPDEKERHEDRRRYRRMRRDRLRCRKPRFDNRRKPEDWLAPTVEHKKDLHVGLAVMFKCVCPLTSVTVETGSFDTQELEAIERGLPLPKGTDYQQGPRYRVNTLRDAVFYRDGHTCRLCGGKGKVLRMHHAGYWRGDHSDRMGNLITLCTGCHTAANHKKGGPLYGWKPKVMPMKGAAFMNQVRFRVVEEIREKTGLPVNVTWGSATKTARKYFCIRKTHANDAFVMGVFHPAHRCREQAFCKQRRNDRRLQKFYDAVYTDIRDGKEKSGQELSCGRTKRSEPRRSERDLRPFRGHKVKKGHITIRRQRTQIKPGSQVRYGNEILLVHGTHTRRDKKSGQVNTNVEFTHPAKNGRKSADLRKVTVIREQYTNAWRRVT

SEQ ID NO: 17877 - protein, 413 aa, unidentified; identical to SEQ ID NO: 3751
  REGION 1..413: note = Human gut metagenome

SEQ ID NO: 17878 - protein, 430 aa, unidentified; identical to SEQ ID NO: 8226
  REGION 1..430: note = Human gut metagenome

SEQ ID NO: 17879 - protein, 512 aa, unidentified; identical to SEQ ID NO: 5549
  REGION 1..512: note = Human gut metagenome

SEQ ID NO: 17880 - protein, 450 aa, Moorena sp.; identical to SEQ ID NO: 2935

SEQ ID NO: 17881 - protein, 411 aa, unidentified; identical to SEQ ID NO: 6244
  REGION 1..411: note = Human gut metagenome

SEQ ID NO: 17882 - protein, 414 aa, unidentified
  REGION 1..414: note = Human gut metagenome
MPCSPAKARLLLKEKKAIVKRRTPFTIQLTIATGETKQPVGLGVDAGYKHVGLSASTEKAELYASEVELRKDITDLLSARRALRRARRNRKTRYRAPRFNNRIRTKRKGWLAPSVENRINAHLSRIEAVLRLLPVTKITVETASFDMLLLKNPDIAGKEYQEGEQLGFWNVREYVLFRDGHVCQHCYGRSKDPVLNVHHLESRRTGGDSPGNLITLCETCHEALHRGEIALKTKRGHSFRAEAFMGMMRWEVLNRLKASHSELEVNNTYGYRTKHARIVNGIDKSHCADAFCIAGNLGAERLCEFFFQKQTRRNNRQIHKLSILKGGIRKRNQAPFEAKGFRLFDKVACQGEEGFIFGRRSSGYFDVRKLDGTRISAGISCKKLRLLEKRRTYLTEIRKEEALPPLPEGRGLRA

SEQ ID NO: 17883 - protein, 512 aa, unidentified; identical to SEQ ID NO: 16617
  REGION 1..512: note = Human gut metagenome

SEQ ID NO: 17884 - protein, 431 aa, unidentified
  REGION 1..431: note = Human gut metagenome
MVYVLDMDGQSLMPTVRYGKVRKLLNSHLAKVVKRCPFTIQLLYKSTKETQPVSLGVDAGSKHIGLAATTEKKVVYQEELIPRNDVVKLLSARRTLRRTRRNRKTRYRKPRFNNRVHSKHKGWLAPSVEVKIQEHITAIKSVCKILPVSEIHIETAEFDLQRLKAMEEGKPLPVGTDYQLGEQYDFYNTRQYVLHRDGYTCQCCGTHDKDVKLHVHHIESRQTGGNAPNNLITLCEHCHKALHEGKIELPKGRKRGKSYRDATFMGIMRNTLLERLEKEVDVPVMMTYGYITKYWREKTGLEKSHINDAICISKHPYAKPLDTYYLTKAVRHHNRQIHKVKFSKGGIRKRNQAPYLVKGFRLFDKVLYQNKEYFIFGRRATGRFDIRTLDGTKVNKGSISYKKLRIQDTANAYLKEVRAIPHMNKFMGVLA

SEQ ID NO: 17885 - protein, 477 aa, unidentified
  REGION 1..477: note = Freshwater metagenome
MKLLVNDREEIEMSECHPSPDLFGCRLNSSSGCGTVSVSSNLPISDRGEVENSGCSESVVYAQDQHTGRSKSIVYVLNQDGKPLMPCKFVKAKHLLRDGKAKVVSRLPFTIKLLWQCECNTQEVVGGLDTGSVTIGCAAVSDGKVLYMSEVKLRNDITKKMVRRKSSRIHRRMRHTRYRPERWGNRASSLRKGRLAPTLLSKLNSHYREISFVESILPITRWKVELANFDINRIENPDVDKSGHKDGQQKSFYNTKAYIVDRDAYCCKGCRAKNVPLQVHHIIFRSNGGTNIHNNLVSLCKECHEKVHRGELKFLARKSVTKHAGEVGVIKSQLKKGNKKFETTYGYETKFKREVVLGLPKTHYYDAIAICFEDEDNIKQTNSVVFMKRHIAGGDYKQTKGSRSEKKVPTGKLFGVRRYDLVKTDKGIGFVKGKRVNGFFEISTLGGRKISGTANMKKPFTRITARSTTLIDTVVAI

SEQ ID NO: 17886 - protein, 447 aa, unidentified; identical to SEQ ID NO: 5316
  REGION 1..447: note = Human gut metagenome

SEQ ID NO: 17887 - protein, 451 aa, unidentified; identical to SEQ ID NO: 3581
  REGION 1..451: note = Human gut metagenome

SEQ ID NO: 17888 - protein, 431 aa, Escherichia sp.; identical to SEQ ID NO: 3801

SEQ ID NO: 17889 - protein, 414 aa, unidentified; identical to SEQ ID NO: 7795
  REGION 1..414: note = Human gut metagenome

SEQ ID NO: 17890 - protein, 454 aa, unidentified
  REGION 1..454: note = Human gut metagenome
MKTVAVISASGKKLMPTTAYRARKLLKSGRAKIFKYRPVFTIQLLDREDGYTQPMEYSCDTGYMYIGVSTKSRKHEYVNRQYDLLPDEPERHNKRRKYRRTRRNRLRYRKPRWNNRKSLMTKGDPFAPSLRNKRDQHIQVFKAFLAVMPITKATFEMGQFDTQVLKAVEEGKPLPKGTDYQRGERYGYDTLREAVFSRDDYTCVVCKKGIKQGKILRIHHLGYLRGDRSNRMSNLATVCTDCHTSKNHKQGGKLYGLEPKLKAFKGATFMTTVRWDMYQKLKEACGDEVELNITYGAITKEKRKKLNIKKTHSNDAYCIGEYHPKHRSDFEHFQKQRRNNRILRKFHDAKYIDTRDGSTKSGAQLSCGRTNRSVSRRSELNERIYRGEKVKRGSYSIRKTRYPFRPGDTVWTRSGKYTIKGSCHYGQYLITTTGKNISVKQVTRTIHCGGWVLI

SEQ ID NO: 17891 - protein, 442 aa, unidentified; identical to SEQ ID NO: 17475
  REGION 1..442: note = Human gut metagenome

SEQ ID NO: 17892 - protein, 456 aa, Halomonas sp.
MAVFVLGKNKQPLMPCSEKRARLLLERGRAVVVNLTPFVIRLRDRCLSDCALQPTLLGIDPGSKETGLALMRLEDNATDEQAPATRHVLCLFQLVHRGFQIRQALEQRAGFRRRRRSKNLRYRQPRFDNRTRKKGWLPPSLQHRVDTTMAWMDKLCRWAPVTHLNMELVRFDLQKMENPEISGVKYQQGTLLGYEVREYLLEKWGRECAYCGTGDTHLEIEHVVAKSRDGSSRVSNLAIACHDCNQAKDSQWLVDFFAADKGLKKRLKANGLSATVRLERVQRHLKLPLRDATAVNATRWTLFGTMKATGLPVAVGSGGRTKYNRQRLGIPKTHALDAACVGKFDTLKGWQVPTQVIKAMGRGSYQRTRLDKYGFPRGYLMRQKQVQGFQTGDRVRAIVPAGKKTGSHTGRVAIRKTGSFNIQTEQGAVQGISWRHCTLLQRGDGYGYHPLPTIQH

SEQ ID NO: 17893 - protein, 518 aa, unidentified; identical to SEQ ID NO: 7359
  REGION 1..518: note = Human gut metagenome

SEQ ID NO: 17894 - protein, 442 aa, unidentified; identical to SEQ ID NO: 3791
  REGION 1..442: note = Human gut metagenome

SEQ ID NO: 17895 - protein, 424 aa, Enterococcus sp.; identical to SEQ ID NO: 5552

SEQ ID NO: 17896 - protein, 420 aa, unidentified; identical to SEQ ID NO: 6680
  REGION 1..420: note = Human gut metagenome

SEQ ID NO: 17897 - protein, 420 aa, unidentified; identical to SEQ ID NO: 8060
  REGION 1..420: note = Human gut metagenome

SEQ ID NO: 17898 - protein, 340 aa, unidentified
  REGION 1..340: note = Human gut metagenome
MTNYAFVLDANNKQLTPTKEQKAWFLIRKKRATLVSKYPMVIQLKKKIPDKEICKDEVRCGIDDGGLHVGVALVQKCQTRNKVVFKGVIEQRNDVKHLIDVRCGYRRYHRYHKRYRSARFNNRNSSKREERIAPSILQKRQATIRVINQLNKWINITNYWLEDVAIDIRALTDGYKPYRWQYQKSNRLDENIRKAVILRDGCKCMECGKSNCRLEVHHIKPRRLKGSSTLDNLITLCTKCHQKTESVEELYMDRYFALLNSSDNKNLNYAQHVMIGKKWLREQLSNLGMLYLTNGGDTANKRIDWDIAKSHSNDAICITDLRPDTCEIKEWVIKPMRKQS

SEQ ID NO: 17899 - protein, 415 aa, unidentified; identical to SEQ ID NO: 3635
  REGION 1..415: note = Human gut metagenome

SEQ ID NO: 17900 - protein, 392 aa, unidentified
  REGION 1..392: note = Human gut metagenome
FTIQLVYGSSGYTQEVILGVDAGSKTIGMSASTTKEELLSAEVKPRNDVVDLLSTRREFRRARRNRKTRYRKPRFDNRVRSKHKGWLAPSVEVKIQEHITAIRRVCGILPVSKVVIETAEFDLQLLKAIADGKPVPQGEDYQQGEMYGHYNVRQYVLWRDGYTCQCCGAHATKKKEVRLHVHHLESRKVGGDAPDNQVTLCESCHEKLHKGLIAEKDFKKRKRKSTRDATFMGIMRKTLMQRLCSELPIPVIETRGYITKATREKLLVLPKSHTNDALAIAQGKQGFNVGYLPGIVQINKIYTIRPVRHHNRQLHKATILKGGIRKSNQTEKYVFGYCLFDKVQFNGQDCFIWGRRTTGIFTIKTINGKMIKDGISFKKLKLAEKSTSYLIA

SEQ ID NO: 17901 - protein, 485 aa, unidentified
  REGION 1..485: note = Human gut metagenome
KEQKARVVQSNPFTIQLLYETNDVVQPLYLGIDPGRTNIGVAVVKADGTAVFAAHLETRNKKIPKLMQDRKKARRARRTNGRRCRRQRRAKANGTISKKCVKQDTAQSKNPSKRAKEIGVIKRYLPGCKKDVLCVGIKNKEAKYTNRARLEGWLTPTANQLLQTHINLVKKIQKFLPISDAVLEVNKFAFMRLDNPNIQKWQYQQGPLYQKGSLENAVSEMQEHHCLFCEKPIEHYHHVVPKSENGSNTIANIVGLCAEHHNLVHKDVAWQEKLVEEKTGLNKKYGALSVLNQIIPALTKELSFLFPKHSFMTNGKSTHDYRAAHGISKDHWLDAYCIACSGLPIDVCDSTINNCVPYELKQFRRHDRRALNNENMNRVYTLNDKVVATNRHKATEQEAASLEEFRKEHPNDVCKLKVKEHHPTYRNMNRNYPGSVFLVGKQIHVMQGIASSKDGKATKYNDTRATTIAAGKCKFVAKNSGILFV

SEQ ID NO: 17902 - protein, 512 aa, unidentified; identical to SEQ ID NO: 13775
  REGION 1..512: note = Human gut metagenome

SEQ ID NO: 17903 - protein, 357 aa, unidentified
  REGION 1..357: note = Human gut metagenome
EIRCGIDDGGLHVGIALVQKCKSKNKVVFKGTIEQRNDVKHLMEVRRNYRRYHRYHKRYRQARFDNRKSSKRKGRIAPSILQKRQATIRVINRLNKWINITNYWLEDVSIDIRVLTDGYKSYSWQYQKSNRLDENIRKATILRDGGKCMECGKSNCRLEVHHIKPRRRNGSNTLDNLITLCESCHQKTEGQEELYMDRYFSLLKSSDNKNLNYAQHVMIGKMWLRKQLSGLGVLYLTSGGDTANKRIDWNIEKSHTNDAVCITDLQPDTCDIKEWAIKPMRRQSKAKTDHVLGIHHRDLVEYTFKNGETHRGYVTALYPDQKAINFQSQTKHCKKVNARKCKLLWNYSKIYWFENAS

SEQ ID NO: 17904 - protein, 419 aa, unidentified; identical to SEQ ID NO: 4131
  REGION 1..419: note = Human gut metagenome

SEQ ID NO: 17905 - protein, 524 aa, Moorena sp.
MQNKCLSKGNIYRMQSSQAVFVLTGRRLLLMTTVYIQTRSGKPLMPTTRCGYVRRLLKFGKARVVSTCPFTVQLLYETEEKTQPLVLGIDPGRTNIGMAIVTEDAGPEMLLQAETRNKEMPKLMEKRKSFRQKHRKCRREKRRRRAKAAGTESPKGEIERILPGCEKPIVCKGIKNKEARFNNRKRPAGWLTPTAKHLLQTHLNLVETVGRILPITDVVLEVNKFAFMALDNPNIRPWEYQKGPLYRQGSVEKAVFAMQDGTCLFCGKPITRYHHVVPRSKGGSDTLENRVGLCEEHHALVHTDPEWAKKLKEQKTGMNKKYHALSVLNQIIPFLTDELAKRFPDHTYVTSGKSTFDFRNVHDIPKDHYLDAYCIACSILDKSDSRVLNEKPYLVRQFRRHDRQACHQQNCKRRYMLDGKVVAVNRHQAFEQKETSLEKYLANGGGSDNLTVKRQKPTYKRQDRIMPGALFCVNGLIKAMTASTGLHNGIPDYFHFADQTKSTPKRSYKLLNNTGLVFADVLNN

SEQ ID NO: 17906 - protein, 512 aa, unidentified; identical to SEQ ID NO: 7341
  REGION 1..512: note = Human gut metagenome

SEQ ID NO: 17907 - protein, 419 aa, unidentified
  REGION 1..419: note = Human metagenome
MVYVINKDGQALMPTERFGKVRRLLKNGLAHVVCRIPFTIRLDYETTHFVQPISLGVDAGSKHIGISATTSKKELYAADVELRNDIVDKLSTRREQRRTRRSRLRYRKARFNNRVSSKHKGWLAPSVENKIQTHLTVVEKIHKFLPITKIIVETASFDIQKIKNPSISSKEYQQGEQLGFFNVREYVLFRDNHTCQHCKGKSKDHILNVHHIESRKTGGNSPSNLITLCESCHKAYHNGKIDIKIKRGASFRDATFMGIARWTTYERLKNIYPNVSMTFGYITKNTRITNGLPKEHYVDARCISGNPKSKPLGYYFYQKKVRCQNRQIHKANFLKGGRKKLNQSPFLVKGYRLFDLVEYQKELYYIFGRRDRGFFDIRKLDGTKVNKGSISCKHIRLVSKRRSILTERRNSCSIPPTKL

SEQ ID NO: 17908 - protein, 408 aa, unidentified
  REGION 1..408: note = Human gut metagenome
MVYVLNKQGEPIMPCKEAKARKLLKQNKAKIAKHEPFTIQLLFDCENQTQEVNLGIDAGSKYIGVSATTEKQVLYEADVELRNDIVNKLSSRRENRRTRRNRLRYRPARFNNRVKSKYKGWLAPSIEQKINTHIQVIKHLYEVLPITKLIVETAQFDIQKINNSEISGKEYQQGNQLGFWNVREYVLFRDNHECQRCHGKSKDSILNVHHIESRKTGGNTPNNLITLCETCHKAYHNGEVKLNFKRGKSYRDAAFMGIMRKTLFNRLCELYPNVYEIYGYITKNTRIENNLPKKHYVDARCISGNPKANPLDYYIYQKCVRRQNRQIYKNNFLKGGRKKNTKLNGNIFGFELFDTVKYQNKQCFVFGKRKSGYLDVRNLNGEKVNNGSISYKKLKRIKHNSTKLTERR

SEQ ID NO: 17909 - protein, 408 aa, Bacillus sp.; identical to SEQ ID NO: 9968

SEQ ID NO: 17910 - protein, 419 aa, unidentified; identical to SEQ ID NO: 17238
  REGION 1..419: note = Human gut metagenome

SEQ ID NO: 17911 - protein, 423 aa, Moorena sp.
MRVFVLNKNRQPLDPCKPARARILLSVGKAKVYRRYPFTIILTEEVKQPITHDHQLKIDPGAKISGLAIVQGKRVIWGSELTHRGFQIQEALTSRRQLRRSRRNRKTRYRKPRFLNRTRSKGWLAPSLTSRVQNILTWVKKLSRFCPVTGISQELVRFDTQKLQNPEISGIEYQQGTLYGYELREYLLEKWNRKCAYCGVAGTQLEIEHIKPLSKGGSNRVSNLAIACRPCNQAKSNQDIELFLSKKPSILKRILSQAKRSLADAASVNTTRWKLYHDLKSIGLPVEVGSGGLTKFNRCRQSLPKTHWLDAANVGKVETLIIEVTLPLAISAKGHGTRQLCRTNKYGFPTRHCSRIKFHKGFQTGDLVRAVVTKGKKIGTYVGRVATRKSGSFNISTKSGLVQGISHKYCKFIHRKDGYAYAN

SEQ ID NO: 17912 - protein, 428 aa, unidentified
  REGION 1..428: note = Human gut metagenome
LKVFVLNMRGRPLMPCSPAKARHLLKAGKAVVRRRTPFTIQLRIATGETKQSVTLGVDAGAKHVGLSAATEKEEVFASEVELRQDITGLLAARLSLRRDRRHRKTRYRAPRFLNRVRSKHKGWLAPSVENRIQAHMSRIDAVCRLLPVTKIVIETASFDIQKIKDPSVEGTDYQQGDQLGFWNVREYVLFRDGHVCQHCHGHSKDKILNVHHLESRKTGGDAPNNLITLCETCHKAYHAGKIKLKVKRGQSFRAEAFMGIMRWTLLDRVRKAHPGLPVENTYGYLTKNTRITLGLPKAHCVDAYCIAGNLKAVRRGVHLYQRQVRKHNRQIHKCTVLSKTLKDGTKIGYRKLNQTPHLVKNFRLFDKVRCLGQTGFIFGRRSSGYFDVRRLDGVKISSCISYRKLTLLEKRSTYLTELRKEDGASSPV

SEQ ID NO: 17913 - protein, 418 aa, unidentified
  REGION 1..418: note = Human gut metagenome
MVYVLGQDGHPLMPTCRHGKVRRMLKSGMAKVVKRCPFTIQLQYESTIHTQEINLGIDAGSKTIGVSATTEKKVLYESEVILRNDIVGLLSGRRALRSSRRNRKTRYRKPRFDNRKKPDGWLAPSIRQKIETHVTVVGNVIKILPVTKIIVETASFDIQKIKNPEIEGEGYQHGEQLNFWNVREYVLFRDGHTCQCCKGKSKDSILNVHHIESRKTGGNAPNNLITLCETCHKAYHKGIITLPKEIYRGMRFRDAAFMGVMRWAFYDRLKELYNPLGVEVINTYGYITKNTRIEHGLPKEHYVDARCISDNPAAKPLDHYYFQKKVRCHNRQIHKNTILKGGTRKRNQAAYLVKGFRLFDKVKYQDQEYFIFGRRTRGSFDIRTLDGTKVNKGSISCKKLQLVEKSKHYLTEQRKVTA

SEQ ID NO: 17914 - protein, 419 aa, unidentified
  REGION 1..419: note = Human gut metagenome
MKKRKESRRTRRTNGRRCRRQRRAKANGTISKKCVKHGTAQNGSVSKRAKEIGVIKRHLPGCEKDVLCIGIKNKEAKFSNRTRPEGWLTPTANQLLQTHINLVKKIQKFLPISDVVLEINKFAFMRLDNPNVQKWQYQQGPLYQKANLEETVSEMQEHHCLFCKKKIDHYHHVVPQHKNGSNTIDNIIGLCTQHHDLVHKDATWQKRLAKKKTGLNKKYGALSVLNQIIPALTKELSSLFPKHFFVTNGKSTYDYRAAHGVSKDHWLDAYCIACSVLPNDTCDKTINSRVPYELKQFRRHDRRALNNENMSRVYTFNGKMVATNRHKATEQTTDSLEEFRQRQPNDVCKLKVKEHHPTYRNMNRNYPGSVFLVGNQVHVMQGIAGSKDGEATTYKDTNANSIAAGKCKFVAKNSGILFV

SEQ ID NO: 17915 - protein, 456 aa, unidentified; identical to SEQ ID NO: 6857
  REGION 1..456: note = Human gut metagenome

SEQ ID NO: 17916 - protein, 373 aa, unidentified
  REGION 1..373: note = Human gut metagenome
ILLKDETERHNDCRKYRRTRRNRLRYRKALWNNRHDNLICKDGFAPSIRNKRDTHIILFKMYYEVCPITSATFEMGQFDTQLLKAIENGENIPQSTDYQHGEQYGYSTLREAVFTRDNYKCICCGKSAIKNGSILKIHHLGYRIGDRTNRMNNLATVCSNCHTSKNHQKGGKLYDLKPRLKGFKGATFMTMVRYDMFAKLKEVTPNIDFNMTYGALTKLKRKDYHIKKSHSNDAYVMGMFHPKHRTDFKCYQKLRRNNRILSKFYDAKYIDLRDGTVKSGKQLSYNRTSRNELRNSNKNERIYRGQKVSKGKIVVRKQHYQYRPYDFIWYENVKYIVKGVQDKGKRIALQNHLPVSLSRVDKCVHTNGWSLVN

SEQ ID NO: 17917 - protein, 513 aa, unidentified; identical to SEQ ID NO: 8629
  REGION 1..513: note = Human gut metagenome

SEQ ID NO: 17918 - protein, 408 aa, unidentified; identical to SEQ ID NO: 3192
  REGION 1..408: note = Human gut metagenome

SEQ ID NO: 17919 - protein, 434 aa, unidentified; identical to SEQ ID NO: 5659
  REGION 1..434: note = Fermentation metagenome

SEQ ID NO: 17920 - protein, 414 aa, unidentified
  REGION 1..414: note = gut metagenome
MPCSPAKARLLLKEKKAIVKRRTPFTIQLTIATGESKQPVTLGVDAGYKHVGLSASTEKAELYASEVELRQDVSDLLSARRALRQSRRNRKTRYRAPRFDNRIRTKRKGWLAPSVENRINAHLSRIEAVLRLLPITKITVETASFDMQRLKNPDISGKEYQEGEQLGFWNVREYVLFRDGHVCRHCHGRSKDPVLNVHHLESRRTGSDSPDNLITLCETCHKALHRGEITLKAKRGQSFRAQAFMGIMRREVLNRLKASYPELKVHETYGYLTKHARIANGIVKSHGADAFCIAGNLGAERLGEFFFQKQTRRNNRQIHKLSILKGGIRKRNQAPFEAKGFRLFDKVACQGEEGFIFGRRSSGSFDVRKLDGTRISAGISCKKLRLLEKRRTYLTEIRKEEALPPLPEGRGLRA

SEQ ID NO: 17921 - protein, 417 aa, unidentified; identical to SEQ ID NO: 15658
  REGION 1..417: note = Spirochaetales bacterium UBA4673

SEQ ID NO: 17922 - protein, 489 aa, unidentified; identical to SEQ ID NO: 15226
  REGION 1..489: note = uncultured beta proteobacterium

SEQ ID NO: 17923 - protein, 419 aa, Aneurinibacillus sp.
MVVYVINRQGKPLMPCSPRKARILLKQQKAKVVKRTPFTIQLFYGSRGYRQPVSLGVDAGTKHIGLSATTETRVLFEGDVQLRTDIPQLLATRLQFRRARRSRTTRYRKARFLNRKKSKGWLAPSVQHKVDSHLKVVQLVHRIFPVTKITVEVAQFDTQLLKNPSIKGEEYQQGEQMGFWNVREYVLFRDKHTCQRCKGKKKDNILNVHHIESRKTGGDSPDNLITLCETCHNEIHQKGLEHTIKRKTQTLRDVSQMTVMRWFIYNGLKERYPHIQLTYGYITKNTRITNGLGKSHEVDARCISGYPLAKPMDTVYHLKFVRKNNRQLHKATISKGGKRKSNKAERFVKGFQLFDKVLYEGQECFIFGRRSSGYFDIRKLDGTKIHASASYKKLTRIEYARTLLIERRKGDSSPTYATA

SEQ ID NO: 17924 - protein, 428 aa, unidentified
  REGION 1..428: note = Human gut metagenome
LKVFVLNMRGQPLMPCSPAKARHLLKAGKAVVRRRTPFTIQLRIATGETKQSVTLGVDAGAKHVGLSAATEKEEVFASEVELRQDITGLLAARFSLRRERRQRKTRYRAPRFLNRVRSKHKGWLAPSVENRIQAHMSRIDAICGLLPVTKIVIETASFDIQKIKHPDVEGTDYQQGDQLGFWNVREYVLFRDGHVCQHCHGHAKDKILNVHHLESRQTGGDAPNNLITLCETCHKACHAGKIKLKVKRGQSFREEAFMGIMRWTLLDRVRKAHPGLPVENTYGYLTKNTRITLGLPKAHCVDAYCIAGNLKAVRRGVYLHQRQVRKHNRQIHKCTVLSKTLKDGTKIGYRKLNQTPHLVKNFRLFDKVRCLGQTGFIFGRRSSGYFDVRRLDGVKISSCINYRKLTLLEKRSTCLTELRKEDGASSPV

SEQ ID NO: 17925 - protein, 423 aa, Moorena sp.; identical to SEQ ID NO: 2845

SEQ ID NO: 17926 - protein, 450 aa, Moorena sp.
MVYVINFEGKPLMPTTNAKARKLLKQKKATVKRVNPFIIQLLYKTDTEYIQTITLGIDSGYLNIGFSAITDSKELIVGEVKLLQGMKDRLLEKSQYRRIGRQRLRYRKPRWNNRKIRQGWLAPSLQHKLDTHVKFIDYLNTILPIRNIVLEVANFDIQKIKNPDISGVEYQQGEQMGFWNVREYVLHRDGHKCQNPNCKNKSKEQILEIHHIKYKSEGGSDAPSNLITLCNKCHTSPNHKKGKFLYDWCENGKKVRGFRDATFMSMIRWYLLEQLKEKYTNIKATYGYLTKNHRIEHGIEKSHFNDAFAIAKGVNQVRNLEIFKVEQSRLNNRSLEKFYDAKYIDNRTGEKVSASELNCGRRTRNKNLNSENLRVFRGQKISKGQRRIRKKKSLYQSNDLIKYESKVYTVKGSQNEGKYIALKEIKKVPNVKLIKPYIFKKGLNWSHGLC

SEQ ID NO: 17927 - protein, 456 aa, unidentified
  REGION 1..456: note = Human gut metagenome
MSTCVCVLSNSGERLMPTIRLGKVRRLLKDGKAKIVKHHPFTIQLLYDSKANTQPIEICEDVGYNYIGISVKSESHEYVSAQYDTLQDEKEHHDDCRKYRRTRRNRLRYRKPRFDNRKRSEGWLAPSLEHKKQLNIRLIERYVSVIPITRATVEVGSFDTMLLQAIQKGESKPEGVDYQKGPRYNLATLREAVFYRDNYTCQVCGRKIADGAILHMHHMFYWKGRHGYQLDELVTACEKCHTPANHQKGGKLFGFGENKEFANLSGAAFMNAVRWQIVNALYATYGKEFVTITYGAMTKEKRIILGIEKTHNNDAYAMGDYHPAHRCVFRHYQKRRRNNRVLEKFYDATYIDARTGNKAKGKELFNGRISRNHKKDSEDLHKYRSKKVSKGRRSIRRQRYAIQPYDTVRLESKTYITSGCHNKGTRLLIPANGKSKSVAISKVQVVCHAGAWIQII

SEQ ID NO: 17928 - protein, 427 aa, unidentified
  REGION 1..427: note = Cyanobacteria bacterium UBA11148
VAEMPNYVFVLDTNKQPLNPIPPARARELLTKQKAAVFRMYPFTVILKHAVHDPTPKPLTIKLDPGSKFTGIAVLEGENVIWVAELEHRGWQIKDSLGSRRSLRRSRRHRQTRYRQPRFNNRKRQEGWLAPSLRHRVLTVETWVKRLCRYAPITQIAMELVKFDTQKMQNPEIDGVEYQQGELAGYEVREYLLEKWGRKCAYCDKEGVSLQIEHIHPRAKGGSNRVSNLALSCERCNIKKGTKFIDEFLKKDSSRLEKIKLQAKQPLKDAAAVNTTRWALFRALKEILPTTTGTGGQTKYNRIRLELPKHHWVDAACVGEVEKFNLLTQQPLRIKCTGWGTRQMCGTDKYGFPIRHRERKQIHFGFRTGDIAKVVVTSGKKVGQYIGRVLCRRTGSFDIATKTGRVAGISYKFCTSIHKKDGYSYAF

SEQ ID NO: 17929 - protein, 451 aa, unidentified; identical to SEQ ID NO: 2436
  REGION 1..451: note = Human gut metagenome

SEQ ID NO: 17930 - protein, 418 aa, unidentified; identical to SEQ ID NO: 12063
  REGION 1..418: note = Human gut metagenome

SEQ ID NO: 17931 - protein, 431 aa, unidentified; identical to SEQ ID NO: 4306
  REGION 1..431: note = Human gut metagenome

SEQ ID NO: 17932 - protein, 406 aa, unidentified
  REGION 1..406: note = Human gut metagenome
MVYVQDIDGKPMMPTTRHGKVRRLLKDNKAVVVNTCPFTIKLTYKTSDYKQEIVLGVDAGTKHVGLSATTKSKELYSGEVILRNDVVELLSTRRESRRARRNRLRYRKPRFENRVKSKRLGWVAPSVRHKVDAHIRVIDNICSTLPISRIIVEIAQFDTQKIKNPDISGNEYQEGDQLGFWNVREYVMARDGHKCQHCKGKSKDPILNVHHIESRKTGGDSPSNLITLCETCHKEYHKGNIDLKVKRGKSLRDAAVMGIMKWKLYEELKSRYPNVSMTFGYITKYNRIKYGIEKSHTSDAFVISRNFNAKRIERQYLKRLIRRHNRQIHKMKILKGGKKKNNQAPFEVFGFRLFDKVLYNNEICFIYGRRKSGCFDIRDFDGKNSKNVTYKKLKLIRGKRYPIILK

SEQ ID NO: 17933 - protein, 450 aa, Moorena sp.; identical to SEQ ID NO: 2935

SEQ ID NO: 17934 - protein, 457 aa, unidentified
  REGION 1..457: note = Human gut metagenome
VWLYQAVYNHGEGFLPSSEERTAFYWLLIYRKEHGIMQYVYVLNKHGEPLMPCSPGKARLLLKQQKACVVKRTPFTIKLLYGSAGYKQPITLGVDAGSKHVGLSASTEKRELYREEFTPRNDVVDLLSTRRQNRRSRRNRKTRYRAPRFDNRVHSKHKGWLAPSVEVKIQEHITVIKRICRILPITLVRVETAEFDTQRLKAMLKGKPLPVGTDYQLGEMYDEYNVRQYVLKRDNYTCQCCGAHPTEKKPVRLHVHHLESRHVGGNAPNNLITLCVACHKALHEGKITLDKGKKRGKPLRDAAFMGIMRNTLLARLKDELNIPVKQTYGYITKLLREKNKIPKSHVNDARCIAKAPNAKPCDTMLYTRALRHHNRQIHKAKILNGGIRKKNQAPYLVKGFRLWDKVRYNGEECFITGRRSSGYFALKKYDGTVISNSASYKKLMLLEAATNYITERS

SEQ ID NO: 17935 - protein, 417 aa, unidentified; identical to SEQ ID NO: 14385
  REGION 1..417: note = Human gut metagenome

SEQ ID NO: 17936 - protein, 419 aa, unidentified; identical to SEQ ID NO: 3670
  REGION 1..419: note = Human gut metagenome

SEQ ID NO: 17937 - protein, 415 aa, unidentified; identical to SEQ ID NO: 16389
  REGION 1..415: note = Human gut metagenome

SEQ ID NO: 17938 - protein, 236 aa, unidentified
  REGION 1..236: note = Human gut metagenome
LLMVAVVDLFGKPLMPTNEYRARKLLKQKKAKIFGYRPFTIQLTERKSAEIQPIELCMDTGYIHIGISAKSERHEYLGMQIDTLTDEKLKRDDKRQYRRQRRNRKRYRAPRFDNRRRKEGWIAPSLEHKKEIHIDAIQRICKVMPITDITLEIGNFDTHVLKAVEEGKPLPQGSDYQHGERYGIATLREAVFFRDGYKCQCCEKSVKDGAILHVHHIKYRSQGGTNRMSNLITVCD

SEQ ID NO: 17939 - protein, 441 aa, unidentified
  REGION 1..441: note = Marine metagenome
MQRTLVLDKDKRPLMPCHPARARALLKNGKAAVYRKFPFTIILNNRDGGSVQPIEVKLDQGSKTTGIALNLHGKRGVKTIWCANLNHRGHQISEALASRAATRRARRNRKTRYRQARLDNRAKPKGWMAPSLMSRVYNCETWCSRLAKFAPVSAFVVETARFDTQKMSNPDISGAEYQQGELAGYEVREYILFRDRHVCQYCHGASNNRVLNVDHKHPRSKGGSDSVKNLVTSCRKCNEDKSNLLLEDWLAKEKKMRSKLAKSRVLHIPKVIAGKFMPMRDAAAVNAARYRLGDSVKKFGLPVTFTSGGQTKFNRTKQGYEKEHWVDASCAGDTGSSVLIPMGLKPLVISAKGHGTRQMCRVDKYGFPRTSAKLNSVINGFRTGDIVLADVPSGKKQGRHTGRVAVRANGFFNITTIDGTVQGISHKHCRLQQVSDGYQYN

SEQ ID NO: 17940 - protein, 513 aa, unidentified; identical to SEQ ID NO: 3179
  REGION 1..513: note = Human gut metagenome

SEQ ID NO: 17941 - protein, 415 aa, Eubacterium hallii; identical to SEQ ID NO: 15461

SEQ ID NO: 17942 - protein, 411 aa, unidentified; identical to SEQ ID NO: 3917
  REGION 1..411: note = Human gut metagenome

SEQ ID NO: 17943 - protein, 426 aa, Moorena sp.
MSNSTNYVFVLDASKKPLTPCKPSMARSLLKAGKAKVFRRYPFTIIVNKLVAEKHQGLLLKIDPGSKQTGFAIVTQGGEVIFAMVLVHRGQQIKNALERRRTIRRSRRNRKTRYRQPRFLNRKRKKGWLPPSLMHRVLTTETWVNRLIKLAPIDSIAMELVSFDTQKMVNPEVSGVEYQQGELAGYEVREYLLLKFNRTCAYCDAKNVPLEVEHIQPRSKGGSNRISNLTLACRPCNEAKGNQDIKDFLRGKPNLAIRILSEAKTPLKDAAAVNATRWKLFETLKAKGLPITTGSGARTKYNRCRLDLPKEHWIDAACVGEVEQLIILTTQPLLVTAMGHGCRQMVQMDKYGFPRKGYQAKKPVPGWKTGDMINVVKGKNIGLKGVRIKTVRSKGNFDIRHGDKILSVSRNHIQPIHRGDGYNYSF

SEQ ID NO: 17944 - protein, 537 aa, unidentified; identical to SEQ ID NO: 2454
  REGION 1..537: note = Human gut metagenome

SEQ ID NO: 17945 - protein, 406 aa, unidentified; identical to SEQ ID NO: 9290
  REGION 1..406: note = Human gut metagenome

SEQ ID NO: 17946 - protein, 425 aa, Moorena sp.
MSTNYVLVLDTNRKPLNPCKPGMARSLLKAGKAAVFKQYPFTIILNKAVDDAPKPVQLKIDPGSKVTGLALVQDDKVLWGAELYHRGQQIKADLEDRRKLRRGRRNRKTRYRQPRFLNRTRPEGWLAPSMLHRVLTTMTWVRRLTKFVPVTGISLERVRFDMQKMINPEVSGVDYQQGELQGYEVREYLLEKWNRQCAYCKATDTRLEVDHIHPKSKGGSDRVSNLTVACHDCNQAKGNRNITDFLSGKSDLLNRILSQVKQPLLDAAAVNSTRNKIAEELIATGLPIEFGTGGQTKYNRCRLDLPKTHWLDAACVGVVVHLTLETKQCLTITASGHGNRQMAGVDKYGFPYRHRTRQQVHFGFRSGDIVRAVVPKGKKAGTHLGRVLCRKSGSFDIQTKSGRVTGINHKYCSTIHGRDGYAYVF

SEQ ID NO: 17947 - protein, 431 aa, unidentified
  REGION 1..431: note = Human gut metagenome
MPNKVYVINKHGRPLMPCSPAKARHLLDAGKAKVKKRTPFTIQLVYGSSGYTQEVILGVDAGSKTIGMSASTTKEELLSAEVKPRNDVVDLLSTRREFRRARRNRKTRYRKPRFDNRVRSKHKGWLAPSVEVKIQEHITSIKRVCRILPVSKVVVETAEFDLQLLKAIADGKPVPQGEDYQKGEMYGHYNVRQYVLWRDNYTCQCCGTHPSKKKEVRLHVHHLESRKVGGDAPDNQVTLCESCHEKLHKGLIAEKDFKKRKRRSTRDATFMGIMRKTLMQRLCSELPIPVVKTRGYITKATREKLLVLPKSHTNDALAIAQGKRGFNVGYLPEIAQIDKIYTIRPVRHHNRQLHKATILKGGIRKSNQTEKYVFGYRLFDKVQFNGQDCFIWGRRTTGIFTIKTINGKMIKDGISFKKLKLVEKSTSYLIA

SEQ ID NO: 17948 - protein, 428 aa, unidentified
  REGION 1..428: note = Human gut metagenome
MNYVYVLDKKGKPLMPTTRYGKVRRMLKSGQAKPVQNLPFTIQLTYIPKTTVCQPVIVGFDPGRTNIGISAVREDGTCLNLTHCETRNREIPKLMQKRKEHRQTSRRGERLVRKRLAKRHGTVSSKPLERILPSCEKPLKVKDIINTESRFNNRLRSEGWLTPTATQLLRTHVNLLKRMCQILPATDVVMEVNRFAFMQLDQPNVKKCGIDFQHGPLFGTDGIKEAVSIQQDGRCLLCEKRTIEHYHHIVPRAYRGSDTAENIAGLCAGCHKLVHTSREASNKLKHKKDGINKKYGGISVLNQVIPFLFMEFEQMFPGHTYATNGWNTKQFREKYRLAKDHSVDAYCIAASILPEPKVELPEDTHEIVQYRRHDRARIKRQTERTYCLGKKGVCKNRHKRFEQKTDSLEEYVEKYPNFLSNLTVKKSQ

SEQ ID NO: 17949 - protein, 401 aa, unidentified
  REGION 1..401: note = Human gut metagenome
RRQRRAKANGTISKKCVKQDTAQNGSVSKRAKKIGVIKRHLPGCEKEVLCIGIKNKEAKFSNHVRPEGWLTPTANQLLQTHINLVKKIQKFLPISDVVLEVNKFAFMQLNNPNIQKWQYQQGPLYQKANLEEAVSEMQEHHCLFCKKPIAHYHHVVPQSENGSDTIGNIVGLCTKHHDLVHKDTEWQKKLAKKKTGLNKKYGALSVLNQIIPALTKELSSLFPKHFFATNGKSTYDYRAAHGVSKDHWLDAYCIACSVLADDVCDNNINSHVPYELKQFRRHDRRALHKENMSRVYTLNGKSVATNRHKATEQTTDSLEEFRQCQPDDVCKLKVKEHYPEYRNPKRNFPGCVFLVGKHTHVMQGTSGSHNGKADGYYDTNGNSYSSGECKFVAKNEGIVFA

SEQ ID NO: 17950 - protein, 411 aa, unidentified
  REGION 1..411: note = Human gut metagenome
VWLTQTTCDIGEGFQLSAKRERLLFSRQIFRKEHGIMQYVYVLNKHGKPLMPCSPGKARLLLKEGKARVVKRTPFVIKLLHGSAGYKQPVALGVDAGSRHVGLSACTEGRELYKEELSPRNDVVELLSVRRQYRRSCRNRKTRYRAPRFNNRVHSKHKGWLAPSVEVKIQEHITVIKRVCRILPIVLVRVETAEFDTQRLKAMLEGKPLPVGSDYQLGEMYDEYNVRQYVLKRDNYTCQCCGAHPAEKKPVRLHVHHIESRHVGGNAPNNLITLCAVCHKALHEGKITLGNGKKRGKPLRDAAFMGIMRNTLLARLKDELNIPVKQTYGYITKLLREENHVEKSHTNDARCIAKAPNAKPCDTMFHTRALRHHNRQIHKAKIIKGGTRKKNQAPYLVKGFRLWDKVRYNGE

SEQ ID NO: 17951 - protein, 456 aa, Halomonas sp.
MAIFVLDKKKQPLMPCSEKRARLLLARGRAVVHKRYPFTIRLKDRVGGETQPLRLGIDPGSKTTGLALMREPDSQQRHMLCLFELVHRGLQIKKALQQRAAFRRRRRSANLRYRAPRFNNRTKPKGWLAPSLQHRVDTVTAWVKRLSRLAPVTAISQELVRFDTQKLENPEISGVEYQQGTLLGYEVREYLLEKWERECAYCGTGDTPLEIEHVVPRSRGGSNRVSNLTLSCHPCNAEKDSQTLTDFFATNKGLKKRLKANGLSADAQLERVQRQLKQPMRDASAVNATRWALFSALKTTDLPVAVSSGGRTKYNRQRLNIPKTHALDAACVGAFEKLHDWTVPTLTIKAMGRGSYQRTRLTKHGFPRGYLMRQKQVHGFQTGDMVRAIVPTGKKAGTYTGRVAVRKRGSFNIQRSAGTVSDISYKYCTLIQRSDGYGYYVTPFTNLTGGAGQAVA

SEQ ID NO: 17952 - protein, 470 aa, unidentified; identical to SEQ ID NO: 6354
  REGION 1..470: note = Wastewater metagenome

SEQ ID NO: 17953 - protein, 442 aa, unidentified; identical to SEQ ID NO: 8268
  REGION 1..442: note = Human gut metagenome

SEQ ID NO: 17954 - protein, 408 aa, unidentified; identical to SEQ ID NO: 4614
  REGION 1..408: note = Human gut metagenome

SEQ ID NO: 17955 - protein, 413 aa, unidentified
  REGION 1..413: note = Human gut metagenome
MTNYAFVLDANGKQLAPTKEQKAWFLIRKKRATLVSKYPMVIQLKKEISDEQICKDEICCGIDDGGIHVGLALVQKCKTKNKVVFKGTIEQRNDVKHLIEVRKGYRNYHRFHKRYRQARFNNRKSSKRKGRIAPSIFQKRQATIRVIKQLNKWINIANYSLEDVAIDIRALTDGYKSYRWQYQQSNRLDENIRKAVILRDGCKCMECGKSNCRLEVHHIKPRRLNGSNTLDNLISLCEKCHQRTEGQEELYMDRYFSILSSTDNKNLDYAQHVMIGKKWLREQLSELGTLILTTGGDTANKRIDWNIEKSHANDAICITGLQPDACNVKEWTIKPMRKQSKAKTDNVLGIKHRDLVEYTFKNGETHRGYVTALYPKQNAINFQSPTKHCKKVNAKKCKLIWKYSKIYWLDNVL

SEQ ID NO: 17956 - protein, 502 aa, unidentified; identical to SEQ ID NO: 2616
  REGION 1..502: note = Human gut metagenome

SEQ ID NO: 17957 - protein, 536 aa, unidentified; identical to SEQ ID NO: 4526
  REGION 1..536: note = Human gut metagenome

SEQ ID NO: 17958 - protein, 521 aa, unidentified; identical to SEQ ID NO: 3983
  REGION 1..521: note = Human gut metagenome

SEQ ID NO: 17959 - protein, 438 aa, Moorena sp.
MYVFVLDKHKKPLTPCRPSRARHLLGSGRAVVHKRFPFTIRLKDRTAEESVIKPVRVKVDPGARFTGIAIVREDRQGGPRLIAGIELEHRGNAIRDNMTKRAGYRRRRRSANTRYRAPRFDNRRRPEGRFPPSLRHRIDTTVSWMRRLTRIAPVSGFSVESVKFDTQKMLDPEVSGKEYQQGELEGYEVREYLLEKWCRKCAYCNAGNVPLQVEHIVPRARGGSDRVSNLTLACERCNRAKGARPVKEFLHDKPALLGRIRAHVKAPLSSAAAVNSTRNALFGEMRAFGLPVETGSGGLTKYNRTRLGLPKSHVLDALCVGTVSSAKVLTDSVLHVRCTGRGRYSRTLTDKYGFPRAYLPRGKRFFGFATGDIVRTAVPKGKYKGTWTGRVAVRESGWFALSTGKNTPDGKKERVNVKWDTCKILERNNGYEYSVIAV

SEQ ID NO: 17960 - protein, 424 aa, unidentified; identical to SEQ ID NO: 8456
  REGION 1..424: note = coral metagenome

SEQ ID NO: 17961 - protein, 431 aa, unidentified
  REGION 1..431: note = Human gut metagenome
MPNKVYVINKHGRPLMPCSPAKARHLLDAGKAKVKKRTPFTIQLVYGSSGYTQEVILGVDAGSKTIGMSASTTKEELLSAEVKPRNDVVDLLSTRREFRRARRNRKTRYRKPRFDNRVRSKHKGWLAPSVEVKIQEHITAIRRVCGILPVSKVVVETAEFDLQLLKAIADGKPVPQGEDYQKGEMYGHYNVRQYVLWRDDYTCQCCGAHATKKKEVRLHVHHLESRKVGGDAPDNQVTLCESCHEKLHKGLIAEKDFKKRKRKSTRDATFMGIMRKTLMQRLCSELPIPVVETRGYITKATREKLLVLPKSHTNDALAIAQGKQGFNVGYLPEIAQIDKIYTIRPVRHHNRQLHKAAILKGGIRKSNQAGKYVFGYRLFDKVQFNGQDCFIWGRRTTGIFTIKTINGKMIKDGISFKKLKLVEKSTSYLIA

SEQ ID NO: 17962 - protein, 425 aa, unidentified; identical to SEQ ID NO: 14294
  REGION 1..425: note = Human gut metagenome

SEQ ID NO: 17963 - protein, 448 aa, Eubacterium sp.; identical to SEQ ID NO: 9395

SEQ ID NO: 17964 - protein, 515 aa, unidentified
  REGION 1..515: note = Human gut metagenome
MTALEERLSKTEYIYVLGFDGKPQMPTRRKRHVLKLLKTGRARIAEDIPFTIRLTYRNAPVLQPVTLAEDPGRTNIGAAVLSPLGGLLFAAVIETRNKEIKKLMADRKKSRQASRRGERKARQRLAKRYGSMVKSGMVMRKLPMYAADKFVICKFIRNTQARFCNRKRCPDWITPTVQHLVQTHLNIIRKISRYLPVTDIAFEVNRFAFMHMENPEAMGVDFQNGPLKGYDDVKEAICTQQHGKCLMCKKPIAHFHHIVPRSRGGSDTIQNLAGLCPECHTKVHTDTTFRKDFDRKKSGQLKKYGALSALNQAVPFICKKLLEEYGEEHVHFCGGLDTSLIRTALGFEKTKKNQMHEVDAYCIGLAALEVNEVETPAFDHTFQIRQFRRQDRSIIHHQTGRSYYQGKEKVAQNRKPGFEQKTTALSQWYKEQIRIHGEKEAEKLRSQLRVEKSCRHYNDMDRFLPGAVFLYEGKRYVLSGRITNGKYLRACGQGMKNFPATECTFIRHNAGLVFI

SEQ ID NO: 17965 - protein, 424 aa, unidentified; identical to SEQ ID NO: 4955
  REGION 1..424: note = Human gut metagenome

SEQ ID NO: 17966 - protein, 431 aa, unidentified
  REGION 1..431: note = Human gut metagenome
MPNKVYVINKHGRPLMPCSPAKARHLLDAGKAKVKKRTPFTIQLVYGSSGYTQEVILGVDAGSKTIGMSVSTTKEELLSAEVKPRNDVVDLLSTRREFRRARRNRKTRYRKPRFDNRVRSKHRGWLAPSVEVKIQEHITSIKRVCRILPVSKVVIETAEFDLQLLKAIADGKPVPQGEDYQKGEMYGHYNVRQYVLWRDNYTCQCCGAHATKKKEVRLHVHHLESRKVGGDAPDNQVTLCESCHEKLHKGLIAEKDFKKRKRKSTRDATFMGIMRKTLMQRLCSELPIPVIETRGYITKATREKLLVLPKSHTNDALAIAQGKQGFNVGYLPGIVQIDKICTIRPVRHHNRQLHKAAILKGGIRKSNQAGKYVFGYRLFDKVQFNGQDCFIWGRRTTGIFTIKTINGKMIKDGISFKKLKPVEKSTSYLIA

SEQ ID NO: 17967 - protein, 432 aa, unidentified; identical to SEQ ID NO: 6070
  REGION 1..432: note = Human gut metagenome

SEQ ID NO: 17968 - protein, 423 aa, unidentified; identical to SEQ ID NO: 3538
  REGION 1..423: note = metagenome

SEQ ID NO: 17969 - protein, 512 aa, unidentified; identical to SEQ ID NO: 3720
  REGION 1..512: note = Human gut metagenome

SEQ ID NO: 17970 - protein, 428 aa, unidentified; identical to SEQ ID NO: 5055
  REGION 1..428: note = Human metagenome

SEQ ID NO: 17971 - protein, 415 aa, unidentified
  REGION 1..415: note = Human gut metagenome
MVYVVANDGQPLMPTERHGKVCRMLKSGMAKVVKKCPFTIQLQYESERNVQPVSLGVDAGSKHIGISATTKTKVLYESDVELRDDIVKLLATRRQLRRSRRSRKTRYRPVRFDNRKRKEGWLAPSIRQKIGSHLTVVANACKILPINQIIVETASFDIQKIKDPEIQGIEYQQGEQMDFWNIREYVLFRDGHICQCCKGRFKDKILNVHHIESRKTGGNAPNNLITLCETCHKGYHNGTVILPKNIKHGMQFKDAAFMGIMRWTFYNTLKEQYEPDIPVSMTYGYLTKNTRIEHGLPKEHYIDARCISGNPDAVSDGTYYYQKKVRCHNRQIHKQTILKGGIRKSNQAEYLVKGYRLFDKVRYQGREYFIFGRRKSGFFDIRTLSGEKVNKGSISVKKLTFADTRKNYLIERRTV

SEQ ID NO: 17972 - protein, 426 aa, unidentified
  REGION 1..426: note = Human metagenome
MTKTLTTRTIQACVLDRHGKPLMPTTRLGKVYRLLKAQKAHIVSYEPFTIQLDYEPDTQVIQPMTLGVDSGAIHSGYSVANEHREYYSAEVIARNDISNRLSDRHMHRRNRRSRKTRYRKPRFNNRKNKKKGWLAPSLEQKVAVQANEIEHIYRHFPIETIIVETAEFDIQKIKNPNISGIEYQQGTLQGYNIRNYLLEKHGRKCFYCGKTVSGFEVEHMLPKSRGGSHRIDNLTLSCHDCNQKKDTLTAEEFIRQILPAKKAAAKLKQLPNEKRVFKYMAHMNATRWTLYDTVKEKYPNVKMTYGYITKHNRIQAELPKAHHIDAKCITGFATVPSISQTVVKVKMRRHNRQLHRATFSKGHVRKAANLPTVTFGFQLHDLVCFNNHRYYIKGRRSSGSFALVSVEGLKDENRNYKKLTLLAHTN

SEQ ID NO: 17973 - protein, 380 aa, unidentified
  REGION 1..380: note = Human gut metagenome
LVSKYPMVIQLMKEIPENEICQDEIRCGIDDGGLHVGIALVQKCKTKNKVVFKGTMEQRNDVKHLMEVRRGYRRYHRYHKRYRQARFDNRKSSKREGRIAPSILQKRQATIRVIHWLNKWINITNYWLEDVSVDIRALTDGYQSYRWQYQRSNRLDENIRKAAILRDGGKCMECGKSNCRLEVHHIKPRRRNGSNTLDNLITLCESCHQKTEGQEELYMDRYFSLLKSSNNKNLNYAQHVMIGKRWLRKQLSGLGVLYLTSGGDTANKRIDWNIEKSHTNDAVCITDLQPDTCDIKEWAIKPMRRQSKAKTDHVLGIHHRDLVEYTFKNGETHRGYVTALYPDQKAINFQSQTKHCKKVNARKCKLLWNYSKIYWFENAS

SEQ ID NO: 17974 - protein, 417 aa, unidentified
  REGION 1..417: note = Human gut metagenome
MNMIYVRSKENKALMPTERGGRIGYLLRHGKAHVVSRVPFVVQLDYESHTYTQAVSLGIDAGSKHIGVSASTEKKELFAAQVELRSDVTKLLSDRRELRRARRYRKTRYRKSRFDNRRKKTGWLAPSIEQKVGSHLKVIRLVRGLLPLSRITIEVAQFDIQKIKNPNIAGEEYQQGEQLGFWNVREYVLARDGHRCVHCKGKSKDPILNVHHLESRKTGGNSPSNLVTLCETCHKAYHRGEFELKIKRGSSFRDASVMSIMRWAVYERARSEFGNVNLTYGYFTKHTRIENGIAKTHAADAFCIARNVHARRSDSFFLCRCVPRHTRALHVANPKKGGIRRSTIAPHKIGGSRFQRFDMVRWKGKECFIFGSTHGRPILRNCSGDRMHEISSVNLKTVKFMKRLRNNILMEERASES

SEQ ID NO: 17975 - protein, 442 aa, unidentified; identical to SEQ ID NO: 2903
  REGION 1..442: note = Human gut metagenome

SEQ ID NO: 17976 - protein, 458 aa, unidentified
  REGION 1..458: note = Human gut metagenome
MGRNSVAYIKTLYNIVDGYITGLVPELSIKLDRREFMQLVYVLNKDGLPLMPTHKLGKVRHLLKDGKAEIVKYSPFTIQLEYECENHIQPVTLGVDAGSKHIGLSASTEKIELYCSDVEIRNDIVELISTRRETRRTRRNHLRYRPARFNNRKASKPEGWLAPSVKQKVESHLKVVEEVYKIIPISTIIVEVASFDTQLLKAEAEGKTISGKDYQNGEMLGYNTREYVLFRDNHTCQHCHGKSKDKVLEVHHLESRKTGGNAPSNLITLCKTCHENYHKGKIKLKQTRAEKYNDATFMGIMRWSFYNELKEIYPDVSLTYGYITKNNRIKYNLAKEHYNDAYCIAQNFKAEPLDKVIYQKKVRCHNRQIHKANFLKGGKKKLNQAPYTVKTFRLFDKVKCQNQECFIFGRRSSGYFDIRMLDGTKVNNSVSYKKLELLEARKNYLKEERSRQFLPLIK

SEQ ID NO: 17977 - protein, 414 aa, unidentified; identical to SEQ ID NO: 11971
  REGION 1..414: note = Human gut metagenome

SEQ ID NO: 17978 - protein, 424 aa, unidentified; identical to SEQ ID NO: 3434
  REGION 1..424: note = Human gut metagenome

SEQ ID NO: 17979 - protein, 488 aa, unidentified; identical to SEQ ID NO: 9276
  REGION 1..488: note = Human gut metagenome

SEQ ID NO: 17980 - protein, 429 aa, unidentified
  REGION 1..429: note = Human oral metagenome
MLVYVLKQNGQPFMPTARFGKVRRLLKAKKAKVVRREPFTIRLLYEPETNVVQECYCGVDTGSKHIGVAVVSNDKVLYQSQTELRNDIKRKMDARRQARRFRRSRKTRYRKPRFLNRSNSTKGDRLPPSVKHKVQAHIDEIEFCKKILPVSDLIVEVSQFDTALMKDPRLISEKVKHWGYQQGFNYGYSSRREAILHRDNYTCQCCGKKNCRLEVHHVKFKSNGGTDDEENLITLCEDCHKGVHAGTVVLDKKPKKSKNLKYATQMSIIRSYLLKKYPNAIETFGFVTSENRNHLNLEKDHYIDACIVASGGLEFKELDVIYKKRRVSVQDRVLTKGVRGEQKLPTGKIFGFKKFDKVEYLGKTCFIKGRRSSGSFVLMNIDNKSIDFRDRGGKQNPSYRSIERVNTRRSILCISERIKGKERLIPVLS

SEQ ID NO: 17981 - protein, 363 aa, unidentified
  REGION 1..363: note = Human gut metagenome
GLSASTEKAELYASEVELRQDITDLLSARRALRQSRRNRKTRYRAPRFDNRISTKRKGWLAPSVENRINAHLSRIEAVLRLLPVTKITVETASFDIQLLKNPNIAGKEYQEGEQLAFWNVREYVLFRDGHVCQHCHGRSKDPVLNVHHLESRRTGGDSPGNLITLCETCHRALHRGEMKLRAKRGQSLRAEAFMGIMRWEVLGRLKTSHPELEVNNTYGYRTKHVRIRNGIAKSHCADAFCIAGNLGAERLGEFFFQKQTRRNNRQIHKLSILKGGIRKRNQAPFEVKGFRLFDKVACQGEEGFIFGRRSSGFFDVRKLDGTRISAGISYKKLHLLEKRRTYLTEIRKEEVLPPLPEGRGLRA

SEQ ID NO: 17982 - protein, 454 aa, unidentified
  REGION 1..454: note = Human gut metagenome
LDTVAVISASGRKLMPTNSYRARRLLKLKRAVIYKYRPVFTIKLVDRTNGYTQPIEYKCDTGYQNIGISICSDTKEFVNEQRELLKDEVKRHSDSRKYRRTRRNRLRYRKKRFDNRKGMISKDGFAPSIRNKRDVHIHLYEEYYKVFPITKAVFEMGQFDTQVLKAVEAGLPIPDGTDYQRGEQYGYATLREAVFARDNYKCICCGKSAVRDGVKLRIHHIGYLSGDRSNRMANLGSVCESCHTSKNHKPGGKLYSLKPELKTFKGATFMTTVRYSMVKKLKVMTPTVGIKVTYGAATKLARRVLSVKKTHSNDAYCMGEFHPKHRSDFKHYKKCRRNSRVLSRFYDAKYRDLRDGSVKTGSQLSCGRTNRKISRHAELDERIYRAHKISKGRVSTRRQHYSLRPGDKVLYDGKVYFVTGMQNSGTHVKLTNGKVCSLKKVHVLQHCNAWTAVI

SEQ ID NO: 17983 - protein, 481 aa, unidentified
  REGION 1..481: note = Human gut metagenome
VQPLYLGIDPGRTNIGVAVVKANGTAVFTAHLESRNKEIPKLMQDRKKARRARRTNGRRCRRQRRAKANGTISKKCVKQDTAQNGSVSKRAKKIGIIKRHLPGCKKDVLCIGIKNKEAKYTNRTRPEGWLTPTANQLLQTHINLVKKIQKFLPISDVVLEVNKFAFMRLDNPDIPDIQKWQYRQGPLYQKGSLENAVSEMQEHHCLFCEKPIDHYHHVVPKSENGSNTIANIVGLCAEHHNLVHKDVAWQEKLVEEKTGLNKKYGALSVLNQIIPALTKELSFLFPKHSFMTNGKSTHDYRAAHGISKDHWLDAYCIACSVLPIDVCDSTINNCVPYELKQFRRHDRRALNNENMNRVYTLNDKVVATNRHKATEQEAASLEEFRKEHPNDVCKLKVKEHHPTYRNMNRNYPGSVFLVGKQIHVMQGIASSKDGKATKYNDTSATTIAAGKCEFVAKNSGILFVQCKFRKVFSDETTKKLQ

SEQ ID NO: 17984 - protein, 411 aa, unidentified; identical to SEQ ID NO: 3731
  REGION 1..411: note = Human gut metagenome

SEQ ID NO: 17985 - protein, 477 aa, unidentified; identical to SEQ ID NO: 2707
  REGION 1..477: note = Human gut metagenome

SEQ ID NO: 17986 - protein, 406 aa, Moorena sp.
MRVFVLNKNRQPLDPCRPARARILLSTGKAKVYRRYPFTIILTEEIIDPVTHDHKIKIDPGAKTSGFAIVQGERVVWGAELIHRGFQIRDSLTSRRQLRRSRRNRKTRYRKPRFLNRTRPKGWLAPSLMSRVQNIETWTKKLIKLCPVAGISQELVKFDTQKLENPEISGIEYQQGTLYGYELREYLLEKWNRKCAYCGTTGTQLEIEHIKPKSKGGSDRVSNLAIACHPCNQAKSNQDIELFLSNKPSILKRILSKAKRPLADAACVNSTRWKLYHDLKSTGLPVEVGSGGLTKFNRCRQNLPKTHWLDAANVGKVETLIIEVTNPLIITAKGHGTRQICRTNKYGFPTRHCSRIKFHKGFQTGDIVRAVVTKGKKIGTYVGRVATRKSGSFNISTKSGCAACSK

SEQ ID NO: 17987 - protein, 431 aa, Aphanizomenon sp.; identical to SEQ ID NO: 3492

SEQ ID NO: 17988 - protein, 431 aa, unidentified
  REGION 1..431: note = Human gut metagenome
MPNKVYVINKHGRPLMPCSPAKARHLLDDGKAKVKKRTPFTIQLVYGSSGYTQEVILGVDAGSKTIGVSASTKKEELFAANVIPRNDVVDLLSTRREFRRARRNRKTRYRKPRFDNRVRSKHKGWLAPSVEVKIQEHITSIKRVCRILPVSKVVIETAEFDLQLLKAIEEGKPVPQGEDYQQGEMYGHYNVRQYVLWRDDYTCQCCGAHATKKKEVRLHVHHLESRKVGGDAPDNQVTLCESCHEKLHKGLITEGDFKKRKRRSTRDATFMGIMRKTLIQRLRAELTIPVAETRGYITKATREKLLVLPKSHTNDALAIAQGKHGFNVGYLPGIEQIDKIYTIRPVRHHNRQLHKATILKGGIRKSNQAEKYVFGYRLFDKVQFNGQDCFIWKRRTSGYFVVKTIDGKIIHNSASFKKLRIAERASNYLIA

SEQ ID NO: 17989 - protein, 414 aa, unidentified; identical to SEQ ID NO: 3441
  REGION 1..414: note = Human gut metagenome

SEQ ID NO: 17990 - protein, 442 aa, unidentified; identical to SEQ ID NO: 2903
  REGION 1..442: note = Human gut metagenome

SEQ ID NO: 17991 - protein, 470 aa, unidentified; identical to SEQ ID NO: 2825
  REGION 1..470: note = Human gut metagenome

SEQ ID NO: 17992 - protein, 413 aa, unidentified
  REGION 1..413: note = Human gut metagenome
LKVFVLNMRGKPLMPCSPAKARHMLKAGKAFVVRRTPFTIKLTIATGETKQDVTLGVDAGARHVGISATTEKEEVFASEVALRQDITGLLADRLAFRRARRNRKTRYRAPRFNNRVRSKHKGWLAPSVENRIQAHMSRIEAVCRLLPVTKIVIETASFDIQKIRNPEVEGTGYQQGDQLGFWNVREYVLFRDGHVCQHCHGRSRDKILNVHHLESRKTGGDAPNNLITLCETCHKAYHAGKIKLKVKRGQSFRAEAFMGIMRWTLLDRVRKTHPKLPVENTYGYLTKHKRIALGLPKTHCADAFCIAGNLKALRRGDFLFQQQTRKHNRQIHRCSILKGGVRKLNQAPFLVKGFRLFDKVRIGGQIGFVFGRRVRGTFNIRRLDKTVIGTDINCKKLSLLETRKTFLTELRKE

SEQ ID NO: 17993 - protein, 475 aa, unidentified
  REGION 1..475: note = Human gut metagenome
MTALEEKLSKTEYIYVLGFDGKPQMPTRRKRHVLKLLKTGRARIAEDIPFTIRLTYRNAPVLQPVMLAEDPGRTNIGAAVLSPLGDLLFAAVIETRNKEIKKLMADRQKSRQASRRGERKARQRLAKRYGSMVKSGMVMRKLPMYAADKFVICKFIRNTQARFCNRKRCPDWITPTVQHLVQTHLNIIRKISRYLPVTDIAFEVNRFAFMHMENPEAMGVDFQNGPLKGYGDVKEAIRTQQHGKCLMCKKPITHFHHIVPRSRGGSDTIQNLAGLCTECHTKVHTDTAFRKDFDEKKSGQLKKYGALSALNQAVPFICKKLLEEYGEEHVYFCRGLDTSLIRTAFGFEKTKKNQMHEVDAYCIGLAALEVNEVETPAFDHTFQIRQFRRQDRSIIHHQTGRSYYQGKEKVAQNRKPGFEQKTTALSQWYKEQIRIHGEKEAEKLRSQLRVEKSCRHYNDMDRFLPGAVFLYEGKR

SEQ ID NO: 17994 - protein, 415 aa, Bacillus sp.; identical to SEQ ID NO: 15146

SEQ ID NO: 17995 - protein, 414 aa, unidentified; identical to SEQ ID NO: 2588
  REGION 1..414: note = metagenome

SEQ ID NO: 17996 - protein, 360 aa, unidentified; identical to SEQ ID NO: 12847
  REGION 1..360: note = Human gut metagenome

SEQ ID NO: 17997 - protein, 426 aa, unidentified; identical to SEQ ID NO: 3614
  REGION 1..426: note = Human gut metagenome

SEQ ID NO: 17998 - protein, 414 aa, unidentified
  REGION 1..414: note = Human gut metagenome
MPCSPAKARLLLKEKKAIVVRRTPFTIQLTIATGEAKQPVSLGVDAGYKHVGLSASTEKAELYASEVELRQDVSDLLSARRALRQSRRSRNTRYRAPRFDNRIRTKRKGWLAPTVENRINVHLSRIETVLRLLPVTKITVETASFDTQLLKNPDIAGKEYQEGEQLGFWNVREYVLFRDGHVCQHCHGRSKDPVLNVHHLESRRTGGDSPGNLITLCETCHKALHRGEIKLRAKRGQSFRAETFMGIMRWGVLNRLKASHPKLEVHNTYGYRTKHARIANGIAKSHCADAFCIAGNFGAKRLGEFFFQKQTRRNNRQIHKLSILKGGIRKRNQAPFEVKGFRLFDKVACQGEEGFIFGRRSSGYFDVRKLDGTCISAGISYKKLHLLEKRRTYLTEIRKEEALPPPPEGRGLRA

SEQ ID NO: 17999 - protein, 445 aa, Moorena sp.
LKWEAPCESWERRSQTPSNNPDVDIQSGMTGRDLRVPVLNMRNEPLMPTTPGRARKLLKQNKARVISSNPFTIQLLYATGETKQPVRLGVDSGYKRTGFSVVTQKRELISGEAVIRTDIPKLNQEKSMYRRGRRNKLWYRQPRFMNRGNKKEGWLAPSINHKLQTHVKLIEKLKRILPITETVIEVASFDAQKMQNPEISGIEYRQGELQGYEIREYLLEKFHRTCVYCGKTNVPLEIEHLTPRSRGGPDTVNNLAISCHECNQRKNNLTAEEFGYPEVRKMALVTLRDAAFMNTVRWKLTHLTGSAHTFGYITKKNRISLGLDKSHANDAFVIAGGTDQIRASQYEISQRRRNNRSLQVNRKGFMPSIRRKRYTFQPGDIVVHSHERFSVIGVHSYGKSIVIKGGEMKMDINTKKVKLVKYGKGLRFTAQFLPPLKKVGILGGS

SEQ ID NO: 18000 - protein, 420 aa, unidentified; identical to SEQ ID NO: 15202
  REGION 1..420: note = Human gut metagenome

SEQ ID NO: 18001 - protein, 512 aa, unidentified; identical to SEQ ID NO: 4031
  REGION 1..512: note = Human gut metagenome

SEQ ID NO: 18002 - protein, 415 aa, Moorena sp.
MIYVRSKDGKALMPSERGGRIGYLLRHGKAHVVSRVPFVVQLDYESTTYTQEVSLGIDAGSKHIGVSASSEKKELLAAQVELRNDVVNLLSTRRELRRTRRNRKTRYRKVRFDNRKKKDGWLAPSVKQKVESHLKVIRLVRKLLPITKTTIEVAQFDAQKIKRPDIQGEEYQQGEQMGFWNVREYVLARDGHRCVHCKGKSKDHILNVHHLESRKTGGNSPSNLVTLCETCHKAYHRGEFELKIKRGNSLRDAAVMNIMRWVVYERAKEEFENVHLTYGYVTKHTRIENGIAKTHAADAFCIAKNVNAMRLSSFFMCRCVPRHTRVLHVANPKKGGIRRSTIASHKIGKSRFQRFDMVRWRGKECFIFGSTHCNVVLRKIDGVKVHETQAVSAKTIKFLKRIRNNILVEEIVSIS

SEQ ID NO: 18003 - protein, 396 aa, unidentified
  REGION 1..396: note = Human gut metagenome
LLKQKKACVVKRTPFTIKLLYGSTGYKQPITLGVDAGSKHIGISAAAEKYELYCEEATPRNDVVDLLSARRAFRRSRRNRKTRYRAPRFNNRVHSKHKGWLAPSVEVKIQEHITLIKRVCRILPVTFVRVETAEFDTQRLKAMLEGKPLPVGTDYQLGEMYDEYNVRQYVLKRDNYTCQCCGAHPTKTKAVKLHVHHIETRRTGGNAPNNLITLCTACHKALHAGKVTLDGKKRGRSLKDAAFMGVMRKTLMERLLKELKIPVQGTYGYITKYLREKHSIPKSHTNDARCISKNPLAIPCDTCYYTKAIRHHNRQLHKATILKGGIRKANQAPYTVKGYRLWDKVSYNGSECFITGRRTSGYFALKKLYGTVVSNSASYKKMRLLEVATNYITERR

SEQ ID NO: 18004 - protein, 460 aa, unidentified
  REGION 1..460: note = Human gut metagenome
MVAVVDLFGKPLMPTNEYRARRLLKQKKAKIFGYRPFTIQLTERKSTEIQPIELCMDTGYIHIGISAKSERHEYLGMQIDTLTDEKLKRDDKRQYRRQRRNRKRYRAPRFDNRRRKEGWIAPSLEHKKEIHIDAIQRICKVMPITDITLEMGNFDTHVLKAVEEGKPLPQGSDYQHGERYGIATLREAVFLRDGYKCQCCEKSVKDGAILHVHHIKYRSQGGTNRMSNLITVCDKCHTPKNHKPGGKLWNWKPKLAEFKGVSYMTSIRWTLYNEVTALLPNSSVHITYGAKTKESRRKLDIKKSHVNDAYVMGLFCPKHRTKSVYFKKKRRNNRVLEKFYDAKYIDSRDGKKQSGQELFNGRISRNHRKDSENLHLYRKQKVTKGKRSIRNKHYPIQPHDILLYQKKKYENAGCHNNGSRVILLPEKKSVALKQLTIYQYAGGYYRVPYESNKKEERTGS

SEQ ID NO: 18005 - protein, 467 aa, unidentified
  REGION 1..467: note = Human gut metagenome
MKVFVIGMTGKRLCPTSPSKAKKLLKTGKAHVYRRVPFTIRLDYKTGGSAPPLKLGIDTGEQHIGTAVCNDATVFCKSEIELIKSMEKKKRLEKRKIYRRSRRYRKTRYRHPKFRFRTKRIYVEGGYRKRKGGKMVLRHWKKVPNTVMTNRHEGWLPPSIESKVKHHIDWINRYMDVLPDGTMLGIEVARFDIARMKDPSIRGELYQFGRMYGRENTKAYVLAKFDYTCPICKKKFDRDRKPRMHHVTMRKNAATDNPDEYAPVCVLCHSGEEHLPGGVLDKLAKECRRREYREPTFINILRRRLFETYPEAEFTYGNITNADRKMLGLEKTHANDAVSIAMHGAKKVIDCEDTVYYRQVHRKKRSLHEATPRKGKKEPNHTAKRNVKNVPYVGKFHINDKVKGPDGNIGFITGFTGSAAYITDFIGEYIYPEGKDYKQHTLSSLRYVHHCGNWITSSVSGAAVSHD

SEQ ID NO: 18006 - protein, 416 aa, unidentified
  REGION 1..416: note = Fermentation metagenome
MPCSEKRARLLMERGRAVVHRMEPFTIRLKDRTLAQSETEPLRLKLDPGSKTTGMAVMSESGRVVFLGEVVHKKGIKMALESRRALRRTRRSRKTRYRKPRFLNRTRAKGWLPPSLEARVNQTLNAAAKLRNLLPIAAISTEHVKFDTQLMENPEISGVEYQQGELLGYEIREYLLEKWGRKCAYCGAENVPLEVEHIVPKTRGGSNRLSNLAIACTPCNQKKNSMTAEEFGFPDIQAQARKPLRDAAMMNATRWRLFERLRETGLPVECGTGARTKMQRLQHRLPKTHYFDACCVGASTPEELVISARYAAVWTATGRGKRQMCQTDKYGFPKTHRANRKVQFGFQTGDIVTADVPMGKYQGAWRGRATCRASGQFDLRDGQKAIICRTNYKRCRLIQRGDGWQYERVPITRREG

SEQ ID NO: 18007 - protein, 415 aa, unidentified
  REGION 1..415: note = Human gut metagenome
LMPCSPAKARLLLKEKKAIVVRRTPFTIQLTIATGETKQPVSLGVDAGYKHVGLSASTEKAELYASEVELRQDITDLLSARRALRQSRRNRKTRYRAPRFDNRIRTKRKGWLAPSVENRINAHLSRIEAVLRLLPITKITVETASFDTQLLKNPDIAGKEYQEGEQLAFWNVREYVLFRDGHVCQHCHGRSKDPVLNVHHLESRRTGGDSPGNLITLCETCHKALHRGEIKLSAKRGQSLRAEAFMGIMRWEVLNRLKLSHPEREVNNTYGYRTKHARIANGIAKSHCADAFCIAGNLGAKRLGEFFFQKQTRRNNRQIHKFSILKGGIRKRNQAPFEVNGFRLFDKVACKGEEGFIFGRRSSGYFDVRKLDGTCISAGISYKKLHLLEKRRTYLTEIRKEKALPPLPGGSGLRA

SEQ ID NO: 18008 - protein, 466 aa, unidentified
  REGION 1..466: note = Human gut metagenome
MSTCACVLSKNGERLMPTIRLGKVRHLLKDGKAKIIKHHPFTIQLLYDSKTDTQPIEICEDVGYNYIGISVKSESHEYVSAQYDTLQDEKDCHDDCRKMRRSRRNRLRYRQTRFDNRKRGEGWLAPSLEHKKELNVNVIKMYCEVAPITHATVEVGSFDTMLVKAIEEGKAAPEGVDYQKGPRYNLATLREAVFYRDNYTCQVCGREAQKDSAILHVHHMFYWKGRHGNSLSELLTVCEKCHTPANHQKGGKLYGFGENIKFANLSGAAFMNTVRWQIVNGLYAAFGKPFVTFTYGVMTKEKRIALNLEKSHNNDAYAMGSFHPADRCAFEHYEKVKRNNRILERFHDSQYIDIRTGNVTNGKSLFNGRINRSHKKDSENLHKYRGKRIRKGYRALRRKKVALNPGDSVSLNGEILIIQSTHTKKNGSVNVEFKTPSKSGKKSASLKKLKIVKMSNSMHSAWTKVS

SEQ ID NO: 18009 - protein, 557 aa, unidentified
  REGION 1..557: note = Human gut metagenome
MIYNLGSTRERGFMKQKKQKVMVYILNKKGKPLMPTTRCGHVRKLLNSKKAVVVNSNPFTIRLKYDTPNGVQDVFAGIDSGRENIGSGASNEDGDCLYLGELKTSNKSIKMKMTERVGFRRERRKHDRQNKQRKARKDHTEIQNGKDDICRATISCKSVQISYPTAEESVTHKIIRGKEGKFANRHRDGDWITPSARQLVQMHMNDLKSMCKILPISHVTLERVAFDFQKLENENIKVWEYGKGKLYGYDSPEEYIHDVQDGKCLVCGKPHIDYLHHIIPRSKGGSDKVSNIAGLCYDCHYGPMGVHNCQNTQDRLPELKNEVNKQYKVSLLNSVMPVLIEEIDKFCKANSIMFSICEGHDTAKVRDMYDLQKDHCIDGFAISLVDRNVKSVDVMPDRIYQKQRYKKKSKNIIQKRNYREYYDDKKLVAINRHKGTDQKADSLEEYMNTYAETHTADECKMHFESLTVKPARRTYTFHKEGRICPLHIGDKVRYEKKNKIKGNTKVDTFICEGIYFSKDENKAKVEHNKTKSKKMKFCRAIESGCIPYIDYIKLALI

SEQ ID NO: 18010 - protein, 490 aa, unidentified
  REGION 1..490: note = Human oral metagenome
MYVVYVLDRQGKPLMPTKRFGHVRRMLKTNKAKAISTKPFVIQLQYESTDFVQPLYGGTDPGRTNIGEAVLNNKGEVVYAAHVLTRNKEIPKLMADRAAHRKASCRGERLRRKRRAKANGTMTCFPEGRKLPGYKDGVLELKDIINTESRFNNRKRPAGWLTPTARQCIQTHLNMVQNICKILPVTNWTLEYNRFAFMQLEDGSVRGWDFQNGRFKGYASKEDYVYALQGGVCVCCGASIEHYHHIKPRHKGGSNTHENLVGLCSVCHAEIHIGKRNLDKIGKYKKYAGTSIVNIAIPFIWDGIVKMFGDKAHICEGQETAELRRANNIPKEHFADAVCIAGIGYGITPQYDDNQPFKLRQFRCHDRSRINAQVERTYLDGKTIVAKNRKPRFEQKGDALSDLQSKMTKEHGELAARRAVSKLVVKKSYRRYNVPERIKPSAVFMFNNKKYLLRGQLTNGMYYRAFGEGTKNFPSRNCEVVSSGCSLTYM

SEQ ID NO: 18011 - protein, 512 aa, unidentified
  REGION 1..512: note = Human gut metagenome
MSTVYVLNKDGKPLMPTTRCGHVRHLLKEQKARVVTSKPFTIQLLYETDDVVQPLYLGIDPGRTNIGVAVVKTDGTAVFTAHLETRNKEIPKLMQGRKKARRTRRTNGRRCRRQRRAKANGTISKKCVKQTTAQNGSVSKRAKEIGVIKRHLPGCEKDVLCVGIKNKEAKFSNRTRQEGWLTPTANQLLQTHINLIKKIRKFLPISNVVLEINKFAFMRLDNPNIQKWQYRQGPLYQKASLEEAVSEMQEHHCLFCKKPIAHYHHVVPQSENGSNTIGNIVGLCTKHHDLVHKDATWQKKLAKKKTGLNKKYGALSVLNQIIPALTKELSSLFPKHFFATNGKSTYDYRAAHSVSKDHWLDAYCIACSVLANDVCDSNINSRVPYELKQFRRHDRRALNNENMSRVYTLNGKVVATNRHKATKQTTDSLEEFRQNHSDDVCKLKVKEHHPTYRNMNRNYPGSVFLIGKQVHVMQGIAGSKNGEATTYKDTNANSIAAGKCKFVAKNSGVLFV

SEQ ID NO: 18012 - protein, 442 aa, unidentified; identical to SEQ ID NO: 3234
  REGION 1..442: note = Human gut metagenome

SEQ ID NO: 18013 - protein, 410 aa, Bacillus sp.; identical to SEQ ID NO: 12020

SEQ ID NO: 18014 - protein, 428 aa, unidentified
  REGION 1..428: note = Human gut metagenome
LKVFVLNMRGQPLMPCSPAKARHLLMDKKAVVKRRTPFTLQLTIATGETKQDVTLGVDAGAKHIGLSASTEKEEVFASEVELRQDITGLLAARLAFRRARRHRKTRYRAPRFLNRVHSKHRGWLAPSVENRIQAHMSRIDAICGLLPVTKIVIETASFDIQKIKNPDVEGTDYQQGDQLGFWNVREYVLFRDGHVCQHCRGRSKDKVLNVHHLESRQTGGDAPNNLITLCETCHKAYHAGKIKLKVKRGQSFREEAFMGIMRWTMLDRVRKAHPDLPVENTYGYLTKNTRITLGLPKTHCIDAYCIAGNLNARRRGVYLYQRQMRKHNRQIHKCKVLSKTLKDGTKVGYRKLNQTPYLVKNFRLFDKVRCFGQTGFIFGRRTSGHFDVRTLNRTRLSDCVNSKKLTLLEKRRTFLTELRKEDGASSPV

SEQ ID NO: 18015 - protein, 415 aa, unidentified
  REGION 1..415: note = Human gut metagenome
MVYVVANDGQPLMPTNRYGKVYRMLRSGMAVVVKKCPFTIQLQYESERNVQPVALGIDAGSKHVGVSATTKAKVLYESDVELRGDIVKLLATRRQLRRSRRSRKTRYRPARFDNRKRKNGWLAPSIRQKIESHLTVVANVCKILPVSRIIVETASFDIQKIKNPDIQGTEYQQGEQMDFWNVREYVFFRDGHTCQCCKGRSKDKILNVHHIESRKTGGNAPNNLITLCETCHKGYHNGIVTLPKNIKRGMKFKDAAFMGIMRWTFYNTLKEQYEPDIPVSMTYGYLTKNTRICHDLPKGHCIDARCISGNPDAVSDGTYYYQKKVRCHNRQIHKQTILKGGIRKSNQAEYLVKGYRLFDEVRYQGREYFIFGRRKSGFFDIRTLSGEKVNKGSISVKKLTFVDTRKNYLIERRTV

SEQ ID NO: 18016 - protein, 420 aa, unidentified; identical to SEQ ID NO: 6507
  REGION 1..420: note = Human gut metagenome

SEQ ID NO: 18017 - protein, 425 aa, unidentified
  REGION 1..425: note = Human gut metagenome
MYVYVLNQHGEPLMPCSPRKARIMLRDHKATVVRRTPFTIRLLHRSSEYKQDITLGVDAGSKFIGLSACTESKELFAAEVKPRNDVVELLSTRRELRRSRRNRKTRYRAVRFNNRVHSKHKGWLAPSVEVKIQEHITAIKRTCAILPISVVIVETAEFDVQRLKAMLEGKPLPVGTDYQLGEMYDEYNVRQYVLKRDTYTCQCCGIQSTDKAPVKFAVHHKESRHVGGNAPNNLITLCEKCHRLLHAGVVTLEEGKRKRGKSFRDAAFMGIMRKTLMRRLRNELSIPVKETYGYITKLLRETHAIQKSHVNDARCIARVPDAQPSDTLYRIRAVRHHNRQLHKVNPIKGGIRKRNQAPYEVFGFRLWDKVLFNGQECFITGRRVRGYFALKNFDGKKVHTGAPYTALTIVESSTSYLIERRGETT

SEQ ID NO: 18018 - protein, 412 aa, unidentified; identical to SEQ ID NO: 16549
  REGION 1..412: note = Human gut metagenome

SEQ ID NO: 18019 - protein, 280 aa, unidentified
  REGION 1..280: note = Human gut metagenome
MPDKVYVISRLGHPLMPCSPAKARHLLDDKKAKVVKRMPFTIRLLYGSTKYIQPIILGVDAGSKTIGLSASTAKEEVFAAEVMPRNDVVENLSTRREFRRARRNRTTRYRKPRSDNCVRSNHERWLAPSVKVKIQEHITSIKRVCTILPISKVVIETAEFDLQLLKAIQEGKPIPEGEDYQKGEMYGSYNVCQYVLWRDNYTCICCGVRGTPKNPVRLHVHHFESRKYGGNAPDNREEENYRFLPAHRGVGFLSKIQANEKWPSVCFVPEAIRFRTISVR

SEQ ID NO: 18020 - protein, 429 aa, Moorena sp.; identical to SEQ ID NO: 8379

SEQ ID NO: 18021 - protein, 443 aa, Ectothiorhodospira sp.
MAVLVLDKRKKPLMPCSEKRARLLLERGRAVVHRMRPFTIRLKDRTVEESVLQPIQIKIDPGSKTTGVTVIREDDTDPEQQQVLMLMEIEHRGQQIKDTLIQRRAFRRRRRGQLRHRAPRFHNRTRPRGWLAPSLQHRVDTTMTWVNRLCRLAPVTGITMERVRFDMQAMDNPEISGVEYQQGTLHGYEVQEYLLEKWQRCCAYCGARKVPLEIDHIHPKSRGGSDRVSNLTLACRGCNQAKGNQPVDVFLADDPKRLQRIKAQAKPPLKDAAAVNSTRWALFRQLQATGLPVITSSGGRTKYNRQRLGIPKTHALDAACVGPVTAVTHWNVPTLTVRAMGRGSYQRTRLNRFGFPRGYLMRQKQVKGFQTGDLVQANVPTGKKAGTYQGRVAIRATGSFNIQTQEGVVQGISHRHCRLLQRADGYGYAFQPKPIKEDATRAA

SEQ ID NO: 18022 - protein, 463 aa, unidentified
  REGION 1..463: note = Human gut metagenome
LPGKYKYKGGQLMSVAVISKTGERLMPTSEYRARKLLKSGKAVKHSYHPFTIQLTERKTGDVQPIELCMDTGYIHIGISVKSEKHEYLAEQIDTLTDERIRHDACRMYRRQRRGRKRYRKPRFNNRKRDKGWIAPSLKHKKDIHVQAISRINKVMPLTDITMEMGNFDTQVLKAKEEGKPLPQGACYQHGERYGTATLREAVFSRDGYKCQCCGRTIRDGAMLHVHHVKYRSQGGTNSMANLATVCDKCHTPKNHKPGGKLYNWKPKLPDFKGATFMTTIRWQLYNEVKSLFPDINVHITYGAATKEQRRELNIDKSHVNDAFAMGKFHPKHRANAVLYKKKRRNNRCLEKFYDAKYIDSRDGSKKTGQELFNGRINRNHKKDSENLHQYRLQKIKAGKRTIRKQHYSIQPHDIIMYKNRKRETSGCHCNGTRVVLLPDKKTAAIQKVKIYKYAGGYFKSAFN

SEQ ID NO: 18023 - protein, 486 aa, unidentified
  REGION 1..486: note = Human gut metagenome
MSVSVFVLDKRKKPLMPCRPARARKLLNAGRARVVKTYPFTIRLVDRLLENSAVQPVAVKVDPGSEQSGMAVVRDDGKAHHHALFFINLVHRGQVIQERMTARSAFRRRRRGANLRYRAPRFNNRKRPEGWLPPSLQHRVDTTMSWVKKLRKLVPVTALWVENVKFDTQKLQNPEVSGVEYQQGTLFGFEVREYLLEKFERRCVYCGAENTPLNIDHVVPRAKGGSDRVSNLVLACAECNQKKGAQPLEAFLKGKPEQFERIRRQLKAPLRDAAAVNATRWALFNALKQTGLPVATGTGAQTKFNRKAFGIPKEHWLDALCVGRINGADYPEGMGILQVRCTGRGSYQRTRLNKYGFPRGHLMRQKRVHGFATGDIVKAVKKGVTFQGRVAVRARGSFVLQTPDGKVDGIHWRHCHLISRNDGYGYAWLRPAPHSSLVVNFSQTGTRDPPKIHKPIGFIFETRLVRTGESFLFDSSKYYQIYDKIK

SEQ ID NO: 18024 - protein, 417 aa, unidentified; identical to SEQ ID NO: 13600
  REGION 1..417: note = Human gut metagenome

SEQ ID NO: 18025 - protein, 447 aa, Petrotoga sp.; identical to SEQ ID NO: 4357

SEQ ID NO: 18026 - protein, 475 aa, Blautia sp.; identical to SEQ ID NO: 4128

SEQ ID NO: 18027 - protein, 410 aa, unidentified
  REGION 1..410: note = Human gut metagenome
MFVDMVYVQDIDGKPMMPTTRHGKVRRLLKDKKAVVVNLCPFTIRLTYVTSDYKQEIVLGVDAGTKHVGLSATTKSKELYSSEVILRNDIVDLLSTRRELRRTRRNRLRYRKPRFNNRIKSKRPGWVAPSVKYKVDAHIRVIENICSILPISRIVIEVAQFDTQKIKNPEILGKEYQEGDQLEFWNTREYVLARDGHKCQYCKGKSKDKILNVHHLESRKTGGDSPSNLITLCETCHKEYHKGNIDLKIKRGSSLRDAAVMGIMKWKLYEELRSRYDRVSMTFGYITKHNRIKYGIEKSHTSDAFVISKNINAKRIGCQYLKRLIRRHNRQIHKMKILKGGKKKNNQAPFEVFGFRLFDKVLYNNKICFVYGRRKSGSFNIRDFNGENSKDVSRKKFKLIRGKRHPIILK

SEQ ID NO: 18028 - protein, 323 aa, unidentified
  REGION 1..323: note = Human gut metagenome
TRYRAPRFDNRIRTKRKGWLAPSVENRINAHLSRIEAVLRLLPVTKITVETASFDLQLLKNPDISGKEYQEGEQLGFWNIREYVLCRDGHVCQHCYGRSKDPVLNVHHLESRRTGGDSPGNLITLCETCHKALHRGEITLKAKRGQSFRAEAFMGIMRWEVLNRLKASHPELEVNNTYGYRTKHARIANDIAKSHCADAFCIAGNLGAERLGEFFFQKQTRRNNRQIHKLSVLKHGLRKRNQAPFEIKGFRLFDKVACQREESFIFGRRSSGVFDVRKLDGTRISAGISCKKLHLLEKRRTYLTEIRKEEALPPLPEDRGLRA

SEQ ID NO: 18029 - protein, 518 aa, unidentified
  REGION 1..518: note = Human gut metagenome
MANLKLIDELLEKTEYIYVLGIDGKPQMPTNRKVRVRSLFKSGMAKVVDTVPFTMQLLYENKPVLQPITIAEDPGRTNIGAAVLTQFGDLVFSAVVETRNKSIKKLMSDRKAHRQASRHGERKARQRLAKKYKSMIKAGMIMRKLPQYAADKFVTCKVIKNTEARFCNRKRMPDWLTPTVNHLVQTHINLIKKVEKYLPITDVAIEVNRFAFMQMENPDASGVDFQNGPLKGFDDVKAAIREQQHGKCLMCKNDIEHFHHIIPRSKGGSNTIQNQVGLCKKCHAKVHTDAEFQAKLKDKKEGLIKKYGALSALNQAVPFICKELLKIYGAEHVHFCTGKDTSLIRSSLGYDKTKDNQMHEVDAYCICLAAIGADKTKRPDFNNVFKIKQFRRQDRSIINYQRERTYYLNGKKIATNRKPRFEQKGDALSDWYSEQVKLKGKKYADKLTGRITVKKSTRGYNSKDRVMPGTIFYYGGKRLVLSGQTTRGKYYKAYGDPKTNYPAAKCQIYKHNEGLAFV

SEQ ID NO: 18030 - protein, 412 aa, unidentified
  REGION 1..412: note = Human gut metagenome
MTNYAFVLDANGKQLAPTKEQKAWFLIRKKRATLVSKYPMVIQLKKEIPDEQIYKDEICCGIDDGGLHVGISLVQKCKTKNKVVFKGTMEQRKDVKHLMEVRKGYRRYHRFYKRYRQARFNNRKSSKRKERIAPSILQKRQATIRVINQLNKWINITNYWLEDIAIDIRALTDGYKAYRWQYQQSNRLDENIRKAVILRDGCKCMECGKSNCKLEVHHIKPRRLNGSNTLGNLISLCKKCHQKTEEQEEVYMNRYFSMLNSSDNKNLNYAQHVMIGKKWLREQLSKLGTLTLATGGDTANKRIDWNIEKSHSNDAICIAGLQPDTCNVKEWTIKPMRRQSKAKTDNVLGINHRDLVEYTFRNGETHRGYVTALYPGQNAINFQSSTKHCKKVNAKKCKLIWKYSKIYWLANV

SEQ ID NO: 18031 - protein, 443 aa, Ectothiorhodospira sp.; identical to SEQ ID NO: 16597

SEQ ID NO: 18032 - protein, 315 aa, unidentified
  REGION 1..315: note = Human gut metagenome
MPTVYVLNKDGKPLMPTTRCMHVRHLLKNGKARVVKSKPFTIQLLYETDDVVQPLYLGIDPGRTNIGVAVVKTDGAAVFTAHLETRNKEVPKLMKKRKESRCARRTNGRRCRRQRRAKTNGTISKKCVKQTTAQNGSVSKRAKEIGVIKRHLPGCEKDVLCIGIKNKEAKFTNRARPEGWLTPTANQLLQTHINLVKKIQKFLPISDVVLEVNKFAFMQLDNPNIQKWQYQQGPLYQKGSLENAVSEMQEHHCLFCEKPIEHYHPVHSSHALPSSFQIISIFKIQGGNNYVRWFWFNSRYRWSVRFCRCIRLYIQ

SEQ ID NO: 18033 - protein, 460 aa, unidentified; identical to SEQ ID NO: 7594
  REGION 1..460: note = Human gut metagenome

SEQ ID NO: 18034 - protein, 453 aa, unidentified
  REGION 1..453: note = Human gut metagenome
MVYVLNKDGKPLMPTKRYAKIRILRKRGLLKIVSAKPFTVQLLYDTKNITQDVTLGIDSGYLNTGFSAITEKQELISGEVKLLQGQKERLYERASYRRLRRQRLRYRVPRFNNRISSKKEGWLAPSIQHKLDSHIRFIEKLQKILPISKIVIEVANFDIQKIKNPEIEGKLYQEGEMQGFWNLREYILHRDNHKCQNPNCKNKDKDPVLMIHHIVYREHGGTDSPSNLTTLCNKCHTDSNHKKGKFLYDWMMEGRKAKGFKDSTFMSMVRWRLVNYLNSLNVETNHTYGFETKSKRIELGLEKSHFNDAFCIARGNNQTRVETFSIEQVRRNNRSLEKFYDAKFIDLRSGEKVSAGDLSCGRTTRNKNLITENLKIYRGRKVSKGKRTIRKSRYFYQPNDLVKYNNKIYTIKGTHNNGTRAILKETGKSIKVGDLIPYRFSKGFYFKVPSENK

SEQ ID NO: 18035 - protein, 512 aa, unidentified
  REGION 1..512: note = Human gut metagenome
MSTVYVLNKDGKPLMPTTRGGHVRHLLKEQKARVVRTKPFTIQLLYETDDVVQPLYLGIDPGRTNIGVAVVKTDGTAVFTAHLETRNKEIPKLMKKRKDSRRARRTNGRRCRRQRRAKANGTISKKCVKQTTAQNGSVSKRAKEIGVIKRHLPGCEKEVLCIGIKNKEAKFSNRVRPEGWLTPTANQLLQTHINLVKKIQKFLPISDVVLEVNKFAFMQLDNPNIQKWQYQQGPLYQKASFEEAVSEMQEHHCLFCKKPIDHYHHVVPQHKNGSNTIGNIVGLCAKHHDLVHKDTTWQKKLAKKKTGLNKKYGALSVLNQIIPALTKELSSLFSKHFFATNGKSTYDYRAAHGVSKDHWLDAYCIACSVLPNDVCDSDINNRVPYELKQFRRHDRRALHKENMSRVYTLNGKSVATNRHKATEQTTDSLEEFRQCQPDDVCKLKVKEHHPEYRNPKRNFPGCVFLVGKHTHVIQGTSGSHNGKADGYYDTNGNSYSSGKCKFVAKNEGIVFT

SEQ ID NO: 18036 - protein, 419 aa, unidentified; identical to SEQ ID NO: 12663
  REGION 1..419: note = Human gut metagenome

SEQ ID NO: 18037 - protein, 414 aa, unidentified
  REGION 1..414: note = Human gut metagenome
MPCSPAKARLLLKEKKAIVVRRTPFTIQLTIATGETKQPVSLGVDAEYKHVGLSASTEKAELYASEVELRQDITDLLSARRALRQSRRNRKTRYRAPRFDNRIRTKRKGWLAPSVENRINAHLSRIEAVLRLLPVTKITVETASFDTQLLKNSDIAGKKYQKGEQLDFWNVREYVLFRDGHVCQHCHGRSKDPVLNVHHLESRRTGGDSPGNLITLCETCHKALHRGEIKLKAKRGQSFRAEAFMGIMRWEVLNRLKASHPELEVNNTYGYRTKHARISNGIAKSHCADAFCVAGNLGAKRLGEFFFQKQTRRNNRQIHKLSVLKHGLRKRNQVPFEVNGFRLFDKVACKGEEGFIFGRRSSGFFDVRKLDETRISAGISYKKLHLLEKRQTYITEIRKEKALPPLPEGRGLRA

SEQ ID NO: 18038 - protein, 464 aa, unidentified
  REGION 1..464: note = Human gut metagenome
MYVFVIGLDGTRFMPCKPRKARKLIEAHKAEIYKKQPFTIRLLYKTGCATQPVTIGIDTGSQHIGIAVTSGNKVLYQAEIELRSTMDKRSLMETRRSYRRSRRYRKTRYRSPKFRFHTKRTYSETLVKRKTTGVMTHWVKHTNSMSTNRPDGWLAPSMQSKADHHIRWINRFLDVLPPDTKLRLEIARFDIARMKNLEVHSELYQYGPQYDYENLKAYVFDRDHYKCVVCKRKLGSKQPDGHSLKGMMHHITFRSKGATDNPDQLVTVCEYCHTPQAHKKGGVLWDLKEKHRPVQRGLRDATQMNIIRTRLVKAFPDAELTYGNITAADRKKMHLPKSHAGDAVAIAMKGKTVNICEPTVYIKQVRKKKRSLHEATPRKGRKNPNTQAVRNPKNTKSIGIYHIYDTVRFQNKTGFISGFTGRSAYVQDFDGNYITMPGKSYKQINLSNLELVRHNNNWIQKTGN

SEQ ID NO: 18039 - protein, 443 aa, unidentified
  REGION 1..443: note = Human gut metagenome
LTKDENRPSGRTTGLRAEQAEPAGIRKGDTLKVFVLNMRGKPLMPCSPAKARHMLKAGKAFVVRRTPFTIKLTIATGETKQDVTLGVDAGARHVGISATTEKEEVFASEVALRQDITGLLADRLAFRRARRNRKTRYRAPRFNNRVRSKHKGWLAPSVENRIQAHISRIEAVCRLLPVTKIVIETASFDIQKIRNPEVEGTGYQQGDQLGFWNVREYVLFRDGHICQHCRGRSKDPILNVHHLESRKTGGDAPNNLITLCETCHKAYHAGKIKLKVKRGQSFRAEAFMGIMRWTLLDRVRKTHPKLPVEYTYGYLTKHKRIALGLPKTHCADAFCIAGNLKALRRGDFLFQQQTRKHNRQIHKCSILKGGVRKLNQAPFLVKGFRLFDKVRIGGQIGFVFGRRVRGIFNIRRLDKTVIGTDINCKKLSLLETRKTFLTELRKE

SEQ ID NO: 18040 - protein, 442 aa, unidentified; identical to SEQ ID NO: 2903
  REGION 1..442: note = Human gut metagenome

SEQ ID NO: 18041 - protein, 512 aa, unidentified
  REGION 1..512: note = Human gut metagenome
MPTVYVLNKDGKPLMPTTRGGHVRHLLKEQKARVVRAKPFTIQLLYETDDAVQLLYLGIDPGRTNIGVAVVKANGTAVFTAHLESRNKEILKLMQDRKKARRARRTNGRRHRRQRRAKANGTISKKCVKQDTAQSKNPSKRAKEIGVIKRRLPGHKKDLLCIGIKNKEAKYTNRARPEGWLTPTANQLLQTHINLVKKIQKFLPISDVVLEVNKFAFMRLDNPDIQKWQYQQGPLYQKGSLENAVSEMQEHHCLFCDKPIDHYHHVVPQSENGSNTIANIVGLCAEHHNLVHKDAAWQKKLAEEKVGLNKKYGALSVLNQIIPALTNKLSVLFPKHFCVTTGKSTHDYRESHSVSKDHWLDAYCIACSVLPSNVCDSNINNHVPYELKQFRRHDRRALHKENMSRVYTLNGKAVATNRHKAIKQTTDSLEEFRQSHPGDVCKLKVKEHHPAYRNLNRNHPGSVFFVGEQAHVMQSIVASKDGKATRYKDTNVNKIAAGQCRFVAKNEGIVFT

SEQ ID NO: 18042 - protein, 420 aa, unidentified
  REGION 1..420: note = Human metagenome
MVVVIDKHKRPCNTISAAYARILLFSKQAVIYKRFPFTIRLRNDNAVLKDKSYTVKLDPGSRTTGVAITDDKESVVMLAEIEHRGHIIKKSLDKRRVIRRSRRNRKTRYREARFLNRTRPQGWLAPSVKSRADNVINFIKKHKKLLNINRVMIEDVSFDIAQMSSDIKLWGNDYQQGSLYNKNLREFIFSKTKGRCSYCGAKAKEIDHIVPRAKGGTDSTYNLAASCRSCNEKKSNLSLKEFGKLMNKDYSQLEPKKLPKDAAIVQSARNYMVKEITKIIPDTTTYDAWMTKYNRNQLGLSKQHYYDALSVGEIPTKFNFLTDKILQISAKGRGSRQMCRMDRYGFPRTSAKASKTVKGFQTGDIVKAIVPFGLKQGEYLGKVAVRSSGYFDIQTKTQVIQGIGYKYCHIVQRSDGYSYD

SEQ ID NO: 18043 - protein, 431 aa, unidentified
  REGION 1..431: note = Human gut metagenome
MPNKVYVINKHGRPLMPCSPAKARHLLDAGKAKVKKRTPFTIQLVYGSSGYTQEVILGVDAGSKTIGMSASTKKEEVFAADVTPRNDVVDLMSTRREFRRARRNRKTRYRKPRFDNRVRSKHKGWLAPSVEVKIQEHITSIKRVCRILPVSKVVIETAEFDLQLLKAIEEGKPVPQGEDYQQGEMYGHYNVRQYVLWRDNYTCQCCGAHATKKKEVRLHVHHLESRKVGGDAPDNQVTLCESCHEKLHKGLIAAKDFKKRKRRSTRDATFMGIMRKTLMQRLCSELPIPAIETRGYITKATREKLLVLPKSHTNDALAIAQGKQGFNVGYLPGILQIDKIYTIRPVRHHNRQLHKATILKGGIRKSNQAEKYVFGYRLFDKVQFNGQDCFIWGRRTTGIFTIKTINGKMIKDGISFKKLKLVEKSTSYLIA

SEQ ID NO: 18044 - protein, 431 aa, unidentified
  REGION 1..431: note = Human gut metagenome
MPNKVYVINKHGRPLMPCSPAKARHLLDAGKAKVKKRTPFTIQLLFGSTGYTQEVILGVDAGSKTIGLSASAETEELLSAEVKPRNDVVDLLSTHREFRRARRNRKTRYRKPRFDNRVRSKHKGWLAPSVEVKIQEHITSIKRVCRILPVSKVVIETAEFDLQLLKAIADGKPVPQGEDYQKGEMYGHYNVRQYVLWRDDYTCQCCGAHATKKKEVRLHVHHLESRKVGGDAPDNQVTLCESCHEKLHKGLITAKDFKKRKRRSTRDATFMGIMRKTLMQMLCSELPIPVVKTRGYITKATREKLLVLPKSHTNDALAIAQGKRGFNVGYLPEIAQIDKIYTIRPVRHHNRQLHKAAILKGGIRKSNQAGKYVFGYRLFDKVQFNGQDCFIFGRRTSGYFVVKTIDGKVIHNSASFKKLKLVERASNYLIA

SEQ ID NO: 18045 - protein, 421 aa, unidentified
  REGION 1..421: note = Human gut metagenome
MRGQPLMPCSPAKARHLLRDKKAVVKRRTPFTIQLTIATGETKQDVTLGVDAGAKHIGLSASTEKEEVFASEVELRQDITELLSARRAFRRARRHRKTRYRAPRFSNRVHSKHTGWLAPSVENRIQAHMSRIDAVCGLLPVTKFVIETASFDIQKIKNPDIEGTDYQQGDQLGFWNVREYVLFRDGHVCQHCRGRSKDKILNVHHIESRQTGGDAPNNLITLCETCHKAYHAGKIKLKVKRGQSFKAETFMGIMRWTLLDRVRKAHPDLPVENTYGYLTKNTRITLGLRKTDCIDAYCIAGNLNARRRGVFLYQRQVRKHNRQIHRCTVLSKTLKDGTKVGYRKLNQTPYFVKNFRLFDKVRCLGQTGFIFGRRSSGSFDVRRLDRVKLSSNISYKKLTLLEKRRTFLTELRKEDGASSPV

SEQ ID NO: 18046 - protein, 418 aa, unidentified; identical to SEQ ID NO: 12569
  REGION 1..418: note = Human gut metagenome

SEQ ID NO: 18047 - protein, 428 aa, unidentified
  REGION 1..428: note = Human gut metagenome
MPKVYVLNKHGHPLMPCTPAKARHLLDSGKAKVRKRTPFTIQLLYGSSGYKQPVALGVDAGSKTIGLSASTEKKELFAAEVKPRNDVVELLSTRREFRQARRNRKTRYRKPRLDNRVKSKHKGWLAPSVEVKIQEHITAIARVCALLPIAKLIVETAEFDTQRLKAMLEGRPLPVGTDYQLGEMYDEYNVRQYVLKRDNYTCQCCGAHPSAKKEVKLHVHHLESRKTGGNAPNNQVTLCEHCHKLLHKGKITLDKKKRGHSMRDAAFMGIMRKTLILRLRSELAIPVVETYGYITKLVRETHHMDKSHTVDALCIAGHPLADASDVIYLIKPVRRHNRQLHKATILKGGVRKANQAPKSVFGFRLFDKVRYQGQECFIWGRRSSGSFLLKKLDGTKVKDGVSYKKTDSIGKRNKLFNRRKEALLLPMP

SEQ ID NO: 18048 - protein, 502 aa, unidentified; identical to SEQ ID NO: 2616
  REGION 1..502: note = Human gut metagenome

SEQ ID NO: 18049 - protein, 415 aa, Bacillus sp.; identical to SEQ ID NO: 2431

SEQ ID NO: 18050 - protein, 238 aa, unidentified
  REGION 1..238: note = Human gut metagenome
VSERIYNVRQYVLKRDNYTCQCCGAHTTAKKAVKLHVHHLESRKVGGNAPSNLITLCVTCHNNLHKGKITLDGKKRGKTLRDAAFMGIMRNTLLTRLRNELNISVQNTYGYITKLLREQNDIKKSHVNDARCISKHPLAEPCSVCYRTKAIRHHNRQIHKAKILKGGIRKANQAPYIVKGFRLWDKVLYNGQECFISGRRSSGYFALRKLDGTAITNSISFRKLRLLEPATNYLIERM

SEQ ID NO: 18051 - protein, 502 aa, unidentified; identical to SEQ ID NO: 2616
  REGION 1..502: note = Human gut metagenome

SEQ ID NO: 18052 - protein, 441 aa, Anaerostipes sp.
MVTVQQSTHHLPFGRVFIRRNLFMVYVISQDGKPLMPCSDPIARLLLKQGKAKVKKREPFTIKLTYETTNYTQGLTLGVDTGSGTIGTAVSKDNGDIVYMSEVVVRNDITDKMTQRAKYRRNRRNRKTRYRKARWLNRASSIKKDRFSPTMQSKLHSHVREIEYIQSILPVTEMVFETGQFDMQLMKNPSLANPKVRPWGYQKGANYGFENTKAMVLNRDNYTCQCCKGKHKDSKLEVHHIVFRSQGGSDEESNLLTLCHTCHKDLHSGKINPKLSGKLKGNLKYATQMNSIRKQLFRFYPNAIETFGYVTKANRLHLGVDKEHYYDACTIATQGNAFNVKSNLYKKKCVSDGDFQKTKGIRSEQPIVTDKICGFRKFDKVRYFGNDYFIKGRMSTGYAILMDIDGNKIDFSTMPRGYKTPKLSNCKRITARSTVMTQVKV

SEQ ID NO: 18053 - protein, 443 aa, unidentified
  REGION 1..443: note = Human gut metagenome
VVKANGTAVFTAHLETRNKEIPKLMQDRKKARRARRTNGRRCRRQRRAKANGTISKKCVKQTTAQNGSVSKRAKDIGVIKRRLPGCEKDVLCIGIKNKETKFTNRTRPEGWLTPTANQLLQTHINLVKKIQKFLPISDVVLEVNKFAFMRLDNPNIQKWQYQQGPLYKKESLESAVSEIQEHHCLFCKKPIDHYHHVVPQHKNGSNTIGNIVGLCAKHHDLVHKDSAWEKKLAKKSTGLYKKYGALGVLNQIIPTLTNELSSLFPKHSFVTNGKSTYDYRAAHGVSKDHWLDAYCIACSVLPSNVCDSNINNHMPYELKQFRRHDRRVLNNENMTRVYTLNNKAVAINRHKAKDQKTVSLEEFRKEHPDDVCKLKVKEHHPTYRNMNRNFPGSVFLVGKQIHVMQGIASSKDGKATKYNDTSATAIAAGKCKFVAKNTGILFV

SEQ ID NO: 18054 - protein, 414 aa, unidentified; identical to SEQ ID NO: 12176
  REGION 1..414: note = Mouse gut metagenome

SEQ ID NO: 18055 - protein, 426 aa, unidentified; identical to SEQ ID NO: 6377
  REGION 1..426: note = Human gut metagenome

SEQ ID NO: 18056 - protein, 443 aa, unidentified
  REGION 1..443: note = Human gut metagenome
LTKDENRPSGRTTGLRAEQAEPAGIRKGDTLKVFVLNMRGKPLMPCSPAKARHMLKAGKAVVVRRTPFTIKLTIATGETKQDVTLGVDAGARHVGISATTEKEEVFASEVALRQDITGLLADRLAFRRARRNRKTRYRAPRFNNRVRSKHKGWLAPSVENRIQAHMSRIEAVCRLLPVTKIVIETASFDIQKIRNPEVEGTGYQQGDQLGFWNVREYVLFRDGHVCQHCHGRSRDKILNVHHLESRKTGGDAPNNLITLCETCHKAYHAGKIKLKVKRGQSFRAEAFMGIMRWTLLDRVRKTHPKLPVENTYGYLTKHKRIALGLPKTHCADAFCIAGNLKALRRGDFLFQQQTRKHNRQIHRCSILKGGVRKLNQAPFLVKGFRLFDKVRIGGQIGFVFGRRVRGIFNIRRLDKTVIGTDINCKKLSLLETRKTFLTELRKE

SEQ ID NO: 18057 - protein, 393 aa, Moorena sp.; identical to SEQ ID NO: 5287

SEQ ID NO: 18058 - protein, 493 aa, unidentified
  REGION 1..493: note = Human gut metagenome
MAAVYVISASGKPLMPTTRCGHIRGLLNAGKAKVVEREPFTIQLKYETPDVTQPLYLGIDPGRTNVGSAVVREDGECVFTAQLTTRNKDVPKLMKARKQFRMAHRRLKRRCKRQRRAKAAETLSQKGEFQRLLPGYEEPILCKGIRNKEARFNNRQRPAGWLTPTANHLLLTHLNMVKKLQKLLPITDVVLEVNRFAFMAMENPSIRRWQYQQGPLYGKGSVEDAVYAQQDGHCLFCGKPIAHYHHVVPQHKNGSETLENRVGLCNEHHDLVHKDRAWDAKMKETKAGLNKKYHALSVLNQIIPALTEQLTAMFPQHAFVTTGKDTADFREDYGIAKEHHLDAYCIACSVLAEPTKVAAPTGKPHRLMQFRRHDRQVCHKENIKRVYLSEGKAVATNRHKAIEQKDDSLEEFRKTHTQQEVSALTVKDHQPVYKDMRRFMPGGVFLFNGKVYTLQRSHGRYKGMPFYYIDTDGSKNHAKGCIFLQQNCGLRWV

SEQ ID NO: 18059 - protein, 512 aa, unidentified
  REGION 1..512: note = Human gut metagenome
MSTIYVLNKDGKPLMPTTRGGHVRHLLKEQKARVVMTKPFTIQLLYETDDVVQPLYLGIDPGRTNIGVAVVKADGTAVFTAHLETRNKEIPKLMKKRKDSRRARRTNGRRCRRQRRAKANDTLSTKRVKQTTAQNGSASKRAKEIGVIRRRLPGCEKDVLCIGIKNKEAKFNNRTRPEGWLTPTANQLLQTHINLVKKIQKFLPISDVVLEVNKFAFMQLDNPNIQKWQYQKGPLYQKESLESAVSEMQEHHCLFCKKPIDHYHHVVPQHKNGSNTISNIVGLCTKHHDLVHKEAVWQEKLAKKKTGLNKKYSALSVLNQIIPALTKELSVLFPKHFFVTTGKSTYDYRAAHGVCKDHWLDACCIACSVLPNDVCDSSINNRVPYELKQFRRHDRRVLHKENMNRVYTLNSKKAATNRHKATEQESASLEEFRKEHPDDVCKLKVKEHHPTYRNMNRNYPGSVFFVDKQVHVMQGIARSKDGKATTYKDTNANLITAEGCKFVAKNSGILFV

SEQ ID NO: 18060 - protein, 544 aa, unidentified; identical to SEQ ID NO: 3572
  REGION 1..544: note = Human gut metagenome

SEQ ID NO: 18061 - protein, 440 aa, unidentified; identical to SEQ ID NO: 12442
  REGION 1..440: note = IscB polypeptide

SEQ ID NO: 18062 - protein, 440 aa, unidentified
  REGION 1..440: note = Human gut metagenome
LLLKKKTASVVCRHPFTIQLLYKTGCATQKGSIGIDTGSQHIGVGITCGDKVILKDEHALRSSMEKRSLLATRAAMRRGRRYRKVRYRKPKWRHHTKRMYFEKANRRGQHWRKVKTTTQSPRSKGWLPPSLQSKCDHHFCIIDRYLKYLPDPITRNLVIETGRFDMARMNDPTIHGKMYQRGPMYDAENRRAYIFARDNYQCACCKAKAGTTRKADGTTVKLVAHHILFRSRGATDNPKYMVSVCDHCHTTKAHQPGGILYSWMENNKKVTRGLRDATFMNILRKRLFARYPQAAFTYGNITAADRKQYHLPKSHVNDAVAVSLFGKEVPTVRDTCQTTYYKQVRKSKRSLHEAIPRKGRKRPNTKAVRNKKNTTQVNGFKLWDSVLANGKKLFICSFTGTSAYLIDKNGCYISQPGKTYKQWPLSKLKRLHPNGNWLMA

SEQ ID NO: 18063 - protein, 543 aa, unidentified; identical to SEQ ID NO: 11881
  REGION 1..543: note = Human gut metagenome

SEQ ID NO: 18064 - protein, 442 aa, unidentified; identical to SEQ ID NO: 2807
  REGION 1..442: note = Human gut metagenome

SEQ ID NO: 18065 - protein, 416 aa, unidentified; identical to SEQ ID NO: 8117
  REGION 1..416: note = Human gut metagenome

SEQ ID NO: 18066 - protein, 431 aa, unidentified
  REGION 1..431: note = Human gut metagenome
MPNKVYVINKHGRPLMPCSPAKARHLLDAGKAKVKKRTPFTIQLVYGSSGYTQEVILGVDAGSKTIGMSASTTKEELLSAEVKPRNDVVDLLSTRREFRRARRNRKTRYRKPRFDNRVRSKHKGWLAPSVEVKIQEHITSIKRVCRILPVSKVVVETAEFDLQLLKAIADGKPVPQGEDYQKGEMYGHYNVRQYVLWRDGYTCQCCGAHATKKKEVRLHVHHLESRKVGGDAPDNQVTLCESCHEKLHKGLIAEKDFKKRKRKSTRDATFMGIMRKTLMQRLCSELPIPVVETRGYITKATREKLLVLPKSHTNDALAIAQGKHGFNVGYLPGIEQIDKIYTIRPVRHHNRQLHKAAILKGGIRKSNQTEKYVFGYRLFDKVQFNGQDCFIWGRRTTGIFTIKTINGKMIKDGISFKKLKLVEKSTSYLIA

SEQ ID NO: 18067 - protein, 427 aa, Moorena sp.
MQNYVFVIDTNKQPLNPISPKKARRLLDKGKAAVFRMYPFTIILKRDIENPSISPCHIKIDPGSKVTGFALVQNGQVIWGMELEHRGGLIKKKLESRCAIRRGRRNRNTRYRKARFLNRKRPEGWLPPSLEHRILTIQTWVKRLIKFCMVNEIWIERVKFDTKKMQNPEINGIEYQQGELAGYEVREYLLEKWGRECTYCGKQNIPLQIEHIHPKSQGGSERVSNLCLACEKCNQRKGNKPVEEFLKKKPSLLQKIQTKALSPLKDAAAVNATRNKLVKVLKSIKPIITGTGAQTKYNRTKLGFPKEHWIDAACVGDIETLVLRTSQPLFVTCKGQGGRQKAAPNKYGYPIRHNPLKPIKGWKTGDIAKHQKLGIGKVTPRTKGSFGFTPLGMKGYKSCKPQDISAVHRKDGYVYSFCKYLPGFTRE

SEQ ID NO: 18068 - protein, 427 aa, Nostoc sp.; identical to SEQ ID NO: 2670

SEQ ID NO: 18069 - protein, 524 aa, unidentified; identical to SEQ ID NO: 14781
  REGION 1..524: note = Human gut metagenome

SEQ ID NO: 18070 - protein, 434 aa, Allochromatium sp.
MAVFVLDKQKRPLMPCTEKRARLLLERGRAVVVRLAPFTIRLKDRIGGALQPLRLKLDPGSRVTGLALVRESETCDADTGAVERLEHGLWFGELVHRGQAIREALTRRRHYRRARRSRKTRYRAPRFLNRPRREGWLPPSLQHRLDTTVNWVQRLRRLAPITALSQELVRFDTQALQNPEISGVEYQQGELAGYEVREYLLEKWRRTCAYCGAMHVPLEIEHIVPRARGGSDRVSNLTLACRACNQRKANQSIEDFLQRQPALLHQIQAQARAPLKDATAVNATRWALLNALKTTGLPVETASGGRTKFNRTRLDIPKTHALDAACVGAVDQVRDWNRPVLSIRATGRGAYSRTRTFNNGFPRGYLIRHKRVQGFQTGDWVRAEVLKGKKAGVHVGRVAIRRTGSFNVQTPGGTVEGLSHRYCRVLQRADGYGY

SEQ ID NO: 18071 - protein, 425 aa, unidentified; identical to SEQ ID NO: 6912
  REGION 1..425: note = Microbial mat metagenome

SEQ ID NO: 18072 - protein, 406 aa, unidentified; identical to SEQ ID NO: 5685
  REGION 1..406: note = Human gut metagenome

SEQ ID NO: 18073 - protein, 514 aa, unidentified
  REGION 1..514: note = Human gut metagenome
MSTVYVLNKDGKPLMPTTRCGHVRHLLKEQKARVVASKPFTIQLLYETDDVVQPLYLGIDPGRTNIGVAVVKTNGTAVFTAHLETRNKEIPKLMKKRKDSRRTRRTNGRRCRRQRRAKANGTISKKCVKQATAQNGSVSKRAKKIGVIKRHLPGCEREVLCIGIKNKEAKFSNRTRPESWLTPTANQLLQTHINLVKKIRKFLPISDVVLEINKFAFMQLDNPNIQKWQYQQGPLYQKANLEEAVSEMQEHHCLFCKKPIAHYHHVVPQSENGSDTIGNIVGLCTKHHDLVHKDTAWQKKLAKKKTGLNKKYGALSVLNQIIPALTKELSSLFPKHFFATNGKSTYDYRAAHAVSKDHWLDAYCIACSVLANYVCDSNINSHVPYELKQFRRHDRRALHKENMNRVYTLNGKSVATNRHKAIKQTTDSLEEFRQRQPNDVYKLEVKEPHPEYRNPKRNFPGCVFLVGKHTHVMQGTSGSHNGKADGYYGTSGNSYSSGKCKFVAKNEGIVFTLN

SEQ ID NO: 18074 - protein, 433 aa, Lactobacillus sp.; identical to SEQ ID NO: 6213

SEQ ID NO: 18075 - protein, 424 aa, unidentified; identical to SEQ ID NO: 3351
  REGION 1..424: note = Human gut metagenome

SEQ ID NO: 18076 - protein, 537 aa, unidentified; identical to SEQ ID NO: 3435
  REGION 1..537: note = Human gut metagenome

SEQ ID NO: 18077 - protein, 528 aa, unidentified; identical to SEQ ID NO: 15389
  REGION 1..528: note = IscB polypeptide

SEQ ID NO: 18078 - protein, 520 aa, unidentified
  REGION 1..520: note = Human gut metagenome
MNYLDFVLIVDKNKVPCIPIKESTAAYLLRHNKAKIINHDPTVIQRFDEYSADYEIRNIFELKIDSGYLNIGFSVSDSEHEYLAGQVNLLQGMSERLTVRASNRRFKRARLRYRKNKNVDYKIVHNPTYKNGNQDGWIAPSIQHKIDSHIRLIKKIAQWVPIDRIIIEVAKFDIQKMIADLDGRIISGKDYQNGEMKGYENVTAYVRDRDKYTCQMCLSSGKVKNKNNDTIEVHHIIPRAAGGTNRPSNLICLCHHHHRLVHSNNNNNKYFKELQNKKMPDTYKDSTFMNIVRYKIYNALCADFKDVELAYGYETKINRRLIGLPKFHYTDAVCLKEWKNISLTKFIYIVDQKRCNDRKMESFFDAKYIDIRDGKTKSGTELCYTRLDNASSWRTTCKNEVDNLRQYREKKITKGRKQRECHFYCLKPGDLIFINLGNHKGNLAEVKTMQIQKGKYKIFFIYKNQKVDNPTISLSPEEYEQLKKNECSKVKIVRTRRGMIWRKYNRLEYENTYKDQYDKN

SEQ ID NO: 18079 - protein, 458 aa, Lactobacillus sp.; identical to SEQ ID NO: 5912

SEQ ID NO: 18080 - protein, 423 aa, Lactobacillus sp.; identical to SEQ ID NO: 5050

SEQ ID NO: 18081 - protein, 431 aa, Petrotoga sp.; identical to SEQ ID NO: 11592

SEQ ID NO: 18082 - protein, 462 aa, unidentified
  REGION 1..462: note = Human gut metagenome
MSVLVIGRNGRALMPTNPRKARLLLKKKTASVVCRHPFTIQLLYKTGCATQEGCIGIDTGSQHIGVGITCGDRVILKDEHALRSSMEKRSLLATRAVMRRGRRYRKVRYRKPKWRHHTKRMYFEKANRRGQHWRKVKTTTQSPRPKGWLPPSLQSKCDHHFRIIDRYLKYLPDPITRNLVIEAGRFDMARMNDPTIHGEMYQRGPMYDAENLRAYIFARDNYQCACCKAKAGTTRKADGTTVKLVAHHILFRSRGATDNPKYIISVCDHCHTTKAHQPGGILYSWMENNKKVARGLRDAVFMNILRKRLFARYPQSAFTYGNITATDRKQLRLPKSHANDAVAISLFGKEASTVKNICQTMHYKQIRKSKRSLHEAIPRKGRKNPNTKAVRNKKNTTQVNGFKLWDSVLADGKKLFICSFTGTSAYLIDKNGCYISQPGKTYKQWPLSKLKRLHPNGNWLMA

SEQ ID NO: 18083 - protein, 415 aa, Bacillus sp.; identical to SEQ ID NO: 7870

SEQ ID NO: 18084 - protein, 431 aa, unidentified; identical to SEQ ID NO: 4306
  REGION 1..431: note = Human gut metagenome

SEQ ID NO: 18085 - protein, 406 aa, unidentified; identical to SEQ ID NO: 7406
  REGION 1..406: note = Human gut metagenome

SEQ ID NO: 18086 - protein, 442 aa, unidentified; identical to SEQ ID NO: 14485
  REGION 1..442: note = Human gut metagenome

SEQ ID NO: 18087 - protein, 447 aa, unidentified; identical to SEQ ID NO: 3626
  REGION 1..447: note = Human gut metagenome

SEQ ID NO: 18088 - protein, 412 aa, unidentified; identical to SEQ ID NO: 10534
  REGION 1..412: note = Human metagenome

SEQ ID NO: 18089 - protein, 423 aa, unidentified; identical to SEQ ID NO: 8242
  REGION 1..423: note = Human gut metagenome

SEQ ID NO: 18090 - protein, 440 aa, Moorena sp.
LVFVINKNKKPLTPCHFAVARKLLKQGKAVVHKQFPFTIRLKELKEANPKGLIIKLDPGAKQTGVALHKPNGEVVLLATIEHRANKIKQNLEARRAFRRTRRNRKTRYRAPRFLNRKRPEGWLPPSIQSIVDNVKNFIIKLKKLCYIKTIYIETVRFDTQLMLNPLIEGVDYQQGTLLGYEIREYLLYTYGHTCQYCKGLTNDHQLEIEHKHPKSRGGSNSIRNLTLACRTCNQEKGNNTLDEWLQSLSKSKLDKERVKNINSILKTNKPVNLKDTAKVNSSRNTVLREMYKLTSDVAVSTGGVTKHNRVKANLPKTHYYDALCVKETPKIKIHKGLKELYIKSIGRGTRSRTLLNKYGFPRSYLPRQKQFFGYQSGDMVKANIPKGKYIGQYVSNVSCRSTGIFAIYSKKHGKQIDVNHKYLKLTQKGDGYRYELKTLA

SEQ ID NO: 18091 - protein, 439 aa, Ktedonobacter sp.; identical to SEQ ID NO: 9125

SEQ ID NO: 18092 - protein, 417 aa, unidentified
  REGION 1..417: note = Human gut metagenome
MPCSPAKARLLLKEQKAIVKRRTPFTIQLTIATGQAKQPVTLGVDAGYKHIGLSATTEKAELYACEVELRQDITDLLFARLALRRARRSRKTRYRAPRFDNRVASKREGWLAPSVENRIAAHMSRVEAVMRVLPVTAICIETAAFDTQLLKNPNIAGEMYQQGEQLGFWNVREYVLFRDGHVCQHCRGKSKDPVLNVHHIESRRTGGDTPNNLITLCETCHKALHRGEINLKVKRGKSFKAETFMGIMRWTFFERLKAAYPEIKVRNTYGYLTKHKRITHRIAKSHCADAYCIAGNLAATRLWGFFFQKQIRKHNRQIHKLSILKGGLRKKNQAPYEVKGFRLFDKVACKGEEAFIFGRRSSGSFDVRRLDGTRISAGISYKKLRLLEPRTTYLTEFRKEAALPPAAEAAGFRADFL

SEQ ID NO: 18093 - protein, 424 aa, Moorena sp.; identical to SEQ ID NO: 8180

SEQ ID NO: 18094 - protein, 242 aa, unidentified; identical to SEQ ID NO: 9579
  REGION 1..242: note = Human gut metagenome

SEQ ID NO: 18095 - protein, 388 aa, unidentified
  REGION 1..388: note = Human gut metagenome
LVYGSSGYTQEVILGVDAGSKTIGLSASAETEELLSAEVKPRNDVVDLLSTRREFRRVRRNRKTRYRKPRFDNRVRSKHKEWLAPSVEVKIQEHITSIKRVCRILPVSKVVIETAEFDLQLLKAIADGKSVPQGEDYQKGEMYGHYNVRQYVLWRDNYTCQCCGAHATKKKEVRLHVHHLESRKVGGDAPSNLITLCDSCHEKFHKGIITAANLKKRKRRSMRDATFMGIMRKTLIQRLRAELTIPVAETRGYITKTTREKLLVLPKSHTNDALAIALGKHGFNVGYLPEIAQIDKIYTIRPVRHHNRQLHKATILKGGIRKSNQTGKYVFGYRLFDKVQFNGQDCFIWGRRTTGIFTIKTINGKMIKDGISFKKLKPVEKSTSYLIA

SEQ ID NO: 18096 - protein, 442 aa, unidentified; identical to SEQ ID NO: 7655
  REGION 1..442: note = Human gut metagenome

SEQ ID NO: 18097 - protein, 416 aa, unidentified
  REGION 1..416: note = Human gut metagenome
MTNCENYAFVLDAEGKQLSPTKEKKAWYLIRKKRAILVSKYPMVIQLNKIVSNDNICKDEIRCGIDDGGLHVGIALVQKCQTKNKTLFKGTIEQRNDVKHLMKVRWDYRRYRRYHKRYRPKRINNRSSSKRTDRIAPSILQKRQATLRVITQLNKWINITSYWLEDVAIDVRVLTDGFSSYGWQYQKSNRLDENIRKAVILRDGCRCMECGQSNCRLEVHHIKPRRLNGSNTLGNLITLCESCHQKTEGKEEQYMQHYFNILESSDNKNLNYASYVMIGKTWLRKQLSQLGVLNLTTGGNTANKRIDWNIEKSHSNDAVCITDLQPDSCNVKDWIIKPMRRQSKAKTDNVLGIKHRDLVSYVYKNGELHTGYVTALYPKLNALNFQSPTKHCKKVNVRKCRVLWKYNKIYWLDSVS

SEQ ID NO: 18098 - protein, 470 aa, unidentified; identical to SEQ ID NO: 2949
  REGION 1..470: note = Human gut metagenome

SEQ ID NO: 18099 - protein, 469 aa, unidentified; identical to SEQ ID NO: 9316
  REGION 1..469: note = Human gut metagenome

SEQ ID NO: 18100 - protein, 419 aa, unidentified; identical to SEQ ID NO: 5271
  REGION 1..419: note = Human gut metagenome

SEQ ID NO: 18101 - protein, 349 aa, unidentified
  REGION 1..349: note = Human gut metagenome
MPRNDVVENLSTRREFRRARRNRTTRYRKPRSDNRVRSNHERWLAPSVKVKIQEHITSIKRVCTILPISKVVIETAEFDLQLLKAIQEGKPIPEGEDYQKGEMYGSYNVCQYVLWRDNYTCICCGVRGTPKNPVRLHVHHFESRKYGGNAPDNHGTLCDDCHKKFHLGIIADVKLKTRRRQSTRDAAFMGIMRKTLMWRLRTELFIPVAETKGYITKATREKLLVLPKSHTRDALAIAQGRHGFSIKEYAYVEPANHIYTVRPVRHHNRQLHKASILKGGIRKRNQASKYVFGFRLYDKVLYQGKACFVWGRRTSGTFLLRTIDGIKVKDGVSYRNLTLLERSSNYLIA

SEQ ID NO: 18102 - protein, 417 aa, unidentified; identical to SEQ ID NO: 9081
  REGION 1..417: note = Human gut metagenome

SEQ ID NO: 18103 - protein, 445 aa, Clostridium sp.; identical to SEQ ID NO: 13585

SEQ ID NO: 18104 - protein, 453 aa, unidentified
  REGION 1..453: note = Human gut metagenome
DPGRTNIGVAVVKTDGTAVFTAHLETRNKEIPKLMKKRKDSRRARRTNGRRCRRQRRAKANDTISKKCVKQDTAQSGSVSKRAKKIGVIKRHLPGCEKEVLCIGIKNKEAKFSNRTRPESWLTPTANQLLQTHINLVKKIQKFLPISDVVLEINKFAFMQLDNPNVQKWQYQQGPLYQKATPEEAVSEMQEHHCLFCKKPIAHYHHVVPQSENGSNTIGNIVGLCTKHHDLVHKDTTWQKKLAKKKTGLNKKYGALSVLNQIIPALTKELSSLFPKHFFATNGKSTYDYRAAHGVSKDHWLDAYCVACSVLPNDVCDSGINSRVPYELKQFRRHDRRALHKKNMSRVYTLNGKSVATNRHKAIKRTTDSLEEFRQRQPNDVCKLKVKEHHPEYRNPKRSFPGCMFLVGKQTHVMQGTSGSHNGKADGYYDTNGNSYSSGKCKFVAKNEGIVFA

SEQ ID NO: 18105 - protein, 413 aa, Sutterella sp.; identical to SEQ ID NO: 6473

SEQ ID NO: 18106 - protein, 456 aa, unidentified
  REGION 1..456: note = Human gut metagenome
MSTCVCVLSNSGERLMPTIRLGRVRHLLKDGKAKIIKHHPFTIQLLYDSKANTQPIEICEDVGYNYIGISVKSQSHEYVSAQYDTLQDEKACHDSCRKLRRTRRNRLRYRKPRFDNRKRGEGWLAPSLRHKKELNVNVVKMYCAVMPITHATVEVGSFDTMLVKAIQEGKAIPEGADYQKGPRYNLATLREAVFYRDNYVCKVCGRKATEGAILHVHHMFYWKGRHGNSLSELITVCEKCHTPANHQKGGKLYGLGEDIKFANLSGAAFMNTVRWQIVNALYATYGKEFVTITYGAMTKEKRIALQLEKTHSNDAYAMGNCHPAHRCEFGHYQKRRRNNRVLEKFYDATYIDARTGNKAKGKELFNGRISRNHKKDSEDLHKYRSKKVSKGRRSIRRQRYAIQPYDTVRLESKTYITSGCHNKGTRLLIPANGKSKSVAISKVQVVCHAGAWIQII

SEQ ID NO: 18107 - protein, 469 aa, Desulfobacter sp.
MKVYVRSQSGKWLMPTNPANARILLKQGEAKVIQRTPFAIQLLYETTEHVQPVTVGIDDGGIQVGISAVSKGKSLFQQEITLRSDIKLKLDTRRQYRRSRRNRKTRYRKSRFLNRKSSIPICKVCGGNAPASQVICRVCLRKVKGIHQKYAGIPKKVFKIPPSIKAKKEAIIRAVKQIPLPVSRIILEDACFDFQAMENPDISGRQYQHGELLYHKNFKQACLVRDKFKCRVCGAESRLQCHHIKPKANGGTDKLSNLMTLCEGCHERHHKDGLKLPRQESTFYISAAHVQQGKNYLQAELSRIVPLRMTFGYITAHYRNKAGIQKSHVNDAVVIADKQADPLDRYIQTKHVQSRKRSLHEATARKGRKTPNRTQKRNNKNVFTLKGFSRWDTVQYKGKVGFISGFTGSSSCYIVDIKGNYIKNPMKKYKQVNLREVSLICKNQTIISQWVEKSPSESKIRKETSRPEN

SEQ ID NO: 18108 - protein, 512 aa, unidentified
  REGION 1..512: note = Human gut metagenome
MSTVYVLNKDGKPLMPTTRCGHVRHLLKEQKARVVTSKPFTIQLLYEADDVVQSLYLGIDPGRTNIGVAVVKADGTAVFTAHLETRNKEIPKLMKKRKESRRARRTNGRRCRRQRRAKAKGTISKKCVKHDTAQNGSVSKRAKEIGVIKRHLPGCEKDVLCIGIKNKEAKFSNRTRPEGWLTPTANQLLQTHINLVKKIQKFLPISDVVLEINKFAFMRLDNPNVQKWQYQQGPLYQKANLEETVSEMQEHHCLFCKKKIDHYHHVVPQHKNGSNTIDNIIGLCTQHHDLVHKDATWQKRLAKKKTGLNKKYGALSVLNQIIPALTKELSSLFPKHFFVTNGKSTYDYRAAHGVSKDHWLDAYCIACSVLPNDTCDKTINSRVPYELKQFRRHDRRALNNENMSRVYTFNGKMVATNRHKATEQTTDSLEEFRQRQPNDVCNLKVKEHHPTYRNMNRNYPGSVFLVGNQVHVMQGIAGSKDGEATTYKDTNANSIAAGKCKFVAKNSGILFV

SEQ ID NO: 18109 - protein, 451 aa, unidentified
  REGION 1..451: note = Human gut metagenome
MSVAVMSKTGMRLMPTSEYRARKLLKSKKATVYRYNPFTIQLTERETGDVQTVELCMDTGYLHIGTSVKSEKHEYLGVQIDTLTDEKQKHDACRMYRRQRRSRKRYRQSRFNNRKRSDGWIAPSLEHKKDIHIQTISRICNAMPITNITLEMGNFDTQVLKALEENRPLPQGTDYQHGERYGIATLREAVFARDKYTCQCCRRTIADSAILHVHHIIYRSRGGTNRMSNLATVCDRCHTPANHKPGGRLYNWKPKIASFKGATFMTAVQWKMYNEVKSKFSNIKIHITYGAKTKEQRRAFDITKSHVNDAFVMGQFHPKHRSRPVCYKKKRRNNRCLEKFYDAKYIDSRDGKKRSGQELFNGRINRNHKKDSENLHQYRQQKVSSGRKTIRKQHYSIQPHDIVVFNRQQFETSGCHCNGARAILLPQKKSVAIKKLSIHKYAGGYFKSDFT

SEQ ID NO: 18110 - protein, 556 aa, unidentified; identical to SEQ ID NO: 17146
  REGION 1..556: note = Human gut metagenome

SEQ ID NO: 18111 - protein, 498 aa, unidentified
  REGION 1..498: note = Human gut metagenome
MNYVYVLNTSGMPLMPTTRYGKVRRMLKSGKATVVSTKPYTIRLLYEPETNIKQSITLGTDPGRTNIGVAAVDESGRCLYSAKCETRNKQIPKLMEDRAAHRRASRRGERLVRKRLARKLVTTTKFLEGRRLPGCDNPVMLKEIINTESRFNNRKRPEGWLTPTATQLLRTHLNLIELIKKILPVSRIVVELNKFAFMAMDNPSIQRWQYQKGPLHGYRNIREALENIQNGSCLLCGKSSIEHDHHIVPQSKGGSDTLTNMAGLCENCHTKVHTDVNAFKRLTKIKVGQNKKYHALSVLNQIIPSLLVELIVRFPDQVYVTTGMDTKAYRDENDIMKDHDTDAYCIACSTLKVQSIKDIPKHSFQIKQYRRHNRQMIHLQKERTYRLNGKIVAKNRRKRMDQKEPSLHEWYLETKRQYRRKETRRLQLQMTVIKSTRSYNDPKRTLPGAIFLYEGKRYVMSGQLSGGAYLRAEGFGTKNFPVSKTKIQCQNRGLVYVN

SEQ ID NO: 18112 - protein, 417 aa, unidentified
  REGION 1..417: note = Human gut metagenome
MPCSPAKARLLLKEKKAIVKRRTPFTIQFTIATGEARQPVTLGVDSGYKHIGLSATTEKDELYASQVELRQDITDLLSARLALRRSRRSRKTRYRAPRFDNRVASKRKGWLAPSVENRIAAHMSRVEAVMRVLPVTAITVETAAFDTQLLKNPDIAGEAYQQGEQLGFWNVREYVLFRDGHVCQHCRGKSKDPILNVHHIESRRTGGDAPNNLITLCETCHKAFHRGEIKLKVKRGKSFKAETFMGIMRWTLFERLKKAHPELRVRNTYGYLTKHKRISHGIAKSHCADAYCIADNLGAKRLEGFFFQKQTRKHNRQIHKLSILKGGLRKKNQAPYEVKGFRLFDKVICKGEEAFIFGRRTSGSFDVRRLDGTRISAGINYKKLRLLEPRTTYLTEFRKEAALPHLHECRGFRAEFL

SEQ ID NO: 18113 - protein, 413 aa, unidentified; identical to SEQ ID NO: 9873
  REGION 1..413: note = Human gut metagenome

SEQ ID NO: 18114 - protein, 431 aa, unidentified; identical to SEQ ID NO: 2952
  REGION 1..431: note = Human gut metagenome

SEQ ID NO: 18115 - protein, 414 aa, unidentified; identical to SEQ ID NO: 2588
  REGION 1..414: note = Human gut metagenome

SEQ ID NO: 18116 - protein, 442 aa, unidentified
  REGION 1..442: note = Human gut metagenome
MVTVQQSTHHLPFGRVFIRRNLFMVYVISQDSKPLMPCSNPIARLLLKQGKAKVKRREPFTIKLTYETTNYTQDLTLGVDTGSGTIGAAVSKDNGDIVYMSEVVVRNDITDKMTQRAKYRRNRRNRKTRYRKARWLNRASSIKKDRFSPTMQSKLHSHVREIEYIQSILPITEMVFETGQFDMHLMKNPSLANPKVRPWGYQKGTNYGFENTKAMVLNRDNYTCQCCKGKHKDSKLEVHHIVFRSQGGSDEESNLITLCHTCHKDLHSGKINLKLSGKVKGNLKYATQMNSIRKQLFRFYPNAIETFGYVTKANRLHLGVDKEHYYDACTIATQGNAFNVKSDLYKKKCVSDGDFQKTKGIRSEQPIVTDKICGFRKFDKVRYFGKDYFIKGRMSTGYAILMDIDGNKIDFSTMPRGYKTPKLSNCKRITARSTVMTQVKVV

SEQ ID NO: 18117 - protein, 406 aa, unidentified; identical to SEQ ID NO: 6897
  REGION 1..406: note = Human gut metagenome

SEQ ID NO: 18118 - protein, 460 aa, unidentified; identical to SEQ ID NO: 7594
  REGION 1..460: note = Human gut metagenome

SEQ ID NO: 18119 - protein, 464 aa, unidentified; identical to SEQ ID NO: 6574
  REGION 1..464: note = Human gut metagenome

SEQ ID NO: 18120 - protein, 423 aa, Moorena sp.; identical to SEQ ID NO: 11977

SEQ ID NO: 18121 - protein, 477 aa, unidentified; identical to SEQ ID NO: 3241
  REGION 1..477: note = Human gut metagenome

SEQ ID NO: 18122 - protein, 411 aa, unidentified; identical to SEQ ID NO: 3277
  REGION 1..411: note = Human gut metagenome

SEQ ID NO: 18123 - protein, 440 aa, Fervidobacterium sp.; identical to SEQ ID NO: 4293

SEQ ID NO: 18124 - protein, 414 aa, unidentified
  REGION 1..414: note = Human gut metagenome
MPCSPAKARLLLKEKKAIVKRRTPFTIQLTIATGETKQPVGLGVDAGYKHVGLSASTEKAELYASEVELRKDITDLLSARRALRRARRNRKTRYRAPRFNNRIRTKRKGWLAPSVENRINAHLSRIEAVLRLLPVTKITVETASFDMLLLKNPDIAGKEYQEGEQLGFWNVREYVLFRDGHVCQHCYGRSKDPVLNVHHLESRRTGGDSPGNLITLCETCHEALHRGEIALKTKRGHSFRAEAFMGMMRWEVLNRLKASHSELEVNNTYGYRTKHARIVNGIDKSHCADAFCIAGNLGAERLCEFFFQKQTRRNNRQIHKLSILKGGIRKRNQAPFEIKGFRLFDKVACKGEESFIFGRRSSGYFDVRKLDGTRISAGISYKKLRLLEKRRTYLTEIRKEEALPPLPEGRGLRA

SEQ ID NO: 18125 - protein, 476 aa, unidentified; identical to SEQ ID NO: 3164
  REGION 1..476: note = Human gut metagenome

SEQ ID NO: 18126 - protein, 419 aa, unidentified; identical to SEQ ID NO: 4877
  REGION 1..419: note = Human gut metagenome

SEQ ID NO: 18127 - protein, 557 aa, Blautia sp.; identical to SEQ ID NO: 7395

SEQ ID NO: 18128 - protein, 506 aa, Halomonas sp.; identical to SEQ ID NO: 8416

SEQ ID NO: 18129 - protein, 421 aa, unidentified
  REGION 1..421: note = Human gut metagenome
MRGQPLMPCSPAKARHLLRDKKAVVKRRTPFTIQLTIATGETKQDVTLGVDAGAKHIGLSASTEKEEVFASEVELRQDITELLAARRACRRARRHRKTRYRAPRFLNRVHSKHKGWLAPSAENRIQAHMSRIDAICGLLPVTKIVIETASFDIQKIKNPDVEGTDYQQGDQLGFWNVREYVLFRDGHACQHCRGRSKDKILNVHHIESRKTGGDAPNNLITLCETCHKAYHAGKIKLKVKRGQSFKAETFMGIMRWTLLDRVRKTHPKLPVENTYGYLTKNTRITLGLRKTDCIDAYCIAGNLNARRRGVFLYQRQVRKHNRQIHRCTVLSKTLKDGTKVGYRKLNQTPYLVKNFRLFDKVRCLGQTGFIFGRRSSGSFDVRRLDRVKLSSNISYKKLTLLEKRRTFLTELRKEDGASSPV

SEQ ID NO: 18130 - protein, 422 aa, unidentified; identical to SEQ ID NO: 5333
  REGION 1..422: note = Human gut metagenome

SEQ ID NO: 18131 - protein, 447 aa, unidentified; identical to SEQ ID NO: 5316
  REGION 1..447: note = Human gut metagenome

SEQ ID NO: 18132 - protein, 415 aa, unidentified
  REGION 1..415: note = Human gut metagenome
MVYVLANDGQPLMPTERHGKVCRMLKSGIAKVVKKCPFTIQLQYESERNVQPVALGIDAGSKHVGVSATTKAKVLYESDVELRDDIVKLLATRRQLRRRRRSRKTRYRPARFDNRRRKEGWLAPSIRQKIESHLTVVANACKILPINQIIVETASFDIQKIKDPEIQGIEYQQGEQMDFWNIREYVLFRDGHTCQCCKGKSKDKVLNVHHIESRKTGGNAPNNLITLCETCHKGYHNGTVTLPKNIKRGMKFKDAAFMGIMRWTFYNTLKEQYEPDIPVSMTYGYLTKNTRIEHGLPKEHYIDARCISGNPDAVSDGTYYYQKKVRCHNRQIHKQTILKGGIRKSNQAEYLVKGYRLFDKVRYQGREYFIFGRRKSGFFDIRTLSGEKVNKGSISVKKLTFADTRKNYLIERRTV

SEQ ID NO: 18133 - protein, 442 aa, unidentified; identical to SEQ ID NO: 7529
  REGION 1..442: note = Human gut metagenome

SEQ ID NO: 18134 - protein, 415 aa, unidentified
  REGION 1..415: note = Wastewater metagenome
MSNFVFLIDANKKPMNPIHPAHARELMKKGKAAVFRRFPFTLIMKRVVDKIVTYPLSLRIDPGSKFTGISLVNNRNEVIWGMELQHRGAAIKDALETRKGVRRGRRARHTRYRQARFLNRKRPNGWLAPSLMHRVLTIKTWVKRLIKIAPITEIRQELVRFDLQQLENPEISGVEYQQGELLGYEVREYLLNKWNRKCTYCEIKDVPLQVEHIQPKASGGSNRISNLCLACEKCNQKKGALDVKFFLAHKPELLKKIQLQAKRPLKDAAAVNSTRWVLFNTLKLTGLPVLTGSGGLTKFNRCRLELPKTHWIDSACVGVVNVLKILTTKILSVKATGKGTRRLCRINKFGFPCSNPRQTYQHGWQTGDIATGKGVTGRIVVQSATRLEIRVDGKRIGGKLGDFKLLHSKDSYLYA

SEQ ID NO: 18135 - protein, 447 aa, unidentified; identical to SEQ ID NO: 5316
  REGION 1..447: note = Human gut metagenome

SEQ ID NO: 18136 - protein, 453 aa, unidentified
  REGION 1..453: note = Human gut metagenome
CVCVLSNNGERLMPTFRLGKVRRLLKDGKAKIVKHHPFTIQLLYDSKTNKQPIEICEDVGYNYIGISVKSESHEYVSAQYDTLQDEKEHHDDCRKMRRARRNRLRYRKPRFDNRKRSEGWLAPSLEHKKQLNISLVERYVSVIPITHATVEVGSFDTMLLQAIQKGETKPEGADYQEGPRYNLATLREAVFYRDNYTCQVCGRKITDGAILHMHHMFYWKGRHGYKLDELVTACEKCHTPANHQKGGKLFGFGEDKEFADLSGAAFMNAVRWQIVNALHTTYSKEFVTITYGAMTKEKRIALQLEKSHNNDAYAMGDFHPVHRCGFRHYQKRRRNNRVLEKFYDATYIDARTGNKAKGKELFNGRISRNHKKDSENLHKYRSEKVSKGRRSIRKRRYAIQPYDTVRLKGKTYITSGCHNKGTRLLIPVNGKSKSVTISKVQVVCHAGPWIQII

SEQ ID NO: 18137 - protein, 515 aa, unidentified
  REGION 1..515: note = Human gut metagenome
LTALEELLSKTEYIYVIGTDGRPQMPTKRKRHVLKLLNTGKARIAEKVPFTIQLKYDNIPVLQPIILAADPGRTNIGVTALSPFGDLMFAAVIETRNKEIKKLMADRKSHRQASRRGERKARQRLAKKYGTMIKAGMIMRKLPQYAADKFVTCNVIRNTEARFCNRKRCSDWLTPTVNHLAQTHLNVIKKISRYLPVTDIAIEVNRFAFMQMENPNASGVDFQNGPLRGFDDVKAAIREQQNGKCLMCKNDIEHFHHMVPLSKGGSDTIQNQVGLCPKCHAKAHTEQTFKKKLKDKKSGLLKKYGALSALNQSIPFICKDLLAEYGKEHVHFCTGKETSLIRTSLGYEKTKDNQMHEVDAYCIGLASLELEDIKLQSFVNTYKIKQFRRQDRSIIHHQTERSYYLDEQKIVTNRKPRFEQTGNALSDWYKKQVKACDKAKADKMLNTLKVKKSARSYNSEGRLMPGAVFSYNGQRHVMSGQLTGGRYLRAYGDTKTNYPASKCNISRSNEGLVFI

SEQ ID NO: 18138 - protein, 431 aa, unidentified
  REGION 1..431: note = Human gut metagenome
MDAWDIIVVLNKRGKPLMPCSPAKARLLLKEKKAIVKRRTPFTIQLTIATGETKQPVSLGVDAGYKHVGLSASTEKAELYASEVELRQDITDLLSARRALRQSRRNRKTRYRAPRFDNRIRTKRKGWLAPSVENRINAHLSRIEAVLRLLPVTKITVETASFDMQLLKNPDISGKEYQEGEQLGFWNVREYVLFRDGHVCQHCHGRSKDPVLNVHHLESRRTGGDSPGNLITLCETCHKALHRGEIKLKAKRGHSFRAQAFMGIMRWEVLNRLKASHPELEVNNTYGYRTKHARIANDIAKSHCADAFCIAGNLGAERLGEFFFQKQTRRNNRQIHKLSILKGGIRKRNQAPFEVKGFRLFDKVACQGEEGFIFGRRSSGFFDVRKLDGTRISAGISCKKLHLLEKRRTYLTEIRKEEALPPLPEGRGLRA

SEQ ID NO: 18139 - protein, 460 aa, unidentified
  REGION 1..460: note = Human gut metagenome
MVAVVDLFGKPLMPTNEYRARKLLKRKKAKIFCYRPFTIQLTERKDTEIQPIELCMDTGYIHIGISAKSERHEYLGMQIDTLTDEKLKHDDKRQYRRQRRNRKRYRAPRFDNRRRKEGWIAPSLEHKKEIHIDAIQRICKVMPITDITLEMGNFDTQVLKAVEEGKPLPQGSDYQYGERYGIATLREAVFLRDGYKCQCCEKTVKDGAILHVHHIKYRSQGGTNRMSNLITVCDKCHTPQNHKPGGKLWNWKPKLAEFKGASYMTSIRWMLYNEVTAMLPNRSIHITYGAKTKESRRELDIEKSHVNDAYVMGLFHPKHRTQPVYFKKKRRNNRVLERFYDAKYIDGRDGKKRSGQELFNGRISRNHKKDSENLHLYRKQKVTKGKRSIRNRHYPIQLHDILLYQKKKYETAGCHNNGSRAILLPEKKSVALKQLTMYQYAGGYYRVPYESNKKEERTGS

SEQ ID NO: 18140 - protein, 503 aa, Streptomyces sp.; identical to SEQ ID NO: 9513

SEQ ID NO: 18141 - protein, 428 aa, unidentified
  REGION 1..428: note = uncultured Mitsuokella sp.
MTSARRKILLKRKVTEMSKSYAFVLDASKKQLDPTIEQNAWRLVRQNKATLVSRFPMVIQLHKTIEDPNADEVRCGIDDGANHVGIALIQKCQTRNKVLFKGTIEQRKDVKKLLELRRVYRRCHRYHKWHRPERFNNRASSKMSGRLPPSILQRKQAVLRVIDRLRQWVRIDGYWLEDVKIDIRALTDGYRPYRWQYQKSNHLDNNLRLAAIYRDGCRCMECGKTKTRFEVHHITPRKAGGADTISNLITLCPACHARTFGREGQFADRYYAMIGSKGNIAGLKDAESVMQGKHWLHEQLRIRGTLALTTGTDTANKREDWDIPKTHADDAICITNLEPESIDVPSWTIRPMRRKSKASAGETCGFRHRDYVTYTYRNGETHTGYVTAIYPELHALNFQSPIKHCKKANALKCRLVWRFNKIYWFKCA

SEQ ID NO: 18142 - protein, 264 aa, unidentified
  REGION 1..264: note = Human gut metagenome
IADGKPVPQGEDYQKGEMYGHYNVRQYVLWRDGYTCQCCGAHATQKKEVRLHVHHLESRRVGGDAPDNLVTLCTACHDKLHKGIIMAADIKKRKRRSTRDATFMGIMRMTLLRRLREQLPVPVVETRGYITKATRENLLVLPKSHTNDALAIAHGPQGFRAEYLPNIRQADRLYTIRPVRHHNRQLHKATILKGGVRKANQAEKYICGFRLYDKVLYNGIECFVWGRRNSGSFLLRQLNGEKVKDGVSYKHLKLLERSQSYLVA

SEQ ID NO: 18143 - protein, 426 aa, Parasutterella sp.; identical to SEQ ID NO: 3045

SEQ ID NO: 18144 - protein, 414 aa, unidentified
  REGION 1..414: note = Human gut metagenome
MPCSPAKARHLLKEKKAVVVRRTPFTIQLTIATGESKQPVSLGVDAGYKYVGLSASTEKAELYASEVELRQDITDLLSARRSLRQSRRNRKTRYRAPRFDNRIRTKRKGWLAPSVENRINAHLSRIEAVLRLLPVTKITVEMASFDMQLLKDPDISGKEYQEGEQLGFWNVREYVLFRDGHVCQHCHGRSKDPVLNVHHLESRRTGGDSPGNLITLCETCHKALHHGEITLMAKRGQSFRAEAFMGIMRREVLNRLKASHTELEVINTYGYRTKHARIANGIAKSHCADAFCIAGNLGAERLGEFLFQKQTRRNNRQIHKLSILKGGLRKRNQAPFEVKGFRLFDKVACRGEEGFIFGRRSSGYFDVRKLNGTHISAGISYKKLRLLEKRQSYLTEIRKEEALPPLPEGRGLRA

SEQ ID NO: 18145 - protein, 431 aa, unidentified
  REGION 1..431: note = Human gut metagenome
MPNKVYVINKHGRPLMPCSPAKARHLLDAGKAKVKKRTPFTIQLLFGSTGYTQEVILGVDAGSKTIGLSASAETEELLSAEVKPRNDVVDLLSTRREFRRARRNRKTRYRKPRFDNRVRSKHKGWLAPSVEVKIQEHITAIRRVCGILPVSKVVVETAEFDLQLLKAIADGKPVPQGEDYQKGEMYGHYNVRQYVLWRDDYTCQCCGAHATKKKEVRLHVHHLESRKVGGDAPDNQVTLCESCHEKLHKGLIAEKDFKKRKRRSTRDATFMGIMRKTLMQMLCSELPIPVVKTRGYITKATREKLLVLPKSHTNDALAIAQGKRGFNVGYLPEIAQIDKIYTIRPVRHHNRQLHKATILKGGIRKSNQTEKYVFGYRLFDKVQFNGQDCFIWGRRTTGIFTIKTINGKMIKDGISFKKLKPVEKSTSYLIA

SEQ ID NO: 18146 - protein, 418 aa, unidentified; identical to SEQ ID NO: 2425
  REGION 1..418: note = Human gut metagenome

SEQ ID NO: 18147 - protein, 431 aa, unidentified; identical to SEQ ID NO: 17947
  REGION 1..431: note = Human gut metagenome

SEQ ID NO: 18148 - protein, 481 aa, unidentified; identical to SEQ ID NO: 4548
  REGION 1..481: note = Human gut metagenome

SEQ ID NO: 18149 - protein, 297 aa, unidentified
  REGION 1..297: note = Human gut metagenome
HITAIKRICQILPISEIHVEISEFDLQRLKAMEEGRTLPVGTDYQLGEQYDFYNTRQYVLHRDGYTCQCCGTHDNNIKLHVHHIESRQTGGNAPSNLITLCEHCHKALYKGKFELPKGKKRGKTYRDATFMGIMRKTLLERLKKEIDVPVAGTYGYITKYWRERAGLEKSHINDAICISKYPYVKPLDTYYLTKVVRNHNRQIHKSNFSKGGIRKRNQAPYLIKGFRLFDKVLYQGKEYFIFGRRATGYFDIRTLDGTKVNKDSISYKKLRIQDTAKAYLKEARAIPHMNKFTCVLA

SEQ ID NO: 18150 - protein, 419 aa, unidentified; identical to SEQ ID NO: 4877
  REGION 1..419: note = Human gut metagenome

SEQ ID NO: 18151 - protein, 406 aa, unidentified; identical to SEQ ID NO: 2703
  REGION 1..406: note = Human gut metagenome

SEQ ID NO: 18152 - protein, 410 aa, Geobacillus sp.; identical to SEQ ID NO: 4122

SEQ ID NO: 18153 - protein, 512 aa, unidentified; identical to SEQ ID NO: 16896
  REGION 1..512: note = Human gut metagenome

SEQ ID NO: 18154 - protein, 461 aa, Parasutterella sp.; identical to SEQ ID NO: 3646

SEQ ID NO: 18155 - protein, 406 aa, unidentified
  REGION 1..406: note = Human gut metagenome
VVYVQDIDGNPLMPTTRHGKVRRLLKAKKATVVNLCPFTIRLLYDTTGYKQEITLGVDAGTKHVGLSATTKSKELYASEVILRSDVVDLLSTRRELRRARRYRLRYRKPRFNNRIKSKKDKWIAPSIRQKIDSYIRIIGFVYSILPVSKLIIEVAQFDTQKIKNPEISGKEYQEGEQLGFWNVREYVLARDGHKCQHCKGKSKDPVLNVHHIESRKTGGDSPSNLITLCETCHKEFHKGKIKLKVKRSASLRDAAVMGIMKWELYDELKSLYPNIKMTFGYITKHDRINHGIEKSHVSDAFVISRNFDSYRLGYYYKQKLVRRHNRQIHKMKILKGGIKKPNQAPFKVFGFRLFDKVRYQDNVYFVYGRRTSGCFNIRDINGNNNKNPTFKKLTYISHGLISVETV

SEQ ID NO: 18156 - protein, 419 aa, Anoxybacillus sp.; identical to SEQ ID NO: 5328

SEQ ID NO: 18157 - protein, 462 aa, unidentified; identical to SEQ ID NO: 2823
  REGION 1..462: note = Human gut metagenome

SEQ ID NO: 18158 - protein, 489 aa, unidentified; identical to SEQ ID NO: 15226
  REGION 1..489: note = uncultured beta proteobacterium

SEQ ID NO: 18159 - protein, 424 aa, Moorena sp.
MQPAKQQNWVFQINGDKQPLDMINPGRCRELQNRGKLASFRRFPYVVIQQQTIENPQTKEYILKIDPGSQWTGFAIQCGNDILFRAELNHRGEAIKFDLVKRAWFRRGRRSRNLRYRKKRLNRAKPEGWLAPSIRHRVLTVETWIKRFMRYCPIAWIEIEQVRFDTQKLANPEIDGVEYQQGELQGYEVREYLLQKWGRKCDYCGTENVPLEVEHIQSKSKGGSSRIGNLTLACHVCNVKKGNLDVRDFLAKSPDILNQVLENSTKPLKDAAAVNSTRYAIVKMAKSICENVKCSSGARTKMNRVRQGLEKTHSLDAACVGESGASIRVLTDRPLLITCKGHGSRQSIRVNASGFPAVKNAKTVFTHIAAGDVVRFTIGKDRKKAQAGTYTARVKTPTPKGFEVLIDGARISLSTMSNVVFVHR

SEQ ID NO: 18160 - protein, 454 aa, unidentified; identical to SEQ ID NO: 8101
  REGION 1..454: note = uncultured beta proteobacterium

SEQ ID NO: 18161 - protein, 279 aa, unidentified
  REGION 1..279: note = Human gut metagenome
VVVETAEFDLQLLKAIADGKPVPQGEDYQKGEMYGHYNVRQYVLWRDDYTCQCCGAHATKKKEVRLHVHHLESRKVGGDAPDNQVTLCESCHEKLHKGLIAEKDFKKRKRKSTRDATFMGIMRKTLMQRLCSELPIPVVKTRGYITKATREKLLVLPKSHTNDALAIAQGKRGFNVGYLPEIAQIDKIYTIRPVRHHNRQLHKATILKGGIRKSNQTEKYVFGYRLFDKVQFNGQDCFIFGRRTSGYFVVKTIDGKVIHNSASFKKLKLVERASNYLIA

SEQ ID NO: 18162 - protein, 413 aa, unidentified; identical to SEQ ID NO: 3476
  REGION 1..413: note = Human gut metagenome

SEQ ID NO: 18163 - protein, 406 aa, unidentified
  REGION 1..406: note = Human gut metagenome
MVYIQDIDGKPMMPTTRHGKVRRLLKSKKAIVVNLCPFTIRLLYDTTGYKQEITLGVDAGTKHVGLSVTTKSKELYASEVILRSDVVDLLSTRRELRRARRYRLRYRKPRFNNRVKYKKDKWIAPSIRQKIDSHIRIIGFVYSILPVSKLIIEVAQFDTQKIKNPEISGKEYQEGEQLGFWNIREYILARDGHKCQHCKGKSKDLILNIHHIESRKTGGDSPSNLITLCEICHKEFHKGNIKLKVKRGKSLRDAAVMGIMKWELYEELKSLYPNVKMTFGYITKHDRIKHGIEKSHVSDAFVISRNFDSYRLGYYYKRKLVRRHNRQIHKMKILKGGIKKPNQAPFEVFGFRLFDKVRYQDNVYFVYGRRTSGYFNIRDINGENKKDVSYKKFKYISHGLISVESG

SEQ ID NO: 18164 - protein, 518 aa, unidentified; identical to SEQ ID NO: 7282
  REGION 1..518: note = Human gut metagenome

SEQ ID NO: 18165 - protein, 420 aa, unidentified
  REGION 1..420: note = Human gut metagenome
MQYVYVLNKHSEPLMPCSPGKARLLLKRQKACVVKRTPFTIKLMHGSAGYKQPITLGVDAGSKHVGLSASTEKRELYSEEFTPRNDVVELLSTRRQNRCSRRNRKTRYRTPRFNNRVHSKHKSWLAPSVEVKIQEHITVIKRICRILPVTLVRVETAEFDTQRLKAMLAGKPLPVGTDYQLGEMYDEYNVRQYVLKRDNYTCQCCGAHTTTKKAVKLHVHHLESRKVGGNAPSNLITLCVTCHNNLHKGKITLDGKKRGKTLRDAAFMGIMRNTLLTRLRNELNIPVQNTYGYITKLLREQNDIKKSHVNDARCISKHPLAEPCSVCYRTKAIRHHNRQIHKAKILKGGIRKANQAPYIVKGFRLWDKVLYDGQECFISGRRSSGYFALRKLDGTAITNSISFKKLWLLEPATNYLIERM

SEQ ID NO: 18166 - protein, 424 aa, Kosmotoga sp.
LVYVISKNGKPLMPTKRHGKVRKLLKQGLAKVVRREPFTIQLLYDATTYTQPVTVGIDIGSKVVGISAITEKQELLSMEVELRQNIKKLLLKRREYRRSRRHRKRRYRKPRFLNRRKKEGWLAPSVQCKVDAHVKLINLIAKTLPVTKIVVEIAPFDTHKIINPEVESVDYQNGVQKGFWDVREYCLWRAGYKSELSGKKGILEVHHIMPRSKGGTDNPSNLIVLTSEEHEGIHKGELKIPKSKLKKVKILKDATHVSTIGWYIVNRLKELFCVEVTYGSTTKARRSKFGIEKSHKNDAFVIAGGAFQERICEWYFGKYFRRQNRSLHKANPIKGGIRKLNTVKEVKGFKRFDKVKYNGQIGIIYGLRNSGYFDLRTLSGEKIHSSAKWQNLKLIERARTLILERREQCIPLHLVEGGVSCAGF

SEQ ID NO: 18167 - protein, 414 aa, unidentified
  REGION 1..414: note = Human gut metagenome
MPCSPAKARLLLKEKKAIVKRRTPFTIQLTIATGETKQPVSLGVDAGYKHVGLSASTEKAELYASEVELRQDITDLLSARRALRQSRRNRKTRYRAPRFDNRIRTKRKGWLAPSVENRINAHLSRIEAVLRLLPVTKITVETASFDLQLLKNPDISGKEYQEGEQLGFWNVREYVLFRDGHVCHHCYGRSKDPVLNVHHLESRRTGGDSPGNLITLCETCHKALHRGEITLKAKRGQSFRAEAFMGIMRWEVHNRLRALHPGIEVSNTYGYRTKHARIANGIAKSHCADAFCIAGNLGAERLCEFFFQKQTRRNNRQIHKLSILKGGIRKRNQAPFEVNGFRLFDKVACQGEEGFIFGRRSSGFFDVRKLDGTRISAGISCKKLHLLEKRRTYLTEIRKEEALPPLPEGRGLRA

SEQ ID NO: 18168 - protein, 431 aa, unidentified
  REGION 1..431: note = Human gut metagenome
MPNKVYVINKHGRPLMPCSPAKARHLLDEGKAKIKKRTPFTIQLVYGSSGYTQEVILGVDAGSKTIGMSASTKKEEVFAADVTPRNDVVDLMSTRREFRRARRNRKTRYRKPRFDNRVRSKHKGWLAPSVEVKIQEHITAIRRVCGILPVSKVVVETAEFDLHLLKAIADGKPVPQGEDYQKGEMYGHYNVRQYVLWRDDYTCQCCGAHATKKKEVRLHVHHLESRKVGGDAPDNQVTLCESCHEKLHKGLIAEKDFKKRKRRSTRDATFMGIMRKTLMQRLCSELPIPVIETRGYITKATREKLLVLPKSHTNDALAIAQGKQGFNVGYLPGIVQINKIYTIRPVRHHNRQLHKATILKGGIRKSNQVGKYVFGYCLFDKVQFNGQDCFIWGRRTTGIFTIKTINGKMIKDGISFKKLKPVEKSTSYLIA

SEQ ID NO: 18169 - protein, 427 aa, Moorena sp.
MSIQPNYVFVLDANRKPLTPCKPSLARKLLKVGKCKVFRLYPFTIILKKVVSQDPQPVTLKIDPGSKVTGIAILRDSELMWVAELTHRGQAIKALLESRRSLRRSRRNRHTRYRQARFLNRTRPEGWLAPSLRHRVETTLTWVNKLSRLAPVHTIFQELVRFDLPKMETPEISGIEYQQGKLQGYEVREYLLEKWERRCAYCGVENVPLQVEHIHPKSSGGTNRVSNLCLACEPCNTKKGTKDIKIFLARKPDILKKILAQAKRPLKDAAAVNSTRWALFNRLKETGKVIVTGSGGLTKFNRLRLKLPKTHFFDAVCVGDAPNISVLANQPLNIKATGHGSRQMCRTDKFGFPSRYVPRLKFVKGFQTGDIIKAVVTSGKKIGTYTGRVAVRSSGSFNVSAVQGLIQGINYKCCFLIHQKDGYNYGF

SEQ ID NO: 18170 - protein, 429 aa, Parasutterella sp.; identical to SEQ ID NO: 3656

SEQ ID NO: 18171 - protein, 290 aa, unidentified
  REGION 1..290: note = metagenome
MPCSPAKARLLLKEKKAIVKRRTPFTIQLTIATGETKQPVGLGVDAGYKHVGLSASTDKAELYASQVELRQDITDLLSARRALRRARRNRKTRYRAPRFNNRIRTKRKGWLAPSVENRINAHLSRIETVLRMLPVTKITVETASFDMQLLKDPDISGKEYQEGEQLGFWNVRECVLFRDGHVCQHCHGRLKDPVLNVHHLKSRRTGGDSPGNLITLCETCHKALHRGEITLKAKRGQSFRAETFMGIMRREVLDRLKASHPKLEVQNTYGYWTKHARMLSASPAILAPKG

SEQ ID NO: 18172 - protein, 431 aa, unidentified; identical to SEQ ID NO: 4463
  REGION 1..431: note = Human gut metagenome

SEQ ID NO: 18173 - protein, 419 aa, unidentified; identical to SEQ ID NO: 3867
  REGION 1..419: note = Human gut metagenome

SEQ ID NO: 18174 - protein, 420 aa, unidentified; identical to SEQ ID NO: 3288
  REGION 1..420: note = Human gut metagenome

SEQ ID NO: 18175 - protein, 408 aa, unidentified
  REGION 1..408: note = Human gut metagenome
MVYVQDINGKPMMPTTRYGKVRRLLKDKKAVVVNLCPFTIKLTYVTSDYKQEIVLGVDAGTRHVGLSATTKSKELYSSEVILRNDIVDLLSTRRALRRSRRGRLRYRKPRFNNRIKSKRSGWIAPSVQYKIDAHIRVIDNVCSILPISRIVIEVAQFDTQKINNPEISGKEYQEGDQLGFWNVREYVLARDGHKCQYYKGKSKDKILNVHHIESRKTGGNSPSNLITLCETCHKEYHKGNINLKVKRGKSLRDAAVMGIMKWRLYEGLKSKYDKVSMTFGYVTKYNRIYNNIEKSHVSDAFIISKNFNSIRLGYYYKVRLIRRHNRQIHKQKIPKGGIKRLNQSPFEVFGFRLFDRVMFENSYYFIFGRRKTGRFNIRDIDGKNQRDIMHNKLKLSRCKRFMIQKEMN

SEQ ID NO: 18176 - protein, 480 aa, unidentified
  REGION 1..480: note = Human gut metagenome
LYTKPLDNIGEGSLPPSGEINLKGMTFMVYVKSIDGKVLMPTSNAKARKLLKQKKAKVVSLRPFVVKLTYKTKTEYIQKLNLGVDSGYSNIGFSVIDAKQEYIAGEVKLLEGMKKRLLEKASYRRIRRSRLRYRKARWNNRVKSKKKGWLAPSLKHKLDTHIKFIDYLKNILPIEKITIEVANFDIQKMKDDLISGIDYQNGDMFGFWNVREFVLHRDGHKCQNPNCKHKDKKEQILKVHHIRYRSEGGSDRPENLITLCSKCHIPANHKKGKFLYDWCVNGKKVRGFKDATFMSMIRWYLVNELKSKHNNVSITYGYITKNHRIQNSIEKSHLNDAFAITKGTNQARTKDRFLVIQDRLKNRSLEKFYDSKIIDIRTEKKVSGGDLNCGRSTRNKNLNTENLRKYRGVKISKGQRRIRKQKYFYQSNDLVKYDGKVYTVKGTQNEGKYIALKEIKKVPKVELLIPYVFKKGLNWSYGLC

SEQ ID NO: 18177 - protein, 414 aa, unidentified; identical to SEQ ID NO: 2588
  REGION 1..414: note = Human gut metagenome

SEQ ID NO: 18178 - protein, 440 aa, Lactobacillus sp.; identical to SEQ ID NO: 5150

SEQ ID NO: 18179 - protein, 420 aa, unidentified; identical to SEQ ID NO: 16129
  REGION 1..420: note = Human gut metagenome

SEQ ID NO: 18180 - protein, 406 aa, unidentified
  REGION 1..406: note = Human gut metagenome
MRGKPLMPCSPAKARHMLKAGKAFVVRRTPFTIKLTIATGETKQDVTLGVDAGARHVGISATTEKEEVFASEVALRQDITGLLADRLAFRRARRNRKTRYRAPRFNNRVRSKHKGWLAPSVENRIQAHMSRIDAVCRLLPVTRIVIETASFDVQKIRNPEVEGTGYQQGDQLGFWNVREYVLFRDGHICQHCRGRSKDPILNVHHLESRKTGGDAPNNLITLCETCHKAYHAGKIKLKVKRGQSFRAEAFMGIMRWTLLNRMRKAHPSLPVENTYGYLTKHKRIALGLPKTHCADAFCIAGNLKALRRGDFLFQQQTRKHNRQIHKCSILKGGVRKLNQAPFLVKGFRLFDKVRIGGQIGFVFGRRVRGTFNIRRLDKTVIGTDINCKKLSLLETRKTFLTELRKE

SEQ ID NO: 18181 - protein, 470 aa, Blautia sp.; identical to SEQ ID NO: 2925

SEQ ID NO: 18182 - protein, 427 aa, unidentified; identical to SEQ ID NO: 6307
  REGION 1..427: note = Human gut metagenome

SEQ ID NO: 18183 - protein, 416 aa, unidentified
  REGION 1..416: note = Human oral metagenome
MVVYVLNQNGQPLMPTVRFGKVRRLLRDRKAKVIRRCPFTIKLLYEPSTDMVQECYCGVDTGSKYIGTAVIGNDKVLYQSQTELRDDIKKKMNRRKGFRRSRRSRKTRYRKPRFLNCKNSKKLNRLPPSIRHKVQAHIDEIEFCKKILPVSYLILEVSQFDTALMKNPTLVDEKVKKWGYQEGFNYGYSCRREAVLHRDGYTCQCCGKKNCRLEVHHIKFRSNGGTDDENNLITLCEGCHKKVHDSVITLDKKPKKMNLKYATHMSIIRSQLLKIYPQAIETFGFVTSENRNHLGLEKAHYIDACVIAGGGLPFELSDMIYYKRRVSKGNYRLTKGIWGGQRLPTGKFYGLRKLDKVEYLGEEYFIYSRNSFGYVTLTDIFGNKIKFNYMPNGYKTPKMSNCKRISARRSSLCKKE

SEQ ID NO: 18184 - protein, 310 aa, Scytonema sp.
MSNYVFLIDQNKTPLNPVHPAQARKLLDSGKAAVFRRYPFVLILKRVIENPNVYPLTLKIDPGSKVTGIVLVTNQGDVIWAMELQHRGQQIKDALEHRRAVRRGRRNRNTRYRQTRFLNRKRPSGWLAPSLRHRVLTTETWVKRLQRFVPIGSIVQELVKFDTQAIQNPEISGTEYQQGTLHGYECREYLLEKWNRQCAYCGVKDVPLEIEHIQSKSKGGSDRISNLCLACHKCNQRKGNKDIKDFLKGKPDVLNRVQKLGLAPLKDAASVNSTRWSLFNTLKSFGLPIITSTGGQTKFNRTRFNLPKAH

SEQ ID NO: 18185 - protein, 387 aa, unidentified
  REGION 1..387: note = Human gut metagenome
LTTLSVSSTTLLNGVDAGSKTIGVSASTKKEELFAANVIPRNDVVDLLSTRREFRRARRNRKTRYRKPRFDNRVRSKHKGWLAPSVEVKIQDHITAIRRVCGILPVSKVVVETAEFDLQLLKAIADGKPVPQGEDYQHGEMYGHYNVRQYVLWRDGYTCQCCGAHATQKKEVRLHVHHLESRRVGGDAPDNLVTLCTACHDKLHKGIIMAADIKKRKRRSTRDATFMGIMRMTLLRRLREQLPVPVVETRGYITKATRENLLVLPKSHTNDALAIAHGPQGFRAEYLPNIRQADRLYTIRPVRHHNRQLHKATILKGGVRKANQAEKYICGFRLYDKVLYNGIECFVWGRRTSGSFLLRQLNGEKVKDGVSYKHLKLLERSQSYLVA

SEQ ID NO: 18186 - protein, 415 aa, unidentified; identical to SEQ ID NO: 3582
  REGION 1..415: note = Human gut metagenome

SEQ ID NO: 18187 - protein, 442 aa, unidentified
  REGION 1..442: note = Human gut metagenome
MGEGLQPDASPRRRNLRVFVLNKRGQPLMPCSPAKARLLLKAKKAVVKRRTPFTIQLALATGETVQSVTLGVKAGSKEIGLSASTDKAEIFASSVQLRTDVLDLLSTRRELRRARRNRKTRYRAPRFNNRIHSKNKGWLAPSIENKINVHLSRVETVRKLLPVSKIVVETAAFDIQKIKNPDIEGTEYQQGDQLGFWNVREYVLFRDGHKCCHCHGKSKETILNVHHLESRKTGGNAPNNLITLCETCHKAYHAGKIVLKQKRGQSFRDATSMGIMRWTFFNRLKAQCLELEVRNIYGYVTKNTRIRCGLVQTKTADAFCIAGNLGAKRLGEYFFQKQTRKHNRQIHKLTILKGGVRKRQQAPYEVKGFRLFDKVRYGSREAFIFGRRSSGFFDVRTLTGHRLSASINCKKLGLLERRKTFLTQLIKEDAIPPATEVAGFLA

SEQ ID NO: 18188 - protein, 527 aa, unidentified
  REGION 1..527: note = Human gut metagenome
MSTCVCVLSNNGERLMPTFRLGKVRRLLKDGKAKIVKHHPFTIQLLYDSKTNTQPIEICEDVGYNYIGISAKSKSHEYVSAQYDTLQDEKEHHDDCRKMRRTRRNRLRYRKPRFDNRKRGEGWLAPSLRHKKELNVNVVKMYCAVMPITYATVEVGSFDTMLVKAIQEGKVIPEGADYQKGPRYNLATLREAVFYRDNYVCKVCGRKATEGAILHMHHMFYWKGRHGNSLDELLTVCEKCHTPANHQKGGKLYGFGEDVKFTDLSGAAFMNTVRWQIVNELYAAFGKPFVTITYGAMTKEKRIALQLEKSHNNDAYAMGEFHPSCRCKFRHYQKRRRNNRVLEKFYDATYIDTRTGNKAKGKELFNGRISRNHKKDSENLHKYRAHKITKGRRSIRSKHYDIQSGDTVLYAGRKCITTGCFNKGKWLRITVGSTAKSVAISKVKLINHVGAWKKRFIHITSYKRIHPRLSLAAVDGVFCFKNNKRLPYNSQSDEEEQIHPSGASALFLLPTNERGVRPWQNPGQQKN

SEQ ID NO: 18189 - protein, 427 aa, Enterococcus sp.; identical to SEQ ID NO: 5630

SEQ ID NO: 18190 - protein, 518 aa, Moorena sp.; identical to SEQ ID NO: 7410

SEQ ID NO: 18191 - protein, 416 aa, Parasutterella sp.; identical to SEQ ID NO: 10114

SEQ ID NO: 18192 - protein, 457 aa, unidentified
  REGION 1..457: note = Human gut metagenome
MDAVAVISASGKPLMPTNPVRARKLIKKGKEVIYKYRPLFTIRLTERTDGDIQTIEYCCDTGYQHIGLSIKSRKHEYVNERRDLLPNETERHNDSRKYRKARRRRKLRHRACRRDNRHDNQICKDGYAPSIRNKRDQHISLYRSYTEILPVERAVFEMGQFDTQVLKAIEKGEPLPQGKDYQHGERYGYATLREAVFARDDYTCICCGKNSFKDKRILCVHHLGFRIGDRTNRLANLATVCTKCHTPKNHQPKGKLYNLKPELKDFKGATFMTMVRWDMLDKLKVVSKDIQVDVTYGAATKEARRDLKIKKSHANDAYCMGSFHPSHRTDLKRYEKCRRNNRVLSKFYDATYIDIRDGKKKKANALGCNRTKRRESRRSEKNERIYRGEKVSKGRIVLRTKRAVIRPGDIVYVGKKKYIVASSKNLGAQLKLADGSLLTTSKVTKIIHCGGWKTVTL

SEQ ID NO: 18193 - protein, 512 aa, unidentified
  REGION 1..512: note = Human gut metagenome
MSTVYVLNKDGKPLMPTTRCGHVRHLLKEQKARVVTSKPFTIQLLYETDNVVQPLYLGIDPGRTNIGVAVVKANGTAVFTAHLETRNREIPKLMKKRKDSRRTRRTNGRRCRRQRRAKANGTISKKCVKQDTAQNGSVSKRAKKIGVIKRHLPGCEKEVLCIGIKNKEARFNNRTRPEGWLTPTANQLLQTHINLVKKIQKFLPISDVVLEVNKFAFMQLDNPNIQKWQYQQGPLYQKANLEEAVSEMQEHHCLFCKKPIAHYHHVVPQSENGSDTIGNIVGLCTKHHDLVHKDTEWQKKLAKKKTGLNKKYGALSVLNQIIPTLTKELSSLFPKHFFATNGKSTYDYRAAHGVSKDHWLDAYCIACSVLADDVCDNNINSHVPYELKQFRRHDRRALHKENMSRVYTLNGKSVATNRHKATEQTTDSLEEFRQRQPNDVCKLKVKEHHPEYRNPKRNFPGCVFLVGKHTHVMQGTSGSHNGKADGYYDTNGNSYSSGECKFVAKNGGIVFA

SEQ ID NO: 18194 - protein, 404 aa, unidentified
  REGION 1..404: note = Clostridiaceae bacterium UBA5742
MPTNRHGKVKHLLKDGKAKVVRRTPFTIQLLYDSPEYTQPITLGVDAGSKVVGLSATTEKKELFVSEVTLRDDIPELLSTRRQNRRTRRNHLRYRMARFLNRTASKKEGWLAPSVKHKVDSHLKVIENVHRILPVSRIVIETASFDIQKIRNPEISGREYQQGEQLGFWNTREYVLWRDNHECQHCHGKSKDRVLNVHHKESRKTGGDSPGNLVTLCETCHKSHHAGRIKLNLTPNKSYRDASFMGIMRWYVYNSLKELYPEVSMTFGYITKNNRINNNIEKAHSADAYCISGNMNAKRIDEIYNQAFKRKHNRQIHKGNFLKGGKKKLNQSAYEVKGFRLFDHVRYRDKECFIFGRRTSGYFDLRKLDGSVVHRSASFKELTLLKRQNTILIERKGRNGVLLS

SEQ ID NO: 18195 - protein, 442 aa, unidentified; identical to SEQ ID NO: 4522
  REGION 1..442: note = Human gut metagenome

SEQ ID NO: 18196 - protein, 358 aa, Oscillibacter sp.
KEELLSAEVKPRNDVVDLLSTRREFRRAQRNRKTRYRKPRFDNRVRSKHKGWLAPSVEVKIQEHITSIKRVCRILPVSKVVIETAEFDLQLLKAIEEGKPVPQGEDYQQGEMYGHYNVRQYVLWRDGYTCQCCGAHATKKKEVRLHVHHLESRKVDGDAPDNQVTLCESCHEKLHKGLIAEKDFKKRKRKSTRDATFMGIMRKTLMQRLCSELPIPVIETRGYITKATREKLLVLPKSHTNDALAIAQGKQGFNVGYLPGIVQINKIYTIRPVRHHNRQLHKATILKGGIRKSNQTEKYVFGYCLFDKVQFNGQDCFIWGRRTTGIFTIKTINGKMIKDGISFKKLKLAEKSTSYLIA

SEQ ID NO: 18197 - protein, 447 aa, unidentified
  REGION 1..447: note = Human gut metagenome
VPAYRIKHITKKEAPYMVYVLDIDGQPLMPTSRHRKVRKLLNSHLAKVVKRCPFTIQLLYQSTKETQPVSLGVDAGSRHIGLAATTEQKVVYQEELVPRNDVVKLLSARRALRSSRRSRKTRYRKPRFNNRVHSKHKGWLAPSVEVKIQEHITAIKRICQILPISEIHVETAEFDLQRLKAMDEGRTLPVGTDYQLGEQYDFYNTRQYVLHRDEYTCQCCGTHDNNVKLHVHHIESRQTGGDAPNNLITLCEHCHKLLHAGKTILPKGKKRGKSYRDATFMGIMRKTLLERLKKEIDVPVAGTYGYITKYWRERAGLEKSHINDAICISKHPYARPLETYYLTKAVRHHNRQIHKTKFSKGVIRKRNQAPYLVKGFRLFDKVLYQGESYFIFGRRITGYFDIRTLDGTKVNKGSTSYKKLRIQDTAEAYLTEVRAIPHMNEFTCVLA

SEQ ID NO: 18198 - protein, 425 aa, Anaerostipes sp.; identical to SEQ ID NO: 5668

SEQ ID NO: 18199 - protein, 431 aa, unidentified
  REGION 1..431: note = Human gut metagenome
MPNKVYVINKHGRPLMPCSPAKARHLLDAGKAKVKKRTPFTIQLVYGSSGYTQEVILGVDAGSKTIGMSASTTKEELLSAEVKPRNDVVDLLSTRREFRRARRNRKTRYRKPRFDNRVRSKHKGWLAPSVEVKIQEHITSIKRVCRILPVSKVVIETAEFDLQLLKAIEEGKPVPQGEDYQQGEMYGHYNVRQYVLWRDGYTCQCCGAHATKKKEVRLHVHHLESRKVDGDAPDNQVTLCESCHEKLHKGLIAEKDFKKRKRKSTRDATFMGIMRKTLMQRLCSELPIPVIETRGYITKATREKLLVLPKSHTNDALAIAQGKQGFNVGYLPGIVQINKIYTIRPVRHHNRQLHKATILKGGIRKSNQTEKYVFGYRLFDKVQFNGQDCFIWGRRTTGIFTIKTINGKMIKDGISFKKLKLVEKSTSYLIA

SEQ ID NO: 18200 - protein, 442 aa, unidentified; identical to SEQ ID NO: 3234
  REGION 1..442: note = Human gut metagenome

SEQ ID NO: 18201 - protein, 426 aa, Moorena sp.; identical to SEQ ID NO: 8077

SEQ ID NO: 18202 - protein, 481 aa, unidentified; identical to SEQ ID NO: 4548
  REGION 1..481: note = Human gut metagenome

SEQ ID NO: 18203 - protein, 431 aa, unidentified
  REGION 1..431: note = Human gut metagenome
MNRVFVLGKTGKTLMPCHPARARQLLHSKKARVKRLYPFTIQLTHRSDGYIQPVELKFDPGSKQTGIGLVLHGKNRLSAIYAAVLTHRGQEIKSNLDSRRMIRRARRNRKTRYRQARFLNRVRSKHKGWLAPSVQSRVDNIVEWSKRFIRLSPVGFITVESVKFDMQKMENAAVEGLEYQRGTLFDYEVKEYLLEKYNYSCVYCGAKNVPFEKEHVIPRSRGGSNRISNLVLSCHDCNQKKDNLPIEVFLKDNPALLKKIKAQLKSSLKDAAAVNITRKQIVKELSDLNVPVLTGTGAETKYNRVSQKYPKEHYIDALCAGTTGAKIYIPKKLKPLLIKKERRNNRQMCLVDKYGFPRGKAKGPKIVHGFKTGDIVKAVVLKGKKKGVYKGKVAVRSSGSFNINVKQGRVEGIGWKNCVMLHRFDGYSYTY

SEQ ID NO: 18204 - protein, 451 aa, unidentified
  REGION 1..451: note = Human gut metagenome
MSVAVISKTGIVLMPTSEYRARKLLDSGKAIIYGYRPFTIQLTERETGDVQPVELCVDTGYIHIGVSVKSEKHEYLGLQVDTLTDEKAKHDDRRMYRRQRRNRKRYRKSRFDNRKRKSGWLAPSLEHKKEIHLQIITAICGVYPIADITLEMGNFDTQVLKAKEEGKQIPQGTDYQHGERYGIATLREAVFTRDGYKCQCCDRGIKDGAILHAHHIQYRSQGGTNRMSNLITVCEKCHTPANHKPGGKLYGWKPKIASFKDATYMTAVRWQLYRKVKEMFPGIHVKITYGAETKERRRILDIKKSHVNDAFVMGQFHPKHRSLPVLYKKKRRNNRCLEKFYDAKYIDSRNGKTRSGQELFNGRISRNHKKDSENLHRYRKKKVSRGKRNIRVQRYKIQPHDIVLFDGKKYETTGCHNKGTRAILLPEKKSKSVEKLTIYKYAGGYYPSKFA

SEQ ID NO: 18205 - protein, 465 aa, unidentified
  REGION 1..465: note = Human gut metagenome
MSTCVCVLSNSGERLMPTFRLGKVRRLLKDGKAKIVKHHPFTIQLLHDSKTNTQPIEICEDVGYNYIGISVKSESHEYVSAQYDTLQDEKACHDSCRKLRRTRRNRLRYRKPRFDNRKRGEGWLAPSLEHKKQLNIRLIERYVSVIPITHATVEVGSFDTMLLQAIQKGKSKPEGVDYQKGPRYNLATLREAVFYRDNYTCQVCGRKVADGAILHMHHMFYWKGRHGDSLNELLTVCEKCHTPANHQKSGKLYGFGENVKFADLSGAAFMNTVRWQIVNELYAAFGKGFVTITYGAMTKEKRIALHLEKSHNNDAYAMGSFHPVNRCAFEHYEKVKRNNRILEKFYDSQYIDTRTGELTNGKSLFNGRISRSHKKDSENLHKYRGKRICKGHYALRRKKLALNPGDLVSLNGEILVVHGTHTKKNGSVNVEFKTPSRGGKKSASLKKLKIVKTSNLMHSAWTKVA

SEQ ID NO: 18206 - protein, 442 aa, unidentified; identical to SEQ ID NO: 2834
  REGION 1..442: note = Human gut metagenome

SEQ ID NO: 18207 - protein, 455 aa, unidentified
  REGION 1..455: note = Mouse gut metagenome
MSVFVISKNGKRLMPTVRYGLVRHMLKDGRAVIYCRKPFTIQLTYVSSKYIEPLELCIDTGAQHIGISLKSNKREFVSEQRDLFKDEKEKHDGCRMYRRTRRNRLRYRKPRFNNRISNKKEGWFAPSLKNKADQHIMLIQRLATVAPIKDIYLEVGSFDTQLLDAIAKGLPIQEGTDYQQGALYGEETLRKAVFQRDNYTCQVCGRTIKDGAKLHTHHFLYWKGRHGNRLDELCTVCEKCHTSANHQKGGKLYGWGADKKFKSYVSAAFMNTVRWYIVNQVKDLVSDTEVHTTYGAATKLARKDFQFEKSHVNDAYAMGKLHPNIRCETEYYKKVRRNNRCLEKFYDAKYIDIRDGKKKSGKELGCQRINRREPRMSEKNLRIYHGQKVSKGRRSIRKQRYSIRPGDVVLFNGQKYISKGCGSYGTQVLLDIGKSVSIKKVQIIRHTGGWINLNI

SEQ ID NO: 18208 - protein, 414 aa, unidentified; identical to SEQ ID NO: 4015
  REGION 1..414: note = Human gut metagenome

SEQ ID NO: 18209 - protein, 219 aa, unidentified
  REGION 1..219: note = Human gut metagenome
VHHKESRQTGGNAPNNLITLCEDCHKALHAGTIQLPDGRAKRGRSHRDAAFMGIMRKAMVSQLRDIVDIPVTETYGYITKYYRELYHAEKSHISDAIMISRNFKAEPDDTYYASKAVRHHNRQLHKNTILKGGVRKRNQAPRVVRGFRLFDLVRYENSVYYVFGRRRSGFMDIRTLDGRKINKGSISNKRLKFVSTSRGLLVERRKAIPLADKSASFLA

SEQ ID NO: 18210 - protein, 443 aa, unidentified
  REGION 1..443: note = Human oral metagenome
MVEENMTCFMQRKGENPMVFVLDTNKRPLAPCHEAVARKLLKQGKAAIYRRFPFTIILKKSVDESEIKATYRLKIDYGSRHTGLAILRGQEVVWLGQLDHRTDIKERIDKRRAFRRARRNRKTRYRKPRFLNRKRKEGWLPSSLESRVQNIQTWVNRLKKLCPIGYISYENAKFDTQLMRNPEINGVEYQQGTLQGYEVREYLLEKFGRKCCYCGKENVPLEVEHIIPKSRGGTDRVDNLCLACHDCNQRKGSKTAEEFGYPHIQKQVKESLKDASAVNSTRWKAYEVLKQSGCEVECGTGARTKMNRIRLDLPKTHYFDACCVGESTTNHLYFKTKEVLFIKAKGRGSRSRTNLDRYGFPRGYLARQKFFFGFQTGDMVKAVVPRGKYQGVWFGEVACRKTGSFDIKGKDGKRIAQGINYRYVQVIQRFDGYAYGKGVAELA

SEQ ID NO: 18211 - protein, 413 aa, unidentified; identical to SEQ ID NO: 3621
  REGION 1..413: note = Human gut metagenome

SEQ ID NO: 18212 - protein, 408 aa, unidentified; identical to SEQ ID NO: 5560
  REGION 1..408: note = Human gut metagenome

SEQ ID NO: 18213 - protein, 515 aa, unidentified
  REGION 1..515: note = Human gut metagenome
MTALEERLSKTEYIYVLGFDGKPQMPTRRKRHVLKLLKTGRARIAEDIPFTIRLTYRNAPVLQPVTLAEDPGRTNIGAAVLSPLGDLLFAAVIETRNKEIKKLMADRKKSRQASRRGERKARQRLAKRYGSMVKSGMVMRKLPMYAADKFVTCKFIRNTQARFCNRKRCPDWITPTVQHLVQTHLNIIRKISRYLPVTDIAFEVNRFAFMHMENPEVMGVDFQNGPLKGYGDVKEAIRTQQHGKCLMCKKPISHFHHIVPRSRGGSDTIQNLAGLCPECHTKVHTDTTFRKDFDRKKSGQLKKYGALSALNQAVPFICKKLLEEYGEEHVHFCGGLDTSLIRTALGFEKTKKNQMHEVDAYCIGLEALEVNEVETPAFDHTFQIRQFRRQDRSIIHHQTGRSYYQGKEKVAQNRKPGFEQKTTALSQWYEEQVRIHGEKEAEKLRSQLRVEKSCRHYNDVDRFLPGAVFLYEGKRYVLSGRITNGKYLRACGQGMKNFPAAECTFIRHNAGLVFI

SEQ ID NO: 18214 - protein, 456 aa, unidentified
  REGION 1..456: note = metagenome
MSTCVCVLSNSGERLMPTFRLGKVRRLLKDGKAKIVKHHPFTIQLLYDSKANTQPIEICEDVGYNYIGISVKSQSHEYVSAQYDTLQDEKACHDSCRKLRRTRRNRLRYRKPRFDNRKRGEGWLAPSLRHKKELNVNVVKMYCAVMPITHATVEVGSFDTMLLQAIQKGESKPEGVDYQKGPRYNLATLREAVFYRDNYTCQVCGRKIADGAILHMHHMFYWKGRHGYQLDELVTACEKCHTPANHQKGGKLFGFGEDKEFANLSGAAFMNAVRWQIVNALYATYGKEFVTITYGAMTKEKRIALQLEKTHSNDAYAMGNCHPAHRCVFRHYQKRRRNNRVLEKFYDATYIDARTGNKAKGKELFNGRINRNHKKDSENFHKYRSKKVSKGRRSIRRQRYAIQPYDTVHLEGKTYITSGCHNKGTRLLIPANGKNKSVAISKVQVVCHAGAWIQII

SEQ ID NO: 18215 - protein, 310 aa, unidentified; identical to SEQ ID NO: 8570
  REGION 1..310: note = Human gut metagenome

SEQ ID NO: 18216 - protein, 493 aa, unidentified; identical to SEQ ID NO: 3781
  REGION 1..493: note = Human gut metagenome

SEQ ID NO: 18217 - protein, 451 aa, unidentified; identical to SEQ ID NO: 12558
  REGION 1..451: note = Human gut metagenome

SEQ ID NO: 18218 - protein, 447 aa, unidentified; identical to SEQ ID NO: 4640
  REGION 1..447: note = Human gut metagenome

SEQ ID NO: 18219 - protein, 404 aa, unidentified
  REGION 1..404: note = Clostridiaceae bacterium UBA2240
MPTSRHGKVKHLLKDGMAKVVRRTPFTIQLLYDSPEYTQPITLGVDAGSKVVGLSATTEKKELFVSEITLRDDIPELLSTRRQNRRTRRNHLRYRMARFLNRTASKKEGWLAPSIKHKVDSHLKVIGNVHRILPISRIVIETASFDIQKIRNPEISGREYQQGEQLGFWNTREYVLWRDKHECQHCHGKSKDRILNVHHKESRKTGGDSPGNLVTLCETCQKSHHEGRIKLKLTPNKSYRHASFMGIMRWYVYNSLQELYPEVSMTYGYITKNNRIRNNIEKTHSADAYCISGNMNAIRIDEIYNQVFKRKHNRQIHKANFLKGGKKKLNQSAYEVKGFRLFDHVRYRDEDCFIFGRRISGYFDLRKLDGSVVHRSASFKELKLLKRQNTILIERKGCNRVLLS

SEQ ID NO: 18220 - protein, 420 aa, unidentified; identical to SEQ ID NO: 8162
  REGION 1..420: note = Human gut metagenome

SEQ ID NO: 18221 - protein, 428 aa, Moorena sp.
MQNYVLVIDTNKQPLNPISPKRARRLLDKGKAAVFRMYPFTIILKAAIDNPTISPCQIKIDPGSKVSGFALVQNNQVIWGMELEHRGGLIKKKLESRRSVRHRRRSRHTRYRKPRFLNRRRPEGWLAPSLEHRVLTIQTWVKRLIKFCTINEIWVERVKFDTQKMQNPEINGVEYQQGDLAGYEVREYLLEKWGRECTYCGKQSVPLQIEHIHPKSFGGSDSAKPTLRERVSNLCLACEKCNQRKGNKPIEEFLKKKPSLLQKIKTKAKQPLKDAAAVNVTRNKLVRVLQSIKPVITGTGAQTKYNRTKLGLPKEHWIDAACVGNIEMLTLKTSQPLLVTCKGQGGRQKAALNKYGYPIRHNPLKPIKGWCSGDIAKRLLTGEFGKVSPRSKSNSFNYTVPGKKAISLHVKNLTRVHQKDGYTYSFCR

SEQ ID NO: 18222 - protein, 342 aa, unidentified; identical to SEQ ID NO: 10149
  REGION 1..342: note = Human gut metagenome

SEQ ID NO: 18223 - protein, 432 aa, Moorena sp.
MRVFVLDKNKKTLDPCRPARARILLKQGKAKVLKRYPFTIIMQEKEVENCVTHEHQLKIDPGAKTTGIVIIQGSKVIWGAELTHRGFQIREALTSRRQLRRSRRNRKTRYRQPRFLNRKRSEGWLAPSLMSRVDNILTWTKKLIRLCPIKGISQELVRFDTQKMENPEISGVEYQQGTLYGYEIREYLLEKWNRKCAYCGVDDIPLEIEHIKPKSKGGSDRVSNLTIACKKCNKAKGSQDIENFLSGKPNVLKQILSQSKKPLANAAAVNSTRWKLYNSLKSTGLPIETGSGGLTKYNRCRQNLPKTHWLDAANVGKVDHLYIESYQPLLITAKGHGTRQMCRTNKFGFPTRYVPRYKEVKGFQTGDIVKAIVTKGKKIGTYTGRVATRQTGSFNISTKSGLVQGISHKYCSIIHRKDGYSYSFVLQGMQWP

SEQ ID NO: 18224 - protein, 506 aa, unidentified
  REGION 1..506: note = Human gut metagenome
MPYIYVLGMDGKPQMPTTRRRHVQRLLDTGRARIVSHVPFTIQLLYKNDPVLQPVTLAEDPGRTNIGLAALSLKGDLLFSAKVETRNKEIAKLMDKRRQSRRASRNGERKARQRLARKFGTMLKAGMLMRKLPQYAADKFITCHVIRNTQARFSNRKRPDGWLTPSARHLVQTHINLVRKMGRYLPVTDVALEVNRFAFMQMEDPSISGVDFQNGPLKGFDDLHAAVRDLQDGKCLLCKKEIEHFHHIVPRSKHGSNTIGNIAGLCTKCHEKVHKDEKAGKRLKDKKKGLDKKYGALSILNQAIPFICKELETEFGKEHVHYCTGRETSLVRRSLGYHKTKEEQYHEVDAWCIGALSLDSIPEKAPAFEEVHTIMQFRRQDRALIKAQTSRSYKLDGETVAWNRKKRTDQKNDSLEDWYQKQVQLHGQKEAVRMRSRLTVKISQRRYNNPERMLPGTVFLYKGKRYVMKGQHCNGVYLQAVGMGSRDFPVKECTIIKRNQGLVFLS

SEQ ID NO: 18225 - protein, 431 aa, unidentified; identical to SEQ ID NO: 2977
  REGION 1..431: note = Human gut metagenome

SEQ ID NO: 18226 - protein, 424 aa, unidentified; identical to SEQ ID NO: 16952
  REGION 1..424: note = Human gut metagenome

SEQ ID NO: 18227 - protein, 502 aa, unidentified; identical to SEQ ID NO: 2616
  REGION 1..502: note = Human gut metagenome

SEQ ID NO: 18228 - protein, 451 aa, unidentified; identical to SEQ ID NO: 2910
  REGION 1..451: note = Human gut metagenome

SEQ ID NO: 18229 - protein, 432 aa, Moorena sp.; identical to SEQ ID NO: 6011

SEQ ID NO: 18230 - protein, 418 aa, unidentified; identical to SEQ ID NO: 2710
  REGION 1..418: note = Human gut metagenome

SEQ ID NO: 18231 - protein, 295 aa, Microcoleus sp.
LKHRVDTILTWVNKFIRFAPISSIAMELVRFDLQKLENPEISGVEYQQGELLGYEIREYLLNKWDRKCTYCKTENIPLQVEHIHPKARGGSNRISNLCLACEKCNLKKGTQNIKDFLSKKPDLVKQIMAQVKRPLKDATAVNSTRWALFNQLKLTGLPVTTGSGGQTKYNRTRLELPKTHYFDAACVGKVDKLVVLTAQPLSIKSNGHGTRQMCRTDKFGFPSRYVPRDKFVKGFQTGDLVKAVVTSGNKIGEYVGRVAVRSSGSFNISAKELVQGINHQYCQILHRKDGYSYQL

SEQ ID NO: 18232 - protein, 416 aa, unidentified; identical to SEQ ID NO: 5948
  REGION 1..416: note = Human gut metagenome

SEQ ID NO: 18233 - protein, 406 aa, unidentified; identical to SEQ ID NO: 10063
  REGION 1..406: note = Human gut metagenome

SEQ ID NO: 18234 - protein, 421 aa, unidentified; identical to SEQ ID NO: 2846
  REGION 1..421: note = metagenome

SEQ ID NO: 18235 - protein, 330 aa, unidentified
  REGION 1..330: note = Human gut metagenome
LVGTICGGQNPRAHHLNQEGWNSRCSGGMRRYREEHITAIRRVCGILPVSKVVIETAEFDLQLLKAIADGKPVPQGEDYQKGEMYGHYNVRQYVLWRDNYTCQCCGAHATKKKEVRLHVHHLESRKVGGDAPDNQVTLCESCHEKLHKGLIAEKDFKKRKRKSTRDATFMGIMRKTLMQRLCSELPIPVVETRGYITKATREKLRVLPKSHINDALAIAQGKQGFNVGYLPGILQIDKIYTIRPVRHHNRQLHKATILKGGIRKSNQTEKYVFGYRLFDKVQFNGQDCFIWGRRTTGIFTIKTINGKMIKDGISFKKLKLAEKSTSYLIA

SEQ ID NO: 18236 - protein, 396 aa, unidentified; identical to SEQ ID NO: 4508
  REGION 1..396: note = Human gut metagenome

SEQ ID NO: 18237 - protein, 424 aa, unidentified; identical to SEQ ID NO: 7678
  REGION 1..424: note = Human gut metagenome

SEQ ID NO: 18238 - protein, 415 aa, unidentified
  REGION 1..415: note = Human gut metagenome
MVYVLANDGQPLMPTERHGKVCRMLKSGMAKVVKKCPFTIQLQYESERNVQPVSLGVDAGSKHIGISATTKTKVLYESDVELRDDIVKLLATRRQLRLSRRSRKTRYRPVRFDNRKRKEGWLAPSIRQKIESHLTVVANVCKILPINQIIVETASFDIQKIKDPEIQGIEYQQGEQMDFWNIREYVLFRDGHTCQCCKGKSKDKVLNVHHIESRKTGGNAPNNLITLCETCHKGYHNGTVTLPKNIKRGMKFKDAAFMGIMRWTFYNTLKEQYEPDIPVHYTYGYITKNTRINHNLPKGHCIDARCISGNPDAVSDGTYYYQKKVRCHNRQIHKQTILKDGVRKSNQAEYLVKGYRLFDKVRYQGREYFIFGRRKSGFFDIRTLSGEKVNKGSISVKKLTFADTRKNYLTERRTV

SEQ ID NO: 18239 - protein, 355 aa, unidentified
  REGION 1..355: note = Human gut metagenome
LKVFVLNMRGRPLMPCSPARARHLLKAGKAVVRRRTPFTIQLRIATGETKQSVTLGVDAGAKHVGLSAATEKEEVFAPEVELRQDITGLLAARLSLRRERRQRKTRYRAPRFLNRVRSKHKGWLAPSVENRIQAHLSRIDAICGLLPVTKIVIETASFDIQKIKHPDVEGTDYQQGDQLGFWNVREYVLFRDGHVCQHCHGHAKDKILNVHHLESRQTGGDAPNNLITLCERCHKACHAGKIKLKVKRGQSFRAGAFIGIMRWTLLDRVRKAHPGLPVENTYGYLTKNTRITLGLPKAHCVDAYCIAGNLKAVRRGVYLHQRQVRKHNRQIHKCTVLSKTLKDGTKIGYRKLNQT

SEQ ID NO: 18240 - protein, 422 aa, Streptomyces sp.; identical to SEQ ID NO: 12341

SEQ ID NO: 18241 - protein, 401 aa, unidentified
  REGION 1..401: note = Human gut metagenome
LNKRGKPLMPCSPAKARLLLKEKKAIVVRRTPFTIQLTIATGESKQPVSLGVDAGYKHVGLSASTEKAELYASEVELRKDITDLLSARRALRQSRRNRKTRYRAPRFDNRIRTKRKGWLAPSVENRINAHLSRIEAVLRLLPITKITVETASFDMQRLKNPDISGKEYQEGEQLGFWNVREYVLFRDGHVCRHCHGRSKDPVLNVHHLESRRTGSDSPDNLITLCETCHKALHRGEITLKAKRGQSFRAQAFMGIMRREVLNRLKASYPELKVHETYGYLTKHARIANGIVKSHGADAFCIAGNLGAERLGEFFFQKQTRRNNRQIHKLSSSKGAFESAIRHPLRPKASVFLTRLPAREKKASFSAVDHPGTLMFESLMEPAFQPASAARSCVCWRRDGPI

SEQ ID NO: 18242 - protein, 442 aa, unidentified; identical to SEQ ID NO: 2903
  REGION 1..442: note = Human gut metagenome

SEQ ID NO: 18243 - protein, 475 aa, unidentified
  REGION 1..475: note = Human gut metagenome
MVITLDKNKRPLGFMSERRCRILLEKKRAVLYRYFPTIVILKDVDARKLSGLSSYRIKIDPGAKYTGIAIVMDDTNEFMYAMQIEHRGEQIKKNLDTRRGARRNRRSRETGYRRPKWGNRCTAKEQRQSYDSRRDENWLPPSVKSTADNIISWIRRLCRWINITNCSIESVRFDTQLMENPEIEGVEYQQGTLYGYEVKEYLLEKYGHTCQYCGGKSNDPILEWEHMLPRSRGGADRLKNAALACHNCNQDKGNHTLEEWQTILQDRIPKESGKQKELDQIRQKFVQQVMEGKTPVKGLRYAAWVNSSRRYSQRHLYLRFPELECSSGGRTKYNRNVLKYPKEHHYDALCVGEIPEDGFVDRTHGYYLYAKATGRGTRLREQINQCGVIIRKWMDRSKTAFGFQTGDLVVADVPKDTNYKYKGHFSGRVMIRKSGSFDIRTLSGELVTVNAKFCRLLQNNSGYQMMIKRAIPLGN

SEQ ID NO: 18244 - protein, 442 aa, Anaerostipes sp.; identical to SEQ ID NO: 3218

SEQ ID NO: 18245 - protein, 428 aa, unidentified
  REGION 1..428: note = Human gut metagenome
LKVFVLNMRGQPLMPCSPAKARHLLKAGKAVVKRRTPFTIQLRIATGETKQNVTLGVDAGAKHVGLSATTEKEEVFASEVELRQDITGLLAARLSLRRERRQRKTRYRAPRFLNRVRSKHKGWLAPSVENRIQAHMSRIDAVCRLLPVTKIVIETASFDIQKIRNPEVEGTGYQQGDQLGFWNVREYVLFRDGHICQHCRGRSKDPILNVHHLESRKTGGDAPNNLITLCETCHKAYHAGKIKLKVKRGQSFRAEAFMGIMRWTLLDRVRKAHPGLPVENTYGYLTKHTRITHGLPKTHCVDAYCIAGNLKAVRRGVYLHQRQMRKHNRQIHKFTVLSKRLEDGTKIGYRKLNQSPYLVHGFRLFDKVRCLGQIGFIFGRRSSGYFDVRRLDGVKLSPSISWRKLTLLEKRSTYLTELRKQDGASSPV

SEQ ID NO: 18246 - protein, 422 aa, unidentified; identical to SEQ ID NO: 5333
  REGION 1..422: note = Human gut metagenome

SEQ ID NO: 18247 - protein, 279 aa, unidentified
  REGION 1..279: note = Human gut metagenome
TKITVETASFDLQLLKNPDISGKEYQEGEQLGFWNIREYVLCRDGHVCQHCYGRSKDPVLNVHHLESRRTGGDSPGNLITLCETCHKALHRGEITLKPKRGQSFRAEAFMGIMRWEVLGRLKASHPELEVNNTYGYRTKHARIANDIAKSHCADAFCIAGNLGAERLGEFFFQKQTRRNNRQIHKLSILKGGIRKRNQAPYEIKGFRLFDKVACQGEEGFIFGRRSSGFFDVRKVDGTRISAGISYKKLRLLEKRRTYLTEIRKEEALPPLPEGRGLRA

SEQ ID NO: 18248 - protein, 413 aa, unidentified; identical to SEQ ID NO: 3924
  REGION 1..413: note = Human gut metagenome

SEQ ID NO: 18249 - protein, 470 aa, unidentified; identical to SEQ ID NO: 2825
  REGION 1..470: note = Human gut metagenome

SEQ ID NO: 18250 - protein, 421 aa, unidentified
  REGION 1..421: note = Human gut metagenome
MQYVYVLSKHGEPLMPCSPGKARLLLKEKKARVVRRTPFTIKLLYGSAGYKQPITLGVDAGSKHVGLSASTKKRELYREEFTPRNDVVDLLSTRRQNRRSRRNRKTRYRAPRFDNRVHSKHKGWLAPSVEVKIQEHITVIKRICRILPISLVRVETAEFDTQRLKAMLEGKSLPVGTDYQLGEMYDEYNVRQYVLKRDNYTCQCCGAHPTEKKPVRLHVHHLESRHVGGNAPNNLITLCVACHKALHEGKITLDKGKKRGKPLRDAAFMGIMRNTLLARLKDELNIPVKQTYGYITKLLREKNKIPKSHVNDARCIAKAPNAKPCDTMLYTRALRHHNRQIHKAKILNGGIRKKNQAPYLVKGFRLWDKVRYNGEECFITGRRSSGYFALKKYDGTVISNSASYKKLMLLEAATNYITERS

SEQ ID NO: 18251 - protein, 424 aa, unidentified; identical to SEQ ID NO: 5750
  REGION 1..424: note = Human gut metagenome

SEQ ID NO: 18252 - protein, 475 aa, unidentified; identical to SEQ ID NO: 15899
  REGION 1..475: note = Human gut metagenome

SEQ ID NO: 18253 - protein, 389 aa, unidentified
  REGION 1..389: note = Human gut metagenome
LTKDENRPSGRTTGLRAEQAEPAGIRKGDTLKVFVLNMRGKSLMPCSPAKARHMLKAGKAVVVRRTPFTIKLTIATGETKQDVTLGVDAGARHVGISATTEKEEVFASEVALRQDITGLLADRLAFRRARRNRKTRYRAPRFNNRVRSKHKGWLAPSVENRIQAHMSRIEAVCRLLPVTKIVIETASFDIQKIRNPEVEGTGYQQGDQLGFWNVREYVLFRDGHVCQHCHGRSRDKILNVHHLESRKTGGDAPNNLITLCETCHKAYHAGKIKLKVKRGQSFRAEAFMGIMRWTLLDRVRKTHPELPVENTYGYLTKHKRIALGLPKTHCADAFCIAGNLKALEEEISSSNNRRESTTDRYTGVRFSKAECENSIRRHSSSRGSAYSTR

SEQ ID NO: 18254 - protein, 417 aa, unidentified
  REGION 1..417: note = Human gut metagenome
MPCSPAKARLLLKEKKAIVKRRTPFTIQLTIATGEAKQPVTLGVDSGYKHIGLSATTEKAELYASQVELRQDITDLLSARLALRRSRRSRKTRYRAPRFDNRVASKRKGRLAPSVENRIAAHMSRVEAVMRVLPVTAITVETAAFDTQLLKNPDIAGAAYQQGEQLGFWNVREYVLFRDGHVCQHCRGKSKDPILNVHHIESRRTGGDAPNNLITLCETCHKAFHRGEIELKIKRGKSFKAETFMGIMRWTLFERLKKAHPELNVHNTYGYLTKHKRISYGIAKNHCADAYCIADNLSAKRLKGFFFQKQTRKHNRQIHKLSILKGGLRKKNQAPYEVKGFRLFDKVICKGEEAFIFGRRTSGSFDVRRLDGTRISAGINYKKLRLLEPRTTYLTEFRKEAALPPLHKCRGFRAEFL

SEQ ID NO: 18255 - protein, 442 aa, unidentified; identical to SEQ ID NO: 2834
  REGION 1..442: note = Human gut metagenome

SEQ ID NO: 18256 - protein, 415 aa, unidentified; identical to SEQ ID NO: 10543
  REGION 1..415: note = Human gut metagenome

SEQ ID NO: 18257 - protein, 422 aa, unidentified
  REGION 1..422: note = Human gut metagenome
MRGKPLMPCSAAKARILLKEKKAAVAKRTPFTIRLTTAGGEAKQPVSLGVDAGYKHVGLSASTEKAELYASEIELRQDITDLLSARLALRRARRSRKTRYRAPRFDNRVRSKRKGWLAPSIENRIAAHISRIEAVLRILPVTKITVETASFDMQLLKNPDISGKGYQQGEQLGFWNVREYVLFRDGHVCQNCGGRSKDPVLNVHHLESRRTGGDSPGNLITLCETCHKALHRGEITLSIKRGASFRAEAFMGIMRWKVLERLKATHPELEVRNTYGYLTKHARIEHGIAKSHCADAFCIAGNLKAERLGSFYYQKQTRRHNRQIHKLSILKGGVRKRNQAPYEVKGFRLFDKVACKGETAFIFGRRSTGSFDVRKLDGTRISAGISFKKLRLLERRRTFLTEIRKEAALPPLPEGRGLRADF

SEQ ID NO: 18258 - protein, 509 aa, unidentified
  REGION 1..509: note = metagenome
MPDTDYIYVLGVDGKPQMPTKRKRHVKRLLDTGKARIACHVPYTIQLLYENTPVLQPVMLAEDPGRTNIGMAVLSVKGELLMSAVVETRNREIVRLMNHRRGYRRASRNGERKARQRLAKRFSTMLKAGMLMRKLPKFAADKFITCHCIKNTESRFCNRKRPDGWLTPTSRQLVETHINLIHKIQKYLPVTDIAMEVNRFAFLSLENPSVSGADFQNGPLKGFDSLHDAVNELQHGKCLLCNKKIEHYHHIVPRSMNGSNTIGNIAGLCMECHDKVHKYASHQKKLNDVKKGLDKKYGALSALNQAVPFICKRLEAEFGKEHVSYCTGRDTAKMRNSFGFQKTKDNQMHETDAWCIGILALNRISDGVPDFGQTYCIRQFRRQDRSFIYAQTERVYKLDGVIVAKNRKKRTEQKTDSLEDWYNRQVVLYGKKEADFMRSRLTVIKSKRRYNDLTRVMPGAVFMYNGVCHVLSGRLTEGQYFRAVGDAKTNYPASKCKIIRHNEGLVFVC

SEQ ID NO: 18259 - protein, 513 aa, unidentified; identical to SEQ ID NO: 3179
  REGION 1..513: note = Human gut metagenome

SEQ ID NO: 18260 - protein, 408 aa, unidentified
  REGION 1..408: note = Human gut metagenome
LKVFVLNMRGKPLMPCSPAKARHMLKAGKAFVVRRTPFTIKLTIATGETKQDVTLGVDAGARHVGISATTEKEEVFASEVALRQDITGLLADRLAFRRARRNRKTRYRAPRFNNRVRSKHKGWLAPSVENRIQAHISRIEAVCRLLPVTKIVIETASFDIQKIRNPEVEGTGYQQGDQLGFWNVREYVLFRDGHICQHCRGRSKDPILNVHHLESRKTGGDAPNNLITLCETCHKAYHAGKIKLKVKRGQSFRAEAFMGIMRWTLLNRMRKAHPSLPVENTYGYLTKHKRIALGLPKTHCADAFCIAGNLKALRRGDFLFLQQTRKHNRQIHKCSILKGGVRKLNQAPFLVKGFRLFDKVRIGGQIGFVFGRRVRGTFNIRRLDKTVIGTDINCKKTESSRNTQNFFD

SEQ ID NO: 18261 - protein, 428 aa, unidentified; identical to SEQ ID NO: 5055
  REGION 1..428: note = Human gut metagenome

SEQ ID NO: 18262 - protein, 438 aa, Moorena sp.
MSQVFVLDANKQALNPIHPGRARLLLKQGKAAVYRRYPFTIILASAVEQPPLHPLRIKVDPGSQTTGIALVNDLTGEVVWAAELAHRGEQIKRGLDKRRAIRRSRRQRKTRYRKPRFANRGKRTGTLPPSLESRVCNVLTWVRRLMRLCPVTAISQELVRFDTQALEHPDIEGVEYQQGQLSGYEVREYALLKWNHQCAYCDARGVPLELDHVQPRSKHGSNRVSNLTLACLSCNQRKGNRDVREFLHDDPARLVRMLAHMKAPLRDAAAVNATRWALYERLKILDLPVEGGSGGETAYNRVMRGLDKSHWLDAANVGRSTPASLIIKDIVPLHITATGHGSRQMCRMDKYGFPRSGPKQHKRVQGFQTGDLVRAVVTSGTKQGTYVGKVAVRTRGSFNITTAQGVVTDIHHRFCVLIARSDGYSYQQRKEAALPPTA

SEQ ID NO: 18263 - protein, 397 aa, Moorena sp.
MTPKVFVIDKKGKPLLPTHPARARKLLRSGKAKVTRVVPFTIQLERIIEKEVGSFVIGIDDGAKEVGIAILNKKTQEVVFRGTIKLRQDVSRKIKQRAQLRRNRRCRKLRHRKARFKNRKPKTPQPSIRQRKESIVRVVCDLKKVLNITAGIIEQGQFDVSSLAAGRQLVSTEFQQSEYEGRNFRAKVLWRDEYTCQRCLAKEKLNAHHIMGKGKGGTDTPKNGITLCKRCHDELHSGKWQLDKKPKTFKYPMHLMQGKRYILTLLKEIGLSVTRCVGWMTAYWRKKIGIEKSHSNDAIAMVTRSYMPNIVSLEYTILPKRAKVWADNPTKQRKEKLGFKHYDLVKARHRTKGWVIGSVRALKAKVMTLRTKEDVNFPVSYRKSKLLTRFNRIIYSY

SEQ ID NO: 18264 - protein, 420 aa, unidentified; identical to SEQ ID NO: 3546
  REGION 1..420: note = Human gut metagenome

SEQ ID NO: 18265 - protein, 416 aa, unidentified; identical to SEQ ID NO: 7785
  REGION 1..416: note = Human gut metagenome

SEQ ID NO: 18266 - protein, 465 aa, unidentified
  REGION 1..465: note = Human gut metagenome
MSTCVCVLSNNGERLMPTIRLGRVRHLLKDGKAKIIKHHPFTIQLLYDSKANTQPIEICEDVGYNYIGISVKSQSHEYVSAQYDTLQDEKACHDSCRKLRRTRRNRLRYRKPRFDNRKRGEGWLAPSLRHKKELNVNVVKMYCAVMPITHATVEVGSFDTMLVKAIQEGKAIPEGADYQKGPRYNLATLREAVFYRDNYICKVCGRKATEGAILHMHHMFYWKGRHGNSLDELLTVCEKCHTSANHQKGGKLYGFGENVKFADLFGAAFMNTVRWQIVNELYTAFGKPFVTITYGTMTKEKRIALHLEKSHNNDAYAMGEFHPNHRCTFEHYEKVRRNNRTLEKFYDSRYIDIRTGEIATGKELFNGRINRNHKKDSENLHRYRGKRTYAGHRALLRKKVNLNPGDLVSLNGEVLVVHSTHTNKKGAVNVEFKTPGKSGQKSASLKKLKIVKAADSMHSAWEKIS

SEQ ID NO: 18267 - protein, 482 aa, unidentified
  REGION 1..482: note = Human oral metagenome
MPGSLSVSGKSRQHTLARRTSRPLGQEGSNPIVMRVFVLDTNRRPLSPCHPARARELLRKGKAAVFRRVPFTIILKYAPSGDPTEVEVKVDPGSRTTGMALVMERRGMDEVVWASELRHRGLEVKAKLDKRRALRRGRRSRKTRYRAPRFLNRRRKEGWLPPSLESRVYNVVTWVKRLHRLSPVAGLSMELVKFDTQAMQAPETRSVEYQQGTLYGYEVREYLLEKWGHRCAYCGAENVPLEIDHVVPRSRGGSNRVSNLTLACHDCNQKKGNRPIEEFLCRKPEVLRRVLSQAKTPLKDAAVVNATRWALLERLKVTGLSVECGTGGRTKYNRTTQGYPKKHWIDAACVGKAGDSVRLEPDMEALSIKAMGHGNRQMCRMDRYGFPRTGPKSIRTVHGFRTGDLVRAVVPNGRHAGAYRGRVAVRASGSFRIGDTDGVSWRHCYRLQYGDGYQYSIPQPKGQGTSPIPPTSEDVGFFGGIS

SEQ ID NO: 18268 - protein, 470 aa, unidentified; identical to SEQ ID NO: 5326
  REGION 1..470: note = Human gut metagenome

SEQ ID NO: 18269 - protein, 480 aa, unidentified; identical to SEQ ID NO: 14571
  REGION 1..480: note = Human gut metagenome

SEQ ID NO: 18270 - protein, 451 aa, unidentified; identical to SEQ ID NO: 10609
  REGION 1..451: note = Human gut metagenome

SEQ ID NO: 18271 - protein, 456 aa, unidentified; identical to SEQ ID NO: 6990
  REGION 1..456: note = Human gut metagenome

SEQ ID NO: 18272 - protein, 451 aa, unidentified; identical to SEQ ID NO: 3061
  REGION 1..451: note = Human gut metagenome

SEQ ID NO: 18273 - protein, 458 aa, Lactobacillus sp.; identical to SEQ ID NO: 6016

SEQ ID NO: 18274 - protein, 493 aa, unidentified
  REGION 1..493: note = Human gut metagenome
MAAVYVISASGKPLMPTTRCGHIRGLLNAGKARVVEREPFTIQLKYETPDVTQPLYLGIDPGRTNVGSAVVREDGECVFTAQLTTRNKDVPMLMKARKQFRMAHRRLKRRCKRQRRAKAAETLSQKGEFQRLLPGYEEPILCKGIRNKEARFNNRQRPAGWLTPTANHLLLTHLNMVKKLQKLLPITDVVLEVNRFAFMAMENPSIRRWQYQQGPLYGKGSVEDAVYAQQDGHCLFCGKPIAHYHHVVPQHKNGSETLENRVGLCNEHHDLVHKDRAWDAKMKETKAGLNKKYHALSVLNQIIPALTEQLTAMFPQHAFVTTGKDTADFREDYGIAKEHHLDAYCIACSVLAEPTKVAAPTGKPHRLMQFRRHDRQVCHKENIKRVYLSEGKAVATNRHKAIEQKDDSLEEFRKTHTQQEVSALTVKDHQPVYKDMRRFMPGGVFLFNGKVHTLQRSHGRYKGMPFYYIDTDGSKNHAKGCIFLQQNCGLRWV

SEQ ID NO: 18275 - protein, 420 aa, unidentified; identical to SEQ ID NO: 2812
  REGION 1..420: note = Human gut metagenome

SEQ ID NO: 18276 - protein, 406 aa, unidentified; identical to SEQ ID NO: 7406
  REGION 1..406: note = Human gut metagenome

SEQ ID NO: 18277 - protein, 416 aa, unidentified
  REGION 1..416: note = Human gut metagenome
MVYVLDKNGQPLMPTDRHRKVRLMLQSGQAKVIKRCPFTIQLNYDSGHQTQEISLGIDAGSKHIGVSATTKIKVLYEADVELRNDIVDLLSSRRELRRGRRNRKTRYRQAKFNNRRRGNGWLAPSIRQKIGTHLIVVENICKILPISRIMVETASFDIQKIKNPDIQGAEYQQGDQLGFWNIREYVLFRDNHTCQCCKGKSKDKILNVHHIESRKTGGNAPNNLITLCETCHTGYYKGTVQLPKAIKRGMRFKDAAFMGIMRWAFYEALKQQYEPVGTPVHDTYGYITKHTRIAYNLPKEHYVDARCISGNPEASSNGEYYYQKKVRCHNRQIHKLTVLKGGIRKQNQATYLVKGYRLFDKVSYQGKGYFVFGRRQSGFFDIRTLSGEKVNKGSLSCKKLKFIATRTYYLTERRAV

SEQ ID NO: 18278 - protein, 405 aa, Sulfobacillus sp.
  SITE 405: note = misc_feature - Xaa can be any naturally occurring amino acid
MFVYVLNKHGNPLIPCSPRKARILLKAGKAIVVNRTPFTVQLLYGSSGYKQEVSLGVDAGTKPVGLSATTEKQVLYEAEGELCTDIPAWLAMRREFRRNRRPRKTRYRPARFPHRRRKAGGLPPAIQHQVATHVKVIKQVTKILPIMGITVEVAQFDTPLLKNPEVSGAAYQHGEQMGFWNVREYVFYRDHHTCQGCQGKSGDKILHGHHRESRKTGGDAPNNLVTWGETCHHKIHQEGLEDQIQRKTASLRDATQMTILRWFIYHGITAEYPQAKLTDGYITKNTRMTHGLAKSHIVDARCISGNPDAIPIAQTFLIKQVRGQNRQLHKVTILKGGVRKANKAPRHVLGFPLFDKVCVTTVGNVSSLEGVPAVTLICDYSMGQKCLPGSVTRNSRGLRQPRHFX

SEQ ID NO: 18279 - protein, 427 aa, unidentified
  REGION 1..427: note = Human gut metagenome
MVYVLAIDGEPLMPTERHGKVRRLLKEKKAKVVKRCPFTIQLLYDSTRYVQEINLGIDAGSKHIGVSATTKEKVLYEADVELRNDIVDLISTRRELRHLRRIRKTRYRKARFNNRVSTKKTGWLAPSVKQKIHTHLTVINNVYKILPIKNLIVETASFNIQKIKNPDISGEEYQQGEQKDFWNVREYVLFRDNHTCQCCKGKSKDKVLNVHHIESRKIGGNAPHNLITLCETCHKGYHNGSVKLPKSIHRGVSFRDAAFMGIMRKTLLSELRKIYPNVKETYGYITKDTRITHNLPKDHYVDARCISGNPDAKPLGYYFYQKKARCHNRQIQKMSILRGGLRKNNQAEYLVKGFRLFDKVKHNSKEYFIFGRRKTGYFDIRNFFGEKVNKGSVSYKKLKFLETRHNMLTERRKVISYPAIKAEGSLA

SEQ ID NO: 18280 - protein, 406 aa, unidentified; identical to SEQ ID NO: 18155
  REGION 1..406: note = Human gut metagenome

SEQ ID NO: 18281 - protein, 465 aa, unidentified
  REGION 1..465: note = Human gut metagenome
MSTCVCVLSNNGERLMPTIRLGKVRHLLKDGKAKIIKHHPFTIQLLYDSETNIQPIEICEDVGYNYIGISVKSQSHEYVSAQYDTLQDEKSCHDACRRMRRTRRNRLRYRQKRFDNRKRDKGWLAPSLKHKKELNVNVIKMYCEVVPITHATVEVGSFDTMLVKAIEEGKATPEGADYQKGPRYNLATLREAVFYRDNYTCQVCGREASEGAILHVHHMFYWKGRHDNSLSELITVCEKCHTPANHQKGGKLYGFGEDIKFANLSGAAFMNTVRWQIVNELYAAFGKPFVTFTYGAMTKEKRIALHLDKSHSNDAYAMGNFHPVDRCAFEHYEKVKRNNRILEKFHDSRYIDIRTGKEAKGKELFNGRISRSHKKDSENLHKYRGKRIRKGYRALRRKKVALNSGDLVSLNGETLIVHGTHTNKKGNVRVEFKVAALNGKKSASLKKLKIVKTSTPMHSAWAKVS

SEQ ID NO: 18282 - protein, 418 aa, unidentified
  REGION 1..418: note = uncultured Bacteroides sp.
MVYVLGQDGHPLMPTCRHGKVKRMLKSRMAKVVKKCPFTIQLQYESTTHTQKINLGIDAGSKTIGVSATTESKVLYESEVVLRNDIVELLSGRRALRRSRRNRKTRYRKPRLDNRRRPDGWLAPSIRQKIKTHVTVVENVMKILPVTKIIVETASFDIQKIKNPKIEGAEYQYGEQLDFWNVREYVLFRDGHTCQCCKGKSKDNILNVHHIESRKTGGNAPNNLITLCETCHKAYHKGVITLPKEIHRGMRFRDAAFMGIMRWAFYDRLKELYTPFGVEVINTYGYITKNTRIEHGLPKEHYVDARCISGNPAAKPLGHYYFQKKVRCHNRQIHKNTILKGGIRKRNQAAYLVNGYRLFDKVKYQNQEYFIFGRRSSGFFDIRTLDGTKVNKGSISCKKLQLVEKSKHYLTEQRKVAA

SEQ ID NO: 18283 - protein, 411 aa, unidentified; identical to SEQ ID NO: 5446
  REGION 1..411: note = Human gut metagenome

SEQ ID NO: 18284 - protein, 431 aa, unidentified; identical to SEQ ID NO: 3801
  REGION 1..431: note = Human gut metagenome

SEQ ID NO: 18285 - protein, 414 aa, unidentified
  REGION 1..414: note = metagenome
MPCSPAKARLLLKEKKAIVKRRTPFTIQLTIATGETKQPVGLGVDAGYKHVGLSASTDKAELYASQVELRQDITDLLSARRALRRARRNRKTRYRAPRFDNRIRTKRKGWLAPSVENRINAHLSRIEAVLRLLPVTKITVETASFDMLLLKNPDIAGKEYQEGEQLGFWNVREYVLFRDGHVCQHCYGRSKDPVLNVHHLESRRTGGDSPGNLITLCETCHEALHRGEIALKTKRGHSFRAEAFMGMMRWEVLNRLKASHSELEVNNTYGYRTKHARIVNGIDKSHCADAFCIAGNLGAERLCEFFFQKQTRRNNRQIHKLSILKGGIRKRNQAPFEIKGFRLFDKVACKGEESFIFGRRSSGYFDVRKLDGTRISAGISYKKLRLLEKRRTYLTEIRKEEALPPLPEGRGLRA

SEQ ID NO: 18286 - protein, 439 aa, Ktedonobacter sp.; identical to SEQ ID NO: 9125

SEQ ID NO: 18287 - protein, 420 aa, unidentified
  REGION 1..420: note = Human gut metagenome
MQYAYVLNKRGEPLMPCSPGKARILLKQQKACVVKRTPFTIKLLHGSAGYKQPITLGVDAGSKHVGLSASTEKRELYSEEFTPRNDVVELLSTRRQSRRSRRNRKTRYRAPRFDNRVHSKHKGWLAPSVEVKIQEHITVIKRICRILPVTLVRVETAEFDTQRLKAMLAGKPLPVGTDYQLGEMYDEYNVRQYVLKRDNYTCQCCGAHTTAKKAVKLHVHHLESRKVGGNAPSNLITLCTTCHNNLHKGKITLDGKKRGKTLRDAAFMGIMRNTLLTRLRNELHIPVQNTYGYITKLLREQNDIKKSHVNDARCISKHPLAEPCSICYRTKAIRHHNRQIHKAKILKGGIRKANQAPYIVKGFRLWDKVLYNEQECFISGRRSSGYFALRKFDGTTITNSISFKKLRLLEPATNYLIERK

SEQ ID NO: 18288 - protein, 427 aa, Nostoc sp.; identical to SEQ ID NO: 2670

SEQ ID NO: 18289 - protein, 420 aa, unidentified; identical to SEQ ID NO: 9880
  REGION 1..420: note = Human gut metagenome

SEQ ID NO: 18290 - protein, 406 aa, unidentified; identical to SEQ ID NO: 6079
  REGION 1..406: note = Human gut metagenome

SEQ ID NO: 18291 - protein, 502 aa, unidentified; identical to SEQ ID NO: 11560
  REGION 1..502: note = Human gut metagenome

SEQ ID NO: 18292 - protein, 478 aa, unidentified
  REGION 1..478: note = Human gut metagenome
MVVYILNKDNKPLMPCRPQRARKLIKEKKAKVVSYKPFTIKLLYGSYGYTQNTNLGIDLGSKHIGVAISSQDIVLSKGEIELRQDVSSLIETKATLRRSRRNRKTRYRKCKFNFRNKRVFNTPKGTKLKPLKKVAKAPIANHLEKQVGCSKGSNSKNNWRTLATNIDSSRLDGWLPPSIQSRIDNTFFWIDKYYNLLPKCNLSIEVGKFDMAKMINSEIEGTDYQQGEAFGFYNTRYYVFARDNYTCQVCKKSKDKILHTHHVLYKSKGGSDRAENLATVCDDCHTYENHQPGGILYEWMIKKKKMKSYKEPPFMNAMRIRIFKKYPNANITYGSITTPKRKELGLDKSHFNDAIAISGIDTIKSNCNEVFKIRQFRKKKRSLHEATARKGRKTKNTESKRNEKNTNYANGFYLNDKVEIFGQAGYITGFSGTSSVYVKNINDEYITIPEKKYKQVPISNLKFVSHNNNWQYEHCWSV

SEQ ID NO: 18293 - protein, 434 aa, unidentified; identical to SEQ ID NO: 9304
  REGION 1..434: note = Human gut metagenome

SEQ ID NO: 18294 - protein, 456 aa, Halomonas sp.; identical to SEQ ID NO: 17892

SEQ ID NO: 18295 - protein, 420 aa, unidentified
  REGION 1..420: note = Mouse gut metagenome
MVYVISIDNEPLMPCSNVIARLLLKNGKAKVKRKCPFTIKLRYPTSTYTQNLTLGVDTGSSHIGSSVSDDKGNIYYMSDTKIRNDIADKMKQRLAYRRNRRERKTRYRKARFLNRKNSKKKDRFSPTMISKFHSHVKEIEFIQSILPITTLVLETGNFDTHLMKNPSLAKENVKHWGYQQGANYGFENTKAKVLNRDNYTCQCCKGKRKDSKLEVHHIIFRSNGGSDEEDNLITLCHTCHFKVHHGLQKLNLKGKVKGTLKFATQMNSIRKHLLERVYPDAIETFGYVTKQNRYLNGVEKSHYLDACMIASGGKQIKILQKEVYFKVDVAKGDYQQRKGIRSEKVIPTGKMKGIRKFDKVRYLGKEYFVKGRMSSGYGILMDIDGKKIDFSHLKKGKTPKLDNLERISARTTQMIDRKVI

SEQ ID NO: 18296 - protein, 423 aa, Scytonema sp.; identical to SEQ ID NO: 3612

SEQ ID NO: 18297 - protein, 424 aa, unidentified; identical to SEQ ID NO: 12629
  REGION 1..424: note = Human gut metagenome

SEQ ID NO: 18298 - protein, 458 aa, unidentified
  REGION 1..458: note = Fermentation metagenome
LVFVLNYKKKPVDMCSNAEARILLKKGYAVVHKAHPFTIRLKRDADYSQETEKEYKLKIDPGSKHTGVAIVDDEDSVVFLGEIEHRGSQIVALLKTRSNVRRNRRSRKTRYRRCKFVNYYLKKDSKYKADSNRPKGWFPPSIESIKNNIVNFLKKYKKLCNITSVSIESVKFDSQLLENPDISGVMYQQGTLFGYELREYLLDKYGHNCQYCSGESKDTRLEIEHKVPKSRGGSDRVDNLTIACRSCNQDKSNLTLEKYLNRLKNAKSKNKLTQKRINNITDILDKGTIHKHQRYSAWVNSYRLKLIEEIKPLVNDVELSTGGRTKYNRTNLNLPKTHYYDALCVGEVPENFNFKTDKVLEIKAYGRGSRFRGRTNSCGIITKNLPRQKNFFGFQTGDIVKANVAKGKKAGSYYGRVAVRSSGYFNIQEKNKTTQGIKHTDCKIVQRSDGYGYNLKDV

SEQ ID NO: 18299 - protein, 451 aa, unidentified; identical to SEQ ID NO: 2593
  REGION 1..451: note = Human gut metagenome

SEQ ID NO: 18300 - protein, 413 aa, unidentified
  REGION 1..413: note = Human gut metagenome
LKVFVLNMRGKPLMPCSPAKARHMLKAGKAFVVRRTPFTIKLTIATGETKQDVTLGVDAGARHVGISATTEKEEVFASEVALRQDITGLLADRLAFRRARRNRKTRYRAPRFNNRVRSKHKGWLAPSVENRIQAHISRIEAVCRLLPVTKIVIETASFDIQKIRNPEVEGTGYQQGDQLGFWNVREYVLFRDGHICQHCRGRSKDPILNVHHLESRKTGGDAPNNLITLCETCHKAYHAGKIKLKVKRGHSFRAEAFMGIMRWTLLNRMRKAHPSLPVENTYGYLTKHKRIALGLPKTHCADAFCIAGNLKALRRGDFLFQQQTRKHNRQIHRCSILKGGVRKLNQAPFLVKGFRLFDKVRIGGQIGFVFGRRVRGIFNIRRLDKTVIGTDINCKKLSLLEIRKTFLTELRKE

SEQ ID NO: 18301 - protein, 420 aa, unidentified
  REGION 1..420: note = Human gut metagenome
MQYVYVLNKHGEPLMPCSPRKARLLLKQKKACVVKRTSFTIKLLYGSTGYKQPITLGVDAGSKHIGISATTEKHELYREEATPRNDVVDLLSARRAFRRSRRNRKTRYRAPHFNNRVHSKHEGWLAPSVEVKIREHITLIKRVCRTLPVTLVRVETAEFDTQRLKAMLEGKPLPVGTDYQLGEMYDEYNVRQYVLKRDNYTCQCCGAHSTKTKDVKLHVHHIETRRTGGNAPNNLITLCTDCHKALHAGKVTLDGKKRGKPLKDAAFMGVMRKTLMERLRKKLKIPVQGTYGYITKYLREKNGIPKSHTNDARCISKNPLAIPCDTCYYTKAVRHHNRQLHKATILKGGIRKANQAPYIVKGYRLWDKVSCNGTECFITGRRTSGYFALKKLDGTVVSNSTSYKKMRLLEVATNYITERR

SEQ ID NO: 18302 - protein, 452 aa, Lactobacillus sp.; identical to SEQ ID NO: 3322

SEQ ID NO: 18303 - protein, 413 aa, unidentified; identical to SEQ ID NO: 5477
  REGION 1..413: note = Human gut metagenome

SEQ ID NO: 18304 - protein, 416 aa, unidentified
  REGION 1..416: note = Human gut metagenome
MVYVLDKNGQPLMPTDRHRKVRLMLQSGQAKVIKRCPFTIQLTYNTGHQAQEISLGIDAGSKHIGVSATTKTRVLYEADVELRNDIVDLLSSRRELRRGRRNRKTRYRPARFDNRRREDGWLAPSIRQKIGTHLTVVENICKILPISRITVETASFDIQKIKNPDIQGAEYQQGDQLGFWNNREYVLFRDNHTCQCCKGKSKDKILNVHHIESRKTGGNAPNNLITLCEICHTGYHKGAVQLPKTVKRGMRFKDAAFMGIMRWAFYEALKQQYEPVGTPVHNTYGYITKHTRIAYNLPKEHYVDARCISGNPEASSNGEYYYQKKVRCHNRQIHKLTVLKGGIRKQNQATYLVKGYRLFDKVSYQGKGYFVFGRRQSGFFDIRTLSGEKVNKGSLSCKKLKFIATRTYYLTERRAV

SEQ ID NO: 18305 - protein, 423 aa, unidentified; identical to SEQ ID NO: 10848
  REGION 1..423: note = Microcoleaceae bacterium UBA9251

SEQ ID NO: 18306 - protein, 512 aa, unidentified
  REGION 1..512: note = Human gut metagenome
MSTVYVLNKDGKPLMPTTRCGHVRHLLKEQKARVVTSKPFTIQLLYEADDVVQSLYLGIDPGRTNIGVAAVKADGTAVFTAHLETRNKEIPKLMKKRKESRRTRRTNGRRCRRQRRAKANGTISKKCVKHDTAQNGSVSKRAKEIGVIKRHLPGCEKDVLCIGIKNKEAKFSNRTRPEGWLTPTANQLLQTHINLVKKIQKFLPISDVVLEINKFAFMRLDNPNVQKWQYQQGPLYQKANLEETVSEMQEHHCLFCKKKIDHYHHVVPQHKNGSNTIDNIIGLCTQHHDLVHKDATWQKRLAKKKTGLNKKYGALSVLNQIIPALTKELSSLFPKHFFVTNGKSTYDYRAAHGVSKDHWLDAYCIACSVLPNDTCDKTINSRVPYELKQFRRHDRRALNNENMSRVYTFNGKMVATNRHKATEQTTDSLEEFRQRQPNDVCNLKVKEHHPTYRNMNRNYPGSVFLVGNQVHVMQGIAGSKDGEATTYKDTNANSIAAGKCKFVAKNSGILFV

SEQ ID NO: 18307 - protein, 465 aa, unidentified; identical to SEQ ID NO: 3856
  REGION 1..465: note = Human gut metagenome

SEQ ID NO: 18308 - protein, 432 aa, Moorena sp.
MWSTHNRSNAELSERRNTLVVYVISKDGKPLMPTTPARAKKKLRSGKAKCIRRTPFTIKLTYDSKEFTQPLTHGIDTGSSIIGSAVVDNNGEVVYLSEIEIRNDITDKMKQRAKYRRNRRNRKTRYRKARWQHRKNSIRNDRFSPTMTSKINSHLKEIRFVKSILPITHLILETATFDPHALKNPAVLQNKWLYQKGINYGFANTKAFVLDRDSYTCQYCGGKTKDSRLHIHHITFRMNGGSDEADNLITLCKTCHDKLHDGLIQLKGGKHKGQLRHATQMNSIRQQLLRQLNCDETFGFITKEHRQLMSLPKEHHMDAVAVASQGNGVTFKTSVMLQKKCLADGDYQKTKGIRSEQPITTDKICGFKKFDKVRYGGIDYFIKGRMSTGYAILMNIHGEKVAMKPIPKLDKMKRISARKSWIIQAETIRNIV

SEQ ID NO: 18309 - protein, 424 aa, unidentified
  REGION 1..424: note = Human gut metagenome
MVYVISKDGNPLMSCCNVIARLLLKQGKAQVKKREPFIIKLNYETTNYLQNLTLGVDTGSRTIGTAVSNDNGDILYMSEVVVRNDIPEKMTQRAKYRRNRRNRKTRYRKARWLNRANSIKNDRFSPTMRSKLYSHVKEIECIKSILPITQMVFETGQFDTHLMKNPSLANPRIRRWGYQKGPNYGYENTKAMVLNRDNYTCQCCKGKHKDSKLEIHHIVFRSKGGSDEASNLITLCHTCHKDLHSGKINPKLKGRIKGNLKFATQMNTIRKQLFRLYPNAIETFGYITKANRLQLGVNKEHYYDACTIATQGNRFTIKSNLYKKKCISDGDFQQTKGICSKQPIVTNKIHGFRKFDKVRYLGKNYFIKGRMSTGYAVLMDINGKKADFSNMPKGFKTPKMANFKRIEARTTWMTTTVVLTSNIA

SEQ ID NO: 18310 - protein, 423 aa, unidentified; identical to SEQ ID NO: 12332
  REGION 1..423: note = coral metagenome

SEQ ID NO: 18311 - protein, 518 aa, unidentified; identical to SEQ ID NO: 8622
  REGION 1..518: note = Human gut metagenome

SEQ ID NO: 18312 - protein, 361 aa, unidentified; identical to SEQ ID NO: 7533
  REGION 1..361: note = Human gut metagenome

SEQ ID NO: 18313 - protein, 423 aa, Moorena sp.
MRVFVLNNNLQPLDPCKPARARILLSTGKAKVYRRYPFTIVLREEIKEPITHEHQLKIDPGAKTSGLAIVQGERVIWGAELTHRGFKIRDALNFRRQLRSSRRNRKTRYRKPRFLNRTRPEGWLPPSLMSRVQNILTWVKKLTRLCPVAGISQELVRFDTQKLQNPEISGIEYQQGTLYGYELREYLLEKWNRKCAYCGATGIQLEIEHIKPKSKGGSDRASNLTIACHPCNQAKSNQDIELFLSLKPSILKRILSQAKRPLVDAASVNSTRWKLYHELKSIGLPVEVGSGGLTKFNRCRQNLPKTHWLDAANVGKVETLIVEVTHPLIITAKGHGTRQLCRTNKYGFPIRHCSRIKFHKGFQTGDIVRAVVTKGKKVGTYVGRVATRKSGSFNISTKLGLVQGISHKYCQFIHRKDGYAYTN

SEQ ID NO: 18314 - protein, 407 aa, Succinivibrio sp.; identical to SEQ ID NO: 12001

SEQ ID NO: 18315 - protein, 448 aa, unidentified; identical to SEQ ID NO: 4254
  REGION 1..448: note = Human gut metagenome

SEQ ID NO: 18316 - protein, 424 aa, Moorena sp.; identical to SEQ ID NO: 2430

SEQ ID NO: 18317 - protein, 431 aa, unidentified; identical to SEQ ID NO: 15055
  REGION 1..431: note = Human gut metagenome

SEQ ID NO: 18318 - protein, 417 aa, Sutterella sp.; identical to SEQ ID NO: 8821

SEQ ID NO: 18319 - protein, 450 aa, Moorena sp.; identical to SEQ ID NO: 2935

SEQ ID NO: 18320 - protein, 420 aa, unidentified
  REGION 1..420: note = Human gut metagenome
MQYVYVLSKHGEPMMPCSPGKARLLLKQQKACVVRRTPFTIKLLYGSAGYKQPITLGVDAGSKHVGLSASTEKRELYREEFTPRNDVVELLSTRRQNRRSRRNRKTRYRAPRFDNRVHSKHKGWLAPSVEVKIQEHITIIKRICKILPISLVRVETAEFDTQRLKAMLAGKPLPVGTDYQLGEMYDEYNVRQYVLKRDNYTCQCCGAHTTAKKLVKLHVHHLESRKTGGNAPSNLITLCTTCHKNLHKGKVTLDGKERGKPLRDAAFMGIMRKTLMARLKKELPIPVQGTYGYITKMRREQNDIKKSHTNDARCISKHPLAEPCSVCYRTKAIRHHNRQTHKANFSKKGIRKRSQMPYLVEGYRLWDKVLYKEQKCFVSGRRSSGSFTLKKLDGTSVSKGVTFKKLRLLEPATNYLIERM

SEQ ID NO: 18321 - protein, 408 aa, unidentified
  REGION 1..408: note = Fermentation metagenome
MPCENVVARLLLKQKKAKVKRKTPFTIKLLYDTTEYVQDCTLGVDTGSSHVGTSVINSKNEVLYMSDVEIRNDIADKMSQRAKYRRNRRNRKTRYRKARWLNRKNSIKKDRFSPTMRSKLDSHMKEIEFIKSILPISRLVMETATFDPHLLKNSSLHNPIYKKWGYQQGGNYGFENTKAKVLNRDNYICQHCKGRRKDSKLEVHHIIYRSNGGSDEEDNLITLCHTCHKCVHSKSIKLKLLGKRKGQLKHATQMNSIRLQLLKLCSDAIETFGYITKANRLLLRVDKKHHLDACIIASGGNKFTIRQNILYRKKCIPNGDFQQTKGVRSQQAIPTGKIQGFRKFDKVRYLGKEYFIKGRMSSGYAILMDIEGNKVDFSSMPKGWKTPKLSNCKRISARKTWMVDSLVV

SEQ ID NO: 18322 - protein, 472 aa, unidentified
  REGION 1..472: note = Human gut metagenome
FRQVPFTIQLTYENEPVLQPVTIAEDPGRSNIGMAVVSLSGELLSAAVVQTRNKEIAKLMEKRKQHRRASRNGERKARQRLAKKCHTMFKAGFLMRKLPMYGKDKRVKCHVIRNTEARFCNRKRKDGWLTPSAEHLVRTHINLVHKMQKFLPITDVAVEINRFAFLSLEDPSVSGVDFQNGPLKGYDNLNAAVEDLQDGHCLMCKDPIEHRHHIVPRSIQGSNTIENIAGLCCKCHEKVHKNAAFEKRLKKKKAGLDKQYAAVSVLNQAIPFICKRLEQEFGKEHVHYCSGRETAMVRRSFGYHKTKEEPLHEVDAWCIAVLSLQQVPEKAPEFDHVHKIMQFRRQDRSRIKAQTSRTYYYEGKKVAKNRKKAEGQKEDSLQEWRECQITLYGEEQARKMTSQLKVRKSIRRYNRLDRLMPGAVFYYKGTRYVMRGQHGNGRYLQAVGMGNKDFPVKDCKIVIQNEGLVFLS

SEQ ID NO: 18323 - protein, 424 aa, unidentified; identical to SEQ ID NO: 3232
  REGION 1..424: note = Human gut metagenome

SEQ ID NO: 18324 - protein, 423 aa, Arthrospira sp.; identical to SEQ ID NO: 3079

SEQ ID NO: 18325 - protein, 423 aa, Arthrospira sp.; identical to SEQ ID NO: 12548

SEQ ID NO: 18326 - protein, 431 aa, unidentified; identical to SEQ ID NO: 2746
  REGION 1..431: note = Human gut metagenome

SEQ ID NO: 18327 - protein, 457 aa, unidentified
  REGION 1..457: note = Human gut metagenome
MDAVAVISASGKPLMPTSPVRARKLIKKGKAVIYKYRPLFTIRLTERTDGDIQTIEYCCDTGYQHIGLSIKSRKHEYVNEQRDLLPDETEHHNDSRMYRRARRRRKLRHRACRRDNRHDNQICKDGYAPSIRNRRDQHISLYKSYTRILPVERAVFEMGQFDTQVLKAIEKGEPVPQGKDYQHGYRYGYATLREAVFARDNYTCICCGKNAFKDKRIMCVHHLGFRTGDRTNRLANLATVCTKCHTPKNHQPKGKLYNLKPKLKDFKGATFMTMVRWDMLDRLKTVSKGVRVDVTYGAATKEARHDLKIKKSHANDAYCMGNFHPSHRTDLKRYEKCRRNNRVLSKFYDATYIDIRDGEKKKANALGCNRTKRRESRRSEKNERIYRGKKMSKGRIVLRTKRAVIRPGDTVHVGKKKYIVASSKNLGAQLKLADGSLLTASKVTEIIHCGGWKTVNL

SEQ ID NO: 18328 - protein, 447 aa, unidentified; identical to SEQ ID NO: 12599
  REGION 1..447: note = Human gut metagenome

SEQ ID NO: 18329 - protein, 424 aa, Succinivibrio sp.; identical to SEQ ID NO: 15364

SEQ ID NO: 18330 - protein, 431 aa, Escherichia sp.; identical to SEQ ID NO: 10818

SEQ ID NO: 18331 - protein, 421 aa, unidentified; identical to SEQ ID NO: 4235
  REGION 1..421: note = Human gut metagenome

SEQ ID NO: 18332 - protein, 439 aa, Campylobacter sp.; identical to SEQ ID NO: 4429

SEQ ID NO: 18333 - protein, 415 aa, Bacillus sp.; identical to SEQ ID NO: 2431

SEQ ID NO: 18334 - protein, 413 aa, unidentified; identical to SEQ ID NO: 7541
  REGION 1..413: note = Human gut metagenome

SEQ ID NO: 18335 - protein, 427 aa, unidentified
  REGION 1..427: note = Plant metagenome
VSKIFVIDQNKRPLAPIHPAQARQLLKNKKAAIYRQFPLTLILKESRTESPVSLNRLKIDPGAKHTGIALVNDTSGEVVFAAELKHRGFAIRDALTSRRQLRRSRRARKTRYRKPRFLNRTRPSGWLAPSLQSRVDNIKTWVDKLRRFAPITSISQELVRFDMQLMRKPDIQGREYQQGTLAGYETREFLLEKWGRQCAYCQVLDVPLQIEHIHPRAKGGSNSISNLTLSCEKCNTKKGARDIKDFLKKDPSKLEKILKQAKRPLADAAAVNTTRFALLEVLKATGLPVETGSGGLTKFNRSQHNLVKTHWLDAACVGKSTPKLIIKGVKPLLIAANGHGSRQSCRTDKFGFPSRHVPREKIHFGFQTGDIVKSFVTTGKKIGNYVGKVAIRSSGSFNVSTKNGLVQGISHKFCKRIHAKDGYSYAY

SEQ ID NO: 18336 - protein, 470 aa, unidentified; identical to SEQ ID NO: 2949
  REGION 1..470: note = Human gut metagenome

SEQ ID NO: 18337 - protein, 414 aa, unidentified; identical to SEQ ID NO: 2588
  REGION 1..414: note = Human gut metagenome

SEQ ID NO: 18338 - protein, 352 aa, Parasutterella sp.; identical to SEQ ID NO: 7917
  SITE 40: note = misc_feature - Xaa can be any naturally occurring amino acid

SEQ ID NO: 18339 - protein, 430 aa, unidentified; identical to SEQ ID NO: 16611
  REGION 1..430: note = gut metagenome

SEQ ID NO: 18340 - protein, 512 aa, unidentified
  REGION 1..512: note = Human gut metagenome
MSTVYVLNKDGKPLMPTTRGGHVRHLLKEQKARVVTSNPFTIQLLYETDDVVQPLYLGIDPGRTNIGVAVVKADGTAVFTAHLETRNKEIPKLMKKRKNSRRARRTNGRRCRRQRRAKANGTISKKCVKQDTAQNGSVSKRAKKIGVIKRHLPGCEKEVLCIGIKNKEAKFSNRVRPEGWLTPTANQLLQTHINLVKKIQKFLPISDVVLEVNKFAFMQLDNPNIQKWQYQQGPLYQKANLEEAVSEMQEHHCLFCKKPIAHYHHVVPQSENGSNTIGNIVGLCTKHHDLVHKDTEWQKKLAKKKTGLNKKYGALSVLNQIIPALTKELSSLFPKHFFATNGKSTYDYRAAHGVSKDHWLDAYCIACSVLADDVCDNNINSHVPYELKQFRRHDRRALHKENMSRVYTLNGKSVATNRHKATEQTTDSLEEFRQCQPDDVCKLKVKEHYPEYRNPKRNFPGCVFLVGKHTHVMQGTSGSHNGKADGYYDTNGNSYSSGECKFVAKNEGIVFA

SEQ ID NO: 18341 - protein, 470 aa, unidentified
  REGION 1..470: note = Human gut metagenome
MSVFVVGLNGCRLMPVSERKARLLLKGGKASVYRKVPFTIKLNYKTGSTVQPGYLGIDTGSQHIGVSVVRQDGTVLHKEEIGLRDSMSKRKLLESRASLRRGRRYRKTRYRHPKWKPKTKRIYSEKADRKGRHWKKQKNTFTSKRQAGWLPPSLQSKTDHHIQWIRKLLHLLPEGYRLSIELGRFDPARMKDPGIHGELYQKGPQYDYENVRAYVLARDGYTCRVCKKKGGKLHVHHILYRSRGASDDPKYMAAVCSNCHTTENHLPGGILYQWMQDQKKFTRGLRDATFMNILKKRLRRAFPDAVFTYGNITKADREKLGLPKSHGNDATAIALVKTGVTSVRDEEPVIHIQQVRRKKRSLHEETPRKGRKEPNRTASRNDKNTRSVTVSKGSGKKKVSMTACLFDRVELDGKKGWITGFTGTSCYVKDKEDNYICTSPKYKQVSISKLRILHHCGNWVIGAEKPLGKG

SEQ ID NO: 18342 - protein, 480 aa, unidentified
  REGION 1..480: note = Human gut metagenome
MKGKNMVITLDKNKRPLGFMSERRCRILLEKKRAVLYRYFPTIVILKDVDARKLSGLSSYRIKIDPGAKYTGIAIVMDDTNEFMYAMQIEHRGEQIKKNLDTRRGARRNRRSRETGYRRPKWGNRCTAKEQRQSYDSRRDENWLPPSVKSTADNIISWIRRLCRWINITNCSIESVRFDTQLMENPEIEGVEYQQGTLYGYEVKEYLLEKYGHTCQYCGGKSSDPILEWEHMLPRSRGGSDRLKNASLACHNCNQDKGNHTLEEWQTILQDRIPKERGKQKELDQIRQKFVQQVMEGKTPVKGLRYAAWVNSSRGYLQRHLYLRFPELECSSGGRTKYNRNVLKYPKEHHYDALCVGEIPEDGFVDRTNGYYLYAKATGRGTRLRGQINQCGVIIRKWMDRSKTAFGFQTGDLVVADVPKDTKYKYKGHFSGRVMIRKSGSFDIRTLSGELVTVNAKFCRLLQNNSGYQMMIKRAIPLGN

SEQ ID NO: 18343 - protein, 415 aa, unidentified; identical to SEQ ID NO: 15940
  REGION 1..415: note = Human gut metagenome

SEQ ID NO: 18344 - protein, 447 aa, unidentified
  REGION 1..447: note = Human gut metagenome
VPAYRFKHITKKEVPYMVYVLDIDGQPLMPTSRHGKVRRLLNSHLAKVVKRCPFTIQLLYQSTKETQPVSLGVDAGSRHIGLSATTEREVVYQEELVPRNDIVKLLSARRALRRSRRNRKTRYRKPRFNNRVHSKHKGWLAPSVEVKIQEHITAIKRICQILPIFDIHVETAEFDLQRLKAMEEGRSLPLGTDYQLGEQYDFYNTRQYVLHRDEYTCQCCGTHDNNVKLHVHHIESRQTGGDAPNNLITLCEHCHKLLHAGKTILPKDKKRGRSYRDATFMGVMRKTLLERLKKEIDVPVAGTYGYITKYWREKTGLEKSHINDAICISKHPYAKSLDTYYLTKAVRHHNRQIHKSNFSKGGIRKRNQAPYLVKGFRLFDKVLYQGKSYFIFGRRATGYFDIRTLDGTKVNKGSIKYKKLRIQDTTKAYLKGARAIPHMNKFTCVLA

SEQ ID NO: 18345 - protein, 544 aa, unidentified; identical to SEQ ID NO: 12025
  REGION 1..544: note = Human gut metagenome

SEQ ID NO: 18346 - protein, 472 aa, Moorena sp.; identical to SEQ ID NO: 4432

SEQ ID NO: 18347 - protein, 406 aa, unidentified; identical to SEQ ID NO: 4271
  REGION 1..406: note = Human gut metagenome

SEQ ID NO: 18348 - protein, 424 aa, unidentified
  REGION 1..424: note = Lachnospiraceae bacterium
LRVFVKNLRGQSLMPCSQRKARLLLKNKKAKIYCYNPFTIQLLYATGETVQKCNIGIDTGSRHIGLAITSEKKVLFKGEINLRQDVKSNLDTRRIYRRNRRNRKTRYRKARFLNRVKSKKQNWLPPSIESKINHTFNWIDKLENLAADTKLHIEAGKFDIAKMIRPDIQGKDYQQGQCYGYFDTRYFVFARDGYTCQCCKKKNKILNTHHIIYRSNGGTDRADNLITVCTDCHTSENHEKGGILYEWQQRHKKVKQYKEPPFMNIIRKRILKKYPDAVICYGSQTTPKRKDMNLDKTHYNDAIIISGIEDIKENPDEWLLIKQFRKKKRSLHEANARKGRKEPNITQKRNSKNTSYYKGMYLNDYVEVFGQKGYISGFTNGGVYVKNTNDGYITMPGKKYKQVSISNIVRICHNNNWQYYMQNI

SEQ ID NO: 18349 - protein, 277 aa, unidentified; identical to SEQ ID NO: 16282
  REGION 1..277: note = Human gut metagenome

SEQ ID NO: 18350 - protein, 441 aa, Sulfobacillus sp.; identical to SEQ ID NO: 4231

SEQ ID NO: 18351 - protein, 490 aa, unidentified
  REGION 1..490: note = Human oral metagenome
MYVVYVLNRQGKPLMPTKRFGHVRRMLKTGKAKAISTKPFVIQLQYESTDFIQPLYGGTDPGRTNIGEAVLNGKGEVVYAAHVTTRNKEIPKLMADRAAHRRASRRGERLRRKRRAKANGTMTYFPEGRKLPGYKDGVLELKDIINTESRFNNRKRPAGWLTPTARQCIQTHLNMVQNICKILPVTDWTLEYNRFAFMRLEDDSVRGWDFQNGRLKGYASKEDYIYALQGGVCICCGASIEHYHHIKPRHKGGSDTPENLVGLCSVCHTEIHTGKRSLDKIGKYKEYAGTSIVNIAIPFIWDGIVKMFGDKAHICEGQETAELRKANNLPKEHFADAVCIAGIGSGIIPQYDDNQPFELRQFRCHDRSRIHSQAERTYLDGKTVVAKNRKPRFEQKGDALSDLQSKMTKEHGELAARRVVSKLVVKKSYRRYNAYERIKPSAVFVFNNKKYLLSGQLTNGRYYRAFGEGTKNFPSRNCELVSFGYSLTYM

SEQ ID NO: 18352 - protein, 492 aa, unidentified; identical to SEQ ID NO: 4486
  REGION 1..492: note = Human gut metagenome

SEQ ID NO: 18353 - protein, 518 aa, unidentified; identical to SEQ ID NO: 2751
  REGION 1..518: note = Human gut metagenome

SEQ ID NO: 18354 - protein, 429 aa, unidentified
  REGION 1..429: note = Human oral metagenome
MLVYVLKQNGQPFMPTSRFGKVRRLLKEGKAKVIRREPFTIKLLYRPETDVIQECYCGVDTGSKHIGVAVVGNDKVLYQSQTELRSDIKKKMNRKRASRRNRRNRKTRYRKPRFLNRRNSIREDKLPPSVQHKVQTHINEIEFCKKILPVSDLILEVSQFDTALMKNPGLMNEKVKHWGYQKGFNYGYSSRRSAILHRDNYTCQCCGKKNCRLEVHHIKFKSNGGTDDEENLITLCTDCHKGVHAGTVVLNKKPKKSKNLKYATHMNVIRSQLLKEYPDAIETFGFVTSENRNHLNLPKDHYIDACVIASGGLEFKELDVIYRKRRVSIQDRVLTKGVRGEQKLPIGKIFGFKKFDKVEYLGETCFIKGRRSSGAFVLMDIDNNSIDFRDRGGKQNPSYKCIERVSTRKSVLCVSKRIEREVRLIPILS

SEQ ID NO: 18355 - protein, 465 aa, unidentified; identical to SEQ ID NO: 3070
  REGION 1..465: note = Human gut metagenome

SEQ ID NO: 18356 - protein, 424 aa, Petrotoga sp.; identical to SEQ ID NO: 8893

SEQ ID NO: 18357 - protein, 429 aa, Parasutterella sp.; identical to SEQ ID NO: 3656

SEQ ID NO: 18358 - protein, 416 aa, unidentified; identical to SEQ ID NO: 9947
  REGION 1..416: note = Freshwater metagenome

SEQ ID NO: 18359 - protein, 414 aa, unidentified
  REGION 1..414: note = Human gut metagenome
MPCSPAKARLLLKEKKAIVKRRTPFTIQLTIATGETKQPVSLGVDAGYKHVGLSASTEKAELYASEVELRQDVSDLLSARRALRQSRRNRKTRYRAPRFDNRIRTKRKGWLAPSVENRINAHLSRIETVIRLLPVTKISVETTSFDMQLLKNSDIAGKEYQESEQLGFWNVREYVLFRDGHVCQHCHGRSKDPVLNVHHLESRRTGGDSPGNLITLCETCHKELHRGEITLKAKRGQSFRAETFMGIMRWEVLDRLKASHPKLEVQNTYGYRTKHARIVNGIAKSHCADAFCIAGNLGAERLGEFLFQKQTRRNNRQIHKLSILKGGIRKRNQVPFEVKGFRLFDKVACKGEEGFIFGRRSSGYFDVRKLDGTRISAGISYKKLRLLEKRQTYLTEIRKEEALPPLPEGRGLRA

SEQ ID NO: 18360 - protein, 428 aa, unidentified
  REGION 1..428: note = Human oral metagenome
MLVYVVDKNGQPLMPTHNGAKVRVLLKHKRAKVVSKCPFTIKLLYESTNFTQPLTLGIDTGSKYVGSAIINDVTAEILYESQLELRDDIKSKIDKRRQFRRVRRNKLRYRPSRFDNRKASKRKNHYTPTLISKFQGHTREIEFIKSILPVNDVVLEIGEFDTHLLQDSTLAYHKWDYAKGELYQQENFKQAAKARDGYKCQCCGKKNCRLEVHHLLPRSRGGSDKLANLITLCSDCHHLAYSSEEQLLAFQKRFGKKSKSVLSYATQMNILRSMLQKEYPDAELTYGFITKEIRRVFGLDKSHTIDACCIASRGVLFINENSNKYKKKCVPKGNYARTSVKGGRFVFLPSGKISGFKRYDKVLYNNKEYFVTGRMSNGYITLTDIDGNKPQVESVKRSTGEKYLSLAKIKVSLVKKISSAKTCIYTSV

SEQ ID NO: 18361 - protein, 413 aa, unidentified; identical to SEQ ID NO: 3220
  REGION 1..413: note = Human gut metagenome

SEQ ID NO: 18362 - protein, 516 aa, unidentified; identical to SEQ ID NO: 5652
  REGION 1..516: note = Human gut metagenome

SEQ ID NO: 18363 - protein, 627 aa, unidentified
  REGION 1..627: note = Erysipelotrichaceae bacterium
MQELEACICAVGDTMNAPTALVQVVALLQFMVKFRVHGIRNTVTLLPQKVPHWMHSNAVYDSELSFQKDVTVYMYVRVIAKDGTPLMPTRRCGNVRHLLETGMAVAIRTKPFTIRLKYETSKYVQALYAGIDTGRENIDSAVSKENGENVYLADTRSNNGTVHSKMYDRAGFRRKRCRHDRQNKQRKAKFDGTEMKKGDADKVRTTHDCISRKVSYPVAEKSVTHKVIQGKEGKFNNRKHPDGWITPSAKQLVQITMNEVKFMCDTMPIRQLSVERVSFDFQKLANVNIRAWEYGKGPLYGYRSYKDYFCDEQKGKCPFCGEDIAHYHHIMPRHRRGTDTVRNIIGVCESCHEKIHSGQITDEMLHEVKDGVAESFEVGLLNSVMPALIDAMKQFCDARNIRLVVMDGRTTSETRNRYHIRKDHCTDAYCISLAGRNIDPADVKLDDFIFMKRRFKKKSKNIINTLNQRVYYDGKKPVAYNRHRAMDQKTDSLEEYMTKYRRTHTGAETDKHFRSLTVRPAKRTYTFHKNGTIAAVHAGDVVRYVKYNKTYGNTKIDTFVALSCEMFGEGHVKYGNGTQGRKLKFCKTIASGALQCVGIEKTDTYLREVALEEAKRRAARVRRKRTG

SEQ ID NO: 18364 - protein, 458 aa, Lactobacillus sp.; identical to SEQ ID NO: 4474

SEQ ID NO: 18365 - protein, 512 aa, unidentified
  REGION 1..512: note = Human gut metagenome
MSTVYVLNKDGKPLMPTTRCGHVRHLLKEQKARVVASKPFTIQLLYKTNDVVQPLYLGIDPGRTNIGVAVVKADGTAVFTAHLETRNKEIPKLMKKRKDSRRARRTNGRRCRRQRRAKANGTISKKCVKHDTAQNGSVSKRAKEIGVIKRHLPGCEKDVLCIGIKNKEAKFSNRTRPEGWLTPTANQLLQTHINLVKKIRKFLPISDAVLEINKFAFMQLDNPNIQKWQYQQGPLYQKANLEEAVSEMQEHHCLFCKKPIAHYHHVVPQHKNGSNTIDNIVGLCTKHHDLVHKDTAWHEKLTKKKTGLNKKYGALSVLNQIIPALTKELSSIFPKHFFVTTGKSTYDYRAAHGVSKDHWLDAYCIACSVLPNDVCDSGINNRVPYELKQFRRHDRRALNNENMSRVYTLNDNVVATNRHKATKQITDSLEEFRQNHPDDVCKLKVKEHHPTYRNMNRNYPGSVFLIGKQVHVMQGIAGSKDGEATTYKDTNANSIAAGKCKFVAKNSGILFV

SEQ ID NO: 18366 - protein, 395 aa, unidentified
  REGION 1..395: note = metagenome
VVRRTPFTIQLTIATGESKQPVSLGVDAGYKHVGLSASTEKAELYASQVELRQDITDLLSARRALRRARRNRKTRYRAPRFNNRIRTKRKGWLAPSVENRINAHLSRIEAVLRLLPITKITVETASFDMLLKNPDIAGKEYQEGEQLGFWNVREYVLFRDGHVCQHCYGRSKDPVLNVHHLESRRTGGDSPGNLITLCETCHKALHRGEITLKAKRGQSFRAQAFMGIMRREVLNRLKASHSELEVNNTYGYRTKHARIVNGIDKSHCADAFCIAGNLGAERLCEFFFQKQTRRNNRQIHKLSILKGGIRKRNQAPFEAKGFRLFDKVACQGEEGFIFGRRSSGSFDVRKLDGTRISAGISCKKLRLLEKRRTYLTEIRKEEALPPLPEGRGLRA

SEQ ID NO: 18367 - protein, 292 aa, unidentified
  REGION 1..292: note = Human gut metagenome
LSRIEAVLRLMPVTKITVETASFDMQLLKNPDIAGKEYQEGEQLGFWNIREYVLCRDGHVCQHCYGRSKDPVLNVHHLESRGTGGDSPGNLITLCETCHKALHRGEITLKAKRGQSFRAEAFVGIMRWEVHNRLRALHPGIEVSNTYGYRTKHARIANGIAKSHCADAFCIAGNLGAERLCEFFFQKQTRRNNRQIHKLSILKGALRKRNQAPFEVKGFRLFDKVACQGEEGFIFGRRSSGFFDVRKLDGTRISAGISCKKLHLLEKRRTYLTEIRKEEALPPLPEGRGLRA

SEQ ID NO: 18368 - protein, 432 aa, Moorena sp.; identical to SEQ ID NO: 16069

SEQ ID NO: 18369 - protein, 420 aa, unidentified
  REGION 1..420: note = Groundwater metagenome
MFVYVINKHGKPLMPTNPRKARILLKQGKAKVVKRTPFTIQLIYGSSGYTQPVTLGVDAGSKTIGVSATTEKEVLFEAEVIPRNDIVNLLATRSQLRRSRRSRKTRYRQPRFLNRKKTKGWLAPSVQNKIQTHIKTVALAHSILPVTKIVVEVAQFDIQKIKDPNVQGKDYQQGDQLGFWNTREYVLWRDGHKCQGKKNCKHDILSVHHIESRKTGGNAPSNLITLCEFCHGDYHAGRLVLDIKRGQAFRDAAFMGIMRWVLYDRLKELYANVSLTYGYLTKYVRIHNGLEKSHRVDARCISGNPSSVPADNWYCLKHVRGQNRQLHKSNPKKGKRQANKAPRYVYGFQLFDKVLFKDQECFIFGRRTSGFFDLRLLNGVKVSASANVKKLRLLEKCKTLLIERRQGDFLPPLKREVSIA

SEQ ID NO: 18370 - protein, 517 aa, Leptospirillum sp.
MLPQSRALEAADADNREGQDETVGGKGAIPKPVANISEGRRFARSALRPQGQCNVRFDGGFVQVFVLDKKKKPLMPCHPARARELLREGRAVVHRIAPFTIRLKDRIGGETQPIRVKLDPGSKTTGLAVVREEETDGETTAHVLFQAEIHHRGSAIKKRLDQRRSFRRRRRSQLRYRTPRFDNRTRPDGWLPPSLRHRVDTTLAWVERLRRLVPVSELSQELVRFDMQKIENPEISGVEYQQGTLAGYEVREYLLEKWGRTCAYCGASDMPLEIDHIHPRSLGGSERVSNLTLACRSCNLKKGNRPVGEFLAKTPERLSTILARAKAPLKDAAAVNTTRLALFQALKATGLPVETASGGRTKYNRTRLGIPKGHSLDAACVGKVDRIEGWNRPCLSIKSTGRGSYQRTRLDAFGFPRGSLTRTKAHFGFQTGDRVRAIVTKGKKTGTYAGRVAVRSSGSFNIQTGSGVVQGISCKDCRLLQRADGYGYSIHPIIEKGEAGEALPLPGMNAGVSRARG

SEQ ID NO: 18371 - protein, 462 aa, unidentified; identical to SEQ ID NO: 15460
  REGION 1..462: note = Human gut metagenome

SEQ ID NO: 18372 - protein, 424 aa, unidentified; identical to SEQ ID NO: 8578
  REGION 1..424: note = Human gut metagenome

SEQ ID NO: 18373 - protein, 420 aa, unidentified
  REGION 1..420: note = Human gut metagenome
MQYVYVLNKHGEPLMPCSPGKARLLLKQQKAHVVKRTPFTIKLLYGGAGYKQPITLGVDAGSKHVGLSASTEKRELYREEFTPRNDVVDLLSTRKQNRRSRRNRKTRYRASRFDNRVHGKHKGWLAPSVEVKIQEHITVIKRTCRILPVALVRVETAEFDTQRLKAMLEGKPLPVGTDYQLGEMCDEYNVRQYVLNRDHHTCQCCGAHTTTKKTVKLHVHHLESRKVGGNAPSNLITLCTTCHDALHKGKVSLDNKKRGKPMRDAVFMGIMRKTLMARLREELPIPVQGTYGYITKMRREQNDIKKSHVNDARCISKHPLAEPCSVCYRTKAIRHHNRQTHKANFSKGSIRKRSQMPYVVEGYRLWDKVLYKGQECFVSGRRASGSFTLKKLDGTRISKGVTFKKLRLLEPATNYLIERM

SEQ ID NO: 18374 - protein, 422 aa, unidentified; identical to SEQ ID NO: 7962
  REGION 1..422: note = Human gut metagenome

SEQ ID NO: 18375 - protein, 404 aa, unidentified
  REGION 1..404: note = Clostridiaceae bacterium UBA4052
MPTSRHGKVKHLLKDGKAKVVRRTPFTIQLLYDSPEYTQPITLGVDSGSKVVGLSATTEKKELFVSEITLRDDIPELLSTRRQNRRTRRNRLRYRMERFLNRTASKKEGWLAPSVKHKVDSHLKVIENVHRILPISRIVIETASFDIQKIRNPEISGTEYQQGEQLGFWNIREYVLWRDNHECQHCHGKSKDRILNVHHKESQKTGGDSPGNLVTLCETCHKSYHAGRIQLKLTPNKSYRDASFMGIMRWYVYNSLKELYPEVSMTYGYITKTNRIMNNIEKTHSADAYCISGNMNAIRSNETYNQAFKRKYNRQIHKANFLKGGKKKLNQSEYEVKGFRLFDHVRYKDEDCFIFGRRTSGYFDLRKLDGSVVHRSASFKELKLLKRQNTILIERKGCNGVLLS

SEQ ID NO: 18376 - protein, 424 aa, Moorena sp.; identical to SEQ ID NO: 17353

SEQ ID NO: 18377 - protein, 414 aa, unidentified; identical to SEQ ID NO: 5310
  REGION 1..414: note = Human gut metagenome

SEQ ID NO: 18378 - protein, 470 aa, unidentified
  REGION 1..470: note = Human gut metagenome
MSVFVVGLNGCRLMPTSERKARLILNDGKASVYRKVPVTIKLNYKTGRTTQPGYLGIDTGSQHIGVSVVREDGTVLHKEEIGLRDSMSKRKLLEAKASLRRGKRYRKTRYRHPKWRPKTKRVYCEVPDRKGRHWQKKKITFTSKRPKGWLPPSLQSKTDHHIRWIKKLQDLLPEGYRLSIELGRFDPARMKNPEIHGDLYQKGPQYDYENVRAYVLDRDRYTCQICKKKGGKLHVHHILYRSHGATDDPQYMVTVCSDCHSAQNHLPGGILYQWMQEQKRFSRGLRDATFMNILRKRLIRAFPEAVFTYGNVTKVDREKLKLPKSHGNDATAIALVKTGITAVKDKESVICIQQVRRKKRSLHEETPRKGRKEPNRTAARNNKNTKAVTVTKRQNKKKVSMTGCLFDRVELNGKKGWISGFTGKSCYVKDADDQYLSTSPKYKQVSLSKLRILHHCGNWIIGAKKTLGKG

SEQ ID NO: 18379 - protein, 416 aa, unidentified
  REGION 1..416: note = Human gut metagenome
MVYVLNIQGNPLMPCKEAKARKLLKNSLAKIIKRTPFTIQLLFECENKTQDITLGIDTGSKTIGVSASTEKQELYSAEVVLRDDIVDLISTKRQNRRTRRNRLRYRKPRFNNRIKFKKDGWLAPSILQKIETHLNVIKKIHKILPISKIIVETASFDIQKIKNPNITGVEYQQGEQLEFWNVREYVLHRDGHTCQHCKGKSKDKILNVHHIESRKTGGDSPSNLITLCETCHKKYHNEEIKLKVKRGQSFRDSAFMGIMRWAFYEKLKETYQNVKMTFGYITKNTRISNNLPKEHCIDAYCIAGNLKAKLMDSYFYQIKKRCQNRQIHKANFLKGGRKKLNQAPYIVKGFRLFDKVSYQGKPYYIFGRRSSGAFDVRDLSGNKVNKGSINCKYLKLLETRKYYLTERRERAIPPND

SEQ ID NO: 18380 - protein, 427 aa, Moorena sp.; identical to SEQ ID NO: 9660

SEQ ID NO: 18381 - protein, 430 aa, Desulfobacter sp.
LNVFVLDTNKKPQNPVHPAKARLLLTEGKAAVFRQFPFTIILKENVLDVASNPLRIKIDPGSRETGIAVINDDSGEIVFAMELRHRGQQIKNNLESRRAIRRSRRNRKTRYRKPRFDNRTRAEGWLPPSLKSRVHNIETWVNRLCRFCNIQAISMELVRFDMQKIQNPEISGVAYQQGELMGYEVREYLLEKWDRTCAYCGKTDIPLEIEHIVPKSKGGSNRVSNLTLACTACNRKKGNKPLEQFLSRKPRLLKRIQKQSKVPLKDAGAVNTTRWDLFRTLKKTGLPVETGSGGLTKFNRTTRGLHKTHWLDAACVGESTPEKMFQIDKTVLIVKADGHGSRQMCRLNKFGFPRTTAKSTEKQVKGFQTGDIVKAVVTSGKKVGTYTGRVAVRKSGSFNIKTVDKTVQGISWKYCRLLHASDGYSYNTTC

SEQ ID NO: 18382 - protein, 287 aa, unidentified
  REGION 1..287: note = Human gut metagenome
QEHITVIKHICRILPITLVRVETAEFDTQRLKAMLAGKPLPVGTDYQLGEMYDEYNVRQYVLKRDNYTCQCCGAHTTAKKTVKLHVHHLESRKVGGNAPSNLITLCTTCHNNLHKGKITLDGKKRGKTLRDAAFMGIMRNTLLTRLRNELNIPVQNTYGYITKLLREQNDIKKSHVNDARCISKHPLAKPCSVCYRTKAIRHHNRQIHKAKILKGGIRKANQAPYIVKGFRLWDKVLYNEQECFISGRRSSGYFALRKFDGTTITNSISFKKLRLLEPATNYLIERK

SEQ ID NO: 18383 - protein, 406 aa, unidentified; identical to SEQ ID NO: 2703
  REGION 1..406: note = Human gut metagenome

SEQ ID NO: 18384 - protein, 430 aa, Desulfobacter sp.
LSVFVLDTNKKPQNPVHPAKARLLLTEGKAAVFRQFPFTIILKENVLDVASNPLRIKIDPGSRETGIAVINDDSGEIIFAMELRHRGQQIKNNLESRRAVRRSRRNRKTRYRKPRFDNRTRAEGWLPPSLKSRVHNIETWVKRLCRFCNIQAISMELVRFDMQKIQNPEISGVAYQQGELMGYELREYLLEKWDRTCAYCGKTDIPLEIEHIVPKSKGGSNRVSNLTLACTVCNRKKGNKALEQFLSRKPRLLKRIQKQSKVPLKDAGAVNATRWDLFRTLKKTGLPVKTGSGGLTKFNRTTRGLHKTHWLDAACVGKSTPEKMFQIDKTVLIVKADGHGSRQMCRVNKFGFPRTTAKSTEKKVKGFQTGDIVKAVVTSGKKVGTYIGRVAVRKSGSFNIKTVDKTVQGISWKYCRLLHASDGYSYNTTC

SEQ ID NO: 18385 - protein, 424 aa, Moorena sp.; identical to SEQ ID NO: 5641

SEQ ID NO: 18386 - protein, 442 aa, unidentified; identical to SEQ ID NO: 7111
  REGION 1..442: note = Human gut metagenome

SEQ ID NO: 18387 - protein, 419 aa, Moorena sp.
MQNYVFVIDTNFQALNPISPKKARKLLDKGKAAVFRMYPFTIILKTAIEHPLLSPCQIKIDPGSKFTGFSLVQDNQVIWAMELQHRGSLIKKKLEARKALRSSRRGRNTRYRKPRFINRRRNDNWLPPSLEHRILTIQSWVERLIKFAPVSEIWIERVKFDPQKMSNPEISGIEYQQGSLAGYEVREYLLEKWGRKCTYCGKKDIPLQIEHIKPKSKGGSNRVSNLCLSCQKCNQKKGNKSVEDFLKNKPGLLQKIKSLAKKPLQDSAAVNATRNKLVKVMNGILPVITGTGAQTKYNRTRLGLPKQHWIDAACVGEVEFVELLTLQPLIVTCKGQGGRQKAALNKYGYPIRHNPLKPIKGWCSGDIAKNLLTGDFGRVNPRSSSNSFNFIVPGRKAVNIHCKNLIRVHRKDGYIYSFS

SEQ ID NO: 18388 - protein, 450 aa, Moorena sp.; identical to SEQ ID NO: 2935

SEQ ID NO: 18389 - protein, 434 aa, unidentified
  REGION 1..434: note = Human gut metagenome
VVLMDAWDIIVILNKRGKPLMPCSPAKARLLLKEKKAVVVRRTPFTIQLTIATGETKQPVSLGVDAGYEHVGLSASTEKAELYASEVELRQDVSDLLSARHALRQSRRNRKTRYRAPRFDNRIRTKRKGWLAPSVENRINAHLSRIEAVLRLLPVTKITVETASFDTQLLKNPDIAGKEYQEGEQLGFWNVREYVLFRDEHVCQHCHGRSKDPVLNVHHLESRRTGGSSPGNLITLCETCHKALHRGEIKLKAKRGHSFRAQAFMGIMRWEVLNRLKASHPELEVNNTYGYRTKHVRIRNGIAKSHCADAFCIAGNLGAERLGEFFFQKQTRRNNRQIHKLSILKGGIRKRNQAPFEVKGFRLFDKVACKGEEGFIFGRRSSGFFDVRKLDGTRISAGISYKKLHLREKRQTYLTEIRKEEALPPLREGRGLRA

SEQ ID NO: 18390 - protein, 477 aa, unidentified; identical to SEQ ID NO: 2707
  REGION 1..477: note = Human gut metagenome

SEQ ID NO: 18391 - protein, 424 aa, unidentified; identical to SEQ ID NO: 4955
  REGION 1..424: note = Human gut metagenome

SEQ ID NO: 18392 - protein, 470 aa, unidentified; identical to SEQ ID NO: 7284
  REGION 1..470: note = Human gut metagenome

SEQ ID NO: 18393 - protein, 406 aa, unidentified; identical to SEQ ID NO: 3795
  REGION 1..406: note = Human gut metagenome

SEQ ID NO: 18394 - protein, 439 aa, unidentified; identical to SEQ ID NO: 3280
  REGION 1..439: note = Wastewater metagenome

SEQ ID NO: 18395 - protein, 425 aa, Arthrospira sp.; identical to SEQ ID NO: 3231

SEQ ID NO: 18396 - protein, 429 aa, Moorena sp.
MELSEMSNYAFILDSNKNPWQPCHPSVARKLLYKGKAAVFRRYPFTIILKEVKTNIVSQPIELKIDPGSKTTGIALVCNSQVVWGGELTHRGFQIKDKLQSRANCRRGRRNRNTRYRKPRFLDPSRAQDTRAKGWLTPSLQHRVLTTMTWVKRLCKYAPINSFAEELVRFDTQQIDNPEITGTEYQQGTLLGYEVREYLLEKWGRSCTYCDKKDTPLEIEHIVPRASGGSNRISNLCLACHSCNTKKGTRSIEEFLKKKPDLLNRIKKQAKAPLRDAAAVNSARWDLYNQLKKTGLPVAVASGGKTKYNRIRLGLTKTHWLDAACVGEVASLKVLTKKPLLIKARGQGGRQKCAVNKFGYPIRHNPLKPIMGWQTGDIARFNGVVGRLTTRSNGRFYLTTATKTVTNLKPKEVALIKPVQRKDGYEYTG

SEQ ID NO: 18397 - protein, 464 aa, unidentified
  REGION 1..464: note = Fermentation metagenome
LVFVLNYKKKPVDMCSNAEARILLKKGYAVVHKAHPFTIRLKRDADYSQETEKEYKLKIDPGSKHTGVAIVDDEDSVVFLGEIEHRGSQIVALLETRSNVRRNRRSRKTRYRRCKFVNYYLKKDSKYKADSNRPKGWFPPSIESIKNNIVNFLKKYKKLCNITSVSIESVKFDSQLLENPDISGVMYQQGTLFSYELREYLLDKYGHNCQYCSGESKDTRLEIEHKVPKSRGGSNRVDNLTIACRSCNQDKSNLTLEKYLNRLKNAKSKNKLTQKRINNITDILDKGTIHKHQRYSAWVNSYRLKLIEEIKPLVNDVELSTGGRTKYNRTNLNLPKTHYYDALCVGEVPENFNFKTDKVLEIKAYGRGSRFRGRTNSCGIITKNLPRQKNFFGFQTGDIVKANVAKGKKAGSYYGRVAVRSSGYFNIQEKNKTTQGIKHTDCKIVQRSDGYGYNLKDVEILKDV

SEQ ID NO: 18398 - protein, 472 aa, unidentified; identical to SEQ ID NO: 7536
  REGION 1..472: note = Human gut metagenome

SEQ ID NO: 18399 - protein, 406 aa, unidentified; identical to SEQ ID NO: 6897
  REGION 1..406: note = Human gut metagenome

SEQ ID NO: 18400 - protein, 465 aa, unidentified; identical to SEQ ID NO: 3070
  REGION 1..465: note = Human gut metagenome

SEQ ID NO: 18401 - protein, 398 aa, unidentified
  REGION 1..398: note = Human gut metagenome
VRHRTPFTIQLLYGSTGYTQEVILGVDAGSKTIGLSAATETEELFSAEVKPRNDVVELMSARRQFRRARRNRTTRYRKPRFDNRVRSKHKGWLAPSVEVKIQEHMTAIRRACAILPVSKVVVETAEFDLQLLKAVAEGKPVPQGEDYQKGEMYGHYNVRQYVLWRDSYTCCICGVHGSVRKGVPLHVHHLESRRVGGDAPDNLVTLCTACHDKLHKGIIMAADIKKRKRRSTRDATFMGIMRMTLLRRLREQLPVPVVETRGYITKATRENLLVLPKSHANDALAIAHGPQGFRAEHLPNIRQADRLYTIRPVRHHNRQLHKATILKGGVRKTNQAEKYICGFRLYDKVLYNGIECFVWGRRTSGSFLLRQLNGEKVKDGVSYKHLKLLERSQSYLVA

SEQ ID NO: 18402 - protein, 404 aa, unidentified
  REGION 1..404: note = Human gut metagenome
LMPTERHGKVCRMLKSGMAKVVKKCPFTIQLQYESERNVQPVSLGVDAGSKHIGISATTKTKVLYESDVELRDDIVKLLATRRQLRLSRRSRKTRYRPVRFDNRKRKEGWLAPSIRQKIGSHLTVVANVCKILPINQIIVETASFDIQKIKDPEIQGIEYQQGEQMDFWNIREYVLFRDGHTCQCCKGRSKDKILNVHHIESRKTGGNAPNNLITLCETCHKGYHNGTVILPKNIKHGMQFKDAAFMGIMRWTFYNTLKEQYEPDIPVSMTYGYLTKNTRIEHGLPKEHYIDARCISGNPDAVSDGTYYYQKKVRCHNRQIHKQTILKDGVRKSNQAEYLVKGYRLFDKVRYQGREYFIFGRRKSGFFDIRTLSGEKVNKGSISVKKLTFADTRKNYLTERRTV

SEQ ID NO: 18403 - protein, 434 aa, Moorena sp.; identical to SEQ ID NO: 7738

SEQ ID NO: 18404 - protein, 430 aa, Desulfobacter sp.
LSVFVLDTNKKPQNPVHPAKARLLLTEGKAAVFRQFPFTIILKETVLDVASNPLRIKIDPGSRETGIAVINDDTGEIVFAMELRHRGQQIKNNLESRRAIRRSRRNRKTRYRKPRFDNRTRAKGWLPPSLKSRVHNIETWVNRLCRFCNIQAISMELVRFDMQKIQNPEISGVAYQQGELMGYEVREYLLEKWDRTCAYCGKTDIPLEIEHIVPRSKGGSNRVSNLTLACTACNRKKGNKPLEEFLSRKPGLLKRIQKQSKVPLKDAGAVNTTRWDLFRTLKKTGLPVETGSGGLTKFNRTTRGLHKTHWLDAACVGKSAPEKMFQIDKAVLIVKADGHGSRQMCRVNKFGFPRTTAKSTEKKVKGFQTGDIVKAVVTSGKKVGTYTGRVAVRKSGSFNIKTVDKTVQGISWKYCRLLHASDGYSYNTTC

SEQ ID NO: 18405 - protein, 413 aa, unidentified; identical to SEQ ID NO: 3587
  REGION 1..413: note = Human gut metagenome

SEQ ID NO: 18406 - protein, 512 aa, unidentified
  REGION 1..512: note = Human gut metagenome
MSTVYVLNKDGKPLMPTTRGGHVRHLLKEQKARVVRTNPFTIQLLYETDNLVQPLYLGIDPGRTNIGVAVVKTDGTAVFTAHLETRNKEIPKLMQGRKKARRARRTNGRRCRRQRRAKANGTISKKCVKQATAQNGSVSKRANEIGVIKRHLPGCEKEVLCIGIKNKEAKFSNRTRPEGWLTPTANQLLQTHINLVKKIQKFLPISDVVLEVNKFAFMQLDNPNIQKWQYQQGPLYQKASLEEAVSEMQEHHCLFCKKPIDHYHHVVPQHKNGSNTIGNIVGLCAKHHDLVHKDTTWQKKLAKKKTGLNKKYGALSVLNQIIPALTKELSSLFSKHFFATNGKSTYDYRAAHGVSKDHWLDAYCIACSVLPNDVCDSDINNRVPYELKQFRRHDRRALHKENMSRVYTLNGKSVATNRHKAIKQTTDSLEEFRQRQPNDVCKLKVKEHHPEYRNPKRNFPGCVFLVGKHTHVIQGTSGSHNGKADGYYDTNGNSYSSGKCKFVVKNEGIVFT

SEQ ID NO: 18407 - protein, 442 aa, Sutterella sp.; identical to SEQ ID NO: 3791

SEQ ID NO: 18408 - protein, 418 aa, unidentified; identical to SEQ ID NO: 5724
  REGION 1..418: note = Human gut metagenome

SEQ ID NO: 18409 - protein, 420 aa, unidentified; identical to SEQ ID NO: 3004
  REGION 1..420: note = Freshwater metagenome

SEQ ID NO: 18410 - protein, 612 aa, Streptomyces sp.; identical to SEQ ID NO: 13256

SEQ ID NO: 18411 - protein, 431 aa, Ktedonobacter sp.; identical to SEQ ID NO: 3598

SEQ ID NO: 18412 - protein, 443 aa, unidentified
  REGION 1..443: note = IscB polypeptide
MVFVLSSDKKPLNPCNPARARILLKQGKACVFKQYPFTIILKSRWSFMSETDEFRLKIDPGSKVTGIAIINETTGKVVWAGEVQHRGYRIKEKLESRSASRRSRRNRHTRYRQARWMNRVRQGQMRFSYTSRKGKGWLPPSLCSRIFNVETWIRRLMKLCPIKAFSLESVKFDTQIMENPEIEGIEYQRGTLYGYELKEYLLEKWGHSCVYCGEKDVPLQIEHIKPKSMGGTNRVSNLTIACEKCNIRKNTMTVEEFLEKDRVARNYQAQLKKEHKSGFFKLYSCREFLKDVAAVNSTRKALYQKIKIYNLPIECGSGGLTKYNRVNRGLEKTHWIDALCVGKSTPDVIDVMGITPLNIKAVGHGSRQMCSVDKYGFPASKAKAGKKFFGYQTHDIVKSGNNIGRIKGVRKTGSFTMEGKDKDLNVSQKKISLTQHADGYSYR

SEQ ID NO: 18413 - protein, 442 aa, unidentified; identical to SEQ ID NO: 4533
  REGION 1..442: note = Human gut metagenome

SEQ ID NO: 18414 - protein, 494 aa, unidentified
  REGION 1..494: note = Human gut metagenome
MTMVYVQNKDGKPLMPTTRYCYVRLLLKEKKARVVCTTPFTIQLNYDTPDITQDLILGIDPGRTNIGVAVVKEDGQCVFSAHLETRNKDVPLLMKKRAGFRKQHRTLDRRRKRQRRAKATGNTVKNETIERLLPCYQRPIVCHYIRNKEARFNNRSRPAGWLTPTANHLLQTHINLIAKVGKFLPITKVVVELNRFAFMAMDNPNIRRWEYQQGPLYGLGSVEDAVYAQQDGHCLFCDKPIDHYHHVVPRHKGGSETLANRCGLCAEHHDLVHKDKAWAEKLVTRKGGMNKKYHAQSVLNQIISFLMEYLGRETPYDVYATDGKSTKGFRIAKNVPKEHYTDAYCIACSILDANTKVSTPAEPFELKQFRRHDRQSCIRQMVDRKYILDSKVVATNRHKAIEQKSDSLQEFREVYGDAAVSQLTVRPHSPQYKDMTRIMPGAVMDFNGTIGVMQCSGGRNNGKVEFFKSTKGNKTPPKKCVLLAQNAGMVFIPA

SEQ ID NO: 18415 - protein, 454 aa, unidentified
  REGION 1..454: note = Human metagenome
LDTVAVISASGKKLMPTNSYRARGLLKSKRAVIHKYRPVFTIKLVDRTNGYTQPIEYKCDTGYQNIGISICSDTKEFVNEQRDLLKDEVKKHSDSRKYRRTRQNRLRYRKKRFNNRRGMISRDGFAPSIRNKRDVHIRLYEEYCKIFPIAKAIFKMGQFDTQVLKAIEAGLPVPKGADYQRGEQYGYATLREAVFARDNYKCICCGKSAIKDGVKLRIHHIGYLSGDRSNRMANLGSVCENCHTPKNHKQGGKLYNLKPKLKELKGATFMTTVRYSMVKNLKAATPNVDIKVTYGAATKLARKDLNVRKTHSNDAYCMGEFHPKHRSDFRHYKKCRRNNRVLSRFYDAKYRDLRDGSTKTGSQLSCGRTNRKISRHIKLDERIYRAHKISKGRVSTRRQHYSLRPGDKVLYDGKVYFVKGVQSNGTSIKLANGKVCPLKKVNILQHCNAWAFIC

SEQ ID NO: 18416 - protein, 512 aa, unidentified
  REGION 1..512: note = Human gut metagenome
MSTVYVLNKDGKPLMPTTRCGHVRRLLKEQKARVVTSKPFTIQLLYETDDVVQSLYLGIDPGRTNIGVAVVKTDGTAVFTAHLETRNKEIPKLMKKRKDSRRARRTNGRRCRRQRRAKANGTISKKCVKQTTAQNGSVSKRAKEIGVIKRHLPGCEKEVLCIGIKNKEAKFSNRTRPEGWLTPTANQLLQTHINLVKKIRKFLPISDVVLEINKFAFMRLDNPNIQKWQYQQGPLYQKASLEEAVSEMQECHCLFCKKPIDHYHHVVPQHKNGSNTIGNIVGLCAKHHDLVHKDTTWQKKLAKKKTGLNKKYGALSVLNQIIPTLTKELSSLFLKHFFVTNGKSTYDYRAAHGVSKDHWLDAYCIACSVLPNDTCDKTINSRVPYEFKQFRRHDRRALNNENMSRVYTFNGKMVATNRHKATEQTTDSLEEFRQRQPNDVCNLKVKEHHPTYRNMNRNYPGSVFLIGKQVHVMQGIAGSKDGEATTYKDTNANSIAAGKCKFVAKNSGILFV

SEQ ID NO: 18417 - protein, 414 aa, unidentified; identical to SEQ ID NO: 2588
  REGION 1..414: note = Human gut metagenome

SEQ ID NO: 18418 - protein, 431 aa, unidentified
  REGION 1..431: note = Human gut metagenome
MPNKVYIINKHGRPLMPCSPAKARHLLDEGKAKVKKRTPFTIQLIYGSSGYTQEVILGVDAGSKTIGMSVSTTKEELLSAEVKPRNDVVDLLSTRREFRRARRNRKTRYRKPRFDNRVRSKHKGWLAPSVEVKIQEHITSIKRVCRILPVSKVVIETAEFDLQLLKAIEEGKPVPQGEDYQQGEMYGHYNVRQYVLWRDNYTCQCCGTHPSKKKEVRLHVHHLESRKVGGDAPDNQVTLCESCHEKLHKGLIAEKDFKKRKRRSTRDATFMGIMRKTLMQRLCSELPIPVIETRGYITKATREKLLVLPKSHTNDALAIAQGKQGFNVGYLPGIVQINKIYTIRPVRHHNRQLHKATILKGGIRKSNQTEKYVFGYCLFDKVQFNGQDCFIWGRRTTGIFTIKTINGKMIKDGISFKKLKLVEKSTSYLIA

SEQ ID NO: 18419 - protein, 420 aa, unidentified
  REGION 1..420: note = Human gut metagenome
MQYVYVLNKHGEPLMPCSPCKARLLLKQKKACVVKRTPFTIKLLYGSTGYKQPITLGVDAGSKHIGISATTEKCELYRVEATPRNDAVDLLSARRAFRRNRRNRKIRYRAPRFNNRVHSKHKGWLAPSVEVKIQEHITLIKRVCRILPVTLVRVETAEFDTQRLKAMLEGKPLPVGTDYQHGEMYDEYNVRQYVLKRDNYTCQCCGAHPTKTKAVKLHVHHIETRRTGGNAPNNLITLCTACHKALHAGKATLNGKKRGKPLKDAAFMGIMRKTLMERLLKELKIPVQETYGYITKYLREKHSIPKSHTNDARCISKNPLAIPCDTCYYTKAIRHHNRQLHKATILKGGIRKANQAPYTVKGYRLWDKVFYHGSECFITGRRTSGYFALKKMDGTVVSNSASYKKLRLLELATNYIAERR

SEQ ID NO: 18420 - protein, 462 aa, unidentified; identical to SEQ ID NO: 2784
  REGION 1..462: note = IscB polypeptide

SEQ ID NO: 18421 - protein, 447 aa, unidentified; identical to SEQ ID NO: 8397
  REGION 1..447: note = Human gut metagenome

SEQ ID NO: 18422 - protein, 434 aa, unidentified; identical to SEQ ID NO: 7534
  REGION 1..434: note = Human gut metagenome

SEQ ID NO: 18423 - protein, 456 aa, unidentified
  REGION 1..456: note = Marine metagenome
MAIFVLDKKKQPLMPCSEKRARLLLQRGRAVVHKRYPFTIRLKDRVGGSTQPLSLGIDPGSKTTGLALIREPDSQQRHVLCLFELIHRGYQIKKALQQRAAFRRRRRSANLRYRAPRFNNRTKPKGWLAPSLQHRVDTVMAWVNRLSRLAPVTAISQELVRFDTQKLDNPEISGVEYQQGTLLGYEVREYLLEKWGRECAYCGTADTPLEIEHVVPRSRGGSNRVSNLTLSCHPCNAEKDSQTLTDFFATNKGLKKRLKANGLSADAQLERVQRQLKQPMRDASAVNATRWALFSALKTTDLPVAVSSGGRTKYNRQRLNIPKTHALDAACVGAFGKLYDWTVPTLTIKAMGRGSYQRTRLTKHGFPRGYLMRQKQVHGFQTGDMVRAIVPTGKKAGTHTGRVAIRKTGSFNIQAEYGAVQGISHKYCTLIQRSDGYGYYVTLFSNLTGEAGRAVA

SEQ ID NO: 18424 - protein, 269 aa, unidentified
  REGION 1..269: note = Human gut metagenome
MVYVLDKNGQTLMPTDRHRKVRLMLQSGQAKVIKRCPFTIQLNYDSGHQTQEISLGIDAGSKHIGVSATTKIKVLYEADVELRNDIVDLLSSRRELRRGRRNRKTRYRQAKFNNRRLGNGWLPPSIRQKIGTHLTVVENICKILPISRIMVETASFDIQKIKNTDIQGAEYQQGDQLGFWNIREYVLFRDNHTCQCCKGKSKDKILNVHHIESRKTGGNAPNNLITLCEICHTVVIIKVPYSYRRPSNAVCDLRMLHLWELCDGLSTKH

SEQ ID NO: 18425 - protein, 431 aa, unidentified
  REGION 1..431: note = Human gut metagenome
MPNKVYVINKHGRPLMPCSPAKARHLLDAGKAKVKKRTPFTIQLVYGSSGYTQEVILGVDAGSKTIGVSALTKKEELFAANVIPRNDVVDLLSTRREFRRARRNRKTRYRKPRFDNRVRSKHKGWLAPSVEVKIQEHIIAIRRVCGILPVSKVVVETAEFDLQLLKAIADGKPVPQGEDYQKGEMYGHYNVRQYVLWRDDYTCQCCGAHATKKKEVRLHVHHLESRKVGGDAPDNQVTLCESCHEKLHKGLIAEKDFKKRKRRSTRDATFMGIMRKTLMQRLYSELPIPVIETRGYITKATREKLLVLPKSHTNDALAIAQGKRGFNVGYLPEIAQIDKIYTIRPVRHHNRQLHKATILKGGIRKSNQAEKYVFGYRLFDKVQFNGQDCFIWGRRPTGIFTIKTINGKMIKDGISFKKLKPVEKSTSYLIA

SEQ ID NO: 18426 - protein, 416 aa, unidentified
  REGION 1..416: note = Anaerobic digester metagenome
MEGVWIMVYVLNQEGKPLMPTSRHGKVKHLLRSGKAKVVKRTPFTIQLCYETPEYTQPITLGVDAGSKVVGLSATTEKEELYSSEVELRNDIVNLLSTRRQNRRTRRNRLRYREARFLNRTSSKKKGWLAPSIQHKVDSHLKAIANVSKILPISKIIIETASFDIQKIKNPEISDVEYQQGEQLGFWNVREYVLWRDGHKCQYCHGKSKDKVLNVHHKESRKTGGDSPGNLVTLCKTCHDLYHAGRINLKLTQSKSFRDATFMGIMRWSVYNRLKEIYHNVSMTYGYITKNTRIAHNIEKVHNADALCITGNLDATRSNVIYNQAFKRRHNRQIHKANFLKGGRKKLNQAPYEVKGFCLFDKVLFQGEECFIFGRRSSGYFDLRKLDGTVVHRSASYNKLKLLEKQSTLLVERKVA

SEQ ID NO: 18427 - protein, 415 aa, unidentified
  REGION 1..415: note = Human gut metagenome
MVYVLDKNGQPLMPTDRHRKVRLMLQSGQAKVIKRCPFTIQLNYDSGHQTQEISLGIDAGSKHIGVSTTTKIKVLYEADVELRNDIVDLLSSRRELRRGRRNRKTRYRQAKFNNRRRGNGWLAPSIRQKIGTHLTVVENICKILPISRIMVETASFDIQKIKNPDIQGAEYQQGDQLEFWNVREYVLFRDGHICQCCKGKSKDKILNVHHIESRKTGGNAPNNLITLCETCHTGYHKGTVQLPKAIKRGMRFKDAAFMGIMRWAFYEALKQQYEPVALVHNTYGYITKHTRIEHNLPKEHYVDARCISGNPEASSNGEYYYQKKVRCHNRQIHKLTVLKGGIRKQNQATYLVKGYRLFDKVSYQGKGYFVFGRRQSGFFDIRTLSGEKVNKGSLSCKKLKFIATRTYYLTERRAV

SEQ ID NO: 18428 - protein, 533 aa, unidentified
  REGION 1..533: note = Mouse gut metagenome
MSRGMTHPHFGVFPASNPADRCAKPRESNPPSGGVFIDRKEGIRVPVYVISSTGKPLMPSRRFVHVRLLLKEGKAKVVKTKPFTIQLLYESTEYTQPLYGGTDPGRTNIGEAVLDQCGTVQYAAHVESRNKDIPKLMENRAAHRSASRRGERKRRQRRAVANGTITFPLQKQRILPGCQKPITNKFIINSEAKFLNRKRPANWLTPTTNQLVQTHLNMVKKICSILPVTDWTLEINKFAFMLMEDGTIRGVDFQNGRMKGYPDVEAYIYAIQDGKCPFCGKTIEHYHHIKPRSEGGSNRPENLVGLCSDCHARIHKGDTEMAGLIDKLGEQKKYAALSVLNQAIPYIYQGLVEIFGEEHTHICYGWQTKEMYTKLKIPKTHSNDAICIAALGSGVVPPIQMTNPYEVKQCRRHNRAIVKAQRERTYKLFGETVAKNRHPRFKQEGPSLEDFVESIPAAYRQQVISVLKVTPSKRYYNTMDRDLPGTVFYYQGHRYVKSGQSSGGKDLRAYGMGSKNFPSAKVSIVPSGGVVYL

SEQ ID NO: 18429 - protein, 519 aa, Streptomyces sp.
MATFSAGQQIHRAVPPQRRALESAGADTPRIGHETARGRHVPPVAPSGEHVREETVGGSPAADGDTFRPAEAGETPRERHPSVFVLDRHGAPLQPCHPARARKLLGKGRAVVARHTPFVIRLKDRTIAESTVEGVELGIDPGSRHTGIAVFTATGGERRGRFAVRLDHRGAQIRRKLQQRSDFRRGRRTRNLRYRAPRHDNRARREGWLAPSLRHRVDTTVAWVDRLARWAPVTAVHVESVAFDTHAISSGGPLEGAEYQHGTLHGTEVREYLRTKWKRACGYCGATDVPLNVDHVRPTSRGGSDRVSNLVLACVPCNQEKTNRPVEEFARAKTRAARILAQAKVPLRDAAAVNATRWALRRALEARLPTHGASGGRTRWNRIRNHLPKTHTLDALAVGELGAVTETVNRVLIAGCTGRGTHARTRSDAYGFPRLRLPRRKRFFGFMTGDLVRACVPDGKNAGTHTGRVAVRASGSFAVRTQSGLFTARHTRFRLLQRADGYAYQATSEGRPGYLVPRP

SEQ ID NO: 18430 - protein, 425 aa, unidentified; identical to SEQ ID NO: 2429
  REGION 1..425: note = Human gut metagenome

SEQ ID NO: 18431 - protein, 457 aa, Scytonema sp.; identical to SEQ ID NO: 6260

SEQ ID NO: 18432 - protein, 431 aa, unidentified
  REGION 1..431: note = Human gut metagenome
MPNKVYVINKHGRPLMPCSPAKARHLLDAGKAKVKKRTPFTIQLVYGSSGYTQEVILGVDAGSKTIGMSASTTKEELLSAEVKPRNDVVDLLSTRREFRRARRNRKTRYRKPRIDNRVRSEHKGWLAPSVEVKIQEHITSIKRVCRILPVSKVVIKTAEFDLQLLKAIADGKPVPQGEDYQKGEMYGHYNVRQYVLWRDDYTCQCCGAHATKKKEVRLHVHHLESRKVGGDAPDNQVTLCESCHEKLHKGLIAEKDFKKRKRKSTRDATFMGIMRKTLMQRLCSELPIPVVETRGYITKATREKLLVLPKSHTNDALAIAQGKHGFNVGYLPGIEQIDKIYTIRPVRHHNRQLHKATILKGGIRKSNQTEKYVFGYRLFDKVQFNGQDCFIWGRRTTGIFTIKTINGKMIKDGISFKKLKPVEKSTSYLIA

SEQ ID NO: 18433 - protein, 457 aa, Anaerostipes sp.; identical to SEQ ID NO: 2712

SEQ ID NO: 18434 - protein, 406 aa, unidentified; identical to SEQ ID NO: 7406
  REGION 1..406: note = Human gut metagenome

SEQ ID NO: 18435 - protein, 427 aa, Eubacterium sp.; identical to SEQ ID NO: 3021

SEQ ID NO: 18436 - protein, 450 aa, Moorena sp.; identical to SEQ ID NO: 2935

SEQ ID NO: 18437 - protein, 416 aa, unidentified
  REGION 1..416: note = Human gut metagenome
MVYVLDKNGQPLMPTDRHRKVRLMLQSGQAKVIKRCPFTIQLNYDSGHQTQEISLGIDAGSKHIGVSTTTKIKVLYEVDVELRNDIVNLLSSRRELRRGRRNRKTRYRQAKFNNRRRGNGWLAPSIRQKIGTHLTVVENICKMLPISRIMVETASFDIQKIKNPDIQGAEYQQGDQLGFWNIREYVLFRDNHTCQCCKGKSKDKILNVHHIESRKTGGNAPNNLITLCETCHTGYHKGTVQLPKAIKRGMRFKDAAFMGIMRWAFYEALKQQYEPVGTPVHDTYGYITKHTRIAYNLPKEHYVDARCISGNPEASSNGEYYYQKKVRCHNRQIHKLTVLKGGIRKQNQATYLVKGYRLFDKVSYQGKGYFVFGRRQSGFFDIRTLSGEKVNKGSLSCKKLKFIATRTYYLTERRAV

SEQ ID NO: 18438 - protein, 420 aa, unidentified
  REGION 1..420: note = Human gut metagenome
MQYVYVLNKHGEPLMPCSPRKARLLLKQKKACVVKRTPFTIKLLYGSTGYKQPITLGVDAGSKHIGISAATEKNELYCEEATPRNDVVDLLSARRAFRRSRRNRKTRYRAPRFNNRVHSKHKGWLAPSVEVKIQEHITLIKRVCRILPVTFVRVETAEFDTQRLKAMLEGKPLPVGTDYQLGEMYDEYNVRQYVLKRDNYTCQCCGAHPTKTKAVKLHVHHIETRRTGGNAPNNLITLCTACHKALHAGKVTLDGKKRGRSLKDAAFMGVMRKTLMERLLKELKIPVQGTYGYITKYLREKHSIPKSHTNDARCISKNPLAIPCDTCYYTKAIRHHNRQLHKATILKGGIRKANQAPYTVKGYRLWDKVSYNGSECLITGRRTSGYFALKKLDGTVVSNSASYKKMRLLEVATNYITERR

SEQ ID NO: 18439 - protein, 627 aa, Moorena sp.; identical to SEQ ID NO: 7833

SEQ ID NO: 18440 - protein, 472 aa, Moorena sp.; identical to SEQ ID NO: 4432

SEQ ID NO: 18441 - protein, 470 aa, unidentified; identical to SEQ ID NO: 2949
  REGION 1..470: note = Human gut metagenome

SEQ ID NO: 18442 - protein, 420 aa, unidentified; identical to SEQ ID NO: 8060
  REGION 1..420: note = Human gut metagenome

SEQ ID NO: 18443 - protein, 443 aa, Anoxybacillus sp.; identical to SEQ ID NO: 7148

SEQ ID NO: 18444 - protein, 427 aa, Oscillochloris sp.; identical to SEQ ID NO: 5291

SEQ ID NO: 18445 - protein, 536 aa, unidentified
  REGION 1..536: note = Human gut metagenome
VLRPRYQYPTRWYPSREQGSGNGCLSGEENTDLEQEVSGTLSKGDHSHPGEQDFCVPAITIQGGPAMSVFVVGLNGCRLMPTSERKARLLLKHGKASVYRKVPFTIKLNYKTGSTTQSGYLGIDTGSQHIGVSVVREDGAVLHKEEIGLRDSMSKRKLMQSRASSRRGRRHRKTRYRHPKWRPKAKRVYCKTPDRKGRHWKKRKITFASKRPKGWLPPSLQSKTDHHIRWIKKLQDLLPDRYRLSIELGRFDPARLKDPEIHGELYQKGPQYDYENVRAYVLDRDRYTCQVCGKKGGKLHVHHILYRSHGATDDPQYMTTVCSDCHNTENHQQGGILYQWMQKQKKFTRGLRDATFMNILRKRLIEAFPGATFTYGNITKADRERLILPKSHGNDATAIAIVKTGIMTVKDKEPVIYIQQVRRKKRSLHEETPRKGRKEPNRKASRYDKNTKAVTVTKRKNKKKISITGCLFDRVELNGKKGWISGFTDKSCYVKDENDQYIRTSPKYKQVSLSKLKILHHCGNWAIGARQSLGKG

SEQ ID NO: 18446 - protein, 537 aa, unidentified; identical to SEQ ID NO: 9239
  REGION 1..537: note = Human gut metagenome

SEQ ID NO: 18447 - protein, 472 aa, unidentified; identical to SEQ ID NO: 7861
  REGION 1..472: note = freshwater bacterium

SEQ ID NO: 18448 - protein, 462 aa, unidentified; identical to SEQ ID NO: 5636
  REGION 1..462: note = Human gut metagenome

SEQ ID NO: 18449 - protein, 439 aa, Ktedonobacter sp.
MSKVFVLDTNHQPLNPVHPGEARLVLKQGKAAIWRRFPFTVILKYAVPAPQVEPLRVKLDPGSKTTGIAVLHDASGEVIFAAELSHRGHKITEALATRRARRRGRRHRKTRYRKPRFDNRRKKGEGWLPPSQISRLSNVLTWVRRLSGLCPITACSMELVKFDMQQMETPEISGGQYQQGTLAGYEVREYLLEKWGRQCAYCGAKDVPLEIEHINPRSKSRDDRVCNLTLACHPCNEKKGTQDIRDFLKHQPDLVQKILAQAKAPLKDAAAVNVTRWALYRRLQALGLPVECGSGGLTKSNRTMRGLPKSHWMDAACVGKSTPKVLKTTGVMPLLIVAQGHGSRQVTNGDRYGFPKGKPKQGGRVKGFRTGDMVKAVVLTGTKKGAYTGRVLVRASGSFDIVTKTARVAGISFTSCRVVQRSEGYRYALGTPVPEPQIR

SEQ ID NO: 18450 - protein, 431 aa, unidentified
  REGION 1..431: note = Human gut metagenome
MPNKVYVLDKHGRPLMPCSPAKARHLLDEGKAKIKKRTPFTIQLVYGSSGYTQEVILGVDAGSKTIGMSASTTKEELLSAEVKPRNDVVDLLSTRREFRRVRRNRKTRYRKPRFDNRVRSKHKGWLAPSVEVKIQEHITSIKRACRILPVSKVVVETAEFDLQLLKAIADGKPVPQGEDYQKGEMYGHYNVRQYVLWRDDYTCQCCGAHATKKKEVRLHVHHLESRKTGGDASGNLVTLCESCHEKLHKGLITEKDLKKRKHRSTRDATFMGIMRKTLMQMLCSELPIPVVETRGYITKATREKLLVLPKSHTNDALAIAQGKQGFNVGYLPGILQIDKIYTIRPVRHHNRQLHKATILKGGIRKSNQAEKYVFGYRLFDKVQFNGQDCFIWGRRTTGIFTIKTINGKMIKDGISFKKLKPVEKSTSYLIA

SEQ ID NO: 18451 - protein, 290 aa, Moorena sp.
RIKAVLRLLPVTKITVETASFDLQLLKNPDISGKEYQEGEQLGFWNIREYVLCRDGHVCQHCYGRSKDPVLNVHHLESRRTGGDSPGNLITLCETCHKALHRGEITLKAKRGQSFRAEAFVGIMRWEVHNRLRALHPGIEVSNTYGYRTKHARIANGIAKSHCADAFCIAGNLGAERLCEFFFQKQTRRNNRQIHKLSILKGGIRKRNQAPFEVKGFRLFDKVACQGEEGFIFGRRSSGFFDVRKLDGTRISAGISCKKLHLLEKRRTYLTEIRKEEALPPLPEGRGLRA

SEQ ID NO: 18452 - protein, 519 aa, Streptomyces sp.; identical to SEQ ID NO: 18429

SEQ ID NO: 18453 - protein, 413 aa, unidentified; identical to SEQ ID NO: 3290
  REGION 1..413: note = Human gut metagenome

SEQ ID NO: 18454 - protein, 423 aa, Moorena sp.; identical to SEQ ID NO: 3576

SEQ ID NO: 18455 - protein, 416 aa, unidentified
  REGION 1..416: note = metagenome
VPEMTNYAFVLDADGKPLSPTKEQKAWFLIRKKRATLNSKYPMVIQLNRVIPEEDICKDEIRCGIDDGGLHVGVALVQKCRNKNKVLFKGTIEQRDDVKHLMEVRKGYRKYHRSHKRYRPARFNNRSSSKRTNRIAPSILQKRQATWRVVIRLSKWIPVTSYWLEDVSMDIRVLTDGFQSYGWQYQKSNRLDENIRKAVILRDGCKCMECGKSNCRLEVHHIRPRRLDGTNTMANLITLCDGCHQKTEGKEEQYMQHYFTMLNSSDMKGLNHVSHVMIGKTWLRKQLSQLGPLHLTTGGDTANKRIDWEIAKSHSNDAICITDLRPDTCEIKDWTIKPIRRQSKAKTDNVLGIQHRDLVSYTYKNGETHTGYVTALYPELYALNFQSPTKHCKKVNARQCRLLWKYNKIYWLDDVV

SEQ ID NO: 18456 - protein, 526 aa, unidentified
  REGION 1..526: note = Human gut metagenome
MLWKFYRLIGRTSVRPISLAYRKKELFMRPVYVLDMNGKPLMPTCRFGKVRRMLKSGEVKVVDTLPFTVQLDRPTKTHVVQSVTLGCDPGRTNIGLAAVRSDGTDLYRSHCETRNKEIVDLMDARRAARRASRRGERLARKRLAAKHETATTFPDGRKLPGYEKPIMLKDIINTEARFNNRVRPAGWLTPTATQLLRTHLNLIKRISRILPVSDIALEINKFAFMQLDEPDKNKWNIDFQHGPLYGTGGLKAAVRQLQNDTCLLCQENVIEHFHHLIPRSKRGDNTINNIAGLCQKCHEAVHKSADTAEKLSTLKKGQTKRYGGTAVLNQIIPKLVEELGKTYHEHLHLTYGWQTKEFRTKHKLEKTHDTDAYCIAAGTMQTVNPNIRTDVYEIKQFRRHNRANIHHQTERTYKLNGQTVAKNRRKRTDQKTDSLAEWFENTVKQYGQQKAEHLRAELKVRKSTRYYNSKDRMMPGAVFQYEGNRYVVTGQLSGGQYFRAYGKGNRNFPAKKIRIISLNRGLVYVA

SEQ ID NO: 18457 - protein, 398 aa, Parasutterella sp.; identical to SEQ ID NO: 5456
  SITE 124: note = misc_feature - Xaa can be any naturally occurring amino acid
  SITE 398: note = misc_feature - Xaa can be any naturally occurring amino acid

SEQ ID NO: 18458 - protein, 470 aa, unidentified; identical to SEQ ID NO: 2825
  REGION 1..470: note = Human gut metagenome

SEQ ID NO: 18459 - protein, 462 aa, unidentified
  REGION 1..462: note = Human gut metagenome
MSVLVIGRNGRALMPTNPRKARLLLKKKTASVVCRHPFTIQLLYKTGCATQEGCIGIDTGSQHIGVGITCGDRVILKDEHALRSSMEKRSLLATRAVMRRGRRYRKVRYRKPKWRHHTKRMYFEKANRRGQHWRKVKTTTQSPRLKGWLPPSLQSKCDHHFRIIDRYLKYLPDPITRNLVIEAGRFDMARMNDPTIHGEMYQRGPMYDAENLRAYIFARDNYQCACCKAKAGTTRKADGTTVKLVAHHILFRSRGATDNPKYIISVCDHCHTTKAHQPGGILYSWMENKKKVARGLRDATFMNILRKRLFARYPQAAFTYGNITAADRKQLRLPKSHANDAVAISLFGKEASTVKNICQTMHYKQIRKSKRSLHEAIPRKGRKNPNTKAVRNKKNTTQVNGFKLWDSVLADGKKLFICSFTGTSAYLIDKNGCYISQPGKTYKQWPLSKLKRLHPNGNWLMA

SEQ ID NO: 18460 - protein, 451 aa, unidentified
  REGION 1..451: note = Human gut metagenome
MSVAVISKTGERLMPTSEYRARKLLKSGKAIKYSYHPFTIQLTERKTGNIQPIELCMDTGYIHIGISVKSEKHEYLTEQIDTVTDERSRHNARRMYRSQRRNRKRYRQPRFNNRKKDKGWIAPSLEHKKNIHVQAISRINNVMPLTDITMEMGNFDTQVLKAKEEGRPLPQGVDYQHGERYSIATLREAVFARDGYKCQCCGRTIKDGAILHVHHIKYRSQGGTNSISNLATVCDKCHTPKNHKPGGKLYGWKPKLPSFKGATFMTTIRWQLYNEAKALFPDIDIHITYGAATKERRRELNIDKSHINDAFVMGQFHPRHRIKAVLYKKKRRNNRCLEKFYDAKYIDSRDGKKRSGQELFNGRINRNHKKDSENLHQYRLQKVTAGKRTVRKQHYSVQPHDIIIYESRKRETTGCHCNGARVMLLPDKKSVSIKKIKIYRYAGGYFKSTFN

SEQ ID NO: 18461 - protein, 413 aa, Roseburia sp.
MTSYSFVLDANGKQLAPTKEPKAWFLIRKKRAALVSKYPMVIQLMKEIPEKEICQDEIRCGIDDGGLHVGIALVQKCKTKNKVVFKGTMEQRNDVKHLMEVRRGYRRYHRYHKRYRQARFDNRKSSKREGRIAPSILQKRQATIRVIHWLNKWINITNYWLEDVSVDIRVLTDGYQSYRWQYQKSNRLDENIRKAAILRDGGKCMECGKSNCRLEVHHIKPRRRNGSNTLDNLITLCESCHQKTEGQEELYMDRYFSLLKSSDNKNLNYAQHVMIGKMWLRKQLSGLGVLYLTSGGDTANKRIDWNIEKSHTNDAVCITDLQPDTCDIKEWAIKPMRRQSKAKTDHVLGIHHRDLVEYTFKNGETHRGYVTALYPDQKAINFQSQTKHCKKVNARKCKLLWKYSKIYWFENAS

SEQ ID NO: 18462 - protein, 442 aa, Lactobacillus sp.; identical to SEQ ID NO: 12912

SEQ ID NO: 18463 - protein, 412 aa, unidentified
  REGION 1..412: note = Human oral metagenome
MENKIEYCFVIDKNNQPLAPTKMNKGWYLIRKGKAKLKSMYPMVIQLEREIKSNKNDKNYIVCGIDDGSVHVGLAIVQKCPTKNKVVFKGTVEQRQDVKHLMDTRRGYRRYHRYHKRYRPKRFNNRSSSKRVGRLAPSIKQKKDAILRVLYQLNKWTNIKEYYLEDVSIDIRAMTDNYKPYKWQYQKSNRLDENLRKAAIIRDNYKCQECGKSNCKLEVHHIRARKYHGADTIGNLITLCFKCHQKTEGKEKDFENKYFKIIDSKPKRFDYTMHVMQGKNYLRNKISELGLLHLTNGGKTANKRIDWNIKKSHSNDAICIADGIPDSCNIKEWIIKPMRRKSKAKTDNVLGIKHRDLVSYTYKNGKTYTGYVISLCPKRLALSFQSRNKRCDKVNAQKCKLLWKFNKIYWLE

SEQ ID NO: 18464 - protein, 406 aa, unidentified; identical to SEQ ID NO: 7406
  REGION 1..406: note = Human gut metagenome

SEQ ID NO: 18465 - protein, 348 aa, unidentified
  REGION 1..348: note = Human gut metagenome
MSEVIVRNDITDKMTQRVKYRRNRRNRKIRYRKARWLNRANSIKNDRFSPTMQSKLHSHVKEIEYIKSILPITEMVFETGQFDTHFMKNPSLANPKVKHWGYQKGTNYGFENTKAMVLNRDSYTCQCCKGKHKDSKLEVHHIVFRSQGGSDEESNLITLCHTCHKDLHSGKINPKLSGKVKGNLKYATQMNSIRKQLFRLYPNAIETFGYVTKANRLHLGVNKEHYYDACTIATQGNAFNVKSNLYKKKCVSDGDFQKTKGVCSEQPIVTDKICGFRKFDKVRYFGNDYFIKGRMSTGYAILMDIDGDKVDFSAMPKGYKTPKMVNLKRLEARSTWMITTVEVTPNIA

SEQ ID NO: 18466 - protein, 472 aa, unidentified
  REGION 1..472: note = Human gut metagenome
VVGNNLLSIKPLINIGEGVIYSSICTGLSLQTYQKRKEVPYMVYVLDIDGQPLMPTTRHGKVRRLLNSHLAKVVKRCPFTIQLLYQSTKETQPVSLGVDAGSKHIGMAATTEKKVVYQEELSPRNDVVKLLSARRTLRRTRRNRKTRYRKPRFNNRAHSKHKGWLAPSVEVKIQEHITAIKRICQILPISEIHVETAEFDLQRLKAMDEGSPLPVGIDYQLGEQYDFYNTRQYVLHRDGYTCQCCGTHDNNIKLHVHHIESRQTGGDAPNNLIILCEHCHKALHEGKLELPKGKKRGKSYRDATFMGVMRKTLLERLKKEIDVPVEGTYGYITKYWRERAGLEKSHIHDAVCISKYPYAKPLDIYYLTKTVRHHNRQIHKSNFSKGGIRKRNQAPYLVKGFRLFDKVLYQGKEYFIFGRRATGYFDIRTLDGTKVNKGSISYKKLRIQDTAKAYLKEARAIPHMNKFTCVLA

SEQ ID NO: 18467 - protein, 418 aa, unidentified; identical to SEQ ID NO: 13450
  REGION 1..418: note = Human gut metagenome

SEQ ID NO: 18468 - protein, 402 aa, Arthrospira sp.
MARSLLKAGKASVFRRYPFTIILNKEVDANPEPLELKLDPGSKVTGIALKQGNHIIFAAELQHRGQQIKEALLSRRQLRRSRRNRKTRYRPARFLNRTRPEGWLAPSWQHRVDTLMTWVHRFRRLAPVGRITQELVRFDLQLMENPEISGVEYQQGELQGYEIREYLLFKWGRTCAYCGAQNVPLEVEHIQPRSKGGSDRVSNLTMACHSCNQAKGNGDIRDFLSGQPDVLSRLLRQAKSPLKDAAAVNSTRWALFKALKATGLPVTTGTGGQTKFNRLRLNLPKAHWLDAACVGPVESLEVLTSKPLLILAKGHGTRQMCGTNKYGFPNRHRSRRQIHKGFQTGDMVTVLVTAGKKIGSYLGRVLCRASGSFDITTASVRVAGISHKYCQPIHRKDGYAYA

SEQ ID NO: 18469 - protein, 466 aa, unidentified; identical to SEQ ID NO: 4288
  REGION 1..466: note = Cyanobacteria bacterium UBA11371

SEQ ID NO: 18470 - protein, 348 aa, Enterococcus sp.; identical to SEQ ID NO: 9214

SEQ ID NO: 18471 - protein, 514 aa, unidentified; identical to SEQ ID NO: 7895
  REGION 1..514: note = Human gut metagenome

SEQ ID NO: 18472 - protein, 557 aa, unidentified; identical to SEQ ID NO: 5269
  REGION 1..557: note = Human gut metagenome

SEQ ID NO: 18473 - protein, 427 aa, Moorena sp.; identical to SEQ ID NO: 2799

SEQ ID NO: 18474 - protein, 420 aa, unidentified
  REGION 1..420: note = Human gut metagenome
MQYVYVLNKHGEPLMPCSPGKARLLLKQQKAHVIKRTPFTIKLLYGSTGYKQPITLGVDAGSKHVGFSASTEKRELYREEFTPRNDVVDLLSTRKQNRRSRRNRKTRYRAPRFDNRVHSKHKGWLAPSVEVKIQEHITVIKRICRILPITLVRVETAEFDTQRLKAMLEGKPLPVGTDYQLGEMYDEYNVRQYVLKRDNYTCQCCGAHTTAKKAVKLHVHHLESRKMGGNAPGNLITLCITCHDALHKGKVSLDNKKRGKPMRDAAFMGIMRRTLMSRLREELPITVQGTYGYITKMQREQNDIKKSHVNDARCISKHPLAEPCSVCYRTKAIRHHNRQTHKANFSKGGIRKRSQMPYVVEGYRLWDKVLYKGQECFVSGRRTSGSFTLKKLDGTRISKGVTFKKLRLLEPATNCLIERM

SEQ ID NO: 18475 - protein, 414 aa, unidentified; identical to SEQ ID NO: 11675
  REGION 1..414: note = gut metagenome

SEQ ID NO: 18476 - protein, 434 aa, Lactobacillus sp.; identical to SEQ ID NO: 13643

SEQ ID NO: 18477 - protein, 442 aa, unidentified
  REGION 1..442: note = Human gut metagenome
MVYVLNKDGQPLMPTNRHGKVRRLLKTNKAKVVKRCPFTIQLLYDTANHTQNITLGVDAGSKHIGLSATTEDKVLFEADAELRNDISKLLEARHAFRRSRRNRKTRYRKKRFDNRVSSKHKGWLAPSIEHKIQSHFAMVEKVHRILPVTKIVVETASFDTRLLKAQLEGKPIPQGTDYQNGELAGWNIREYIFHRDNYTCQWCKGKSKDPVLVTHHHAYWKGDHTNKPSSLITLCNTCNDSKYHKKEANRLWGWEPKITNSYKHAVFMGVMRWTFYNRLKEIYPNVSMTYGYITKNTRIENNLPKTHYVDARCISGHPEAKSSGEYFYYKKVRRHNRQLYKANTLKGGVRKRSQAEYIVKGFRLFDRVEYQNNEYFVFGRRASGFFDIRTLDGQKVNKGSISFKKLKLKETNKTYLIERRMADTGVSLAPLTTEVVSFRQTG

SEQ ID NO: 18478 - protein, 476 aa, unidentified
  REGION 1..476: note = Human gut metagenome
LAASGTEGVSHPGLPGKYKHKGGQLMSVAVISKTGERLMPTSEYRARKLLKSGKAIKHSYHPFTIQLTERETGDIQPIELCMDTGYIHIGISVKSEKHEYLAEQIDTLTDERGRHDACRMYRRQRRSRKRYRQARFNNRKRDQGWIAPSLEHKKKIHIQAISRINNVMPITDITLEMGNFDTQVLKAKEEGKPLPHGADYQHGGRYGIATLREAVFSRDGYKCQCCGRTIKDGAILHIHHIKYRSQGGTNSMSNLATVCDKCHTPKNHKPGGKLYNWKPKLSSFKGATFMTAIRWQLYNEVKALFPDIDIHITYGAATKERRRELDIDKSHVNDAFVMGQFHPKHRIKTVLYKKKRRNNRCLEKFYDAKYIDSRDGKKRSGQELFNGRINRNHKKDSENLHQYRLQKVTAGKRTVRKQHYKIQPHDIVIYENRKRETAGCHCNGTRVMLLPDKKSASIKKVKIYRYAGGYFKSAFN

SEQ ID NO: 18479 - protein, 248 aa, unidentified
  REGION 1..248: note = Human gut metagenome
LPVGTDYQLGEMYDEYNVRQYVLKRDNYTCQCCGAHTTAKKAVKLHVHHLESRKVGGNAPSNLITLCTACHDNLHKGKVTLDGKKRGKALRDAAFMGIMRNTLLERLRNELHIPVQNTYGYITKLLREQNDIKKSHVNDARCISKHPLAEPCSVCYRTKAIRHHNRQIHKAKILKGGIRKANQAPYIVKGFRLWDKVLYNGQECFISGRRSSGYFALKKLDGTTITNSISFKKLRLLEPATNYLIERK

SEQ ID NO: 18480 - protein, 424 aa, unidentified
  REGION 1..424: note = Human gut metagenome
MVYVITQDGTPLMPCSNVIARLLLKQGKAKVKRREPFTIKLTYETTTYTQTLTLGVDTGSGTLGTAAAKDNGDIVYMSEVTVRNDITKKMSQRSKYRRNRRNRKTRYRKARFMNRRNSIKDGRFSPTMRSKLHGHVKEVEYIHSILPITTMVFETSQFDTHLMKNPALADPKIRPWGYQKGPNYGYENTKAMVLNRDDYTCQHCHGRRGNRRLEVHHIIYRSQGGSDESDNLITVCHSCHRDIHDGKIVLNLQGKSKGTLKFATQMNFIRKQLLTIYPGAVETFGYVTKANRQQLDMEKEHFIDACVIASRGTRFTVKSLLYKKRCIPVGDFQKTKGVRSEQPIVTEKIQGFCKFDKVRYMGEEYFIKGRMSSGYAVLMDLQGKKADFSDMPKGYKTPKLSNLKRLGARSSWMVTSEEVTQNTA

SEQ ID NO: 18481 - protein, 496 aa, Streptomyces sp.; identical to SEQ ID NO: 4777

SEQ ID NO: 18482 - protein, 443 aa, Anoxybacillus sp.; identical to SEQ ID NO: 3379

SEQ ID NO: 18483 - protein, 406 aa, unidentified; identical to SEQ ID NO: 6079
  REGION 1..406: note = Human gut metagenome

SEQ ID NO: 18484 - protein, 430 aa, unidentified
  REGION 1..430: note = Human oral metagenome
MLVYVLKQNGQPFMPTARFGKVRRLLKTKKAKVVRREPFTIKLLYEPKTDVVQECYCGVDTGSRHIGVAVVSNDKVLYQSQTELRNDIKQKMDARRACRRNRRSRKTRYRKPRFLNRGNSTKSDRLPPSVKHKVQAHIDEIEFCKKILPISDSNLIVEVSQFDTALMKDPSLISEKVKHWGYQQGFNYGYSSRREAILHRDNYTCQCCGKKNCRLEVHHVKFKSNGGTDDEENLLTLCEDCHKGVHDGTVVLSKKPKKSKNLKYATHMSIIRSRLLKKYPNAIETFGFVTAENRNHLNLKKDHYIDACVIASGGLEFKELEVIFYKNRVSKGDYQLTKGIRGEQKLPTGKICGFRKFDKVEYLGEKYFIKGRMNSGFAILMNIFSEKVDFSSMPKGLKTPKLSNCNRISARRSCLCISQIRKEKAIHTLS

SEQ ID NO: 18485 - protein, 286 aa, unidentified; identical to SEQ ID NO: 16765
  REGION 1..286: note = Human gut metagenome

SEQ ID NO: 18486 - protein, 472 aa, unidentified; identical to SEQ ID NO: 7536
  REGION 1..472: note = Human gut metagenome

SEQ ID NO: 18487 - protein, 406 aa, unidentified; identical to SEQ ID NO: 2874
  REGION 1..406: note = gut metagenome

SEQ ID NO: 18488 - protein, 408 aa, unidentified; identical to SEQ ID NO: 6729
  REGION 1..408: note = Human gut metagenome

SEQ ID NO: 18489 - protein, 450 aa, Moorena sp.; identical to SEQ ID NO: 2437

SEQ ID NO: 18490 - protein, 428 aa, Moorena sp.; identical to SEQ ID NO: 8874

SEQ ID NO: 18491 - protein, 423 aa, Moorena sp.; identical to SEQ ID NO: 6814

SEQ ID NO: 18492 - protein, 373 aa, Moorena sp.; identical to SEQ ID NO: 6300

SEQ ID NO: 18493 - protein, 512 aa, unidentified; identical to SEQ ID NO: 15119
  REGION 1..512: note = Human gut metagenome

SEQ ID NO: 18494 - protein, 384 aa, unidentified
  REGION 1..384: note = Human gut metagenome
MVKSGMVMRKLPMYAADKFVICKFIRNTQARFCNRKRCPDWITPTVQHLVQTHLNIIRKISRYLPVTDIAFEVNRFAFMHMENPEAMGVDFQNGPLKGYGDVKEAIRTQQHGKCLMCKKPIAHFHHIVPRSRGGSDTIQNLAGLCTECHTKVHTDTAFRKDFDEKKSGQLKKYGALSALNQAVPFICKKLLEEYGEEHVHFCRGLDTSLIRTAFGFEKTKKNQMHEVDAYCIGLAALEVNEVETPAFDHTFQIRQFRRQDRSIIHHQTGRSYYQGKEKVAQNRKPGFEQKTTALSQWYKEQIRIHGEKEAEKLRSQLRVEKSCRHYNDMDRFLPGAVFLYEGKRYVLSGRITNGKYLRACGQGMKNFPAAECTFIRHNAGLVFI

SEQ ID NO: 18495 - protein, 415 aa, unidentified; identical to SEQ ID NO: 7357
  REGION 1..415: note = metagenome

SEQ ID NO: 18496 - protein, 460 aa, unidentified; identical to SEQ ID NO: 8636
  REGION 1..460: note = Human gut metagenome

SEQ ID NO: 18497 - protein, 415 aa, unidentified; identical to SEQ ID NO: 11853
  REGION 1..415: note = Human gut metagenome

SEQ ID NO: 18498 - protein, 547 aa, unidentified
  REGION 1..547: note = Clostridia bacterium
VALSRTIPLTANTQPRETQPPVSAGETYSKRRVAYMPTVYVLNKDGKSLMPTTRCMHVRHLLKNGKARVVKSKPFTIQLLYETDDVVQPLYLGIDPGRTNIGVAVVKADGAAVFTAHLETRNKEVPKLMKKRKESRCARRTNGRRCRRQRRAKANGTLSKKCVKQTTAQNGSASKRAKEIGVIKRRLPGCEKDVLCIGIKNKEAKFTNRARPEGWLTPTANQLLQTHINLVKKIQKFLPISDVVLEVNKFAFMQLDNPNIQKWQYQQGPLYQKGSLENAVSEMQEHHCLFCEKPIEHYHHVVPKSENGSNTIANIVGLCTEHHNLVHKDATWQKKLAKEKVGLIKKYSALSVLNQIIPALTKEMNSLFPKHFFVTNGKSTYDYRTAHGVSKDHWLDAYCIACSVLPNDVCDSNINSHVPYELKQFRRHDRRVLHKANMSRVYTLNGKTVATNRHKAIKQTTDSLEEFRQSHPGDVCKLKVKEHHPAYRNLNRNYPGSVFLVDGQVHVMQGVSGSHNGKADGYYNTNGNAYPYYKCKFVVKNEGIVFA

SEQ ID NO: 18499 - protein, 413 aa, unidentified; identical to SEQ ID NO: 10655
  REGION 1..413: note = Human gut metagenome

SEQ ID NO: 18500 - protein, 427 aa, Nostoc sp.; identical to SEQ ID NO: 2670

SEQ ID NO: 18501 - protein, 428 aa, Moorena sp.; identical to SEQ ID NO: 15592

SEQ ID NO: 18502 - protein, 408 aa, unidentified
  REGION 1..408: note = Human gut metagenome
ICEDVGYNYIGISVKSKSHEYVSAQYDTLQDEKEHHDDCRMHRRTRRNRLRYRKPRFDNRKRGEGWLAPSLIHKKELNVNVVKMYCAVMSITHATVEVGSFDTMLVKAIQEGKVIPEGADYQKGPRYNLATLREAVFYRDNYVCKICGRKATEGAILHMHHMFYWKGRHGNSLDELLTVCEKCHTPANHQKGGKLYGFGEDVKFADLSGAAFMNTVRWQIVNELYVAFGKPFVTITYGAMTKEKRIALQLEKSHNNDAYAMGEFHPNLRCMFEHYEKARRNNRILEKFYDSRYIDIRTGEIATGKELFNGRINRNHKKDSENLHKYRGKRTYAGHRALLRKKVNLNPGDLVSLNGENLIVHSTHTKKNGAVNVEFETPAKSGQKSASLKKLKIVKAANSIHPAWKKIS

SEQ ID NO: 18503 - protein, 465 aa, unidentified
  REGION 1..465: note = Human gut metagenome
MSTCVCVLSNSGERLMPTFRLGKVRRLLKDGKAKIVKHHPFTIQLLYDSKTNTQPIEICEDVGYNYIGISVKSESHEYVSAQYDTLQDEKEHHDDCRKYRRTRRNRLRYRKPRFDNRKRDDGWLAPSLEHKKELNVNVIKMYCEVMPITHAIVEVGSFDTMLVKAIEEGKATPESTDYQKGPRYKLATLREAVFYRDNYTCQVCGRKANEGAILHVHHMFYWKGRHGNSLSELITVCEKCHTPANHQKGGKLYGFGEDIKFANLSGAAFMNTVRWQIVNVLNAAFGKPFVTFTYGAMTKEKRIALHLEKSHNNDAYAMGSFHPVNRCAFEHYEKVKRNNRILEKFYDSQYIDTRTGELTNGKSLFNGRISRSHKKDSENLHKYRGKRICKGHRALRRKKLALNPGDLVSLNGEILVVHGTHTKKNGSVNVEFKTPSRGGKKSASLKKLKIVKTSNLMHSAWTKVA

SEQ ID NO: 18504 - protein, 430 aa, Moorena sp.; identical to SEQ ID NO: 7477

SEQ ID NO: 18505 - protein, 465 aa, unidentified; identical to SEQ ID NO: 13070
  REGION 1..465: note = Human gut metagenome

SEQ ID NO: 18506 - protein, 424 aa, unidentified; identical to SEQ ID NO: 11329
  REGION 1..424: note = Human gut metagenome

SEQ ID NO: 18507 - protein, 419 aa, Moorena sp.
MPTTRHGKVRRLLNSHLAKVVKRCPFTIQLLYQSTKEIQPVSLGVDAGSKHIGMAATTKKKVVYQEELSPRNDVVKLLSARRTLRRTRRNRKTRYRKPRFNNRAHSKHKGWLAPSVEVKIQEHITTIKRICQNLPISEIQVETAEFDLQRLKAMKEGKPLPVGTDYQLGEQYDFYNTRQYVLHRDGYTCQCCGTHDNNIKLHVHHIESRQTGGDAPNNLIILCEHCHKALHEGKLELPKGKKRGKSYRDATFMGVMRKTLLERLKKEIDVPVEGTYGYITKYWRERAGLEKSHIHNAVCISKYPYAKPLDIYYLTKTVRHHNRQIHKSNFSKGGIRKRNQAPYLVKGFRLFDKVLYQGKEYFIFGRRATGYFDIRTLDGTKVNKGSISYKKLRIQDTAKAYLKEARAIPHMNKFTCVLA

SEQ ID NO: 18508 - protein, 443 aa, Desulfofustis sp.
MQRVFVLDNEKQPLSPCAPARARHLLRDGKAAVYRRYPFTIIMKHRTGGEVQPLELKLDPGSKTTGIALVQKNKAGVRVVWAAELVHRGLQIKKALDARRAIRRSRRNRKTRYRQPRFLNRTKPQGWLPPSLLSRVGNVTTWGKRLQRFAPLCSVAVETVKFDLQKAENPMISGVEYQHGTLFGYEVREYLLEKWNRVCSYCGKKNVPLEIEHIVAKVNGGTNRVSNLTLSCLDCNQKKGSQPVEVFLKNKPHVLLKLLTQQKRPVKDTAAVNATRYAIGNALKALRLPVTFWSGGRTKFNRTQQNYPKKHWIDAACVGETGRNVCLIPQQRPFVITATGRGTRQMCRMDRFGFPRTGAKGAKTVQGFRTGDIVQASVPSGKKSGVHTGRVAVRTSGSFNITTVAGTVQGIPYRYCSLLYRADGYGYSSPTSAKRPIDVPAPV

SEQ ID NO: 18509 - protein, 442 aa, unidentified; identical to SEQ ID NO: 4113
  REGION 1..442: note = Human gut metagenome

SEQ ID NO: 18510 - protein, 423 aa, Moorena sp.
MRVFVLNSNRQPLDPCKPARARILLSTGKAKVYRRYPFTIILTEEIQEPITHGSQFKIDPGAKTSGLAIVQGNRIVWGGELTHRGFQIRDALTSRRQLRCARRNRKTRYRKPRFLNRSRPEGWLAPSLMSRVHNILTWVKKLTRLCPIAGISQELVRFDTQKLQNPEISGIEYQQGTLYGYELREYLLEKWNRKCAYCGTTGTQLEIEHIKPLSKGGSNRVSNLAIACHSCNQSKSAQEIEQFLSGKPDVLKRVLSQAKRPLTDAAAVNTTRWKLYHELKSIGLPVEVGSGGLTKFNRCRQNLPKTHWLDAANVGKVDTLIIEGYQPLLIAAKGHGTRKICRTNKYGFPIRYCSRTKIHKGFQTGDIVRAVVTKGKKIGTYVGRVATRKSGSFNISTKSGLVQGISHKYCQFIHRKDGYAYRH

SEQ ID NO: 18511 - protein, 489 aa, unidentified
  REGION 1..489: note = Marine metagenome
VGAQCRVVTFSRRARAWPAVTGPRKGNYHRPPEGRKEPAMCVFVLDKRKNPLMPCSQRRARLLLERGRAVVHRHHPFTIRLKDRVGGKTQPVEIRVDPGSKGTGLAVVRIAEDTCPETGEVTTIVHVLERIELRHRGAAIRKALLQRSQRRRRRRSKNLRYRAPRFNNRRRPKGWLPPSLQHRVDTTASWVRRLSRMAPVLRARVETVRFDTQALETPEISGIEYQQGTLAGYEVREYLLEKWGRCCAYCDATGVPLQIDHIHPRARGGSNRVSNLTLACGPCNQTKGSTPVEAFLAHAPKRLARILAQARRPLQDAAAVNATRFAVCSAISDQTGLPITRFSGGQTKWNRTRAGLAKTHANDAVCVGPTDQVVGAAGPTLLVTCTGRGTRQRIMPNAHGFARGHRPRTKSVQGFRTGDLVRAEIPSGVNAGVWTGRIAVRSTGWFLLTATGQGADGERGHRKIGGVAARYCALVASGDGYGYAREVQP

SEQ ID NO: 18512 - protein, 487 aa, Moorena sp.
MLNRNSVFVLDTNKKPCDPIHPGKARRLLSEGLAAVFRNYPFTIILKSESKPTKKYRIKIDPGARYTGLALLSDTDLVWCAELEHRGFEISEALRERRQVRRSRRNRKTRYRKARFLNRTRTKGWLPPSLISRVRNIKSWVDKLIKFAPISNISMELVKFDMQKIVNPEIQGTEYQMGELFSYEIRQYLLEKFNRTCVYCGTKEAVFNLDHFYPKSRGGSDRVSNLVLSCVDCNQAKSNSLPEDFLSDRPKILEIINKQRKQPLADAAAINATRWKLKEVLESTGLIVETGSGGLTKYNRKRNGISKSHWTDAACVGTSTPDSLNIRNYQPLIIKAMGRGNRQMVKPDKYGFPRTAPKLRQKSFYGFMTGDIVKAVVTKGKKIGVYTGRVAVRKTGSFNIKTKTETVQGISHKYCKNLHKSDGCTYSFGELVKQKTVNFVKKITETLDSPVQSHMFDTSGLTAEIEPKARRKKKKLKGTDGEQLSLF

SEQ ID NO: 18513 - protein, 409 aa, unidentified
  REGION 1..409: note = Human gut metagenome
EPLMPCSPRKARLLLKQKKACVIKRTPFTIKLLYGSTGYKQPVTLGVDAGSKHIGISATTEKHELYREEATPRNDVVDLLSARRAFRRSRRNRKTRYRAPRFDNRVHSKHKGWLAPSVEVKIQEHITLIEHVCRILPVTLVRVETAEFDTQRLKAMLEGKPLPVGTDYQLGEMYDEYNVRQYVLKRDNYTCQCCGAHSTKTKGVKLHVHHIETRRTGGNAPNNLITLCKACHKALHAEKVTLDGKKRGKPLKDAAFMGIMRKTLMERLRKELKIPVQGTYGYITKYLREKNGIPKSHTNDARCISKNPLAIPCDTCYYTKAVRHHNRQLHKATILKGGIRKANQAPYIVKGYRLWDKVAYNGTECFITGRRTSGYFALKKLDGTVVSNSISYKKMRLLEAATNYIIERK

SEQ ID NO: 18514 - protein, 425 aa, Nodularia sp.; identical to SEQ ID NO: 3165

SEQ ID NO: 18515 - protein, 416 aa, Chamaesiphon sp.
MSNYVFLIDANKQPMNPIHPAHARKLMELGKAAVFRMYPFTLIMNRIVDKIITYPLSLRIDPGSKLTGISIVNNRDEVIWAMELQHRGWVIKDALETRKAARRGRRNRHTRYRQARFLNRKRSKGWLAPSLMHRVLTIETWVKRLIKFSPVAEIRQELVRFDTQAIQNPEISGTEYQQGTLAGYEVREYLLEKWGRKCTYCSKECVPLQIEHIQARANGGTDRVSNLCLACEKCNQKKGTKDLKDFLKGKPDLVSRILKQAKAPLKDAAAVNSTRWKLFETLKVLGLPVTTGTGGQTKYNRTRLRLPKEHWLDAACVGVTESLKVLTSKILKVKATGYGTRRLCRMDKFGFPCSKPRQSYKTSWKTGDIARTIDRIIGRVVVQNEKRLEVRVNGKRHYCKPDEVKPIHRKDGYSYA

SEQ ID NO: 18516 - protein, 406 aa, unidentified; identical to SEQ ID NO: 3475
  REGION 1..406: note = Human gut metagenome

SEQ ID NO: 18517 - protein, 417 aa, unidentified; identical to SEQ ID NO: 13303
  REGION 1..417: note = Human gut metagenome

SEQ ID NO: 18518 - protein, 294 aa, Parasutterella sp.
AHLSRIKAVLRLLPVTKITVETASFDLQLLKNPDISGKEYQEGEQLGFWNIREYVLCRDGHVCQHCYGRSKDPVLNVHHLESRRTGGDSPGNLITLCETCHKALHRGEITLKAKRGQSFRAEAFVGIMRWEVHNRLRALHPGIEVSNTYGYRTKHARIANGIAKSHCADAFCIAGNLGAERLCEFFFQKQTRRNNRQIHKLSILKGGIRKRNQAPFEVKGFRLFDKVACQGEEGFIFGRRSSGFFDVRKLDGTRISAGISCKKLHLLEKRRTYLTEIRKEEALPPLPEGRGLRA

SEQ ID NO: 18519 - protein, 456 aa, Halomonas sp.; identical to SEQ ID NO: 12860

SEQ ID NO: 18520 - protein, 279 aa, unidentified; identical to SEQ ID NO: 5082
  REGION 1..279: note = Human gut metagenome

SEQ ID NO: 18521 - protein, 286 aa, unidentified; identical to SEQ ID NO: 16765
  REGION 1..286: note = Human gut metagenome

SEQ ID NO: 18522 - protein, 414 aa, unidentified
  REGION 1..414: note = Human gut metagenome
MPCSPAKARLLLKEKKAIVVRRTPFTIQLTIATGESKQPVSLGVDAGYKHVGLSASTEKAELYASEVELRPDVSDLLSARRTLRQSRRNRKTRYRAPRFDNRIRTKRKGWLAPSVENRINAHLSRIGAILRLLPVTKITVETASFDTQLLKNPDISGKEYQEGEQLGFWNVREYVLFRDGHACQHCHGRSKDPVLNVHHLESRRTGGDSPGNLLTLCETCHKALHRREIKLKTKRGQSFRAEAFMGIMRWEVLNRLKASHPELEVHNTYGYRTKHTRIVNGIDKSHCADAFCIAGNLGAKRLGEFFFQKQTRRNNRQIHKLSILKHGLRKRNQAPFEVKGFRLFDKVVCQGEEGFIFGRRSSGSFDVRKLDGTRISAGISCKKLRLLEKRRTYLTEIRKEEALPPLPEGRGLRA

SEQ ID NO: 18523 - protein, 258 aa, unidentified
  REGION 1..258: note = Human gut metagenome
MTAHKRRHTTQPFALCKLSYYVLWRDNYTCTCCGVKGTDKKPVKLHVHHFESRKHGGNAPDNYGTLCEDCHKKLHLGIITDISLKTRKRPSTRDAAFMGIMRKTLMQRLITGLSIPVAETKGYITKAAREEILKLPKTHTNDALAIAQGRHGFGIREPAYVKPTNRIYTVRPVRHHNRQLHKATILKGGIRKLNQASKYIFGFRLYDKVLYQGGECFVWGRRTSGSFLLRTIDGTKVKDGVGYRNLTLLERSTNYLIA

SEQ ID NO: 18524 - protein, 415 aa, Bacillus sp.; identical to SEQ ID NO: 16176

SEQ ID NO: 18525 - protein, 353 aa, Arthrospira sp.; identical to SEQ ID NO: 3451

SEQ ID NO: 18526 - protein, 421 aa, unidentified; identical to SEQ ID NO: 5657
  REGION 1..421: note = Human gut metagenome

SEQ ID NO: 18527 - protein, 323 aa, unidentified
  REGION 1..323: note = Human gut metagenome
MSVAVMSKTGMRLMPTSEYRARKLLKSKKATVYRYNPFTIQLTERETGDVQTVELCMDTGYLHIGTSVKSEKHEYLGVQIDTLTDEKQKHDACRMYRRQRRSRKRYRQSRFNNRKRSDGWIAPSLEHKKDIHIQTISRICNAMPITNITLEMGNFDTQVLKALEENRPLPQGTDYQHGERYGIATLREAVFARDKYTCQCCRKTIADGAILHVHHIIYRSRGGTNRMSNLATVCDRCHTPANHKPGGRLYNWKPKIASFKGATFMTAVRWKMYNEVKSKFSDINIHITYGAETKEQRRAFDITKSHVNDGTVSSEASFKTSML

SEQ ID NO: 18528 - protein, 415 aa, Bacillus sp.; identical to SEQ ID NO: 10988

SEQ ID NO: 18529 - protein, 252 aa, unidentified
  REGION 1..252: note = Human gut metagenome
MCCHDKVHKNEKEAQRLQKKKKGLNKKYGALSVLNQAIPFICKRLEEEFGAEHVFYCTGRETAAVRNSFGYQKTKDNQLHEVDAWCIGILALGKIPKTLPDFSYTCRIRQFRRQDRSRIKAQTERTYKLEGKIVAKNRKKRTEQKTDSLEDWYQKQTALYGQKEADRMRSRLTAAKSQRRYNAPSRILPGTVFLYDGKRHVLSGQLTGGKYFRAVGDAKTNYPASKCRIVRKNEGLVFISQVITERVAVSHG

SEQ ID NO: 18530 - protein, 406 aa, unidentified; identical to SEQ ID NO: 2874
  REGION 1..406: note = Human gut metagenome

SEQ ID NO: 18531 - protein, 438 aa, Petrotoga sp.; identical to SEQ ID NO: 10031

SEQ ID NO: 18532 - protein, 442 aa, unidentified; identical to SEQ ID NO: 4522
  REGION 1..442: note = Human gut metagenome

SEQ ID NO: 18533 - protein, 440 aa, Clostridium sp.; identical to SEQ ID NO: 8300

SEQ ID NO: 18534 - protein, 447 aa, unidentified
  REGION 1..447: note = Human gut metagenome
MYWLIASNISKKKVPCMVYVLDINGQPLMPTTRHGKVRRLLNSHLAKVVKRCPFTIQLLYQSTKEIQPVSLGVDAGSKHIGMAATTEKKVVYQEELSPRNDVVKLLSARRTLRRTRRNRKTRYRKPRFNNRVHSKHKGWLAPSVEVKIQEHITAIKRICQILPISEIHVEISEFDLQRLKAMEEGRTLPVGTDYQLGEQYDFYNTRQYVLHRDGYTCQCCGTHDNNIKLHVHHIESRQTGGNAPSNLITLCEHCHKALHKGKFELPKGKKRGKTYRDATFMGIMRKTLLERLKKEIDVPVAGTYGYITKYWRERAGLEKSHINDAICISKYPYAKPLDTYYLTKVVRNHNRQIHKSNFSKGGIRKRNQAPYLIKGFRLFDKVLYQGKEYFIFGRRATGYFDIRTLDGTKVNKDSISYKKLRIQDTAKAYLKEARAIPHMNKFTCVLA

SEQ ID NO: 18535 - protein, 431 aa, unidentified; identical to SEQ ID NO: 4463
  REGION 1..431: note = Human gut metagenome

SEQ ID NO: 18536 - protein, 447 aa, unidentified; identical to SEQ ID NO: 3626
  REGION 1..447: note = Human gut metagenome

SEQ ID NO: 18537 - protein, 390 aa, unidentified
  REGION 1..390: note = Human gut metagenome
LQFYRKEHSIMQYVYVLNKHGEPLMPCSPGKARLLLKQQKACVVKRTPFTIKLLHGSAGYKQPVTLGVDAGSKHVGLSASTETHELYCEEFTPRNDVVELLSTRRQNRRSRRNRKTRYRAPRFNNRVHSKHKGWLAPSVEVKIQEHITVIKRICRILPVTLVRVETAEFDTQRLKAMLAGKPLPVGTDYQLGEMYDEYNVRQYVLKRDNYTCQCCGAHTTAKKAVKLHVHHLESRKVGGNAPSNLITLCIACHNNLHKGKVTLDGKKRGKTLRDAAFMGIMRNTLLIRLRNELNIPVQNTYGYITKLLREQNDIKKSHINDARCISKHPLAVPCSVCYCTKAIRHHNRQIYKAKILKGGVRKANQATYIVKGFRLWDKVLYNGQECFISG

SEQ ID NO: 18538 - protein, 419 aa, unidentified; identical to SEQ ID NO: 4877
  REGION 1..419: note = Human gut metagenome

SEQ ID NO: 18539 - protein, 442 aa, unidentified; identical to SEQ ID NO: 6360
  REGION 1..442: note = Human gut metagenome

SEQ ID NO: 18540 - protein, 349 aa, unidentified
  REGION 1..349: note = Human gut metagenome
GAIRDALKARSAFRRRRRSQNLRCRSPRFLNRVKPKGWLPPSLRHRVETTLSFVRRMCRYLPVSGIAAELVKFDSQKLQTPEVSGIEYQQGTLFEYEVREYLLEKFGRKCVYCGAEGVPLNIDHVVPRAKGGSNRVSNLVLACVSCNQKKGARSLEDFLKGKPEVLARVRRELKTPLRDAAAVNATRWVLFNELKATGLPVETGSGALTKLNRHAFGVEKEHWLDALCVGRLNGVVTRKGLNALEIRCMGRGSRQRTRLTKYGFPRGYLMRQKCVHGFATGDMVEANVPKGKKAGLWRGRVAVRVSGSFNIQTPKGVIQGVGWKHCRLISHNDGYGYAWLGHAPHSSPA

SEQ ID NO: 18541 - protein, 427 aa, Nostoc sp.; identical to SEQ ID NO: 2670

SEQ ID NO: 18542 - protein, 457 aa, unidentified
  REGION 1..457: note = Human gut metagenome
VWLYQAVYNLGEGFLPSSEERTAFYWLLIYRKEHGIMQYVYVLNKHGEPLMPCSPGKARLLLKQQKACVVKRTPFTIKLLYGSAGYKQPITLGVDAGSKHVGLSASTEKRELYREEFTPRNDVVDLLSTRRQNRRSRRNRKTRYRAPRFDNRVHSKHKGWLAPSVEVKIQEHITVIKRICRILPITLVRVETAEFDTQRLKAMLKEKPLPVGTDYQLGEMYDEYNVRQYVLKRDNYTCQCCGAHPTEKKPVRLHVHHLESRHVGGNAPNNLITLCVACHKALHEGKITLDKGKKRGKPLRDAAFMGIMRNTLLARLKDELNIPVKQTYGYITKLLREKNKIPKSHVNDARCIAKAPNAKPCDTMLYTRALRHHNRQIHKAKILNGGIRKKNQAPYLVKGFRLWDKVRYNGEECFITGRRSSGYFALKKYDGTVISNSASYKKLMLLEAATNYITERS

SEQ ID NO: 18543 - protein, 420 aa, unidentified; identical to SEQ ID NO: 6212
  REGION 1..420: note = Human gut metagenome

SEQ ID NO: 18544 - protein, 498 aa, Moorena sp.
MGCPLSPMHCGSSLSDGWRVTHVRRSSNHPRTLARGTLPPSGVTPPTRHLEFCMIFVLSSDGQPLDPCHPARARQVLRRGRARVVRRFPMTIQLLDRSAAQSTTHGLRLKIDPGSHTTGLALVSDATQTVVWAAELTHRSGTIREALQARSALRRNRRQRHTRYRPARFNNRRRQPGWLAPSLRSRVDHIMTWYQRLARRCPITAISVELVRFDTQALVHPEISGVAYQQGELLGYEVREYLLEKWQRTCAYCGATGLPLQVEHLVPRARGGTDRVSNLTLACGPCNQRKGPQTAAEYGFPQLQAQAQRPLRDATAVNSTRWALYQHLQATGLPVETGTGGRTKYNRTRLGWAKTHWRDAAAVGASTPERLRIITPMVLQITATGRGLHSRTKLDKYGFPRLRLPRQKRFFGFQTGDMVGAVVTTGGKQGRYVGRVAVRARGSFNVTTATGTVQGLHHRFFRLVQRADGYRYATQSSGRLLDPLTTAEANPQPHSSHR

SEQ ID NO: 18545 - protein, 512 aa, unidentified
  REGION 1..512: note = gut metagenome
MSTVYVLNKDGKPLMPTTRGGHVRHLLKEQKARVVRAKPFTIQLLYETNDVVQPLYLGIDPGRTNIGVAVVKANGTAVFTAHLETRNKEVPKLMQDRKKARRARRTNGRRCRRQRRAKANGTISKKCVKQDTAQSKNPSKRAKEIGIIKRRLPGYKKDVLCIGIKNKEAKYTNRTRPEGWLTPTANQLLQTHINLVRKMQKFLPISDVVLEVNKFAFMRLDNPDIQKWQYQQGPLYQKGSLENAVSEMQEHHCLFCDKPIDHYHHVVPQSENGSNTIANIVGLCAEHHNLVHKDAAWQKKLAEEKVGLNKKYGALSVLNQIIPALTNKLSVLFPKHFFVTAGKSTHDYRATHGVSKDHWLDAYCIACSVLPSDVCDSNINNHMPYELKQFRRHARRALNNENMNRVYTLNDKAVAINRHKATEQEAASLEEFRKEHPNDVCKLKVKEHHPTYRNMNRNYPGSIFLVGKHVHIMQGIAGSKDGKATTYKDSNANSITASKCKFVAKNSGILFV

SEQ ID NO: 18546 - protein, 414 aa, unidentified
  REGION 1..414: note = metagenome
MPCSPAKARLLLKEKKAIVVRRTPFTIQLTIATGETKQPVSLGVDAGYKHVGLSASTEKAELYASEVELRQDITDLLSARRALRQSRRNRKTRYRAPRFDNRIRTKRKGWLAPSVENRINAHLSRIEAVLRLLPVTKITVETASFDLQLLKNPDISGKEYQEGEQLGFWNIREYVLCRDGHVCQHCYGRSKDPVLNVHHLESRRTGGDSPGNLITLCETCHKALHRGEITLKAKRGQSFRAEAFMGIMRWEVLNRLKASHPELEVNNTYGYRTKHARIANDIAKSHCADAFCIAGNLGAERLGEFFFQKQTRRNNRQIHKLSILKGGIRKRNQAPFEVNGFRLFDKVACKGEEGFIFGRRSSGFFDVRKLDGTRISAGISYKKLHLLEKRRTYLTEIRKEEVLPPLPEGRGLRA

SEQ ID NO: 18547 - protein, 427 aa, unidentified
  REGION 1..427: note = Human gut metagenome
VPCMSTCACVFSKSGKRLMPTIRLGKVRHLLKDGKAKIIKHHPFTIQLLYDSETNIQPIEICEDVGYNYIGISVKSQSHEYVSVQYDTLQDEKDCHDSCRKMRRIRRNRLRYRKPRFDNRKRNKGWLAPSLEHKKELNVNVIKMYCKVVPITHVTVEVGSFDTMLVKAIQEGKAIPEGADYQKGPRYNLATLREAVFYRDNYTCQVCGREVQKDGAILHVHHMFYWKGRHGNSLSELLTVCEKCHTPANHQKGGKLYGFGEDIKFANLSGAAFMNTVRWQIVNELYAVFGKPFVTFTYGAMTKEKRIAFHLEKCHNNDAYAMGNFHPVDRCAFEHYKKVKRNNRILEKFHDSQYIDIRTGKVANGRSLFNGRINRSHKKNSENLHKYRGKRTRKGYRALRRKKVALNPGDLVSLNGEILVVHSTHAG

SEQ ID NO: 18548 - protein, 497 aa, unidentified
  REGION 1..497: note = Human gut metagenome
LVWNVQAPWDVYPSPTLCGLCLKVLRGRNGDADKKPIPTLTKDENRPSGRTTGLRAEQAEPAGIRKGDTLKVFVLNMRGKPLMPCSPAKARHMLKAGKAFVVRRTPFTIKLTIATGETKQDVTLGVDAGARHVGISATTEKEEVFASEVALRQDITGLLADRLAFRRARRNRKTRYRAPRFNNRVRSKHKGWLAPSVENRIQAHISRIEAVCRLLPVTKIVIETASFDIQKIRNPEVEGTGYQQGDQLGFWNVREYVLFRDGHICQHCRGRSKDPILNVHHLESRKTGGDAPNNLITLCETCHKAYHAGKIKLKVKRGQSFRAEAFMGIMRWTLLDRVRKAHPGLPVENTCGYLTKNTRITPGLPKTHCVDAYCIAGNLKAVRRGVCLHQRQVRKHNRQIHKCTVLSKTLKDGTKIGYRKLNQTPHLVKSFRLFDKVRCLGQTGFIFGRRSSGYFDVRRLDGVKLSSGISYRKLTLLEKRSTYLTELRKEDGASSPV

SEQ ID NO: 18549 - protein, 424 aa, unidentified
  REGION 1..424: note = Human metagenome
MRVFVLNMRGEPLMPCTQRKARLLLKKRKAVIYKYNPFTIQLTYATGETKQDCHIGIDTGSKYIGVAITSEDKVLFKGEIELRQDVKSNLDKRRMYRRDRRNRKTRHRQSRFLNRKRTDKWLPPSLQNRINHTFHWIDTFSRLVPSPKLHIEVGKFDAAKMINPEINGVDYQHGQTYGFFDERYFVFARDKYTCQCCGKSKDKILQTHHIIYRSNGGTNRVDNLITVCTDCHTSENHKKGGVFYKWQEQRKKVKQYKEPPFMNTLRKRIFAKYPNAVITYGSKTTPKRKEMGLDKTHYNDAIVISGVCKINENSEEWLLIKQFRKKKRSLHEATARKGRKIPNRNQVRNSKNTPCYQGFFLNDKVSVLGKSGYITGFTSNGAYIKDNANNYITLPNKTYKQVGISKLRLEHHNNNWQYMVKTAV

SEQ ID NO: 18550 - protein, 426 aa, Microcoleus sp.; identical to SEQ ID NO: 15321

SEQ ID NO: 18551 - protein, 419 aa, Eubacterium hallii
MVYVISQDSKPLMPCSNPVARLLLKQGKAKVKRREPFTIKLIYETTDYTQDLTLGVDTGSGTIGAAVSKDNGDIVYMSEVVVRNDITDKMTQRAKYRRNRRNRKTRYRKARWLNRSNSIKKDRFSPTMQSKLHSHVKEIEYIQSILPITEMVFETGQFDMHLMKNPSLANPKVRPWGYQKGANYGFENTKAMVLNRDNYTCQCCKGKHKDSKLEVHHIVFRSQGGSDEESNLITLCHTCHKDLHSGKINLKLSGKVKGNLKYATQMNSIRKQLFRLYPNAIETFGYVTKANRLHLGVDKEHYYDACTIATQGNAFNVKSNLYKKKCVSDGDFQKTKGIRSEQPIVTDKICGFRKFDKVRYFGNDYFIKGRMSTGYAILMDIDGNKIDFSTMPRGYKTPKLSNCKRITARSTVMMQVKVV

SEQ ID NO: 18552 - protein, 411 aa, unidentified
  REGION 1..411: note = Mouse gut metagenome
MPCSQRKARLLLKNKKAKIYSYHPFTIQLFYASGETIQMCHIGVDTGSRHIGLAITSENKVLLKGEIDLRQDVKSNLDTRRIYRRNRRNRKTRYRKARFFNRVKSKQKNWLPPSIESKIHHTFHWMNKLENLVDDSKLHIEVGKFDVAKMIHPDIQGEDYQQGQCYGYFDTRYFVFARDDYTCQCCKKKNKILRTHHIRYRSNGGTDRADNLITVCTDCHTSKNHKKGGILYEWQQRHKKGKPYKEPPFMNIIRKRIYQKYPDAVISYGSQTTPKRKERNLDKTHYNDAIIISGIEDIKENPKEWLRIKQFRKKKRSLHEAAARKGRKEHNRTQKRNRKNTSYDKGWYLNDYVEVFGKKGYISGFTNSGVYIKNTNDDYITMPDKKYKQVSHHNLVRICHNNNWQYEIQKI

SEQ ID NO: 18553 - protein, 435 aa, Moorena sp.; identical to SEQ ID NO: 15399

SEQ ID NO: 18554 - protein, 447 aa, unidentified; identical to SEQ ID NO: 4640
  REGION 1..447: note = Human gut metagenome

SEQ ID NO: 18555 - protein, 490 aa, unidentified; identical to SEQ ID NO: 14918
  REGION 1..490: note = Mouse gut metagenome

SEQ ID NO: 18556 - protein, 470 aa, Moorena sp.; identical to SEQ ID NO: 17213

SEQ ID NO: 18557 - protein, 544 aa, Streptomyces sp.; identical to SEQ ID NO: 5984

SEQ ID NO: 18558 - protein, 346 aa, Arthrospira sp.; identical to SEQ ID NO: 2872

SEQ ID NO: 18559 - protein, 442 aa, unidentified; identical to SEQ ID NO: 2903
  REGION 1..442: note = Human gut metagenome

SEQ ID NO: 18560 - protein, 451 aa, unidentified
  REGION 1..451: note = metagenome
VPAYRIKHITKKEVPYMVYVLDIDGQPLMPTSRHRKVRKLLNSHLAKVAKRCPFTIQLLYQSTKETQPVSLGVDAGSRHIGLAATTEQKVVYQEELVPRNDVVKLLSARRALRSSRRSRKTRYRKPRFNNRVHSKHKGWLAPSVEVKIQEHITAIKRICQILPISDIHVETAEFDLQRLKAMEEGRPLPVGTDYQLGEQYDFYNTRQYVLHRDEYTCQCCGTHDNNVKLHVHHIESRQTGGDAPNNLITLCEHCHKLLHAGKTILPKGKKRGKSYRDATFMGIMRKTLLERLRKEVDVPVSWTYGYITKYWRERAGLEKSHINDAICISKYPYAKPLDIYYLTKTVRHHNRQIHKSNFSKGGIRKRNQAPYLVKGFRLFDKVLYQGKSYFIFGRRATGYFDIRTLDGTKINKSSIGYRKLRIQDTAKAYLTETKKEARAIPHMNEFTCVLT

SEQ ID NO: 18561 - protein, 435 aa, unidentified
  REGION 1..435: note = Human metagenome
MTKTLTTQTTQACVLDQQGKPLMPTRRLGKVYRLLKTQKAHIVSYEPFTIQLDYEPDTQVIQPMTLGVDSGAIHSGYSVANEHREYYSAEVIARNDISNRLSDRRMYRQNRRARKTRYRKPRFNNRKNKKKGWLPPSLEQKVAVQVNEIDHLHRYFPIETIIVEVAEFDIQKIKNPDIAGIEYQQGTLQGYNIRNYLLEKHGRKCFYCGKAVSDFEVEHMLPKSKGGSNCIDNLTLSCHDCNAKKDTLTAEEFIRQTLPAKKAASKLKQLPNEKRLFKYMAYMNATRWALYDAIKERYPNVKMTYGYITKYNRIQAGLPKAHHIDAKCITGFPTVPSIDQTVVKVKMRRHNRQLHRATFSKGHVRKAASLPTMVFGFRLYDRVLFNNHRYYIKGRRSSGSFALVSVEGLKDEKRSYKKLKLLAHTNAYLTNRYVN

SEQ ID NO: 18562 - protein, 408 aa, unidentified; identical to SEQ ID NO: 4826
  REGION 1..408: note = Human gut metagenome

SEQ ID NO: 18563 - protein, 427 aa, Scytonema sp.
MCKVFVLDTDKRPLDPIHSAQARLLLRNKKAAVYRRFPFAIILKESRSDSPVSSIRLKIDPGAKITGIALVNDSTGEVVFAAELKHRGFAIRDALTSRRQLRRSRRNRKTRYRKPRFLNRTKPEGWLSPSLMSRVHNVESWVNRLRKFAPITAISVELVKFDMQLMRNPEIEGKEYQQGTLAGYETREYLLEKWNRQCAYCGVKDVPFQVEHIHPRSKGGSNSITNLTLSCEKCNVKKGTKDIKDFLKKDPTKLQKILAQAKKPASDAAAVNATRYKLLGVLKSTGLPVECGSGGLTKFNRTNQGLPKTHWIDAACVGQSTPTLNTKSIKALLITANGHGIREMCGTDKFGFPSRHRTNKQIHFGFQTGDIIKAVVTSGKKVGEYVGRVLCRATGSFDIATKTGRIAGISYKYCSAIHKKDGYSYGV

SEQ ID NO: 18564 - protein, 417 aa, unidentified
  REGION 1..417: note = Human gut metagenome
VYVLNKHGEPLMPCSPGKARLLLKQQKACVVKRTPFTIKLLYGGAGYKQPITLGVDAGSKHVGLSASTVKRELYREEFTPRNDVVDLLSTRKQNRRSRRNRKTRYRAPRFDNRVHSKRKGWLAPSVEVKIQEHITVIKRTCRILPVALVRVETAEFDTQRLKAMLEGKPLPVGTDYQLGEMYDEYNVRQYVLKRDHYTCQCCGAHTTTKKTVKLHVHHLESRKVGGNAPSNLITLCTTCHDALHKGKVSLDGKERGKPLRDAAFMGIMRKTLMARLRDELSIPVQGTYGYITKMRREQNDIKKSHVNDARCISKHPLAEPCSVCYRTKAIRHHNRQTHKANFSKGSIRKRSQMPYVVEGYRLWDKVLYKGQECFVSGRRASGSFTLKKLDGTRISKGVTFKKLRLLEPATNYLIERM

SEQ ID NO: 18565 - protein, 424 aa, unidentified; identical to SEQ ID NO: 11297
  REGION 1..424: note = Human gut metagenome

SEQ ID NO: 18566 - protein, 476 aa, unidentified
  REGION 1..476: note = Human gut metagenome
RARIFRQVPFTIQLTYENEPVLQPVTIAEDPGRSNIGMAVVSLSGELLSAAVVQTRNKEIAKLMEKRKQHRRASRNGERRARQRLAKKYHTMITAGFLMRKLPMYGKDKRVRCNVIKNTESRFCNRKRENGWLTPSAEHLVRTHINLIHKMQKFLPITDVAIEINRFAFLSLEDPSISGVDFQNGPLKGYDDLNAAVEDLQDGHCLMCNSPIEHRHHIVPRSMQGSNTIGNIAGLCCKCHERVHKDTRFEDRLKKKKAGLDKRYAAVSVLNQAIPFICKRLEQEFEKEHVHYCSGRDTGMVRRPFGYHKTKEEQLHEVDAWCIAVLALQHVPEKAPEFDHVHEILQFRRQDRSRIKAQTSRAYYHEGKKIAKNRKKAEGQRDDSLQEWRKRQVERYGKEQTRKMISQLEVKESIRRYNRLDRLMPGAVFYYQGVRYVMRGQHSNGQYLQAVGMGSKDFPAKKCKIVANNEGLVFVS

SEQ ID NO: 18567 - protein, 512 aa, unidentified; identical to SEQ ID NO: 2745
  REGION 1..512: note = Human gut metagenome

SEQ ID NO: 18568 - protein, 427 aa, Moorena sp.; identical to SEQ ID NO: 3717

SEQ ID NO: 18569 - protein, 505 aa, unidentified
  REGION 1..505: note = Human gut metagenome
GQPILTRRRLAGAERIENLYGLLLNIFGCLAASGTEGVSHPGLPGKYKHKGGQLMSVAVISKTGERLMPTSEYRARKLLKSGKAIKHSYHPFTIQLTERETGDIQPIELCMDTGYIHIGISVKSEKHEYLAEQIDTLTDERGRHDACRMYRRQRRSRKRYRQARFNNRKRDQGWIAPSLEHKKKIHIQAISRINNVMPITDITLEMGNFDTQVLKAKEEGKPLPHGADYQHGGRYGIATLREAVFSRDGYKCQCCGRTIKDGVILHIHHIKYRSQGGTNSMSNLATVCDKCHTPKNHKPGGKLYNWKPKLSSFKGATFMTAIRWQLYNEVKALFPDIDIHITYGAATKERRRKLDIDKSHVNDAFVMGQFHPKHRIKAILCKKKRRNNRCLEKFYDAKYIDSRDGKKRSGQELFNGRINRNHKKNSENLHQYRLQKVTAGKRTVRKQHYKIQPHDIVIYENRKRETAGCHCNGTRMMLLPDKKSASIKKVKIYKYAGGYFKSAFN

SEQ ID NO: 18570 - protein, 401 aa, unidentified; identical to SEQ ID NO: 13584
  REGION 1..401: note = Human gut metagenome

SEQ ID NO: 18571 - protein, 557 aa, Ruminococcus sp.
MIYNLVSIRERSFMKQKKQKVMVYILNKKGKPLMPTTRCGHVRKLLDSKKAVVVSSNPFTIRLKYDTPNGVQDVFAGIDSGRENIGSGASNEDGDCLYLGELKTSNKSIKMKMTERAGFRKERRSHDRQNKQRKARKDHTEIQNGNADICRTTISCKSVQISYPAAEKSVTHKIIRGKEGKFANRHRDEGWITPSARQLVQMHMNDLKSMCRILPISHVTLERVAFDFQKLENENIKAWEYGKGKLYGYNSPEEYIHDVQGGKCLICGKPHIDYLHHIIPRSKGGSNKVSNLAGLCYDCHYGPMGVHNCQDTQDRLPELKNEANKQYKVSLLNSVMPVLIEEMDKFCKANSIIFSICGGHDTAKVRDMYDLQKDHCIDGFAISLAGRNVKSVDVMPDRIHQKQRYKKKSKNIIQKRNCREYYDGKKLAAVNRHKGTDQKADSLEEYMNTYAETHTADECKKHFESLTVKPARRTYTFHKEGRICPFHIGDKVRYEKKNKIKGNTKVETFICEGIRFPKDENKAKVEHNKTKSKKMKFCRVLEPGCTPYIDYRKLVLI

SEQ ID NO: 18572 - protein, 415 aa, Bacillus sp.; identical to SEQ ID NO: 2431

SEQ ID NO: 18573 - protein, 506 aa, unidentified
  REGION 1..506: note = Human gut metagenome
MVAVLSNVGKPMMPTTEYKARKLIEKGRAIPYQYKPMFTIMILDRSGGYTQPIELKEDTGYEHIGISVCSQKHEYERKEIITLLDEPEKHHDALMYRRTRRNRLGYRPPRFDNRKRENGWIPPSLQHKIDIHLYWFNQYAEVLPITDAVFEIGTFDTQRLNAIEKGEKLPYGEDYQKGEQADFYTLRDAVFARDDYTCVVCGKGIQDGAVLRTHHVGYRHGDRSNRMSNLVTVCDHCHTTKNHQEGGALYDLKAPTKKKANAAFMNVARQRIIDCAKKSHPEINISCAFGSETKMSRKNLQIEKSHTNDAYAMGEFHPKHRCKEKIFQKVRRNNRILSRFYDAKYIDRRDGLTKTGKQLSSGRTNRNHKLDSENFRVYRGKKIQKGRTATRQQVYEFKTKDIVLYQGKRYVVKGTNNKGQNVQLYLNMTADLKDLTIKTKNKRKTADPNRIEVGDKVFTEFHGKKKVFTVKNIDPTTNQVYLQADLSTKPSELKLVKYSNGYKQIK

SEQ ID NO: 18574 - protein, 379 aa, Moorena sp.; identical to SEQ ID NO: 2727

SEQ ID NO: 18575 - protein, 465 aa, Calothrix sp.; identical to SEQ ID NO: 5126

SEQ ID NO: 18576 - protein, 413 aa, unidentified; identical to SEQ ID NO: 2858
  REGION 1..413: note = Human gut metagenome

SEQ ID NO: 18577 - protein, 477 aa, Caldanaerobius sp.; identical to SEQ ID NO: 12228

SEQ ID NO: 18578 - protein, 458 aa, Lactobacillus sp.; identical to SEQ ID NO: 4474

SEQ ID NO: 18579 - protein, 442 aa, unidentified
  REGION 1..442: note = Human gut metagenome
MVTVQQSTHHLPFGRVFIRRNLFMVYVISQDGKPLMPCSDPIARLLLKQGKAKVKKREPFTIKLTYETTNHTQGLTLGVDTGSGTIGTAVSKDNGDIVYMSEVVVRNDITDKMTQRAKYRRNRRNRKTRYRKARWLNRASSIKKDRFSPTMQSKLHSHVKEIEYIQSILPITEMVFETGQFDMQLMKNPSLANPKVRPWGYQKGANYGFENTKAMVLNRDNYTCQCCKGKHKDSKLEVHHIVFRSQGGSDEESNLLTLCHTCHKDLHSGKINPKLSGKVKGNLKYATQMNSIRKQLFRFYPNAIETFGYVTKANRLHLGVDKEHYYDACTIATQGNAFNVKSDLYKKKCVSDGDFQKTKGIRSEQPIVTDKICGFRKFDKVRYFGNDYFIKGRMSTGYAILMDIDGNKIDFSTMPRGYKTPKLSNCKRITARSTVMTQVKVV

SEQ ID NO: 18580 - protein, 442 aa, unidentified; identical to SEQ ID NO: 4522
  REGION 1..442: note = Human gut metagenome

SEQ ID NO: 18581 - protein, 512 aa, unidentified
  REGION 1..512: note = Human gut metagenome
MSTVYVLNKDGKPLMPTTRCGHVRYLLKEKKARVVASKPFTIQLLYETDDVVQPLYLGIDPGRTNIGVAVVKADSTAVFTAHLETRNEEIPKLMQGRKKARRARRTNGRRCRRQRRAKANGTISKKCVKQTTAQNGSASKRAKEIGVIKRHLPGCEKDVLCIGIKNKEAKFSNRTRPEGWLTPTANQLLKTHINLVKKIRKFLPISDVVLEINKFAFMRLDNPNIQKWQYQQGPLYQKASLEEAASEMQEHHCLFCKKSIAHYHHVVPQSENGSNTIGNIVGLCTKHHDFVHKDTAWQKKLAKKKTGLNKKYGALSVLNQIIPALTKELSSLFPKHFFATNGKSTHDYRIAHGVSKDHWLDAYCIACSVLPNDTCDRTINSRVPYELKQFRRHDRRALHKENMSRVYTLNGKSVATNRHKATEQTTDSLEEFRQRQPNDVCKLKVKEHHPTYRNMNRNYPGSVFLIGKQVHVMQGIAGSKDGEATTYKDTNANSIAAGKCKFVAKNSGILFV

SEQ ID NO: 18582 - protein, 431 aa, Escherichia sp.; identical to SEQ ID NO: 3801

SEQ ID NO: 18583 - protein, 475 aa, Blautia sp.; identical to SEQ ID NO: 4128

SEQ ID NO: 18584 - protein, 425 aa, Nodularia sp.; identical to SEQ ID NO: 3165

SEQ ID NO: 18585 - protein, 476 aa, unidentified; identical to SEQ ID NO: 13038
  REGION 1..476: note = Human gut metagenome

SEQ ID NO: 18586 - protein, 404 aa, unidentified
  REGION 1..404: note = Human gut metagenome
QASRRGERKARQRLAKRYGSMVKSGMVMRKLPMYAADRFVICKFIRNTQAWFCNRKRCPDWITPTVHHLVQTHLNIIRKISRYLPVTDIAFEVNRFAFMHMENPKAMGVDFQNGPLKGYDDVKEAICTQQHGKCLMCKKPIAHFHHIVPRSRGGSDTIQNLAGLCPECHTKVHTDTAFRKDFDEKKSGQLKKYGALSALNQAVPFICKKLLEEYGEEHVHFCGGLDTSLIRTALGFEKTKKNQMHEVDAYCIGLAALEVNEVETPAFDHTFQIRQFRRQDRSIIHHQTGRSYYQGKEKVAQNRKPGFEQKTTALSQWYEEQVRIHGEKEAEKLRSQLRVEKSCRHYNDVDRFLPGAVFLYEGKRYVLSGRITNGKYLRACGQGMKNFPAAECTFIRHNAGLVFI

SEQ ID NO: 18587 - protein, 406 aa, unidentified
  REGION 1..406: note = Human gut metagenome
MVYVQDIYGRPLMPTTRHGKVRRLLKSKKATVVNLCPFTIRLLYDTTGYKQEITLGVDTGTKHVGLSATTKSKELYASEVILRSDVVDLLSTRRELRKIRMYRLRYRKPRFMNRIKSKKRGWIAPSIRQKIDSHIRIIGFVYSILPVSKLIIEVAQFDTQKIKNPEISGKEYQEGEQLGFWNVREYVLARDEHKCQHCKGKSKDPVLNVHHIESRKTGGDSPSNLITLCKTCHKEFHKGNIKLKVNRGESLRDAAVMSIMKWELYDELKSLYPNVKMTFGYITKYNRINHGIEKSHVSDAFVISRNFDSERLGYYYKRKLVRRHNRQIHKMKAPKGGNKRMNQSPFKVFGFRLFDKVMFQGKERFIYARRLRGIFNIRDINGENKKDISYKKLEYVSHGLISIVAG

SEQ ID NO: 18588 - protein, 434 aa, Anoxybacillus sp.; identical to SEQ ID NO: 5674

SEQ ID NO: 18589 - protein, 431 aa, unidentified; identical to SEQ ID NO: 11325
  REGION 1..431: note = Human gut metagenome

SEQ ID NO: 18590 - protein, 357 aa, unidentified
  REGION 1..357: note = Human gut metagenome
LMPCSPAKARHMLKAGKAVVVRRTPFTIKLTIATGETKQDVTLGVDAGARHVGISATTEKEEVFASEVALRQDITGLLADRLAFRRARRNRKTRYRAPRFNNRVRSKHKGWLAPSVENRIQAHISRIEAVCRLLPVTKIVIETASFDIQKIRNPEVEGTGYQQGDQLGFWNVREYVLFRDGHICQHCRGRSKDPILNVHHLESRKTGGDAPNNLITLCETCHKAYHAGKIKLKVKRGQSFRAEAFMGIMRWTLLNRMRKAHPSLPVENTYGYLTKHKRIALGLPKTHCADAFCIAGNLKALRRGDFLFQQQTRKHNRQIHKCSILKGGVRKLNQAPFLVKGSSSKPPSLNDGGSRFV

SEQ ID NO: 18591 - protein, 483 aa, unidentified
  REGION 1..483: note = Human gut metagenome
LYIKMTSCTCTVFPACNHAKASSSQGKHNLLLRQERFIVKEVANMSTVYVLNKDGKPLMPTTRGGHVRHLLKEQKARVVRAKPFTIQLLYETNDVVQPLYLGIDPGRTNIGVAVVKANGTAVFTAHLETRNKEVPKLMQDRKKARRARRTNGRRCRRQRRAKANGTISKKCVKQDTAQSKNPSKRAKEIGIIKRRLPGYKKDVLCIGIKNKEAKYTNRTRPEGWLTPTANQLLQTHINLVRKIQKFLPISDVVLEVNKFAFMRLDNPDIQKWQYQQGPLYQKGSLENAVSEMQEHHCLFCDKPIDHYHHVVPQSENGSNTIANIVGLCAEHHNLVHKDAAWQKKLAEEKVGLNKKYGALSVLNQIIPALTNKLSVLFPKHFFVTAGKSTHDYRATHGVSKDHWLDAYCIACSVLPSDVCDSNINNHMPYELKQFRRHARRALNNENMNRVYTLNDKAVAINRHKATEQEAASLEEFRKEHPND

SEQ ID NO: 18592 - protein, 447 aa, unidentified; identical to SEQ ID NO: 8397
  REGION 1..447: note = Human gut metagenome

SEQ ID NO: 18593 - protein, 415 aa, Bacillus sp.; identical to SEQ ID NO: 7196

SEQ ID NO: 18594 - protein, 442 aa, Lactobacillus sp.; identical to SEQ ID NO: 9501

SEQ ID NO: 18595 - protein, 536 aa, unidentified
  REGION 1..536: note = Human gut metagenome
VLRPRYQYPTRWYPSREQGSGNGCLSGEENTDLEQEVSGTLSKGDHSHPGEQDFCVPAITIQGGPAMSVFVVGLNGCRLMPTSERKARLLLKHGKASVYRKVPFTIKLNYKTGSTTQSGYLGIDTGSQHIGVSVVREDGTVLHKEEIGLRDSMSKRKLMQSRASSRRGRRHRKTRYRHPKWRPKAKRVYCEIPDRKGRHWKKKEITFASKRAKGWLPPSLQSKTDHHIWWIKKLQDLLPEGYRLSIELGRFDPARLKDPEIHGELYQKGPQYDYENVRAYVLNRDRYTCQVCGKKGGKLHVHHILYRSHGATDDPQYMATVCSDCHNTENHQQGGILYQWMQKQKKFTRGLRDATFMNILRKRLIEAFPGATFTYGNITKADRERLRLPKSHGNDATAIAIVKTGIMTVKDKEPVIYIQQVRRKKRSLHEETPRKGRKEANRKASRYDKNTKAVTVTKRKNKKKITITGCLFDRVELNGKKGWISGFTDKSCYVKDENDQYIRTSPKYKQVSLSKLKILHHCGNWAIGARQSLGKG

SEQ ID NO: 18596 - protein, 512 aa, unidentified
  REGION 1..512: note = Human gut metagenome
MSTVYVLNKDGKPLMPTTRGGHVRHLLKEQKARVVRAKPFTIQLLYETNDVVQPLYLGIDPGRTNIGVAVVKANGTAVFTAHLETRNKEIPKLMQDRKKARRARRTNGRRWRRQRRAKANGTISKKCVKQTTAQNGSVSKRAKDIGVIKRRLPGCEKDVLCIGIKNKETKFTNRTRPEGWLTPTANQLLQTHINLVKKIQKFLPISDVVLEVNKFAFMRLDNPNIQKWQYQQGPLYKKESLESAVSEIQEHHCLFCKKPIDHYHHVVPQHKNGSNTIGNIVGLCAKHHDLVHKDSAWEKKLAQKSTGLNKKYGALGVLNQIIPTLTNELSSLFPKHSFVTNGKSTYDYRAAHGVSKDHWLDAYCIACSVLPSNVCDSNINNHMPYELKQFRRHDRRVLNNENMNRVYTLNNKAVAINRHKAKDQKTVSLEKFRKEHPDDVCKLKVKEHHPTYRNMNRNFPGSVFLVGKQIHVMQGIASSKDGKATKYNDTSATAIATGKCKFVAKNTGILFV

SEQ ID NO: 18597 - protein, 462 aa, unidentified
  REGION 1..462: note = Human gut metagenome
MSVLVIGRNGRALMPTTSRKARILLKKETASVVCRHPFTIQLLYKTGCATQEGCIGIDTGSQHIGVGVTCGDRVILKEEHELRSSMEKRSLLVTRAAMRHGRRYRKVRYRKPKWRQHTKRMYFEKPNRRGQHWRKVKTTTQSPRPKGWLPPSLQSKCDHHFRIIDRYLKYLPDSITRNLVIEAGRFDMARMNDPMIHGEMYQRGPMYDAENRRAYIFARDNYQCACCKAKAGTTRKTDGTTVKLVAHHILFRSRGATDNPKYMVSVCDHCHTTKAHQPGGILYSWMENNKKVTRGLRDATFMNILRQRLFARYPQAAFTYGNITAADRKQLRLPKSHANDAVAISLFGKEVSAVRDTCQTVHYKQVRKSKRSLHEAIPRKGRKHPNTKAVRNKKNTTQVNGFKLWDSVLADGKKLFICSFTGTSAYLIDKNGCYVSQPGKTYKQWPLSKLKRLHPNGNWLRA

SEQ ID NO: 18598 - protein, 512 aa, unidentified
  REGION 1..512: note = Human gut metagenome
MPTVYVLNKDGKPLMPTTRCMHVRHLLKNGKARVVKSKPFTIQLLYETDDVVQPLYLGIDPGRTNIGVAVVKADGAAVFTAHLETRNKEVPKLMKKRKESRCARRTNGRRYRRQRRAKTNGTISKKCVKQTTAQNGSVSKRAKEIGVIKRHLPGCEKDVLCIGIKNKEAKFTNRARPEGWLTPTANQLLQTHINLVKKIQKFLPISDVVLEVNKFAFMQLDNPNIQKWQYQQGPLYQKGSLENAVSEMQEHHCLFCEKPIEHYHHVVPKSENGSNTIANIVGLCTEHHNLVHKDATWQKKLAKEKVGLVKKYSALSVLNQIIPALTKEMNSLFPKHFFVTNGKSTYDYRTAHGVSKDHWLDAYCIACSVLPNDVCDSNINSHVPYELKQFRRHDRRVLHKANMSRVYTLNGKTVATNRHKAIKQTTDSLEEFRQSHPGDVCKLKVKEHHPAYRNLNRNYPGSVFLVDGQVHVMQGVSGSHNGKADGYYNTNGNAYPYYKCKFVVKNEGIVFA

SEQ ID NO: 18599 - protein, 451 aa, unidentified; identical to SEQ ID NO: 10609
  REGION 1..451: note = Human gut metagenome

SEQ ID NO: 18600 - protein, 420 aa, unidentified; identical to SEQ ID NO: 3004
  REGION 1..420: note = Freshwater metagenome

SEQ ID NO: 18601 - protein, 414 aa, unidentified; identical to SEQ ID NO: 10183
  REGION 1..414: note = Human gut metagenome

SEQ ID NO: 18602 - protein, 389 aa, unidentified; identical to SEQ ID NO: 11535
  REGION 1..389: note = Human gut metagenome

SEQ ID NO: 18603 - protein, 398 aa, unidentified
  REGION 1..398: note = Human gut metagenome
GISVKSQSHEYVSAQYDTLQDEKACHDSCRKLRRTRRNRLRYRKPRFDNRKRGEGWLAPSLKHKKELNVNVVKMYCTVMPITHATVEVGSFDTMLVKAIQEGKAIPEGADYQKGPRYNLATLREAVFYRDNYVCKICGRKATEGAILHMHHMFYWKGRHGNSLNELLTVCEKCHTPANHQKSGKLYGFGEKIKFADLSGAAFMNTVRWQIVNELYVAFGKPFVTITYGAMTKEKRIALQLEKSHNNDAYAMGEFHPNLRCMFEHYEKARRNNRILEKFYDSRYIDIRTGEIATGKELFNGRINRNHKKDSENLHKYRGKRTYAGHRALLRKKVNLNPGDLVSLNGENLIVHSTHTKKNGAVNVEFETPAKSGQKSASLKKLKIVKAANSIHPAWKKIS

SEQ ID NO: 18604 - protein, 512 aa, unidentified; identical to SEQ ID NO: 5811
  REGION 1..512: note = Human gut metagenome

SEQ ID NO: 18605 - protein, 467 aa, unidentified; identical to SEQ ID NO: 14958
  REGION 1..467: note = Human gut metagenome

SEQ ID NO: 18606 - protein, 554 aa, Actinomadura sp.; identical to SEQ ID NO: 16529

SEQ ID NO: 18607 - protein, 426 aa, unidentified
  REGION 1..426: note = Human gut metagenome
MVYVQDIDGKPMMPTTRYGKVRRLLKNKKAVVVNLCPFTIRLTYVTSDYKQEIVLGVDAGTKHVGLSATTKSKELYSSEVILRNDIVDLLSTRRELRRARRNRLRYRKPRFDNRIKSKRPGWIAPSVKYKIDAHIRVVENVCSILPISRIVIEVAQFDTQKIKNPNISGKEYQEGDQLGFWNTREYVLARDGHKCQYCKGKSKDKILNVHHIESRKTGGDSPSNLITLCETCHKEYHKGNIDLKIKRGKSLRDAAVMGIMKWRLYEEIKSKYDRVSMTFGYVTKYNRINHGFEKSHVSDAFVISKNFNAIRLGYYYKVRLVRRHNRQIHKQKIQKGGIKRLNQSPFEVFGFRLFDRVMFENSYYFIFGRRKTGSFDIRYIDGKNQKNVTYKKLKLSRCKRFMIQMELNKKTRTCFENERNSDRDAA

SEQ ID NO: 18608 - protein, 442 aa, unidentified
  REGION 1..442: note = Human gut metagenome
MVTVQQSTHYLPFGRVFIRRNLFMVYVISQDGKPLMPCSDPIARLLLKQGKAKVKKREPFTIKLTYETTNYTQGLTLGVDTGSGTIGTAVSKDNGDIVYMSEVVVRNDITDKMTQRAKYRRNRRNRKTRYRKARWLNRASSIKKDRFSPTMQSKLHSHVREIEYIQSILPVTEMVFETGQFDMHLMKNPSLANPKVRPWGYQKGANYGFENTKAMVLNRDNYTCQCCKGKHKDSKLEVHHIVFRSQGGSDEESNLLTLCHTCHKDLHSGKINPKLSGKVKGNLKYATQMNSIRKQLFRFYPNAIETFGYVTKVNRLHLGVAKEHYYDACTIATQGNAFNVKSNLYKKKCVSDGDFQKTKGIRSEQPIVTDKICGFRKFDKVRYFGNDYFIKGRMSTGYAILMDIDGNKIDFSTMPRGYKTPKLSNCKRITARSTVMTQVKVV

SEQ ID NO: 18609 - protein, 413 aa, unidentified; identical to SEQ ID NO: 3220
  REGION 1..413: note = Human gut metagenome

SEQ ID NO: 18610 - protein, 427 aa, Moorena sp.; identical to SEQ ID NO: 7715

SEQ ID NO: 18611 - protein, 426 aa, Moorena sp.; identical to SEQ ID NO: 3553

SEQ ID NO: 18612 - protein, 431 aa, Petrotoga sp.; identical to SEQ ID NO: 5928

SEQ ID NO: 18613 - protein, 425 aa, Nostoc sp.; identical to SEQ ID NO: 3714

SEQ ID NO: 18614 - protein, 427 aa, Parasutterella sp.; identical to SEQ ID NO: 4435

SEQ ID NO: 18615 - protein, 512 aa, unidentified; identical to SEQ ID NO: 12069
  REGION 1..512: note = Human gut metagenome

SEQ ID NO: 18616 - protein, 456 aa, unidentified
  REGION 1..456: note = Human gut metagenome
MSTCVCVLSNSGERLMPTFRFGKVRRLLKDGKAKIIKHHPFTIQLLYDSKANTQPIEICEDVGYNYIGISVKSQSHEYVSAQYDTLQDEKACHDSCRKLRRSRRNRLRYRKPRFDNRKRSEGWLAPSLEHKKQLNIRLIERYVSVIPITRATVEVGSFDTMLLQAIQKGESKPEGVDYQKGPRYNLATLREAVFYRDNYTCQVCGRKIADGAILHMHHMFYWKGRHGYQLDELVTACEKCHTPANHQKGGKLYGFGKDKKFANLSGAAFMNAVRWQIVDALHATYGKEFVTITYGAMTKEKRIALQLEKTHNNDAYAMGDYHPACRCKFRHYQKRRRNNRVLEKFYDATYIDARTGNKAKGKELFNGRISRNHKKDSENLHKYRSKKVSKGRRSIRRQRYAIQPYDTVRLENKTYITSGCHNKGTRLLIPANGKSKSVAISKVQVVCHAGAWIQII

SEQ ID NO: 18617 - protein, 423 aa, unidentified; identical to SEQ ID NO: 4062
  REGION 1..423: note = Human gut metagenome

SEQ ID NO: 18618 - protein, 475 aa, Blautia sp.; identical to SEQ ID NO: 4128

SEQ ID NO: 18619 - protein, 423 aa, Moorena sp.
MVFVLDRHKKPLMPCSPKRARLLLARKRAVVHRLSPFVIRLRDRRVEESTLQPVAIKIDPGSKTTGMAMVRQEATEEGPHHHALHLSEVRHRGAAVHQAMLERAGHRRRRRSANLRYRPPRFDHRRRPQGWLPPSLTSRVGNVLNWTRRYGRWAPVRRIEVERVKFDPQLLQNPEISGIEYQQGERAGWETRAYLLEKFGHRCAYCGKGEVPFELDHQLPRSRGGSNRVSNLVLACHDCNSAKGNRTAAEFGHPEVEAQAKAPLRDAAAVNATRFALVRELEKLGLPIGTWSGGRTRWTRARFGLSKTHALDALCVGDLAGVDAGKLKTVAITAMGRGRYGRTNVDEYGFPRGYLMRQKQVRGIKTGDRVRAVVPAGFAACGTHTGRIAVRANGQFRMSKVQGIPARFCRILQRAEGYDYAMA

SEQ ID NO: 18620 - protein, 422 aa, unidentified; identical to SEQ ID NO: 16742
  REGION 1..422: note = Human gut metagenome

SEQ ID NO: 18621 - protein, 475 aa, Blautia sp.; identical to SEQ ID NO: 4128

SEQ ID NO: 18622 - protein, 480 aa, unidentified; identical to SEQ ID NO: 2726
  REGION 1..480: note = Human gut metagenome

SEQ ID NO: 18623 - protein, 431 aa, unidentified
  REGION 1..431: note = Human gut metagenome
MPDKVYVISRLGHPLMPCSPAKARHLLDDKKAKVVKRMPFTIRLLYGSTKYIQPIILGVDAGSKTIGLSASTAKEEVFAAEVMPRNDVVENLSTRREFRRARRNRTTRHRKPRSDNRVRSNHERWLAPSVKVKIQEHITSIKRVRTILPISKVVIETAEFDLQLLKAIQEGKPIPEGEDYQKGEMYGSYNVCQYVLWRDNYTCICCGVRGTPKNPVRLHVHHFESRKYGGNAPDNHGTLCDDCHKKFHLGIITDVKLKTRRRQSTRDAAFMGIMRKTLMWRLRTELFIPVAETKGYITKATREKLLVLPKSHTRDALAIAQGRHGFGIKEYAYVEPANHIYTVRPVRHHNRQLHKASILKGGIRKRNQASKYIFGFRLYDKVLYQGKACFVWGRRTSGTFLLRTIDGIKVKDGVSYRNLTLLERSSNYLIA

SEQ ID NO: 18624 - protein, 433 aa, Sutterella sp.; identical to SEQ ID NO: 6555

SEQ ID NO: 18625 - protein, 447 aa, Halolactibacillus sp.; identical to SEQ ID NO: 8439

SEQ ID NO: 18626 - protein, 317 aa, Lamprocystis sp.
MAVFVLDRRGKPLMPCSEKRARLLLTRGRARVHRVVPLQNPQISGVAYQQGTLAGYEVREYLLEQWGRRCAYCTGDGVPLEIDHITPRSRGGSDRVTNLTLACHPCNQAKGNRSAAEFGHPEIEAKAKQSLGDAAAVNSTRWSLFNALTATGLAVETGTGGRTKWNRTRFGVPKTHVLDAACVGVVEGVTGWVAPVLSIRCTGRGTYQRTRVTQDGFPRGYLMRHKQVRGFQTGDLVRATVPSGKKAGVHMGRVAVRATGRFNIQTPQGVVQGIGYRHCCVIQRGDGYGYAQLDATALLPPAIPPRPEGRGFSRRSG

SEQ ID NO: 18627 - protein, 415 aa, unidentified; identical to SEQ ID NO: 5047
  REGION 1..415: note = Human gut metagenome

SEQ ID NO: 18628 - protein, 431 aa, Aphanizomenon sp.; identical to SEQ ID NO: 11808

SEQ ID NO: 18629 - protein, 424 aa, unidentified; identical to SEQ ID NO: 8578
  REGION 1..424: note = Human gut metagenome

SEQ ID NO: 18630 - protein, 370 aa, unidentified
  REGION 1..370: note = Human gut metagenome
LSKVKTMRVFVFNMRGRPLMPCSQRKARLLLRENKAMIYKYHPFTIQLTYTTGETKQDCHIGIDTGSKYIGAAVRSEDKVFWKGEIELRQDIRSNLDTKRIYRRSRRNRKTRYRKPRFLNRKRRDEWLPPSLQSRINHTFHWIDTLSSLVPNPILHIEVGKFDVAKMINPEIHGVDYQHGQTYGFFDERYFVFARDNYTCQCCGKSKNKILNTHHIIYRSNGGTNRVDNLITVCTDCHTSQNHRKGGIFYQWQEQHKKEKQYKDPPFMNTLRKRIFVAYPDAEITYGSETTPKRKAMKLDKTHYNDAIVISGINEIKENPEEWLLIKQFRKKKRSLHEATARKGRKKPNRNQTRNSKNTPYYKGFYLNDK

SEQ ID NO: 18631 - protein, 558 aa, Eubacterium hallii; identical to SEQ ID NO: 5272

SEQ ID NO: 18632 - protein, 523 aa, unidentified
  REGION 1..523: note = Human gut metagenome
MDKDMIYVLDTNGSPLAPTHRHKHIHMLIKTKQAKVVSYHPFTIQLLYESEIPRVVPNYIGGMDPGRTNIGTNVIDKTGKSVYASHIETRNKDIVVLMKKRSAHRHASRNGERARRIRRARFHNTTFLYGDHYRQLPKCEENVLVHDIKNTEARFCCRTRPDGWLTPTANQLLQTHISAVKQTMKILPITDFVIELNTFDFEKLKNPNIKKWQYEKGALYQTTLHDAIDEQQNHHCLLCQNPIEHYHHVVHRKQNGSDTIDNLVGLCEVCHDKVHKHNEIEAKLLNKKEGLKKEFAGISILNQIFYPFINWLMNIFGEDHVFITNGKETAQFRKTYNVPKTHELDAFCIACSILENSIIDYNCRVFEIKQFRRHNRQLINSTRERKYYSVDRVKTTKTLKNGKTVTKTELKNKTLVATNRKKRTEQKVDSLEEYHTKLRQKYDKIITKKIISGLIVSKSTRGYRNPKTLMPGAVFIYQGKHYVLSGTANEGRYYRAVGQGKKNFPTQDCKVVKQNTGLVYLYE

SEQ ID NO: 18633 - protein, 414 aa, unidentified; identical to SEQ ID NO: 3441
  REGION 1..414: note = Human gut metagenome

SEQ ID NO: 18634 - protein, 433 aa, Moorena sp.
MSLVFVLSSDRQPLDPCHPARARQLLTRGKAAIFRRFPFTIILTDRTAAERVTHPHRVKIDPGSKTTGIAVVAEGTGRVVWAGELTHRGQQIRDRLSQRRAVRHSRRQRKTRYRQPRFLNRRRPEGWLAPSLQHRVETTLTWVNRLRRYAPIAALSVELVRFDTQQMQNAEVSGVAYQQGTLAGYEVRQYLLEKWNRRCAYCHATGVPLQIEHMTPRSRGGSDRVSNLTLACEPCNTRKGTQTAAEFGYPHLQAQARLPLKDAAAVNSTRWALYQRLVATCLPVEAGTGGRTTFNRTRLGLPKGHWMDAACVGASTPEALDTRGVRPLLIRATGHGSRQMCRMDRFGFPRTSAKQARRVKGFRTGDMVRAVVTTGKKVGTYTGRVAVRASGSFNITTANRTVQGLSYRFVRAIQRNDGYTYQPQPVPAHAEAG

SEQ ID NO: 18635 - protein, 442 aa, unidentified; identical to SEQ ID NO: 2903
  REGION 1..442: note = Human gut metagenome

SEQ ID NO: 18636 - protein, 424 aa, unidentified; identical to SEQ ID NO: 6292
  REGION 1..424: note = Human gut metagenome

SEQ ID NO: 18637 - protein, 425 aa, Moorena sp.
VRVFVLNKNRQPLDPCKPARARILLRTGKAKVLRRYPLTIILTEEVNEPITHNHQLKIDPGAKITGLAIVQNNRIIWGAELIHRGFNLRDSLTKRRTLRRSRRNRQTRYRQPRFLNRKRPKGWLPPSLMSRVQNILSWVNKLTRFCPITGISQELVRFDTQKLENPEISGVEYQQGTLFGYEIREYLLEKWHRKCAYCGATDTQLEIEHIVPKSKGGSNRVSNLAISCHSCNQAKSNQEVEQFLSGKPNVLQRILSQAKKPLADAAAVNATWWKLYNELKLTGLPVEVGSGGLTKFNRCSQNLPKTHWLDAACVGTSTPEQLIIKDVKKPLIVTATGHGSRQMCRTDKHGFPVRYVPRFKLVKGYQTGDMVKAVVTKGKKQGVYVGRVAVRTTGSFNVKTNNGLVQGISHKYCQPIHKKDGYAYV

SEQ ID NO: 18638 - protein, 335 aa, Butyrivibrio sp.; identical to SEQ ID NO: 14784

SEQ ID NO: 18639 - protein, 442 aa, unidentified; identical to SEQ ID NO: 7529
  REGION 1..442: note = Human gut metagenome

SEQ ID NO: 18640 - protein, 451 aa, Akkermansia sp.
CCRLETPSNIGEGSQPVERPRRENLRVFLLNKRGKPLMPCSPAKARLLLKEKKAIVVRRTPFTIQLTIATGESKQPVSLGVDAGYKHVGLSASTEKAELYASEVELRPDVSDLLSARRTLRQSRRNRKTRYRAPRFDNRIRTKRKGWLAPSVENRINAHLSRIGAILRLLPVTKITVETASFDTQLLKNPDISGKEYQEGEQLGFWNVREYVLFRDGHACQHCHGRSKDPVLNVHHLESRRTGGDSPGNLLTLCETCHKALHRREIKLKTKRGQSFRAEAFMGIMRWEVLNRLKASHPELEVHNTYGYRTKHTRIVNGIDKSHCADAFCIAGNLGAKRLGEFFFQKQTRRNNRQIHKLSILKHGLRKRNQAPFEVKGFRLFDKVVCQGEEGFIFGRRSSGSFDVRKLDGTRISAGISYKKLRLLEKRRTYLKEIRKEEALPPLPEGRSLRA

SEQ ID NO: 18641 - protein, 415 aa, unidentified; identical to SEQ ID NO: 13008
  REGION 1..415: note = Human gut metagenome

SEQ ID NO: 18642 - protein, 420 aa, unidentified; identical to SEQ ID NO: 4588
  REGION 1..420: note = Human gut metagenome

SEQ ID NO: 18643 - protein, 406 aa, unidentified; identical to SEQ ID NO: 2703
  REGION 1..406: note = Human gut metagenome

SEQ ID NO: 18644 - protein, 406 aa, unidentified
  REGION 1..406: note = Human gut metagenome
MVYVQDIDGKPMMPTTRHGKVRRLLKDNKAVVVNTCPFTIKLTYKTSDYKQEIVLGVDSGTKHVGLSATTKSKELYASEVILRSDVVDLLSTRRGLRRTRRSRLRYRKQRFNNRVKSKKDGWIAPSVRHKIDSHIRIISFVYSILPVSKLIVEVAQFDTQKIKNPEISGKEYQEGEQLGFWNVREYVLARDGHKCQHCKGKSKDPILNIHHIESRKIGGDSPSNLITLCETCHKEFHKGNIKLKVSRGKSLRDAAVMGIMKWELYDELKSLYPNVKMTFGYITKYNRINHGIEKSHVSDAFVISRNFDSERLGYYYKRKLVRRHNRQIHKMKAPKGGNKRMNQSPFKVFGFRLFDKVMFQGKERFIYARRLRGIFNIRDINGENKKDISYKKLEYVSHGLISIVAG

SEQ ID NO: 18645 - protein, 418 aa, Bacteroides sp.; identical to SEQ ID NO: 2425

SEQ ID NO: 18646 - protein, 427 aa, Parasutterella sp.; identical to SEQ ID NO: 6030

SEQ ID NO: 18647 - protein, 360 aa, unidentified
  REGION 1..360: note = Human gut metagenome
MSTSVFVLDKKHRPLMPCRPARARRLLRAGRARVVKRFPFVIRLVDRTVEQSEVQPVLIKLDPGSRETGAAVVRDDEKKRHHALAFFVIKHRGGAIRDALKARSAFRRRRRSQNFRCRSPRFLNRVKPKGWLPPSLRHRVETTLSFVRRMCRYLPVSGIATELVKFDSQKLQNPEVSGVKYQQGTLFEYEVREYLLEKFGRKCVYCGAEGVPLNIDHVVPRAKGGSNRVSNLVLACVSCNQKKGARSLEDFLKGKPEVLARVRRELKTPLRDAAAVNATRWVLFNELKATGLPVETGSGALTKLNRHAFGVEKEHWLDALCVGRLNGVVTRKGLNALEIRCMGRGSRQRTRLTKYGFPRG

SEQ ID NO: 18648 - protein, 412 aa, unidentified; identical to SEQ ID NO: 5980
  REGION 1..412: note = Human oral metagenome

SEQ ID NO: 18649 - protein, 470 aa, unidentified; identical to SEQ ID NO: 2825
  REGION 1..470: note = Human gut metagenome

SEQ ID NO: 18650 - protein, 485 aa, unidentified
  REGION 1..485: note = Chicken gut metagenome
MLVYVVDHNGQPLMPTTRGAFVRIALKEGRAKVIRTKPFTIQLLYETTSFTQPLSGGTDPGRTNIGEAVLDAGGEVLYNAHITTRNEEIPDLMAERKAHRQASRRGERKVRQRRAIKNGTITFPLEKGRTPRGCEKPIVNKYIRNSEARFVNRKRPANWLTPTTNQLVETHLNAVKDICRLLPVSDWILEINRFAFMRMEDGSIRGADFQNGRLKGYPSVNAYIFALQGGCCVCCGKPLIEHYHHIVPRHLGGSDGPENIAGLCNECHGKVHTGKLSLDKLGQAKKYAALSVLNQAIPFIYDGLVELFGQEHVHICFGWQTSEQRKRLGLGKTHDADAVCIASLGNGSQPRQIPEPYEIKQFRRHNRAIINNQRERTYKLGKETVAKNRKPRFEQRGHSLESFLESLSPVWRLDACQVMEVSKSTRYYNSEGRCMPGTVFYYKGRRYVLSGQHSYGAYFRAVGCGKKNFPARDCRLVGSGGLVYI

SEQ ID NO: 18651 - protein, 346 aa, Arthrospira sp.; identical to SEQ ID NO: 6643

SEQ ID NO: 18652 - protein, 451 aa, unidentified
  REGION 1..451: note = Human gut metagenome
VLHARNLSITLAKVSYGLYDAGLPQKIIQKERSTYMVYVLSQNGQPLMPTIRHGKVRRLLKEGKANVVKKCPFTIRLTYPSGDQTQEISLGIDSGSKYIGISATTQKKVLYEAEVELRNDISKLLAARRQNRRSRRSRKTRYRKPRFDNRKRKEGWLAPSVQQKVDCHLKVVEDVCKLLPVTRIIAEVASFDIQKIKDPKIHGTDYQQGDQLGFWNVREYVLFRDGHTCRCCKGKSKDKILNVHHIESRQTGGNAPNNLITLCETCHKGYHKGQVKLPKKIKRGMTFKDAAFMGIMRWAFYDRLKEIYLPLGIDVSLTYGYLTKNTRIAHQLPKTHYLDARCISGHPDAISDGIYYHQKKIRCHNRQLHKANTLKGGIRKRNQAEYLVHGFRLFDKVRYQGKDYFIFGRRKSGYFDIRDLNGEKVNKGSISYKKLRLVETRRSYLTERRLA

SEQ ID NO: 18653 - protein, 348 aa, Anoxybacillus sp.
MVFVLDTNKRPLAPCHEAVARKLLKQGKAAIYKRFPFTIILKKSVDESEIKATYRLKIDYGSRHTGLAILRGQEVVWLGQLDHRTDIKERIDKRRAFRRARRNRKTRYRKPRFLNRKRKEGWLPSSLESRVQNIQTWVNRLKKLCPIGYISYENAKFDTQLMRNPEINGVEYQQGTLQGYEVREYLLEKFGRKCCYCGKENVPLEVEHIIPKSRGGTDRVDNLCLACHDCNQRKGSQTAEEFGYPHIQKQVKESLKDASAINSTRWKVYEVLKQTGLDVECGTGARTKMNRVRLDLPKTHYFDACCVGESTTNHLYFKTKEVLFIKAKGQKKCYLSRQKGVVVALVQT

SEQ ID NO: 18654 - protein, 414 aa, unidentified
  REGION 1..414: note = Human gut metagenome
MPCSPAKARLLLKEKKAIVKRRTPFTIQLTIATGESKQPVTLGVDAGYKHVGLSASTEKAELYASEVELRQDVSDLLSARRALRQSRRNRKTRYRAPRFNNRLRTKRKGWLAPSVENRINAHLSRIEAVLRLLPVTKITVETASFDMQLLKNPDIAGKEYQEGEQLGFWNVREYVLFRDGHVCQHCYGRSKDPVLNVHHLESRRTGGDSPGNLITLCETCHKALHRGDITLKAKRGKSFRAEAFMGIMRWEVHNRLRALHPGIEVSNTYGYRTKHARIANGIAKSHCADAFCIAGNLGAERLCEFFFQKQTRRNHRQIHKLSILKGGIRKRNQAPFEVKGFRLFDKVACQGEESFIFGRRSSGFFDVRKLDGTRISAGISCKKLHLLEKRRTYLTEIRKEEALPPLPEGRGLRA

SEQ ID NO: 18655 - protein, 420 aa, unidentified
  REGION 1..420: note = Human gut metagenome
MQYVYVLNKHGEPLMPCSPGKARILLKQQKACVVKRTPFTIKLMHGSAGYKQPVTLGVDAGSKHVGLSASTEKRELYSEEFTPRNDVVELLSTRRQNRRSRRNRKTRYRAPRFNNRVHSKHKGWLAPSVEVKIQEHITVIKRICRILPVTLVRVETAEFDTQRLKAMLAGKPLPVGTDYQLGEMYDEYNVRQYVLKRDNYTCQCCGAHTTAKKAVKLHVHHLESRKVGGNAPSNLITLCTACHDNLHKGKVTLDGKKRGKALRDAAFMGIMRNTLLERLRNELHIPVQNTYGYITKLLREQNDIKKSHVNDARCISKHPLAEPCSVCYRTKAIRHHNRQIHKAKILKGGIRKANQAPYIVKGFRLWDKVLYNGQECFISGRRSSGYFALKKLDGTTITNSISFKKLRLLEPATNYLIERK

SEQ ID NO: 18656 - protein, 428 aa, unidentified; identical to SEQ ID NO: 4442
  REGION 1..428: note = Bioreactor metagenome

SEQ ID NO: 18657 - protein, 418 aa, unidentified; identical to SEQ ID NO: 6835
  REGION 1..418: note = Human gut metagenome

SEQ ID NO: 18658 - protein, 430 aa, unidentified
  REGION 1..430: note = Human oral metagenome
MSKVYVLAMNGQPLMPTTHSGWVYRALRDGKAKVVSKCPFTIKLLYESTGFTQSLTLGVDTGSKYVGSAVINDITSEIVYESQTELRDDIKSKMDRRRQFRRARRNKLRYRPVRLNNRRGSKRKERYSPTLISKFQGHTREIEFIKSILPIRNVILEVGEFDPHLLQDPTLAYHKWDYSKGELYQQENFKQAARVRDGYKCQCCGKKNCRLEVHHLIPRSRGGSDKLANLITLCTDCHHLAHSSEEQLLAFQKKFGKKAKGTLRHATQMNVLRCMLQREYPDAELTYGFITKEVRRVFDLKKSHIIDACCIASRGALYKNNVSNKYKKKCVSNGDYPRTNTTNGKHVIIPKGKIAGFRRYDKVLYNNKEYFVAGRESKGYVTLIDMDNHRPQVERTKRSTGEKYLAKASIKASLVRKVASAKTCVITCGD

SEQ ID NO: 18659 - protein, 430 aa, unidentified
  REGION 1..430: note = Human gut metagenome
LSWSNYSNIQEVIETLVYVLNNQGNPLMPCKEAKARKLLKQNKAIIAKYEPFTIQLTFECENQTQEVSLGVDAGSKHIGISATTEKQVLYEADVELRNDIVDKLSSRRETRRARRNRLRYRPARFNNRVHSKHKGWLAPSVEQKINSHIQIIKKLHQILPVSKIIVETAQFDIQKIQNPDIKGEQYQQGNQMGLWNVREYVLFRDEHKCQYCKGKSKDNRLNVHHIESRKTGGNSPNNLITLCETCHNDYHQGKIQLNIKRSKSFRDAAFMGIMRKTLLLRLKQIYPNVQETFGYITKSTRIENNLPKEHYIDARCISGNPLAKPFGYYLYQKCIRRQNRKINRDKFIKGGIKKKNRLAGDVFGFGLFDTVGYQKKRYFVFGRRKRGEFDIRTLDGEKVNNGSIRYKKLKLIQKNNNILTERRLSVAPQL

SEQ ID NO: 18660 - protein, 413 aa, unidentified; identical to SEQ ID NO: 8694
  REGION 1..413: note = Human gut metagenome

SEQ ID NO: 18661 - protein, 405 aa, unidentified
  REGION 1..405: note = Human gut metagenome
GRRCRRQRRAKANGTISKKCVKHDTAQNGSVSKCAKEIGVIKRHLPGCEKDVLCICIKNKEAKFSNRTRPEGWLTPTANQLLQTHINLVKKIRKFLPISDAVLEINKFAFMQLDNPNIQKWQYQQGPLYQKANLEEAVSEMQEHHCLFCKKPIAHYHHVVPQSENGSDTIGNIVGLCTKHHDLVHKDTEWQKKLAKKKTGLNKKYGALSVLNQIIPALTKELSSLFPKHFFATNGKSTYDYRAAHGVSKDHWLDAYCIACSVLPNDVCDSSINNRVPYELKQFRRHDRRALHKENMSRVYTLNGKKVATNRHKATEQTADSLEEFRQNHPDDVCKLKVKENHSEYRNPKRNFPGCVFLVGKRTHVMQGTSGSHNGKADGYYDTNGNSYSSGKCKFVAKNEGIIFA

SEQ ID NO: 18662 - protein, 419 aa, unidentified
  REGION 1..419: note = Human gut metagenome
MVYVLDINGQPLMPTARHGKVRRLLNSHLAKVVKRCPFTIQLLYQSTKETQSVSLGIDAGSKHIGLAATTEKKDVYQEELIPRNDVVKLLSARRILRRSRRNRKPRYRKPRFNNRVHSKHKGWLAPSVEVKIQEHITAIKRICQILPISDIHVETAEFDLQRLKAMEEGRPLPVGTDYQLGEQYDFYNTRQYVLHRDGYTCQCCGAHDNNVRLHVHHIESRQTGGNAPNDLITLCEHCHKALHEGKLKLPKGKKRGKSYRDATFMGIMRKTLLERLKKEVDVPVTGTYGYITKYWREKAGLEKSHINDAVCISKHPYVEPLDTYYLTKAVRHHNRQIHKVNFSKGGIRKRNQAPHLVKGFRLFDKVLYQGKECFIFGRRVSGRMDVRLLDGTRINASVGYKNLKLLELRKAYLTERRTC

SEQ ID NO: 18663 - protein, 434 aa, unidentified
  REGION 1..434: note = Human gut metagenome
VVLMDAWDIIVVLNKRGKPLMPCSPAKARLLLKEKKAIVKRRTPFTIQLTIATGESKQPVSLGVDAGYKHVGLSASTEKAELYASEVELRQDITDLLSARRALRQSRRNRKTRYRAPRFDNRIRTKRKGWLAPSVENRINAHLSRIETVIRLLPVTKISVETTSFDMQLLKNSDIAGKEYQEGEQLGFWNVREYVLFRDGHVCQHCHGRSKDPVLNVHHLESRRTGGDSPGNLITLCETCHKALHRGEIKLKAKRGRSFRAETFMGIMRWGVLNRLKASHPKLEVHNTYGYRTKHARIANGIAKSHCADAFCIAGNLGAKRLGEFFFQKQTRRNNRQIHKLSILKGGIRKRNQAPFEVNGFRLFDKVACKGEEGFIFGRRSSGYFDVRKLDGTCISAGISYKKLHLLEKRRTYLTEIRKEEALPPPPEGRGLRA

SEQ ID NO: 18664 - protein, 417 aa, unidentified; identical to SEQ ID NO: 2758
  REGION 1..417: note = Human gut metagenome

SEQ ID NO: 18665 - protein, 453 aa, Solobacterium sp.
MSVAVLSSTGRKLMPTSNYRARKLLKSHRAAIECYRPIFTIRLTDRKEGNTQPIEYACDTGYQHVGVSIKSEKHEFVHAQYDMLSDETERHNDCRKYRRTRRNRLRYRKPRFDNRSKKNKEMPPSLRHRKENQISLFESFCKVMPITSATFEMGKFDTQLLQAIANGKPLPEGKDYQQGSKYLYQTEREAVFGRDHYTCQVCGKSVKDGVILNTHHIGYWKGYRSNRISNLLTVCEHCHTAKNHRPGGKLWGLEPKSTNLAPAAYMSTVRWAMYRDLVLMHPEIDIHIQYGAKTSVTRKSLHLAKTHANDAYCIGSLRPKHRAAELVYQKKRRNNRILSRFYDAKYIDIRDGKKKSGSALSCGRTNRRESRRSDKNQRIYRGKKCSSGRTSIRKRRYAYQPGDAILFRSQRFAVNGAHCNGTRVILNTGKSVKTADLTCTKKEGGWRFLPAQA

SEQ ID NO: 18666 - protein, 442 aa, unidentified; identical to SEQ ID NO: 3791
  REGION 1..442: note = gut metagenome

SEQ ID NO: 18667 - protein, 331 aa, unidentified
  REGION 1..331: note = Human gut metagenome
LLSTRKQNRRSRRYRKTRYRAPRFDNRVHSKHKGWLAPSVEVKIQEHITVIKRICKILPISLVRVETAEFDTQRLKAMLAGKPLPVGTDYQLGEMYDEYNVRQYVLKRDHYTCQCCGAHNTAKKVVKLHVHHLESRKTGGNAPSNLVTLCTTCHKNLHKGKVTLDGKERGKPLRDAAFMGIMRKTLMARLKEELPIPVQGTYGYITKMRREQNDIKKSHTNDARCISKHPLAEPCSVCYRTKAIRHHNRQTHKANFSKKGIRKRSQMPYLVEGFRLWDKVLYKGQECFVSGRRSSGSFALKKLDGTSISKGVTFKKLRLLEPATNYLIERM

SEQ ID NO: 18668 - protein, 442 aa, unidentified
  REGION 1..442: note = Human gut metagenome
MVTVQQSTHHLPFGRVFIRRNLFMVYVISQDGKPLMPCSDPIARLLLKQGKAKVKKREPFTIKLTYETTNYTQGLTLGVDTGSGTIGTAVSKDNGDIVYMSEVVVRNDITDKMTQRAKYRRNRRNRKTRYRKARWLNRASSIKKDRFSPTMQSKLHSHVREIEYIQSILPVTEMVFETGQFDMHLMKNPSLANPKVRPWGYQKGANYGFENTKAMVLNRDNYTCQCCKGKHKDSKLEVHHIVFRSQGGSDEESNLLTLCHTCHKDLHSGKINPKLSGKVKGNLKYATQMNSIRKQLFRFYPNAIETFGYVTKVNRLQLGVAKEHYYDACTIATQGNAFNVKSNLYKKKCVSDGDFQKTKGIRSEQPIVTDKICGFRKFDKVRYFGNDYFIKGRMSTGYAILMDIDGNKIDFSTMPRGYKTPKLSNCKRITARSTVMTQVKVV

SEQ ID NO: 18669 - protein, 482 aa, unidentified; identical to SEQ ID NO: 16365
  REGION 1..482: note = Firmicutes bacterium UBA5625

SEQ ID NO: 18670 - protein, 412 aa, unidentified; identical to SEQ ID NO: 3155
  REGION 1..412: note = Human gut metagenome

SEQ ID NO: 18671 - protein, 512 aa, unidentified
  REGION 1..512: note = metagenome
MSTVYVLNKDGKPLMPTTRGGHVRYLLKEKKARVVTSKPFTIQLLYETDDVVQPLYLGIDPGRTNIGVAVVKTDGTAVFTAHLETRNKEIPKLMQGRKKARRARRTNGRRCRRQRRAKANGTISKKCVKQTTAQNGSVSKRAKKIGVIKRHLPGCEKKVLCIGIKNKEAKFSNRTRPEGWLTPTANQLLQTHINLVKKIQKFLPISDVVLEINKFAFMQLDNPNIQKWQYQQGPLYQKASLEEAVSEMQEHHCLFCKKPIAHYHHVVPQSENGSDTIGNIVGLCTKHHDLVHKDTAWQKKLAKKKTGLNKKYGALSVLNQIIPALTKELSSLFPKHFFATNGKSTYDYRAAHGVSKDHWLDAYCIACSILPKDTCDKNINGRVPYKLKQFRRHDRRALHKENMSRVYTLNGKSVATNRHKAIKQTTDSLEEFRQRQPNDVYKLKVKEHHPEYRNPKRNFPGCVFLVGKHTHVMQGTSGSHNGKADGYYDTNGNSYPSGKCKFVAKNKGIVFA

SEQ ID NO: 18672 - protein, 456 aa, unidentified; identical to SEQ ID NO: 4017
  REGION 1..456: note = Human gut metagenome

SEQ ID NO: 18673 - protein, 401 aa, unidentified
  REGION 1..401: note = Human gut metagenome
RRQRRAKANGTISKKCVKQTTAQNGSVSKRAKDIGVIKRRLPGCEKDVLCIGIKNKETKFTNRTRPEGWLTPTANQLLQTHINLVKKIQKFLPISDVVLEVNKFAFMRLDNPNIQKWQYQQGPLYKKESLESAVSEIQEHHCLFCKKPIDHYHHVVPQHKNGSNTIGNIVGLCAKHHDLVHKDSAWEKKLAKKSTGLYKKYGALGVLNQIIPTLTNELSSLFPKHSFVTNGKSTYDYRAAHGVSKDHWLDAYCIACSVLPSNVCDSNINNHMPYVLKQFRRHDRRVLNNENMNRVYTLNNKAVAINRHKAKDQKTVSLEEFRKEHPDDVCKLKVKEHHPTYRNMNRNFPGSVFLVGKQIHVMQGIASSKDGKATKYNDTSATAIAAGKCKFVAKNTGILFV

SEQ ID NO: 18674 - protein, 423 aa, unidentified; identical to SEQ ID NO: 3951
  REGION 1..423: note = Human gut metagenome

SEQ ID NO: 18675 - protein, 415 aa, unidentified; identical to SEQ ID NO: 4319
  REGION 1..415: note = Human gut metagenome

SEQ ID NO: 18676 - protein, 397 aa, unidentified
  REGION 1..397: note = Human gut metagenome
MDTGYIHIGTSVKSEKHEYLGKQIDTLTDERRKHDACRMYRRQRRNRKRYRQPRFNNRERDDGWIAPSLEHKKTIHIQAISRICKVMPVTDITLEMGNFDTQVLKAREEGKPLPQGLDYQHGERYSVTTLREAVFLRDGYTCQCCGRTIKDGAILHAHHVVYRSQGGTNRISNLITVCDKCHTPANHKPGGKLYGWKPKVASFKGATYMTTIRWKLYNEVKALFPDIDIHITYGAETKERRRIFDITKSHVNDAFAMGQFHPKHRLKPVCYKKKRRNNRCLEKFYDAKYIDSRDDKKRTGHELFNGRISRNHKKDSENLRQYRRQKISAGRRTIRKQHYAIQPHDIVIFDGEKFETSGCHNNGTRAILLPQKKSVAIKKLNIYRYAGGYFKSAFNKK

SEQ ID NO: 18677 - protein, 449 aa, unidentified
  REGION 1..449: note = Fermentation metagenome
MVYVLSIDGKPLMPTSNAKARRLLKQKKAKVRELTPFTIQLTYKTKTEYTQPITLGIDSGYSNVGFSAIANNSELISGELKLLQGMKERLLERARYRKIRRSKLRYRKARFDNRTKSKPKGWLAPSLQYKLDSHIKFIDYLYSILPITRCVVEVANFDIQKIKNPDIQGEEYQQGEQMGFWNLREYIIHRDSHKCQNPNCKNRDKEQILETHHIKYKHLGGTDNPNNLITLCTKCHTSQNHKEGYFLWDWCQQGKKVRGFKDATFMSMIRWYLVNLLKERYSNIHVTYGYITKSHRINNKIEKTHYNDAFCIAKGINQKRSIEIFKVKQSRRNNRNLEMFYDAKYIDTRTGEKVSGSELNNGRRTRNKNLNSENLHQYRGQKLSKGQRRIRTKRHFYQPNDLVKYNGQTYSVRGTQNNGAYIRLNEIKKVPRVDLLTPYKFNKGIVWGM

SEQ ID NO: 18678 - protein, 430 aa, Microcoleus sp.
MSNFVFVLDTNKQPLEPVEPGQARRLLKLAQAAVYLRYPFTIILKYAVSRPKTQPAQLKIDPGSKTTGLAIVQGNQVLWGAELTHRGQQIKNDLESRRAIRRNRRNRKTRYRKPRFLNRTRKPGWLPPSLESRVKNIVTWVNRICRYVPITGISQELVKFDLLAMQNPEISGKEYQQGELAGYEVREYLLEKWGRKCAYCGIENLPFEVEHIHPKSKGGSDRVSNLTLACRGCNQAKGNQDIRDFLSKKPDILSRILKQASQPLKDATAVNSTRWALFQQLKQTGLPIEVSTGGRTKYNRTRLGLPKTHWLDAACVGNVEVLQVFTEQPLLIAAKGWGSCQMCTTNKYGFPVKHRTRCKTFFGFGTGDMVSAILPFGKFAGTHVGRLTVRESGVFEMRTPLGKVSPVRHKYCKSIHRNDGYMYAFSTNVQ

SEQ ID NO: 18679 - protein, 424 aa, unidentified; identical to SEQ ID NO: 3434
  REGION 1..424: note = Human gut metagenome

SEQ ID NO: 18680 - protein, 436 aa, unidentified
  REGION 1..436: note = Human gut metagenome
DGKAKIIKHHPFTIQLLYDSETNIQPIEICEDVGYNYIGISVKSQSHEYVSAQYDTLQDEKDCHDSCRKMRRTRRNRLRYRKPRFDNRKHDKGWLAPSLEHKKELNVNVIKMYCEVMPITHATVEVGSFDTMLVKAIEEGKATPESTDYQKGPRYNLASLREAVFYRDNYTCQVCGRKANEGAILHVHHMFYWKGRHGNSLNELVTVCEKCHTPANHQKGGKLYGFGENIKFANLSGAAFMNTVRWQIVNELYAAFGKPFVTFTYGAMTKEKRIALHLDKSHSNDAYAMGNFHPVDRCAFEHYEKVKRNNRILEKFHDSRYIDIRTGKEAKGKELFNGRISRSHKKDSENLHKYRGKRIRKGYRALRRKKVALNSGDLVSLNGETLIVHGTHTNKKGNVRVEFKVAALNGKKSASLKKLKIVKTSTPMHSAWAKVS

SEQ ID NO: 18681 - protein, 408 aa, unidentified
  REGION 1..408: note = Human gut metagenome
MVYVQDINGKPLMPTTRHGKVRRLLKDKKAVVVNLCPFTIRLTYVTSDYKQEIVLGVDAGTKHVGLSATTKSKELYSSEVILRNDIVDLLSTRRELRKTRRNRLRHRKHRFNNRIKSRRPGWTAPSVKYKVDAHIRVIDNVCSILPISRIVIEVAQFDTQKINNPNISGKEYQEGDQLGFWNVREYVLARDGHKCQHCKGKSKDPVLNVHHIESRKTGGDSPSNLITLCETCHKEYHKGNIDLKIRRGKSLRDAAVMGIMKWRLYEELKSKYDNISMTFGYVTKYNRIKHGIEKSHVFDAFVISKNFDAIRLGYYYKVRLVRRHNRQIHKQKIPKGGIKRLNQSPFEVFGFRLFDRVMFENSYYFIFARRKTGSFNIRDIDGKNQRDITYKKLKLSRCKRFMVQKEMD

SEQ ID NO: 18682 - protein, 426 aa, Parasutterella sp.; identical to SEQ ID NO: 3045

SEQ ID NO: 18683 - protein, 450 aa, unidentified
  REGION 1..450: note = uncultured archaeon
MQKLLAKLKNVPTGAPQACSSTSSVLNRDQNLSAQDIVLTNNNLEVDLPASNSSQGLRVPVINMRGKPLMPCRRGVARKLLEQKKAVVINLFPFVIKLKQATGETVDRLVLGVDIGYRWNGFSIVGKKRELFSGTLELDGKTSERLATKAMYRRGRRNKLWYREPRWNNRTRVEGWLPPSVQKRYDSILRYIKKMCSWYPIAEIILETASFDIQKINNPEIQGVEYQQGDLYGYQNMRAYLFTRENGLCQYCGKEFNLKDSSHIHHIIPRPAGTDKPDNLALLHEKCHKALHKKKKPTGLKPNKQFKPETWMSIVRNRFVKDLPESEITFGYITNLVRNSLGLPKTHFNDAFVIAGGTDQERVESVEIKQKRKNNRCLQLNRKGYKPSIRKQRYSLQPGDLIKIKGSNKIYVVKGVHGYGKMVRVKNGDKFLDFKAKLVSWCYHQKTIMY

SEQ ID NO: 18684 - protein, 496 aa, Streptomyces sp.; identical to SEQ ID NO: 4777

SEQ ID NO: 18685 - protein, 470 aa, unidentified
  REGION 1..470: note = Human gut metagenome
VSEYIYVIGVDGDPQMPTKRKRHVEQLLQAGRARVFRQVPFTIQLTYENKPVLQPITIAEDPGRSNIGMAVVSLSGELLSAAVVQTRNKEIVKLMEKRKQHRRASRNGERKTRQRLAKKCYTMLKAGLLMRKLPTYGKDKRVQCNVIRNTEARFCNRKRSDGWLTPSAEHLVRTHINLIHKMQKFLPITDIAIEINRFAFLSLEDPSISGVDFQNGPLKGYDDLNAAVEDLQDGHCLMCNSPIEHRHHIVPRSMQGSNTIGNIAGLCCKCHEKVHKDSAFEDHLKKKKTGLNKRYVAVSVLNQAIPFICKRLEQEFGKEHVHYCSGRDTSMVRRSFGYHKTKEEQLHEVDAWCIAVLSLQQIPEKAPSFDHVHEILQFRRQDRSIIDAQTSRMYYHEGKKVAKNRKKAEGQREDSLQEWRKRQVERYGEEQTRKMISQLKVKKSIRRYNRLDRLMPGAVFYYQDVRYVMR

SEQ ID NO: 18686 - protein, 531 aa, unidentified; identical to SEQ ID NO: 12018
  REGION 1..531: note = Human gut metagenome

SEQ ID NO: 18687 - protein, 470 aa, unidentified
  REGION 1..470: note = Human gut metagenome
MSVFVVGLNGCRLMPVSERKARLLLDDGKASVYRKVPFTIKLNYKTGSTTQPGYLGIDTGSQHIGVSVVRKDGTVLHKEEISLRDSMTKRKLLEAKASLRRGRRYRKTRYRHPKWRSKTKRVYCEVPDKKRRHWKKQKSTFTSGRPEGWLPPSLQSKTDHHIRWIKKLQNLLPEGYRLSIELGRFDPARMKDPEIHGELYQKGPQYDYENVRAYVLDRDRYTCQVCRRKGRKLHVHHILYRSQGASDTPQYMATVCSSCHTTENHLPGGILYQWMQEQKKFTRGLRDATFMNILRKRLMKTFPDAVFTYGNITKVDREKLKLPKSHGNDATAIALVRTGVTSVKDEEPVLYIQQVRRKKRSLHEETPRKGRKEPNRTAARNSKNTKAVTVTKRRDGKKVSVTACLFDRVELNGKKGWITGFTGKACRIVDTEGNYVAATDKYTQVNISSIRILHHTGNWVTGLKRNVGKR

SEQ ID NO: 18688 - protein, 424 aa, Moorena sp.
MSNYVFVIDPDKQPCNPVHPAKAQLLLNQKKAAVFRRYPFTIILNEKQKDVEANPLTLKIDPGSQTTGIAILNGENVVWGAELAHRGQQIKSDLESRRAIRRNRRNRKTRYRPARFLNRKREKGWLAPSLQHRVDTTLTWIKKLIRYCPVTNIVQELVRFDLQKMENPEISGIEYQQGELQGYEVREYLLEKWNRQCAYCGAKNIPLQIEHIHPKSKGGTNRISNLCITCEPCNLAKGTQDIKDFLSGKPSILKRVLSQAKSPLKDAAAVNSTRWALLNALKSIGLPISTGSGGQTKFNRTRLNLPKTHWIDAACVGTIESLRIITKQPLLIKATGHGCRQMCRTDKFGFPSRYVPRLKFIKGFQTGDIVKAIVTSGKKIGTYVGRVAVRCSGSFNISTPQLIQGIGHKYCRAIHRKDGYSYSF

SEQ ID NO: 18689 - protein, 545 aa, unidentified
  REGION 1..545: note = Human gut metagenome
VQFAWWLCHPKPSDNIEDVNHETALMLLQIKAGTETFGTAPCGSGPKAEGVSPERKAMNTVAVVTNTNKPLMPTSPYRARKLLSSGKAKIVKHRPFTILLVNRSDGNVQEIEYKSDTGYLHVGISVCSEKREFVREQRDLLPDEREKHNDRRKYRRTRRKRKRYRKARFDNRIGKIRKAEKNKHVWLPPSLDHKVDAQVQLFLRLYQVMPIKRAVFEMGQFDPALMKALEKGEAAPQGIDYQMGERYQIATRRAAAFTRDRYACVFCGRSIKDHAILHVHHIGFWKQDRSNRLDNLATCCEQCHTSENHRPGGILYGVEPKLESLASATYMNVVRFELLQRLKEAAPDVEFHISYGAKTSVIRKQRSISKSHTNDAYCLGQYFPKLRAEEIGFQKIRRNDRILQKFYDAEYLDSRDGTTKKGKELTNGRISRNHMKDHKNLHQYRGKKLSKGRVTIRRGRSSLKPGGLVRFDGEVLTVHGTHRSRRKNKAGHIKVSVNVEFERPSKTGRKSAALSKCQIISQSYNTGWKKIQLRKEEQGKIAAVV

SEQ ID NO: 18690 - protein, 557 aa, unidentified
  REGION 1..557: note = Human gut metagenome
MIYNLVSTRERSFMKQKKQKVMVYILNKKGKPLMPTTRCGHVRKLLDSKKAVVVNSNPFTIRLKYDTPNGIQDVFAGIDSGRENIGSGASNEDGDCLYLGELKTSNKSIKLKMTERAGFRKERRRHDRQNKQRKARKDHTEIQNGNADICRTTISCKSVQISYPAAEKSVTHKIIRGKEGKFANRHRDEGWITPSARQLVQMHMNDLKSMCKILPISHVTLERVAFDFQKLENENIKVWEYGKGKLYGYDSPEEYIHDVQNGKCLVCGKPHIDYLHHIIPRSKGGSDKVSNIAGLCYDCHYGPMGVHNCQNTQDRLPELKSEANKQYKVSLLNSVMPVLIEEMDKFCKANSIMFSICEGHDTAKVRDMYDLQKDHCFDGFAISLVGRNVESVDVIPDRIYQKQRYKKKSKNIIQKRNCREYYDDKKLVAVNRHKGTDQKADSLEEYMNTYAETHTADECKNQFESLTVKPARRTYTFHKEGRICPFHIGDKVRYEKKNKIKGNTKVDTFICEGIRFVKDENKAEVKHNKTKSKKMKFCRVLESGCTPYVDYRKLALM

SEQ ID NO: 18691 - protein, 496 aa, Streptomyces sp.; identical to SEQ ID NO: 4777

SEQ ID NO: 18692 - protein, 420 aa, unidentified; identical to SEQ ID NO: 15186
  REGION 1..420: note = Human gut metagenome

SEQ ID NO: 18693 - protein, 415 aa, unidentified
  REGION 1..415: note = Human gut metagenome
MENKIEYCFVVDKNNRPLAPTKVNKGWYLIRKGRAKLKSKYPMVIQLEKEVEPDDEDESHMVCGIDDGSSHVGIAIVQKCPSKNKVVFKGTIEQRQDVKHLMDVRRGYRQYRRYHKRYRKPRFNNRASSKKTNRLAPSIKQKKDSILRVLYQLNKWINIKEYYLEDVAIDIRAMTDGYKPYNWQYQKNNRLDENLRKATILRDSCKCQECGKTNTVLEVHHIRAKRFGGANTIGNLITLCSSCHQKTEGKEREFEERYFTKIKSKPKRFDYAMHVMQGKNYLRENIKQLGILHLTTGGDTANKRIEWNIEKSHSNDAICITNCFPDTCNIKEWMIKPMRRKSKSKTDNVLGIKHRDLVEYTYRNGETHKGYVTALYPHLNALNFQSPTKHCKKVNVRKCRLLWKYNKIYWLDSVI

SEQ ID NO: 18694 - protein, 423 aa, Arthrospira sp.; identical to SEQ ID NO: 3221

SEQ ID NO: 18695 - protein, 415 aa, Bacillus sp.; identical to SEQ ID NO: 5390

SEQ ID NO: 18696 - protein, 415 aa, unidentified
  REGION 1..415: note = Human gut metagenome
MVYVVANDGQPLMPTERHGKVCRMLRSEMAKVIKKCPFTIQLQYESEKNVQPVSLGVDAGSKHIGISATTKTKVLYESDVELRDDIVKLLATRRQLRRSRRSRKTRYRPARFDNRKRKEGWLAPSIRQKIGSHLTVVANVCKILPINQIIVETASFDIQKIKNSDIQGTEYQQGEQMDFWNVLEYVFFRDGHTCQCCKGRSKDKILNVHHIESRKTGGNAPNNLITLCETCHKGYHNGTVILPKNIKRGMKFKDAAFMGIMRWAFYNALREQYEPAIPVSMTYGYLTKNTRIEHGLLKEHYIDARCISGNPDAVSDGTYYYQKKVRCHNRQIHKQTILKGGIRKSNQAEYLVKGYRLFDEVRYQGREYFIFGRRKSGFFDIRTLSGEKVNKGSISVKKLTFVDTRKNYLIERRTV

SEQ ID NO: 18697 - protein, 461 aa, Parasutterella sp.; identical to SEQ ID NO: 3646

SEQ ID NO: 18698 - protein, 421 aa, unidentified; identical to SEQ ID NO: 2846
  REGION 1..421: note = metagenome

SEQ ID NO: 18699 - protein, 413 aa, Blautia sp.; identical to SEQ ID NO: 3616

SEQ ID NO: 18700 - protein, 427 aa, Moorena sp.; identical to SEQ ID NO: 7675

SEQ ID NO: 18701 - protein, 408 aa, unidentified; identical to SEQ ID NO: 3192
  REGION 1..408: note = Human gut metagenome

SEQ ID NO: 18702 - protein, 406 aa, unidentified; identical to SEQ ID NO: 16853
  REGION 1..406: note = Human gut metagenome

SEQ ID NO: 18703 - protein, 413 aa, unidentified
  REGION 1..413: note = IscB polypeptide
MQKVYVQNKDGEPLMPCTPAKAKHLLRDKKAGVIHLTPFTIRLNWDCENNKQEIIVGLDTGAVNVGCSAVSNNKCLYASETKLRIDISKKMQRRSKYRRNRRTRLLRYRPARFDNRTRPEGWLPPSLKSKLDSTVKIVKQLSEILPISKVVVEIAKFDTQKLQNPEIKGKEYQKGVSEGYDNVRAYVFERDKYTCQICKKKLGVLQIHHILQRKDGGSDRPQNMVTVHKSCHKDFHLGLIKHKFRKPKEYKMATQVTILKDFIVDGLKKDFDVEVTFGHITKRNRLRLNLPKSHCFDAVAICNPKKIERINKIFQRVCITQRRYQMTKGIRSEKKLPSGKVFGFNQWDKVRLQDEQVGFIKGRRTRGNFDICDINKKNINHSINYTKLQKLSSNNVMEVQAIPPTAKAVGTLA

SEQ ID NO: 18704 - protein, 518 aa, unidentified; identical to SEQ ID NO: 6562
  REGION 1..518: note = Human gut metagenome

SEQ ID NO: 18705 - protein, 424 aa, unidentified; identical to SEQ ID NO: 3351
  REGION 1..424: note = Human gut metagenome

SEQ ID NO: 18706 - protein, 424 aa, unidentified; identical to SEQ ID NO: 5075
  REGION 1..424: note = metagenome

SEQ ID NO: 18707 - protein, 443 aa, unidentified; identical to SEQ ID NO: 15325
  REGION 1..443: note = Human gut metagenome

SEQ ID NO: 18708 - protein, 431 aa, unidentified
  REGION 1..431: note = Human gut metagenome
MPNKVYVINKHGRPLMPCSPAKARHLLDDGKAKVKKRTPFTIQLVYGSSGYTQEVILGVDAGSKTIGMSASTTKEELLSAEVKPRNDVVDLLSTRREFRRARRNRKTRYRKPRFDNRVRSKHKEWLAPSVEVKIQEHITSIKRVCRILPVSKVVVETAEFDLQLLKAIADGKPVPQGEDYQKGEMYGHYNVRQYVLWRDDYTCQCCGAHATKKKEVRLHVHHLESRKVGGDAPDNQVTLCESCHEKLHKGLIAEKDFKKRKRRSTRDATFMGIMRKTLMQRLCSELPIPVIETRGYITKATREKLLVLPKSHTNDALAIAQGKRGFNVGYLPEIAQIDKIYTIRPVRHHNRQLHKAAILKGGIRKSNQAGKYVFGYRLFDKVQFNGQDCFIWGRRTTGIFTIKTINGKMIKDGISFKKLKLVEKSTSYLIA

SEQ ID NO: 18709 - protein, 414 aa, unidentified
  REGION 1..414: note = Human gut metagenome
MPCSPAKARLLLKEKKAIVKRRTPFTIQLTIATGETKQPVSLGVDAGYKHVGLSASTEKAELYASEVELRQDITDLLSARRALRQSRRNRKTRYRAPRFDNRIRTKRKGWLAPSVENRINAHLSRIEAVLRLLPVTKITVETASFDMQLLKNPDISGKEYQEGEQLGFWNIREYVLCRDGHVCQHCYGRSKDPVLNVHHLESRRTGGDSPGNLVTLCETCHKALHRGEITLKAKRGQSFRAEAFMGIMRWEVLNRLKASHPELEVNNTYGYRTKHARIANDIAKSHCADAFCIAGNLGAERLGEFFFQKQTRRNNRQIHKLSILKGGIRKRNQAPFEVNGFRLFDKVACKGEEGFIFGRRSSGFFDVRKLDGTRISAGISYKKLHLLEKRRTYLTEIRKEEVLPPLPEGRGLRA

SEQ ID NO: 18710 - protein, 411 aa, unidentified; identical to SEQ ID NO: 2663
  REGION 1..411: note = Human gut metagenome

SEQ ID NO: 18711 - protein, 480 aa, unidentified; identical to SEQ ID NO: 2726
  REGION 1..480: note = Human gut metagenome

SEQ ID NO: 18712 - protein, 425 aa, unidentified; identical to SEQ ID NO: 7553
  REGION 1..425: note = Human gut metagenome

SEQ ID NO: 18713 - protein, 512 aa, unidentified; identical to SEQ ID NO: 4350
  REGION 1..512: note = Human gut metagenome

SEQ ID NO: 18714 - protein, 421 aa, unidentified
  REGION 1..421: note = Human gut metagenome
MLVYVLSKNGQPLMPTHRCGFVRRLLNSQKAKVVRRCPFTIQLQYDTDCKTQPVTLGIDAGSKHIGVSATTESKVLYEADIELRNDIVDLLATRRQMRRARRSRKTRYRKARFDNRKRNDKWLAPSIQHKVNCHLEAVRFVHKLLPISKIIVEVASFDIQKIKNPLITSTDYQNGELLDWKNVREYVLFRDSHICQCCKGKSKDPVLQVHHIESRKIGGNAPNNLITFCKTCHNGYHHGTVKLPAKIKRGMKFNDATFMGIMRWGFYNQLKSLYPDVSLTYGYITKDIRISNGLAKTHFIDARCISGNPLATSDNTVYFLKKRRRHNRQIHKFNILKGGRKKRNQAAYLVKGYRLFDKVNYNRKEYFIFGRRASGFFDIRTLSGEKVNKGSISCKKLKLLEASKGYLTERRNAFLSPLNSV

SEQ ID NO: 18715 - protein, 470 aa, unidentified
  REGION 1..470: note = Human gut metagenome
MVGGVSQIFQKKEVSVLDTVAVISASGRKLMPTNSYRARRLLKSKRAVIYRYRPVFTIKLADRTDGYIQSIEYKCDTGYQNIGISICSDTKEFVNEQRDLLKDEVKRHSNSRKYRRTRRNRLRYRKKRFDNRRGMISRDGFAPSIRNKRDVHVRLYEEYYKVFPITKAVFEMGQFDTQVLKAVEAGLPVPAGTDYQRGEQYGYATLREAVFARDSYTCVCCGKSAIKDGVKLRIHHIGYLSGDRSNRMANLGSVCESCHTSKNHKPGGKLYSLKPELKTFKGATFMTTVRYSMVKQLKAATPDVDIRVTYGAATKLARKALNVKKTHSNDAYCMGEFHPEHRSDFKHYRKCRRNSRVLSRFYDAKYRDLRDGSVKTGSQLSCGRTNRRIPRHTELNERIYRGHKISKGKLVVRRQHYQYRTGDTVWAEGKRCAVKGIISNGTRIALNERNPVSVNKIDKTVHTGGWAKAS

SEQ ID NO: 18716 - protein, 418 aa, unidentified; identical to SEQ ID NO: 4327
  REGION 1..418: note = Human gut metagenome

SEQ ID NO: 18717 - protein, 426 aa, unidentified
  REGION 1..426: note = Human metagenome
MVFVLNRSKKPLNMITNAEARILIKKKLAVIHKVYPFTIRLKDNSCVSNDRAYTVKLDPGSRHTGVAIVDDKDQVVMLAELEHRGHLIKRNMDSRRAVRRHRRNRNTRYRPARFLNRKIPKGWLAPSVKSRADNVINFIKKYKKLINIDKVMIEHVSFDTAQMSSNTKLYGVKYQQGPLYQQKLRSFIFSRSNGKCVYCGAQAEEIDHVIPRAKGGTNSVYNLVASCRACNQMKSNLSLKEFGKKINKNFSKLEPKKLPKDAAIVQAARNYMVKEVTKLVFNTTLHDAWMTKYNRDELGLPKEHYYDALSVGEVPNKFDFLTDKVFQISAKGRGSRQMCLMNKYGFPRTKSKGSKLVEGFQTGDMVKVIVPSGLKQGEYLGRVVVRSSKCFDVKTKTKTVQGIWHKYFHIVQRGDGYLYNYERRAI

SEQ ID NO: 18718 - protein, 413 aa, unidentified; identical to SEQ ID NO: 3620
  REGION 1..413: note = Fermentation metagenome

SEQ ID NO: 18719 - protein, 367 aa, unidentified
  REGION 1..367: note = Human gut metagenome
VSEMTSYAFVLDANGKQLAPAKEQKAWFLIRKKRAALVSKYPMVIQLKKEIPENEICKDEIRCGIDDGGLHVGIALVQKCKTKNKVVFKGTMEQRNDVKHLMEVRRGYRRYHRYHKRYRQARFDNRKSSKREGRIAPSILQKRQATIRVIHWLNKWINITNYWLEDVSVDIRALTDGYQSYRWQYQKSNRLDENIRKAAILRDGGKCMECGKSNCRLEVHHIKPKRRNGSNTLDNLITLCESCHQKTEGQEELYMDRYFSLLKSSDNKNLNYAQHVMIGKMWLRKQLSGLGVLYLTSGGDTANKRIDWNIEKSHANDAVCITDLRPDTCDVKEWTMKPMRRQSKAKTDHVLGCLLYTSPSPRDRSLS

SEQ ID NO: 18720 - protein, 430 aa, unidentified; identical to SEQ ID NO: 7436
  REGION 1..430: note = Human gut metagenome

SEQ ID NO: 18721 - protein, 406 aa, unidentified; identical to SEQ ID NO: 3475
  REGION 1..406: note = Human gut metagenome

SEQ ID NO: 18722 - protein, 447 aa, unidentified; identical to SEQ ID NO: 5309
  REGION 1..447: note = Human gut metagenome

SEQ ID NO: 18723 - protein, 242 aa, unidentified; identical to SEQ ID NO: 15640
  REGION 1..242: note = Human gut metagenome

SEQ ID NO: 18724 - protein, 396 aa, unidentified; identical to SEQ ID NO: 4508
  REGION 1..396: note = Human gut metagenome

SEQ ID NO: 18725 - protein, 462 aa, unidentified
  REGION 1..462: note = Human gut metagenome
MSVLVIGRNGRALMPTNPRKARLLLKKKTASVVCRHPFTIQLLYKTGCATQEGCIGIDTGSQHIGVGITCGDRVILKDEHALRSSMEKRSLLATRAVMRRGRRYRKVRYRKPKWRHHTKRMYFEKANRRGQHWRKVKTTTQSPRLKGWLPPSLQSKCDHHFRIIDRYLKYLPDPITRNLVIEAGRFDMARMNDPTIHGEMYQRGPMYDAENLRAYIFARDNYQCACCKAKAGTTRKADGTTVKLVAHHILFRSRGATDNPKYIISVCDHCHTTKAHQPGGILYSWMENNKKVARGLRDATFMNILRKRLFARYPQAAFTYGNITAADRKQLRLPKSHANDAVAISLFGKEASTVKNICQTMHYKQIRKSKRSLHEAIPRKGRKNPNTKAVRNKKNTTQANGFKLWDSVLADGKKLFICSFTGTSAYLIDKNGCYISQPGKTYKQWPLSKLKRLHPNGNWLMA

SEQ ID NO: 18726 - protein, 442 aa, unidentified; identical to SEQ ID NO: 3234
  REGION 1..442: note = Human metagenome

SEQ ID NO: 18727 - protein, 462 aa, unidentified
  REGION 1..462: note = Human gut metagenome
MSVLVIGRNGRALMPTNPRKARLLLKKKTASVVCRHPFTIQLLYKTGCATQEGSIGIDTGSQYIGVGVTCGDRVILKEEHELRSSMEKRSLLVARAAMRRGRRYRKVRYRKPKWRHHTKRMYFEKPNRRGQHWRKVKTTTQSPRPKGWLPPSLQSKCDHHFRIIDRYLKYLPDSITRNLVIEVGRFDMARMNDPMIHGEMYQRGPMYDAENLRAYIFARDGYQCACCKAKAGTTRKTDGTTVKLVAHHILFRSRGATDNPKYMVSVCDHCHTTKAHQPGGVLYSWMERNKKVTRGLRDAAFMNILRQRLFARYPQAAFTYGNITAADRKQLRLPKSHANDAVAISLFGKEVSAVRDTCQTVHYKQVRKSKRSLHEAIPRKGRKRPNTKAVRNKKNTTQVNGFKLWDSVLANGKKLFICSFTGTSAYLIDKNGCYISQPGKTYKQWPLSKLKRLHPNGNWLMA

SEQ ID NO: 18728 - protein, 424 aa, unidentified; identical to SEQ ID NO: 3232
  REGION 1..424: note = Human gut metagenome

SEQ ID NO: 18729 - protein, 420 aa, unidentified
  REGION 1..420: note = Human gut metagenome
MQYVYVLSKHGEPMMPCSPGKARLLLKQQKACVVRRTPFTIKLLYGSAGYKQPITLGVDAGSKHVGLSASTEKRELYREEFTPRNDVVELLSTRRQNRRSRRNRKTRYRVPRFDNRVHSKHKGWLAPSVEVKIQEHITVIKHICKILPISLVRVETAEFDTQRLKAMLAGKPLPVGTDYQLGEMYDEYNVRQYVLKRDNYTCQCCGAHTTAKKLVKLHVHHLESRKTGGNAPSNLVTLCTTCHKNLHKGRVTLDGKERGKPLRDAAFMGIMRKTLMVRLKEELPIPVQGTYGYITKMRREQNDIKKSHTNDARCISKHPLAEPCSVCYRTKAIRHHNRQTHKANFSKKGIRKRSQMPYLVEGYRLWDKVLYKEQECFVSGRRSSGSFTLKKLDGTSVSKGVTFKKLRLLEPATNYLIERM

SEQ ID NO: 18730 - protein, 518 aa, unidentified; identical to SEQ ID NO: 7282
  REGION 1..518: note = Human gut metagenome

SEQ ID NO: 18731 - protein, 442 aa, unidentified; identical to SEQ ID NO: 3791
  REGION 1..442: note = Human gut metagenome

SEQ ID NO: 18732 - protein, 518 aa, unidentified
  REGION 1..518: note = Human gut metagenome
MTPKKRKEASRMSEYIYVLGMDGDPQMPTKRKRHVEKLLQVGRARVFRQIPFTIQLTYENKPVLQPITIAEDPGRSNIGMAVVSLSGELLSAAVVQTRNKEIVKLMEKRKQHRRASRNGERKARQRLAKKCHTIIKTGFLMRKLPMYGKDKRVRCNVIKNTEAKFCNRKREDGWMTPSAEHLVRTHINLIHKMQKFLSITDVAIEINRFAFLSLEDPSISGVDFQNGPLKGYDDLNAAVEDLQDGHCLMCNSPIEHRHHIVPRSMQGSNTIGNIAGLCCKCHERVHKDARFEDRLKKKKAGLNKRYAAVSVLNQAIPFICKRLEQEFGKEHVHYCSGRDTSMVRRSLGYHKTKEEQLHEVDAWCIAVLALQHVPEKAPEFDHVHEILQFRRQDRSRIKAQTSRAYYHEGKKIAKNRKKAEGQREDSLQEWRKRQVERYGKEQTRKMISQLEVKESIRRYNRLDRLMPGAVFYYQGVRYVMRGQHSNGQYLQAVGMGDKDFPAKKCKIVVHNQGLVFVS

SEQ ID NO: 18733 - protein, 577 aa, unidentified
  REGION 1..577: note = Human gut metagenome
LYIKMTSCTCTVFPACNHAKASSSQGKHNLLFRQGRLIAKKVTYMSTVYVLNKDGKPLMPTTRGGHVRHLLKEQKARVVQSNPFTIQLLYETNDAVQPLYLGIDPGRTNIGVAVVKADGTAVFTAHLKSRNKEIPKLMQDRKRARRARRTNGRRHRRQRRAKANGTISKKCVKQTTTQNGSVSKRAKEIGIIKRHLPGCEKDVLCIGIKNKEAKYTNRERPEGWLTPTANQLLQTHVNLVKKVQKLLPISDVVLEVNKFAFMRLDNPDIQKWQYQQGPLYKKESLESAVSEMQEHHCLFCKKPIDHYHHVVPKSENGSNTIANIVGLCAEHHNLVHKDVAWQEKLAEEKTGLNKKYGALSVLNQIIPALTNKLSVLFPKHFFVTAGKSTHDYRAAHGVSKDHWLDAYCIACSVLPSNVCDSNINNHVPYELKQFRRHDRRTLHKENMSRVYTLNGKAVATNRHKAIKQTTDSLEEFRQNYPDDVYKLKVKEHHPAYRNLNRNYPGSVFLVGKQAHVMQGIASSKDGKTTKYNDTNATTITAGKCKFVAKNSGILFVQCKFRKALSDGTTKKLQYPVR

SEQ ID NO: 18734 - protein, 470 aa, unidentified; identical to SEQ ID NO: 2825
  REGION 1..470: note = Human gut metagenome

SEQ ID NO: 18735 - protein, 413 aa, unidentified; identical to SEQ ID NO: 8345
  REGION 1..413: note = Human gut metagenome

SEQ ID NO: 18736 - protein, 357 aa, unidentified
  REGION 1..357: note = Human gut metagenome
TEKAELYASEVELRQDVSDLLSARRTLRQSRRNRKTRYRAPRFDNRIRTKRKGWLAPSVENRINAHLSRIGAILRLLPVTKITVETASFDTQLLKNPDISGKEYQEGEQLGFWNVREYVLFRDGHACQHCHGRSKDPVLNVHHLESRRTGGDSPGNLLTLCETCHKALHRREIKLKTKRGQSFRAEAFMGIMRWEVLNRLKASHPELEVNNTYGYWTKHARIANGIAKSHCADAFCIAGNLGAERLGEFFFQKQTRRNNRQIHKLSILKGGIRKRNQAPFEVKGFRLFDKVACQGEEGFIFGRRSTGYFDVRKLDGTCISAGISYKKLHLLEKRRTYLTEIRKEAFPPLPEGRSLRA

SEQ ID NO: 18737 - protein, 418 aa, unidentified; identical to SEQ ID NO: 8891
  REGION 1..418: note = Human gut metagenome

SEQ ID NO: 18738 - protein, 476 aa, unidentified
  REGION 1..476: note = Human gut metagenome
LYIKMTSCTCTVFPACNHAKASSSQGKHNLLFRQERLIVKEVAYMSTIYVLNKDGKPLMPTTRGGHVRHLLKEQKARVVRAKPFTIQLLYETNDVVQPLYLGIDPGRTNIGVAVVKANGTAVFTAHLETRNKEIPKLMQDRKKARRARRTNGRRCRRQRRAKANGTISKKCVKQDTAQSKNPSKRAKEIGVIKRRLPGYKKDVLCIGIKNKEAKYTNRARPEGWLTPTANQLLQTHINLVKKIQKFLPISDVVLEVNKFAFMRLDNPDIQKWQYQQGPLYQKGSLENAVSEMQEHHCLFCDKPIDHYHHVVPQSENGSNTIANIVGLCSEHHNLVHKDAAWQKKLAEEKVGLNKKYGALSVLNQIIPALTNKLSVLFPKHFFVTAGKSTHDYRATHGVSKDHWLDAYCIACSVLPSDVCDSNINNHMPYELKQFRRHARRALNNENMNRVYMLNDKAVAINRHKATEQEAASLEEF

SEQ ID NO: 18739 - protein, 490 aa, unidentified; identical to SEQ ID NO: 6170
  REGION 1..490: note = Human gut metagenome

SEQ ID NO: 18740 - protein, 450 aa, Moorena sp.; identical to SEQ ID NO: 17926

SEQ ID NO: 18741 - protein, 415 aa, unidentified; identical to SEQ ID NO: 6843
  REGION 1..415: note = Human gut metagenome

SEQ ID NO: 18742 - protein, 450 aa, Clostridium sp.; identical to SEQ ID NO: 10471

SEQ ID NO: 18743 - protein, 419 aa, unidentified; identical to SEQ ID NO: 5271
  REGION 1..419: note = Human gut metagenome

SEQ ID NO: 18744 - protein, 442 aa, Lactobacillus sp.; identical to SEQ ID NO: 5193

SEQ ID NO: 18745 - protein, 279 aa, unidentified
  REGION 1..279: note = metagenome
VVVETAEFDLQLLKAIADGKPVPQGEDYQKGEMYGHYNVRQYVLWRDNYTCQCCGTHPSKKKEVRLHVHHLESRKVGGDAPDNQVTLCESCHEKLHKGLIAEKDFKKRKRKSTRDATFMGIMRKTLMQRLCSELPIPVVKTRGYITKATREKLLVLPKSHTNDALAIAQGKQGFNVGYLPGIVQINKIYTIRPVRHHNRQLHKATILKGGIRKSNQTEKYVFGYRLFDKVQFNGQDCFIWGRRTTGIFTIKTINGKMIKDGISFKKLKLVEKSTSYLIA

SEQ ID NO: 18746 - protein, 356 aa, unidentified
  REGION 1..356: note = Human gut metagenome
LSKVKTMRVFVFNMRGRPLMPCSQRKARLLLRENKAKIYKYHPFTIQLTYTTGETKQDCHIGIDTGSKYIGAAVRSEDKVFWKGEIELRQDIRSNLDTKRIYRRSRRNRKTRYRKPRFLNRKRRDEWLPPSLQSRINHTFHWIDTLSSLVPNPILHIEVGKFDVAKMINPEIHGVDYQHGQTYGFFDERYFVFARDNYTCQCCGKSKNKILNTHHIIYRSNGGTNRVDNLITVCTDCHTSQNHRKGGIFYQWQEQHKKVKQYKEPPFMNTLRKRIFVAYPDAEITYGSETTPKRKAMKLDKTHYNDAIVISGINEIKENPEEWLLIKQFRKKKRSLHEATARKGRKKPNRNQTRNS

SEQ ID NO: 18747 - protein, 421 aa, unidentified
  REGION 1..421: note = Human gut metagenome
MRGRPLMPCSPAKARHLLKAGKAVVRRRTPFTIQLRIATGETKQSVTLGVDAGAKHVGLSAATEKEEVFASEVELRQDITGLLAARLSLRRERRQRKTRYRAPRFLNRVRSKHKGWLAPSVENRIQAHLSRIDAICGLLPVTKIVIETASFDIQKIKHPDVEGTDYQQGDQLGFWNVREYVLFRDGHVCQHCHGHAKDKILNVHHLESRQTGGDAPNNLITLCETCHKACHAGKIKLKVKRGQSFREEAFIGIMRWTLLDRVRKAHPGLPVENTYGYLTKNTRITLGLPKAHCVDAYCIAGNLKAVRRGVCLHQRQVRKHNRQIHKCTVLSKTLKDGTKIGYRKLNQTPHLVKNFRLFDKVRCLGQTGFIFGRRSSGYFDVRRLDGVKISSCISYRKLTLLEKRSTYLTELRKEDGASSPV

SEQ ID NO: 18748 - protein, 423 aa, unidentified
  REGION 1..423: note = Human gut metagenome
MRVFVFNMRGEPLMPCTQRKARLLLKTGKAKIYKYNPFAIQLKYVTGENKQECHVGIDTGSKYIGLAVTSENKVLFKGEVELRQDVKSKIDTKRIYRRSRRNRKTRYRRCRFLNRKRFGKWLPPSLQNRINHTFKWIDKLCSFIPESILHIEVGKFDIAKMINPEVHSVDYSQGQTYGYQGERYFIFARDNYTCQVCGERNKPLQTHHIIYISNGGTNRVDNQITVCKECHTSTNHKNGGIFYKWQKEHKKVKQYKAPPFMNVLRQQIFNQYPQALITYGFETTIKRKNIGLEKTHYNDAIVISGVSTISENLHEWLLIRQFRKKKRSLHEGVPRKGRKEPNRIQKRNSKNTPYYRGFYLNDKVSVFGKSGYITGFTNSGAYVKGVDGEYIVLPNKSYKRVNIASLKFICHNNNWQYITKNAV

SEQ ID NO: 18749 - protein, 433 aa, unidentified
  REGION 1..433: note = Human gut metagenome
LAKGNNSIKGGQNLRVFVKNLKGEALMPCSPCKARKLLKTKQAKIIDYKPFTIQLLIATGETVQECNVGIDTGSKHIGVAITLENKVLVKGEIELRQDVKSNLDTRRIYRRSRRNRKTRYRKARFDNRKRNKEWLPPSIQSKLDIEFRMIDKFIDLVPNPSLFIEVGKFDAAKMINSDIEGIEYQQGQTYGYYDTRYYVFARDNYTCQVCHKGGILQTHHIVYKSNGGTDRADNLITVCDKCHSYENHQKGGILYEWQEKHKKVKQYKEPPFMNIVRKRVFNKYPKAYITYGSITTPKRKEMGLDKTHYNDAIVISGIEQIIQDESEYFKFQQFRKKKRSLHEANARKGRKTPNTDAKRNSKNTKEAYGFYLNDKVSVNDKIGYIVGFCKDGCYVKNTNGDYIVLEGKTYKQISPKQINFISHNNNWRYEITT

SEQ ID NO: 18750 - protein, 413 aa, unidentified; identical to SEQ ID NO: 3220
  REGION 1..413: note = Human gut metagenome

SEQ ID NO: 18751 - protein, 419 aa, unidentified; identical to SEQ ID NO: 3670
  REGION 1..419: note = Human gut metagenome

SEQ ID NO: 18752 - protein, 423 aa, Moorena sp.; identical to SEQ ID NO: 5218

SEQ ID NO: 18753 - protein, 372 aa, Ferroplasma sp.; identical to SEQ ID NO: 4479

SEQ ID NO: 18754 - protein, 424 aa, Enterococcus sp.; identical to SEQ ID NO: 12083

SEQ ID NO: 18755 - protein, 424 aa, Anabaena sp.
MSNYALVLDTNKQPLSPCHPSVARKLLDSEKAAVFRRYPFTIILNKSCSDIVNQAIELKIDPGSKTTGIALIQGKKIIFGGELSHRGNAIKASLESRRSLRRGRRNRHTRYRQARFLNRTRTKNWLAPSLQHRVETTLTWVNKLIKFAPITSISQELVRFDLQQIDNPEISGIEYQQGTLSGYEVREYLLEKWQRKCAYCGIKNVPLQVEHIHPKARGGTNRISNLCLACEKCNIKKGTQDIKDFLAKKPDLLKCILAQAKRPLKDAAAVNSTRWALFSRLKETGLPLSTGSGGQTKFNRTRLNFPKTHWLDAACVGQIGELAVLTNKPLLIKATGHGTRQMCRTDKFGFPSRYVPRIKFVKGFQTGDIVKAIVTTGKKIGKYIGRVAVRATGSFNISASKLVQGISYKYCKIIHRKDGYDYAF

SEQ ID NO: 18756 - protein, 515 aa, unidentified; identical to SEQ ID NO: 5111
  REGION 1..515: note = Human gut metagenome

SEQ ID NO: 18757 - protein, 442 aa, unidentified; identical to SEQ ID NO: 2903
  REGION 1..442: note = Human gut metagenome

SEQ ID NO: 18758 - protein, 415 aa, unidentified; identical to SEQ ID NO: 3582
  REGION 1..415: note = Human gut metagenome

SEQ ID NO: 18759 - protein, 492 aa, unidentified; identical to SEQ ID NO: 4486
  REGION 1..492: note = Human gut metagenome

SEQ ID NO: 18760 - protein, 374 aa, Oscillatoria sp.; identical to SEQ ID NO: 17081
  SITE 291: note = misc_feature - Xaa can be any naturally occurring amino acid

SEQ ID NO: 18761 - protein, 417 aa, unidentified
  REGION 1..417: note = Human gut metagenome
MQYVYVLNKHGEPLMPCSPGKARLLLKQQKACVVKRTPFTIKLLHGSAGYKQPVTLGVDAGSKHVGLSASTETHELYCEEFTPRNDVVELLSTRRQNRRSRRNRKTRYRAPRFNNRVHSKHKGWLAPSVEVKIQEHITVIKRICRILPVTLVRVETAEFDTQRLKAMLAGKPLPVGTDYQLGEMYDEYNVRQYVLKRDNYTCQCCGAHTTAKKAVKLHVHHLESRKVGGNAPSNLITLCIACHNNLHKGKVTLDGKKRGKTLRDAAFMGIMRNTLLIRLRNELNIPVQNTYGYITKLLREQNDIKKSHINDARCISKHPLAVPCSVCYCTKAIRHHNRQIYKAKILKGGVRKANQATYIVKGFRLWDKVLYNGQECFISGRRSSGYFALKKLDGTTITNSISFKKIAAIRACNKLLN

SEQ ID NO: 18762 - protein, 421 aa, unidentified
  REGION 1..421: note = Human gut metagenome
MVYVLDITGQPLMPTDRHGKVKHLLKDGKAKVVKRCPFTIQLLYTTTTYTQEITLGVDAGSKVIGLSASTPRKELYSSEVTLRNDIVKLLSLRREYRRSRRNRTTRYRAARFNNRVHSKNKGWLAPSIENKINTHIKVVADIHKILPISKIVVETASFDIQKIKNPNISGEEYQQGEQLDFWNVRQYVLFRDNYTCQCCKGKSKDNRLAVHHIESRQTGGNAPNNLITLCITCHKKYHKGKIKLPNTIKRDKIFKDAVFMGIMRWAFYERLKNIYPNIRMTYGYITKNTRIQHNLSKTHYTDALCISGNPLAKPLEVLYIQKAIRTRNRQIHKATISKGGIRKLNQAPKYVFGFQLYDKVLYKGKECFIFGRRSSGSFDIRTLDGTKISPGVSHKKLKLLEKRKTILTERVIKNQEGGKRG

SEQ ID NO: 18763 - protein, 423 aa, Arthrospira sp.; identical to SEQ ID NO: 6821

SEQ ID NO: 18764 - protein, 384 aa, unidentified
  REGION 1..384: note = mine drainage metagenome
MSARTPDIRGLMDERSMYRNSRRHHRRENVLKKGWTAQHRPPRYESRGKRDPVTLKHGLETHINLYERLARLAPLPSYQVTRGFESASFDLRALAHGKPRTGSSYQVSPIGKGPGEKMHRFVFRRDGGCVICGSKTHLHNHHLRKRSKQGSDRASNQVTLCKDCHADVHAGLIALPITDGAQWRDASTVNAVCGKLRIQATEFGIVPIPVEQSVAARRRLGLEKTHALDAVSVAAAITGAGTVDQMDTLDMDMTQYRRHRRAHIHAQRDRLYYLPGEKKPVAHNRRKRCDQGDMDSLAEFRQAHPEDIGRLKVKKAVRLYTPNRAKAPAVGGDVWEIGGQRVVVRGVHSKTNLYMPDLKPVTGKVYAAPKDGVRLLWNTGMVVV

SEQ ID NO: 18765 - protein, 447 aa, unidentified; identical to SEQ ID NO: 17795
  REGION 1..447: note = Human gut metagenome

SEQ ID NO: 18766 - protein, 428 aa, unidentified; identical to SEQ ID NO: 5055
  REGION 1..428: note = Human gut metagenome

SEQ ID NO: 18767 - protein, 396 aa, unidentified
  REGION 1..396: note = Human gut metagenome
LLKQKKACVVKRTSFTIKLLYGSTGYKQPITLGVDAGSKHIGISATTEKHELYREEATPRNDVVDLLSARRAFRRSRRNRKTRYRAPRFNNRVHSKHEGWLAPSVEVKIREHITLIKRVCRILPVTLVRVETAEFDTQRLKAMLEGKPLPVGTDYQLGEMYDEYNVRQYVLKRDNYTCQCCGAHSTKTKDVKLHVHHIETRRTGGNAPNNLITLCTDCHKALHAGKVTLDGKKRGKPLKDAAFMGVMRKTLMERLHKKLKIPVQGTYGYITKYLREKNGIPKSHTNDARCISKNPLAIPCDTCYYTKAVRHHNRQLHKATILKGGIRKANQAPYIVKGYRLWDKVSCNGTECFITGRRTSGYFALKKLDGTVISNSISYKKLRLLEVATNYITERR

SEQ ID NO: 18768 - protein, 442 aa, unidentified; identical to SEQ ID NO: 2903
  REGION 1..442: note = Human gut metagenome

SEQ ID NO: 18769 - protein, 409 aa, unidentified
  REGION 1..409: note = Human gut metagenome
RRINGRRCRRQRRAKANGTISKKCVKQTTAQNGSVSKRAKDIGVIKRRLPGCEKDVLCIGIKNKETKFTNRTRPEGWLTPTANQLLQTHINLVKKIQKFLPISDVVLEVNKFAFMRLDNPNIQKWQYQQGPLYKKESLESAVSEIQEHHCLFCKKPIDHYHHVVPQHKNGSNTIGNIVGLCAKHHDLVHKDSAWEKKLAQKGTGLYKKYGALGVLNQIIPTLTNELSSLFPKHSFVTNGKSTYDYRAAHGVSKDHWLDAYCIACSVLPSNVCDSNINNHMPYELKQFRRHDRRVLNNENMNRVYTLNNKAVAINRHKAKDQKTVSLEEFRKEHPDDVCKLKVKEHHPTYRNMNRNFPGSVFLVGKQIHVMQGIASSKDGKATKYNDTSATAIAAGKCKFVAKNTGILFV

SEQ ID NO: 18770 - protein, 414 aa, unidentified; identical to SEQ ID NO: 7136
  REGION 1..414: note = Human gut metagenome

SEQ ID NO: 18771 - protein, 420 aa, unidentified
  REGION 1..420: note = Human gut metagenome
MQYVYVLSKHGEPMMPCSPGKARLLLKQQKACVVRRTPFTIKLLYGSAGYKQPITLGVDAGSKHVGLSASTEKRELYREEFTPRNDVVELLSTRRQNRRSRRNRKTRYRAPRFDNRVHSKHKGWLAPSVEVKIQEHITIIKRICKILPISLVRVETAEFDTQRLKAMLAGKPLPVGTDYQLGEMYDEYNVRQYVLKRDNYTCQCCGAHTTAKKLVKLHVHHLESRKTGGNAPSNLVTLCTTCHKNLHKGKVTLDGKERGKPLRDAAFMGIMRKTLMARLKEELPIPVQGTYGYITKMRREQNDIKKGHTNDARCISKHPLAEPCSVCYRTKAIRHHNRQTHKANFSKGGIRKRSQMPYVVEGYRLWDKVLYKGQECFVSGRRASGSFTLKKLDGARISKGVTFKKLRLLEPATNYLIERM

SEQ ID NO: 18772 - protein, 415 aa, Moorena sp.
RKVAEMPTFKKYAFVLDAEGKRLDPTIEQNAWRLVRQHKARLVSKFPMVIQLNKVVDNPNNDEIRCGIDDGANHVGLALAQKCQTRNKVLFKGTIEQRKDVKHLLTVRRGYRRYHRYHKQYRPARFLNRASSRRSGRLMPSIIQRKQAILRVIDRLCQWINIDGYWLEDVKIDIRALTDGYKPYRWQYQKTNRLDNNLRLAAIHRDGCKCVECGKTKTRFEVHHITPREVGGADTISNLITLCPKCHAKTFGRESQFADRYYALIGSTGHVEGLADAQRVMQGKHWFREQLKQRGSLVLTTGGNTANKREDWDIAKTHSNDAVCITDLKPENIDIEEWTIKPMRRKNKAGVDEVCGFHHRDYVTYTYRNGETHTGYVTAMYPELHALNFQSPTKHCKKANALKCKLVWRYSKIYW

SEQ ID NO: 18773 - protein, 431 aa, unidentified
  REGION 1..431: note = metagenome
MPNKVYVINKHGRPLMPCSPAKARHLLDAGKAKVKKRTPFTIQLVYGSSGYIQEVILGVDAGSKTIGMSASTTKEELLSAEVKPRNDVVDLLSTRREFRRARRNRKTRYRKPRFDNRVRSKHKGWLAPSVEVKIQEHITSIKRACRILPVSKVVVETAEFDLQLLKAIADGKPVPQGEDYQKGEMYGHYNVRQYVLWRDNYTCQCCGAHATKKKEVRLHVHHLESRKTGGDAPGNLVTLCDSCHEKLHKGLIAEKDFKKRKRRSTRDATFMGIMRKTLMQRLCSELPIPVVETRGYITKATREKLLVLPKSHTNDALAIAQGKQGFNVGYLPGIIQTDKIYTIRPVRHHNRQLHKAAILKGGIRKSNQAGKYVFGYRLFDKVQFNGQDCFIWKRRTSGYFAVKTIDGKVIHNSASFKKLNLVERASNYLIA

SEQ ID NO: 18774 - protein, 425 aa, unidentified
  REGION 1..425: note = Human gut metagenome
MVYVLNKNGQSLMPTNRHGKVKHLLKDGKAKVVKRCPFTIKLTYETTNYTQDLTLGVDTGSGTIGTAVSKDSGDIIYMSEIVVRNDITDKMSQRAKYRRNRRNRKTRYRQARWLNRRNSIRKDRFSPTMQSKLHSHVKEIEYIKSILPITTMVFETGQFDMHLMKNPMLANPKVKHWGYQKGTNYGFENTKAMVLNRDNYTCQYYKGKHKDSKLEVHHIIFRSQGGSDEDSNLITLCHTCHKNLHDGKIAPNFKGKAKGTLKYATQMNSIRKQLFRLYPEVIETFGYVTKANRLAIGIEKEHYYDACTIATQGKPFIVKTNFYKKKCVSDGDFQKTKGIRSEQPIVTDKIYGFRKFDKVKYFGKEYFIKGRMSTGYAILMDIEGNKVDFLTMPKGFKTPKMINLKRLEARSSWMVTTVEVTPNIV

SEQ ID NO: 18775 - protein, 418 aa, unidentified
  REGION 1..418: note = Human oral metagenome
MLVYVLKQNGQPFMPTERFGKVRRLLKEGKARVVRREPFIIKLLYEPETNVVQECYCGVDTGSRHIGVAVVGNDKVLYQSQTELRNDIKKKMDHRRAFRQNRRFRKTRYRKPRFLNRRNSIKKDRLPPSVRHKVQSHIDEIEFCKKILPISDLILEVSQFDTALMKNPSLMNEKVKHWGYQKGFNYGYSSRRGAILHRDNYTCQCCGKKNCRLEVHHIRFKSDGGTDDEENLITLCEDCHNGVHAGTVVLNKSPKKSKGLKHATHMSIIRSWLLKKYQDAIETFGFVTAENRNHLKLEKDHYIDACVIASGGLDFKELDVIYKKRRVSVQDRILTGGIRGEKRLPTEKLFGFKKFDKVKYLGETYFIKGRRNSGFFVLMDIDNNSIDFRDRGGKQNPSYKSIKRINMRRSVLCIRERL

SEQ ID NO: 18776 - protein, 472 aa, unidentified; identical to SEQ ID NO: 4432
  REGION 1..472: note = Human gut metagenome

SEQ ID NO: 18777 - protein, 418 aa, unidentified; identical to SEQ ID NO: 11413
  REGION 1..418: note = Human gut metagenome

SEQ ID NO: 18778 - protein, 482 aa, unidentified
  REGION 1..482: note = Human gut metagenome
LVWNVQAPWDVYPSPTLCGLCLKVLRGRNGDADKKPIPTLTKDENRPSGRTTGLRAEQAEPAGIRKGDTLKVFVLNMRGKPLMPCSPAKARHMLKAGKAFVVRRTPFTIKLTIATGETKQDVTLGVDAGARHVGISATTEKEEVFASEVALRQDITGLLADRLAFRRARRNRKTRYRAPRFNNRVRSKHKGWLAPSVENRIQAHMSRIDAVCRLLPVTKIVIETASFDVQKIKNPTIEGTDYQQGDQLGFWNVREYVLFRDGHVCQHCHGRSRDKILNVHHLESRKTGGDAPNNLITLCETCHKAYHAGKIKLKVKRGQSFRAEAFMGIMRWTLLDRVRKTHPKLPVENTYGYLTKHKRIALGLPKTHCADAFCIAGNLKALRRGDFLFQQQTRKHNRQIHRCSILKGGVRKLNQAPFLVKGFRLFDKVRIGGQIGFVFGRRVRGTFNIRRLDKTVIGTDINCKKLSLLETRKTFLTELRKE

SEQ ID NO: 18779 - protein, 416 aa, unidentified
  REGION 1..416: note = Human gut metagenome
MTNCENYAFVLDAEGKQLSPTKEKKAWYLIRKKRAILVSKYPMVIQLNKIVSNDNICKDEIRCGIDDGGLHVGIALVQKCQTKNKTLFKGTIEQRNDVKHLMKVRWDYRRYRRYHKRYRPKRINNRSSSKRTDRIAPSILQKRQATLRVITQLNKWINITSYWLEDVAIDVRVLTDGFSSYGWQYQKSNRLDENIRKAVILRDGCRCMECGQSNCRLEVHHIKPRRLNGSNTLGNLITLCESCHQKTEGKEEQYMQHYFNILESSDNKNLNYASYVMIGKTWLRKQLSQLGVLNLTTGGNTANKRIDWNIEKSHSNDAVCITDLQPDSCNVKDWIIKPMRRQSKAKTDNVLGIKHRDLVSYVYKNGELHIGYVTALYPELNALNFQSPTKHCKKVNVRKCRVLWKYNKIYWLDSVS

SEQ ID NO: 18780 - protein, 480 aa, Planomonospora sp.; identical to SEQ ID NO: 9790

SEQ ID NO: 18781 - protein, 431 aa, unidentified; identical to SEQ ID NO: 4306
  REGION 1..431: note = Human gut metagenome

SEQ ID NO: 18782 - protein, 515 aa, unidentified; identical to SEQ ID NO: 15013
  REGION 1..515: note = Human gut metagenome

SEQ ID NO: 18783 - protein, 388 aa, Moorena sp.
MFSVFVLDANRKPLTPCKPGVARSLLKAGKASVFRRYPFTLILKKEVDANPEPIEIKLDPGSQVTGIALKQGDRIIFGAELQHRSQQIKDALLSRRQLRRSRRNRKTRYRQARFLNRTRPNGWLAPSLQHRIDTTMTWVNRFRRLAPIAHISQELVRFDLQLMQNPEISGIEYQQGELPGYEVREYLLEKWNRKCAYCGAKNVALEVEHIHPKSKGGTDRVSNLTLACHSCNQSKGNQDIRDFLSGKPDLLSRILRQAKSPLKDAAAVNSTRWALLTALKQTGLPVATGTGGQTKFNRTRWELPKAHWLDAACVGKIESLEILTSKPLLIAAKGHGTRQMCGTDKYGFPTRHRSRVQIHKGFQTGDIVTATVMTGKKIGSYVGLAEKK

SEQ ID NO: 18784 - protein, 393 aa, Moorena sp.; identical to SEQ ID NO: 5287

SEQ ID NO: 18785 - protein, 414 aa, unidentified; identical to SEQ ID NO: 4779
  REGION 1..414: note = Human gut metagenome

SEQ ID NO: 18786 - protein, 415 aa, Bacillus sp.; identical to SEQ ID NO: 2431

SEQ ID NO: 18787 - protein, 408 aa, unidentified; identical to SEQ ID NO: 8232
  REGION 1..408: note = Human gut metagenome

SEQ ID NO: 18788 - protein, 406 aa, unidentified; identical to SEQ ID NO: 6445
  REGION 1..406: note = Human gut metagenome

SEQ ID NO: 18789 - protein, 406 aa, unidentified; identical to SEQ ID NO: 10802
  REGION 1..406: note = Human gut metagenome

SEQ ID NO: 18790 - protein, 406 aa, unidentified; identical to SEQ ID NO: 6028
  REGION 1..406: note = Human gut metagenome

SEQ ID NO: 18791 - protein, 470 aa, unidentified; identical to SEQ ID NO: 5326
  REGION 1..470: note = Human gut metagenome

SEQ ID NO: 18792 - protein, 408 aa, unidentified; identical to SEQ ID NO: 5302
  REGION 1..408: note = Human gut metagenome

SEQ ID NO: 18793 - protein, 452 aa, Lactobacillus sp.; identical to SEQ ID NO: 3322

SEQ ID NO: 18794 - protein, 416 aa, unidentified
  REGION 1..416: note = Human gut metagenome
MVYVLSQNGQPLMPTGNHAKVRVLLNQRKAKVIKRCPFTIQLQYESTTHTQKINLGIDAGSKTIGVSATTESKVLYESEVVLRNDIVELLSGRRALRRSRRNRKTRYRKPRLDNRRRPDGWLAPSIRQKIKTHVTVVENVMKILPVTKIIVETASFDIQKIKNPKIEGAEYQYGEQLDFWNVREYVLFRDGHTCQCCKGKSKDNILNVHHIESRKTGGNAPNNLITLCETCHKAYHKGVITLPKEIHRGMRFRDAAFMGIMRWAFYDRLKELYTPFGVEVINTYGYITKNTRIEYGLPKEHYVDARCISGNPAAKPLDHYYFQKKVRCHNRQIHKNTILKGGYRKRNQVEYEVKGFRLYDQVLWKGQKCFIFGRRSTGRMDLRLLDGTHVNASVGYKNLKLLSMRKNYLIEQRKAG

SEQ ID NO: 18795 - protein, 457 aa, unidentified
  REGION 1..457: note = Human gut metagenome
VWLYQAVYNLGEGFLPSSEERTAFYWLLICRKEHGIMQYVYVLNKHGEPLMPCSPGKARLLLKQQKACVVKRTPFTIKLLYGSAGYKQPITLGVDAGSKHVGLSASTEKRELYREEFTPRNDVVDLLSTRRQNRRSRRNRKTRYRAPRFDNRVHSKHKGWLAPSVEVKIQEHITVIKRICRILPITLVRVETAEFDTQRLKAMLKGKPLPVGTDYQLGEMYDEYNVRQYVLKRDNYTCQCCGAHPTEKKPVRLHVHHLESRHVGGNAPNNLITLCVACHKALHEGKITLDKGKKRGKPLRDAAFMGIMRNTLLARLKDELNIPVKQTYGYITKLLREKNKIPKSHVNDARCIAKAPNAKPCDTMLYTRALRHHNRQIHKAKILNGGIRKKNQAPYLVKGFRLWDKVRYNGEECFITGRRSSGYFALKKYDGTVISNSASYKKLMLLEAATNYITERS

SEQ ID NO: 18796 - protein, 465 aa, unidentified
  REGION 1..465: note = Human gut metagenome
MSTCVCVLSNNGERLMPTIRLGKVRHLLKDGKAKIIKHHPFIIQLLYDSETNIQPIEICEDVGYNYIGISVKSQSHEYVSAQYDTLQDEKSCHDACRRMRRTRRNRLRYRQKRFDNRKRDKGWLAPSLKHKKELNVNVIKMYCEVVPITHATVEVGSFDTMLVKAIEEGKATPEGADYQKGPRYNLATLREAVFYRDNYTCQVCGREASEGAILHVHHMFYWKGRHDNSLSELITVCEKCHTPANHQKGGKLYGFGEDIKFANLSGAAFMNTVRWQIVNELYAAFGKPFVTFTYGAMTKEKRIALHLEKSHNNDAYAMGEFHPNCRCTFEHYEKVRRNNRILEKFYDSRYIDIRTGEIATGKELFNGRINRSHKKDSENLHKYRGKRIRKGYRALRRKKVALNPGDLVSLNGEILTVHGTHTKKNGSVNVEFKTPSKSGKKSTSLKKLKIIKTISPMRSAWDKVS

SEQ ID NO: 18797 - protein, 413 aa, unidentified; identical to SEQ ID NO: 11236
  REGION 1..413: note = metagenome

SEQ ID NO: 18798 - protein, 312 aa, Desulfurobacterium sp.
VKLRQDVSRKVKERAMYRRNRRSRLRYRPARFLNRRRTKDWLPPSIRYRKEVVLRVLNDLKKFLNITKVIIEQVKFDISSIVAGRKLTGTEYQQKRYEGKSFREKVLKRDSYTCQICESRENLEAHHIIPRSRGGTNCIENGITLCKECHRAVHEGKIRITANVLSLKAPSVVQQGKLWLYRKLKGQFGKVEITFGYLTKKKREELGLPKDHYADACAMLNCNRIVSPVYLVIPRRRRPEINHPTKKHDEYRGFRHFDLVVAYHRTKGKLIGCVRSLKKSGLAIRTKFSDNFVVGYTKSKLLWRPGGLVYVL

SEQ ID NO: 18799 - protein, 442 aa, unidentified
  REGION 1..442: note = Human gut metagenome
MVTVQQSTHHLPFGRVFIRRNLFMVYVISQDGKPLMPCSDPIARLLLKQGKAKVKKRDPFTIKLTYETTNYTQGLTLGVDTGSGTIGTAVSKDNGDIVYMSEVVVRNDITDKMTQRAKYRRNRRNRKTRYRKARWLNRASSIKKDRFSPTMQSKLHSHVREIEYIQSILPVTEMVFETGQFDMQLMKNPSLANPKVRPWGYQKGANYGFENTKAMVLNRDNYTCQCCKGKHKDSKLEVHHIVFRSQGGSDEESNLLTLCHTCHKDLHSGKINPKLSGKVKGNLKYATQMNSIRKQLFRFYPNAIETFGYVTKANRLHLGVDKEHYYDACTIATQGNAFNVKSNLYKKKCVSDGDFQKTKGIRSEQPIVTDKICGFRKFDKVRYFGNDYFIKGRMSTGYAILMDIDGNKIDFSTMPRGYKTPKLSNCKRITARSTVMTQVKVV

SEQ ID NO: 18800 - protein, 450 aa, unidentified
  REGION 1..450: note = Human gut metagenome
MSTVYVLNKDGKPLMPTTRGGHVRHLLKEQKARVVRTKPFTIQLLYETNDVVQPLYLGIDPGRTNIGVAVVKTDGTAVFTAHLETRNKEIPKLMKKRKDSRRARRTNGRRCRRQRRAKANGTISKKCVKQTTAQNGSVSKRAKKIGVIKRHLPGCEKKVLCIGIKNKEAKFSNRTRPEGWLTPTANQLLQTHINLVKKIQKFLPISDVVLEINKFAFMRLDNPNVQKWQYQQGPLYQKASLEEAVSEMQEHHCLFCKNTIDHYHHVVPQHKNGSNTIGDIVGLCAKHHDLVHKDTTWQKKLAKKKTGLNKKYGALSVLNQIIPALSKELSSLFPKHFFATNGKSTYDYRAAHGVSKDHWLDAYCIACSVLPNDVCDSDINNRVPYELKQFRRHDRRALHKENMSRVYTLNGKSVATNRHKATEQTTDSLEEFRQCQPDDVCKLKVKESCK

SEQ ID NO: 18801 - protein, 431 aa, Methylocaldum sp.; identical to SEQ ID NO: 10979

SEQ ID NO: 18802 - protein, 337 aa, Oscillatoria sp.
  REGION 28..29: note = misc_feature - Xaa can be any naturally occurring amino acid
  SITE 32: note = misc_feature - Xaa can be any naturally occurring amino acid
  SITE 46: note = misc_feature - Xaa can be any naturally occurring amino acid
  REGION 48..49: note = misc_feature - Xaa can be any naturally occurring amino acid
MSNHVFVLDTNRKPLTPCQPGVARSLLXXGKXSVFRRYPFTIILNXEXXANPEPLELKLDPGSKVSGMALKQGNQIIFAAELQHRGEPIKKALLSRRQLRRSRRNRKTRYRPARFLNRTRPEGWLAPSLQHRVDTLMTWVHRFRRLAPVGRITQELVRFDLQLMENPEISGVEYQQGELQGYEIREYLLFKWGRTCAYCGAKNVPLEVEHIQPRSKGGSDRVSNLTLACHSCNQAKGNGDIRDFLSGQPDLLGRILKQAKSPIKDAAAVNSTRWALFKALKATGLRVTTGTGGQTKFNRLRLNLPKAHWLDAACVGPVESLEVMTSKPLLIRAKGHG

SEQ ID NO: 18803 - protein, 424 aa, unidentified; identical to SEQ ID NO: 3434
  REGION 1..424: note = Human gut metagenome

SEQ ID NO: 18804 - protein, 460 aa, unidentified
  REGION 1..460: note = Human gut metagenome
GVSCMNTCVCVLSNSGERLMPTFRLGKVRRLLKDGKAKIVKHHPFSIQLLYDSKTNTQPIETCEDVGYNYIGISVKSESHEYVSAQYDTLQDEKEHHDDCRKYRRTRRNRLRYRKSRFDNRKRDKGWLAPSLEHKKQLNISLIERYVSVIPITHVTVEVGSFDTMLVKAIQEGKVIPEGADYQKGPRYNLATLREAVFYRDNYVCKVCGRKATEGAILHMHHMFYWKGRHGYQLDELVTVCEKCHTPANHQKGGKLYGFGKDKKFANLSGAAFMNAVRWQIVNALYATYGKEFVTITYGAMTKEKRIALQLEKTHNNDAYAMGDYHPARRCKFRHYQKRRRNNRVLEKFYDATYVDTRTGNKAKGKELFNGRISRNHKKDCENLHKYRSKKVSKGRRSIRRQHYAIQPYDTVRLEGKTYITSGCHNKGTRLLIPVNGKSKSVAISKVQVVCHAGAWIQII

SEQ ID NO: 18805 - protein, 413 aa, unidentified; identical to SEQ ID NO: 3924
  REGION 1..413: note = Human gut metagenome

SEQ ID NO: 18806 - protein, 416 aa, unidentified
  REGION 1..416: note = Human gut metagenome
MVYVLSQHGQPLMPTENHAKVRALLKHGKAKVIQRCPFTIQLLYESTTHTQKINLGIDAGSKTIGVSATTDSKVLYESEVVLRNDIVELLSGRRALRNSRRSRKTRYRKPRFDNRKKPDGWLAPSIRQKIETHVTVVGNVMKILPVTKIIVETASFDIQKIKNPEIEGEGYQHGEQLDFWNVREYVLFRDGHTCQCCKGKSKDNILNVHHIESRKTGGNAPNNLITLCETCHKAYHKGIITLPKEIHRGMRFRDAAFMGIMRWAFYDRLKELYNPLDAEVINTYGYITKNTRIEHGLPKEHYVDARCISDNPAAKPLDHYYFQKKVRCHNRQIHKNTILKGGIRKRNQASYEVKGFRLYDQVLWKGQKCFIFGRRSTGRMDLRLLDGTHINASVGHKNLKLLSMRKNYLIEQRKAG

SEQ ID NO: 18807 - protein, 419 aa, Geobacillus sp.; identical to SEQ ID NO: 3993

SEQ ID NO: 18808 - protein, 472 aa, unidentified
  REGION 1..472: note = Human gut metagenome
FRQVPFTIQLTYKNQPVLQPVTIAEDPGRSNIGMAVVSLSGELLSAAVVQTRNKEIVKLMEKRKQHRRASRNGERKARQRLAKKCHTMIKTGFLMRKLPMYGKDKRVRCNVIKNTEAKFCNRKREDGWLTPSAEHLVRTHINLIHKMQKFLPISDVAIEINRFAFLSLEDPSISGVDFQNGPLKGYDDLNAAVEDLQDGHCLMCNSPIEHRHHIVPRSMQGSNTIGNIAGLCCKCHERVHKDSAFEDSLKKKKAGLNKRYAAVSALNQAIPFICKRLEQEFGKEHVHYCSGRDSSMVRRSLGYHKTKEEQLHEVDAWCIAVLSLQHVPEKAPEFDHVHEILQFRRQDRSRIKAQTSRAYYHERKKIAKNRKKAEGQREDSLQEWRKRQVERYGEEQTRKMISQLKVKKSIRRYNRLDRLMPGAVFYYQGVRYVMRGQHCEGTYLQAVGMGSKDFPAKKCKIVAQNEGLVFVS

SEQ ID NO: 18809 - protein, 422 aa, unidentified
  REGION 1..422: note = Human oral metagenome
MLVYILKQNGQPFMPTERFGKVRRLLKEKKAKVVRREPFTIKLLYEPETDVVQECYCGVDTGSKHIGVAVVGNDRVLYQSQTELRTDIKKKMDRRRAFRRNRRIRKTRYRKSRFLNRRNSIKKDRLPPSVKHKVQAHIDEIEFCKKILPVSDLILEVSQFDTALMENPGLINEKVRRWGYQKGFNYGYSSRREAILHRDNYTCQCCGKKNCRLEVHHIKFRRDGGTDNEENLITLCKECHDGVHVGTVVLNKKPKKSKNLKYATHMSIIRSWLLREYPDAIETFGFVTAENRNHLNLPKDHYIDACVIASGGLEFKGLDVIHKKRRVSVQDRVLTDGIRDEKKLPTGKVHGFKRYDKVKYLDEICFVKGRRTSGGFVLMDIDNNSIDFRDKGGTLNPSYKYLKRINTRKSVLCIHRRIEREE

SEQ ID NO: 18810 - protein, 480 aa, unidentified; identical to SEQ ID NO: 12495
  REGION 1..480: note = metagenome

SEQ ID NO: 18811 - protein, 431 aa, unidentified
  REGION 1..431: note = Human gut metagenome
MPNKVYIINKHGRPLMPCSPAKARHLLDEGKAKVKKRTPFTIQLVYGSSGYTQEVILGVDAGSKTIGMSASTTKEELLSAEVKPRNDVVDLLSTRREFRRARRNRKTRYRKPRFDNRVRSKHKGWLAPSVEVKIQEHITSIKRVCRILPVSKVVIETAEFDLQLLKAIEEGKPVPQGEDYQQGEMYGHYNVRQYVLWRDGYTCQCCGAHATKKKEVRLHVHHLESRKVGGDAPDNQVTLCESCHEKLHKGLIAEKDFKKRKRRSTRDATFMGIMRKTLMQRLCSELPIPVIETRGYITKATREKLLVLPKSHTNDALAIAQGKQGFNVGYLPEIAQIDKIYTIRPVRHHNRQLYKATILKGGIRKSNQTEKYVFGYRLFDKVQFNGQDCFIWGRRTTGIFTIKTINGKMIKDGISFKKLKLAEKSTSYLIA

SEQ ID NO: 18812 - protein, 406 aa, unidentified
  REGION 1..406: note = Human gut metagenome
MVYVQDIDGRPLMPTTRHGKVRRLLKLKKATVVNLCPFTIRLLYDTTGYKQEITLGVDTGTKHVGLSATTKSKELYASEVILRSDVVDLLSTRRELRKIRRYRLRYRKPRFMNRIKSKKRGWIVPSIRQKIDSHIRIIGFVYSILPVSKLIIEVAQFDTQKIKNPEISGKEYQEGEQLGFWNVREYVLARDEHKCQHCKGKSKDPVLNVHHIESRKTGGDSPSNLITLCKTCHKEFHKGNIKLKVNRGESLRDAAVMSIMKWELYDELKSLYPNVKMTFGYITKYNRINHGIEKSHVSDAFVISRNFDSERLGYYYKRKLVRRHNRQIHKMKAPKGGNKRMNQSPFKVFGFRLFDKVMFQGKERFIYARRLRGIFNIRDINGENKKDISYKKLEYVSHGLIPIVAG

SEQ ID NO: 18813 - protein, 420 aa, unidentified
  REGION 1..420: note = Human gut metagenome
MQYVYVLNKHGEPLMPCSPRKARLLLKQKKACVVKRTSFTIKLLYGSTGYKQPITLGVDAGSKHIGISATTEKHELYREEATPRNDVVDLLSARRAFRRSRRNRKTRYRAPRFNNRVHSKHKGWLAPSVEVKIQEHITLIKRVCRILPVTLVRVETAEFDTQRLKAMLEGKPLPVGTDYQLGEMYDEYNVRQYVLKRDNYTCQCCGAHSTKTKDVKLHVHHIETRRTGGNAPNNLITLCTACHKALHAGKVTLDGKKRGKPLKDAAFMGVMRKTLMERLLKELKIPVQGTYGYITKYLREKNGIPKSHTNDARCISKNPLAIPCDTCYYTKAVRHHNRQLHKATILKGGIRKANQAPYIVKGYRLWDKVSCNGTECFITGRRTSGYFALKKLDGTVISNSISYKKLRLLEVATNYITERR

SEQ ID NO: 18814 - protein, 424 aa, unidentified; identical to SEQ ID NO: 11884
  REGION 1..424: note = Human gut metagenome

SEQ ID NO: 18815 - protein, 424 aa, unidentified; identical to SEQ ID NO: 3351
  REGION 1..424: note = Human gut metagenome

SEQ ID NO: 18816 - protein, 512 aa, unidentified
  REGION 1..512: note = Human gut metagenome
MSTVYVLNKNGKPLMPTTRCGHVRRLLKEQKARAVASKPFTIQLLYKTNDVVQPLYLGIDPGRTNIGVAVVKADGTAVFTAHLETRDKEIPKLMKKRKDSRRARRTNGRRCRRQRRAKANGTISKKCVKHDTAQNGSVSKRAKEIGVIKRHLPGCEKDVLCIGIKNKEAKFSNRVKPEGWLTPTANQLLQTHINLVKKIQKFLPISDVVLEVNKFAFMQLDNPNIQKWQYQQGPLYQKASLEEAVSEMQEHHCLFCKKPIDHYHHVVPQHKNGSNTIGNIVGLCAKHHDLVHKDTTWQKKLAKKKTGLNKKYGALSVLNQIIPTLTKELSSLFLKHFFVTNGKSTYDYRAAHGVSKDHWLDAYCIACSVLPNDTCDKTINSRVPYEFKQFRRHDRRALNNENMSRVYTFNGKMVATNRHKATEQTTDSLEEFRQRQPNDVCKLKVKEHHPTYRNMNRNYPGSVFLIGKQVHVMQGIAGSKDGEATTYKDTNANSIAAGKCKFVAKNSGILFV

SEQ ID NO: 18817 - protein, 427 aa, Moorena sp.
MSKVFVLDTNFIPLNPIHSAQARQLLRNKKAAIFRQFPFTIILKKSRPDSPVSSLKLKIDPGARFTGMVLVNDSTGEVVFAAELKHRGFAIRDALTSRRQLRRSRRARKTRYRQPRFLNRTRPEGWLAPSLQSRVENIKTWVEKLRKLAPIQAISQELVRFDMQLMANPDIQGKEYQQGTLAGYETREYLLEKWGRQCAYCGVKDVAFQIEHIHPRAKGGSNSITNLTLSCEKCNTKKGTKDIKDFLKKDPLKLEKILKQAKRPLADAAAVNTTRTALLEVLKATGLPVETGSGGLTKFNRSQQQLEKTHWIDAACVGKSTPILNIKGVKPLLITANGHGSRQSCRTDKYGFPSRHVPREKIHFGFQTGDIAKAVVTAGKKIGTYVGKVAIRSTGSFNISTKNGLIQGISHKFCKRIHAKDGYSYAV

SEQ ID NO: 18818 - protein, 416 aa, unidentified
  REGION 1..416: note = Human gut metagenome
MVYVLDKNGQPLMPTDRHRKVRLMLQSGQAKVIKRCPFTIQLNYDSGHQTQEISLGIDAGSKHIGVSTTTKIKVLYEVDVELRNDIVDLLSSRRELRRGRRNRKTRYRQAKFNNRRRGNGWLAPSIRQKIGTHLTVVENICKILPISRIMVETASFDIQKIKNPDIQGAEYQQGDQLEFWNVREYVLFRDGHICQCCKGKSKDKILNVHHIESRKTGGNAPNNLITLCETCHTGYHKGTVQLPKAIKRGMRFKDAAFMGIMRWAFYEALKQQYEPVGTPVHNTYGYITKHTRIAYNLPKEHYVDARCISGNPEASSNGEYYYQKKVRCHNRQIHKLTVLKGGIRKQNQATYLVKGYRLFDKVSYQGKGYFVFGRRQSGFFDIRTLSGEKVNKGSLSCKKLKFIATRTYYLTERRAV

SEQ ID NO: 18819 - protein, 420 aa, unidentified; identical to SEQ ID NO: 11059
  REGION 1..420: note = Human gut metagenome

SEQ ID NO: 18820 - protein, 494 aa, unidentified; identical to SEQ ID NO: 6841
  REGION 1..494: note = Human gut metagenome

SEQ ID NO: 18821 - protein, 353 aa, unidentified; identical to SEQ ID NO: 3451
  REGION 1..353: note = seawater metagenome

SEQ ID NO: 18822 - protein, 420 aa, unidentified
  REGION 1..420: note = Human gut metagenome
MQYVYVLNKHGEPLMPCSSGKARLLLKQQKACVVKRTPFTIKLLFGSTGYKQPITLGVDAGSKHVGLSASTEKRELYCEEFTPRNDVVDLLSIRKQNRRSRRNRKTRYRAPRFDNRVHSKRKGWLAPSVEVKIQEHITVIKRIRRILPITLVRVETAEFDTQRLKAMLEGKPLPVGTDYQLGEMYDEYNVRQYVLKRDHYTCQCCGAHTTTKKTVKLHVHHLESRKVGGNAPSNLITLCTTCHDALHKGKVSLDGKERGKPLRDAAFMGIMRKTLMARLRDELSIPVQGTYGYITKMRREQNDIKKSHVNDARCISKHPLAEPCSVCYRTKAIRHHNRQTHKANFSKGSIRKRSQMPYVVEGYRLWDKVLYKGQECFVSGRRASGSFALRKLDGTVVTNSISFKKLQLLEPATNYLIERM

SEQ ID NO: 18823 - protein, 537 aa, unidentified; identical to SEQ ID NO: 13531
  REGION 1..537: note = Human gut metagenome

SEQ ID NO: 18824 - protein, 449 aa, Moorena sp.
VERNETQRRMDRWNETQHYIFQLDSNKQPLDMIPSAKARKLQSQGKAATFRIYPYTIIRNVSFGDNPNTKSYILKIDPGATWTGFAIQCGEEIVFRMELKHRGELIKKSLEQRADFRKGRRSRNLRYRKKRFNRRKPEGWLAPSLRHRLQTVETWIKKFLKFCPITCIEIEQVRFDLQKLENPEISGVQYQQGELQGYEIREYLLEKWGRQCVYCEKQDTSLQIEHIKPKSKGGSNRIGNLTLSCPECNQNKKDQDVKDFLSGKPDLLKRVLAKAPKPLASASAVNSTRYAIVEMAKNLCDHVKCWTGGRTKYNRVNQGLTKSHSIDAACVGESGAKIKVKVNQPLIVESKGHGTKQARRANHKGFPALNKNKQPIKPKTKYTHCFAGDMIKFRLDKDRKTVKAGIYKGRVKTPTPKGFEVKINDCRVSQKMNYLIRFMHRNDGYAYSF

SEQ ID NO: 18825 - protein, 512 aa, unidentified; identical to SEQ ID NO: 16283
  REGION 1..512: note = Human gut metagenome

SEQ ID NO: 18826 - protein, 434 aa, Anoxybacillus sp.; identical to SEQ ID NO: 3421

SEQ ID NO: 18827 - protein, 512 aa, unidentified; identical to SEQ ID NO: 12631
  REGION 1..512: note = Human gut metagenome

SEQ ID NO: 18828 - protein, 464 aa, unidentified; identical to SEQ ID NO: 4559
  REGION 1..464: note = Human gut metagenome

SEQ ID NO: 18829 - protein, 406 aa, unidentified; identical to SEQ ID NO: 4082
  REGION 1..406: note = Human gut metagenome

SEQ ID NO: 18830 - protein, 450 aa, unidentified; identical to SEQ ID NO: 6127
  REGION 1..450: note = Human gut metagenome

SEQ ID NO: 18831 - protein, 266 aa, unidentified
  REGION 1..266: note = metagenome
KAVAEGKPVPQGEDYQKGEMYGHYNVRQYVLWRDSYTCRICGVNGSVRKGVPLHVHHLESRRVGGDAPDNLVTLCTACHDKLHKGIIMAADIKKRKRRSTRDATFMGIMRMTLLRRLREQLPVPVVETRGYITKATRENLLVLPKSHTNDALAIAHGPQGFRAEYLPNIRQADQLYTIRPVRHHNRQLHKATILKGGVRTANQAEKYICGFRLYDKVLYNGIECFVWGRRTSGSFLLRQLNGEKVKDGVSYKHLKLLERSQSYLVA

SEQ ID NO: 18832 - protein, 557 aa, unidentified
  REGION 1..557: note = Human gut metagenome
MIYNLGSTRERGFMKQKKQKVMVYILNKKGKPLMPTTRCGHVRKLLDSKKAVVVNSNPFTIRLKYDTPNGVQDVFAGIDSGRENIGSGASNEDGDCLYLGELKTSNKSIKIKMTERTGFRRERRKHDRQNKQRKARKDHTEIQNGKDDICRATISCKSVQISYPVAEESVTHKIIRGKEGKFANRHRDEGWITPSARQLVQMHMNDLKSICKILPISHVTLERVAFDFQKLENENIKVWEYGKGKLYGYDSPEEYIHDVQDGKCLVCGKPHIDYLHHIIPRSKGGSDKVSNIAGLCYDCHYGPIGVHNCQDTQDRLPELKNEANKQYKVSLLNSVMPVLIEEMDKFCKANSIMFSICEGHDTAKVRDMYDLQKDHCLDGFAISLVGRNVKSVDVMPDRIHQKQRYKKKSKNIIQKRNCREYYDGKKLVAVNRHKGTDQKADSLEEYMNTYAETHTADECKMHFESLTVKPARRTYTFHKEGRICPLHIGDKVRYEKKNKIKGNTKVDTFICEGIYFSKDENKAKVEHNKTKSKKMKFCRAIESGCIPYIDYIKLALI

SEQ ID NO: 18833 - protein, 433 aa, unidentified; identical to SEQ ID NO: 7454
  REGION 1..433: note = Human oral metagenome

SEQ ID NO: 18834 - protein, 404 aa, unidentified
  REGION 1..404: note = Human gut metagenome
LLKEKKAIVVRRTPFTIQLTIATGESKQPVSLGVDAGYKHVGLSASIEKAELYASEVELRKDITDLLSARRALRQSRRNRKTRYRAPRFDNRIRTKRKGWLAPSVENRINAHLSRIEAVLRLLPITKITVETASFDMQRLKNPDISGKEYQEGEQLGFWNVREYVLFRDGHVCRHCHGRSKDPVLNVHHLESRRTGSDSPDNLITLCETCHKALHRGEITLKAKRGQSFRAQAFMGIMRREVLNRLKASYPELKVHETYGYLTKHARIANGIVKSHGADAFCIAGNLGAERLGEFFFQKQTRRNNRQIHKLSILKGGIRKRNQAPFEAKGFRLFDKVACQGEEGFIFGRRSSGFFDVRKLDGTRISAGISCKKLHLLEKRRTYLTEIRKEEALPPLPEGRGLRA

SEQ ID NO: 18835 - protein, 439 aa, unidentified
  REGION 1..439: note = Human metagenome
MVLVIDRQKQPCNTISAAYARILLFTKQAVIHKRFPFTIRLRNDNAVLKDRSYTVKLDPGSRTTGVAITDDQDSVVMLAELEHRGHIIKKNLDSRRAIRRSRRQRKTRYREVRFLNRTKPEGWLAPSVKSRADNVINFIKKYNKLINIDRVMIENVSFDTAQMSSDTKLWGNDYQQGNLYNKNLREFIFSKTKGRCSYCEEKATEIDHIVPRAKGGTNSTYNLTPACRSCNEKKSNLSLKEFGKLMNKDYSKLEPKKLPKDAAIVQSARNYMVKEITKIIPDTTIHEAWITKYNRDQLGLPKQHYYDALSVGEIPSKFNFLTDKILQISAKGRGSRQMCRMDSYGFPRTSAKASKSVKGFQTGDIVKAVVPTGSKQGEYLGRVAVRSRGFFDIKTKSNLVKDIGYKFCRLLQRNDGYSYNYKERDFLLAMNCRVSVAEF

SEQ ID NO: 18836 - protein, 423 aa, Arthrospira sp.; identical to SEQ ID NO: 3160

SEQ ID NO: 18837 - protein, 440 aa, Moorena sp.; identical to SEQ ID NO: 16940

SEQ ID NO: 18838 - protein, 465 aa, unidentified
  REGION 1..465: note = Human gut metagenome
MSTCVCVLSNSGERLMPTFRLGKVRRLLKDGKAKIVKHHPFTIQLLYDSKTNTQPIEICEDVGYNYIGISVKSESREYVSAQYDTLQDEKEHHDDCRKYRRTRRNRLRYRKPRFDNRKCSEGWLAPSLEHKKQLNIRLIERYVSVIPITHATVEVGSFDTMLLQAIQKGKSKPEGVDYQKGPRYNLATLREAVFYRDNYTCQVCGRKIADGAILHMHHMFYWKGRHGDSLNELLTVCEKCHTPANHQKSGKLYGFGENVKFADLSGAAFMNAVRWQIVNELYTAFGKPFVTITYGTMTKEKRIALRLEKSHNNDAYAMGEFHPNHRCTFEHYEKVRRNNRTLEKFYDSRYIDIRTGEVATGKALFNGRINRNHKKDSENLHKYRGKRLYKGHRALVRKKVNFNPGDLVSLNGEVLVVHGTHTNKKGAVNVEFKTPAKNGRKSANLKKLKIVKAAGSIHPAWEKVS

SEQ ID NO: 18839 - protein, 424 aa, unidentified; identical to SEQ ID NO: 8578
  REGION 1..424: note = Human gut metagenome

SEQ ID NO: 18840 - protein, 477 aa, unidentified
  REGION 1..477: note = Human gut metagenome
MKSHKSVLVIGMNGIGLMPTTACKARKLLEAKKAKVYSKMPFTIKLLYKTGCAVQNISLGIDTGSQHIGVAVTTDNCVQLKDEHELRSTMEKRKLIETRAEARRSRRYRKTRYRKPKFKPHCKHVYMNSMTKRHGHKTHWHNVKNEYGTNRQPGWVPPSIQQKIDHHIQIINRYLEALPKKTKVNIEVGRFDTQKVKNPDIKGKQYQLGRMYDYENKKAYILAKYDYKCPICGRKFGSVRENGSIVKFRKHHLHFVSNGATDNPDSYMAICDCCHTAEAHGDGGILNKIMKESKKTSRGLRDMPFMNILRRRLWKAFPEACFTYGNITNADRKWISLPKTHANDAVAIAMHEYLQQAKSYDVKDVPYTKIYKEVRKKKRSLHEMNPRKGRRIPNTSATRNSKNTKSVINKHRTFSLYDKVRYAGQIGWITGFSGTNTAYLKNKEGKYITIQGKNYKNIPLSNVQILERNNTWITYTK

SEQ ID NO: 18841 - protein, 480 aa, unidentified
  REGION 1..480: note = Human gut metagenome
LYTKPLDNIGEGSLPPSGEINLKGMTFMVYVKSIDGKALMPTSNAKARKLLKQKKAKVVSLRPFVVKLTYKTKTEYIQKLNLGVDSGYSNIGFSVIDAKQEYIAGEVKLLEGMKKRLLEKASYRRIRRSRLRYRKARWNNRVKSKKKGWLAPSLKHKLDTHIKFIDYLKNILPIEKITIEVANFDIQKMKDDLISGIDYQNGDMFGFWNVREFVLHRDGHKCQNPNCKHKDKKEQILKVHHIRYRSEGGSDRPENLITLCSKCHIPANHKKGKFLYDWCVNGKKVRGFKDATFMSMIRWYLVNELKSKHNNVSITYGYITKNHRIQNGIEKSHLNDAFAITKGTNQARTKDRFLVIQDRLKNRSLEKFYDSKIIDIRTGKKVSGGDLSCGRSTRNKNLNTENLRKYRGAKISKGQRRIRKQKYFYQSNDLVKYDGKVYTVKGTQNEGKYIALKEIKKVPKVELLIPYVFKKGLNWSYGLC

SEQ ID NO: 18842 - protein, 413 aa, unidentified; identical to SEQ ID NO: 9603
  REGION 1..413: note = Human gut metagenome

SEQ ID NO: 18843 - protein, 446 aa, unidentified
  REGION 1..446: note = Human gut metagenome
GVAVVKADGTAVFTAHLETRNKEIPKLMKKRKDSRRARRTNGRRCRRQRRAKANGTISKKCVKQTTAQNGSVSKRAKGIGVIKRHLPGCEKDVLCIGIKNKEAKFSNRTKSEGWLTPTANQLLQTHINLVKKIRKFLPISDVVLEINKFAFMQLDNPNVQKWQYQQGPLYQKANLEEAVSEMQEHHCLFCKKPIAHYHHVVPQSENGSNTIGNIVGLCTKHHDLVHKDTAWQKKLAKKKTGLNKKYGALSVLNQIIPALTKELGSLFPKHFFATNGKSTYDYRAAHGVRKDHWLDAYCIACSVLPNDVCDKNINSRVLYELKQFRRHDRRALNNENMSRVYTLNENVVATNRHKATKQTTDSLEEFRQNHPDDACKLKVKEHHPTYRNMSRNYPGSVFLVGNQVHVMQGVAGSKDGKATTYKDTNANSIAAGKCKFVAKNSGILFV

SEQ ID NO: 18844 - protein, 427 aa, unidentified; identical to SEQ ID NO: 2980
  REGION 1..427: note = Cyanobacteria bacterium UBA11159

SEQ ID NO: 18845 - protein, 279 aa, unidentified
  REGION 1..279: note = Human gut metagenome
VVVETAEFDLQLLKAIADGKPVPQGEDYQKGEMYGHYNVRQYVLWRDNYTCQCCGTHPSKKKEVRLHVHHLESRKVGGDAPDNQVTLCESCHEKLHKGLIAEKDFKKRKRRSTWDATFMGIMRKTLMQRLCSELPIPVIETRGYITKATREKLLVLPKSHTNDALAIAQGKRGFNVGYLPEIAQIDKIYTIRPVRHHNRQLHKATILKGGIRKSNQTEKYVFGYRLFDKVQFNGQDCFIWGRRTTGIFTIKTINGKMIKDGISFKKLKPVEKSTGYLIA

SEQ ID NO: 18846 - protein, 408 aa, unidentified
  REGION 1..408: note = Human gut metagenome
LKVFVLNMRGKPLMPCSPAKARHMLKAGKAFVVRRTPFTIKLTIATGETKQDVTLGVDAGARHVGISATTEKEEVFASEVALRQDITGLLADRLAFRRARRNRKTRYRAPRFNNRVRSKHKGWLASSVENRIQAHMSRIEAVCRLLPVTKIVIETASFDIQKIRNPEVEGTGYQQGDQLGFWNVREYVLFRDGHICQHCRGRSKDPILNVHHLESRKTGGDAPNNLITLCETCHKAYHAGKIKLKVKRGQSFRAEAFMGIMRWTLLNRMRKAHPSLPVENTYGYLTKHKRIALGLPKTHCADAFCIAGNLKALRRGDFLFQQQTRKHNRQIHKCSILKGGVRKLNQAPFLVKGFRLFDKVRIGGQIGFVFGRRVRGTFNIRRLDKTVIGTDINCKKTESSRNTQNFFD

SEQ ID NO: 18847 - protein, 442 aa, unidentified; identical to SEQ ID NO: 2834
  REGION 1..442: note = Human gut metagenome

SEQ ID NO: 18848 - protein, 431 aa, unidentified
  REGION 1..431: note = Human gut metagenome
MPNKVYVINKHGRPLMPCSPAKARHLLDEGKAKVKKRTPFTIQLVYGSSGYTQEVILGVDAGSKTIGLSASAETEELLSAEVKPRNDVVDLLSTRREFRRARRNRKTRYRKPRFDNRVRSKHKGWLAPSVEVKIQEHITSIRRVCRILPVSKVVIETAEFDLQLLKAIEEGKPVPQGEDYQQGEMYGHYNVRQYVLWRDGYTCQCCGAHATKKKEVRLHVHHLESRKVGGDAPDNQVTLCESCHEKLHKGLIAEKDFKKRKRKSTRDATFMGIMRKTLMQRLCSELPIPVIETRGYITKATREKLLVLPKSHTNDALAIAQGKQGFNVGYLPGIVQINKIYTIRPVRHHNRQLHKATILKGGIRKSNQAEKYVFGYRLFDKVQFNGQDCFIWGRRTTGIFTIKTINGKMIKDGISFKKLKLAEKSTSYLIA

SEQ ID NO: 18849 - protein, 468 aa, Sulfobacillus sp.
VAGRTSRLNLGEERFSQENVTSPVRGRKKDRMVFVLDKHQKPLMPCSEKRARLLLERGRARVVKIAPFTIRLVDRRQEDSVLQGLRLKLDPGSKTTGVAIALDGAHGTKVVFLGEIVHKVGIKAKLDARRALRRGRRHRKTRYRKPRFQNRARKDGWLPPSLVARINQTLHALTKIRTHAPITDLSVEHVRFDTQKLDNPEISGVEYQQGTLLGYEVREYLLEKWGRTCVYCGATDVPLQVEHIIPKLRGGSDRISNLTIACEPCNLQKGQQTAAEFGHPDIQAQARKPLKDAAFMNATRWRLYAQLQATGVPVEGGSGGRTKKQRIAHGLPKEHYYDALCVGESTPERFTSFPASVQVWTAKGRGMRQICRTDKQGFPIRHVSRHKHHFGFQTGDLVQAVIPHGKYTGTWTGRATVKVSGQIRIVTSIGVHPTTSYRYCRVLQRGNGWVYTQKPLNPERRQAAASPA

SEQ ID NO: 18850 - protein, 421 aa, unidentified
  REGION 1..421: note = Human gut metagenome
MRGQPLMPCSPAKARHLLKAGKAVVKRRTPFTIQLRIATGETKQNVTLGVDAGAKHVGLSATTEKEEVFASEVELRQDITGLLAARLSLRRDRRHRKTRYRAPRFLNRVRSKHKGWLAPSVENRIQAHMSRIDAVCRLLPVTKIVIETASFDIQKIKDPSVEGTDYQQGDQLGFWNVREYVLFRDGHVCQHCHGHAKDKILNVHHLESRQTGGDAPNNLITLCETCHKACHAGKIKLKVKRGQSFRAEAFMGIMRWTLLDRVRKAHPGLPVENTYGYLTKHTRITHGLPKTHCVDAYCIAGNLKAVRRGVYLHQRQMRKHNRQIHKFTVLSKRLEDGTKIGYRKLNQSPYLVHGFRLFDKVRCLGQIGFIFGRRSSGYFDVRRLDGVKISSCISYRKLTLLEKRSTYLTELRKEDGASSPV

SEQ ID NO: 18851 - protein, 412 aa, unidentified
  REGION 1..412: note = Human gut metagenome
MENTLKVFVLNMRGQPLMPCSPPKARKLLRAGKAVPVRRTPFVIQLTVPTGETKQPITLGVDAGYKHVGLSATTAKEELLASEVELRQDVTGLLSDRLALRRARRNRKTRYRAPRFDNRVRSKHKGWLAPSVENRIQAHISRIEAVCRVLPITKIVIETASFDIQKIKNPEVEGTDYQQGEQLGFWNVREYVLFRDGHVCQACKGRSKDLILNVHHIESRKTGGDAPGNLITLCEACHKAYHAGKLKQFSPRRGASFRAETFMGIMRWTVLNRLRERHPELPVTNTYGYLTKHKRIVAGLPKTHCADAFCIAGVLDAKRRGEYLFQKQTRRHNRQIHKLTILKGGVRKRHQAPYLVHGFRLFDKVLCKGEVGFIFGRRSSGAFDVRRLNGTKISAGISYKKLSLLEKRKTFF

SEQ ID NO: 18852 - protein, 520 aa, unidentified
  REGION 1..520: note = Human gut metagenome
MNYLDFVFMVDKDKVPCIPIKESTAAYLLRHNKAKIINHDPTVIQRLDEYSADYEIRNIFELKIDSGYLNIGFSVSDSEHEYLAGQVNLLQGMSERLTVRASNRKFKRARLRYRKNKNVDYKTVHNSTYKNGNQDGWIAPSIQHKIDSHIRLIKKIAQWVPIDRIIIEVAKFDIQKMIADLDGRIISGKDYQNGEMKGYENVTAYVRDRDKHTCQMCLSSGKVKNKNNDTIEVHHIIPRSAGGTNRPSNLICLCHHHHRLVHSNNNNNKYFRELQNKKMPDTYKDSTFMNIVRYKIYNALCADFKDVELAYGYETKINRKLIGLPKFHYTDAVCLKEWKNISLTKFIYIVDQKRCNDRKMESFFDAKYIDIRDGKTKSGTELCYTRLDNASSWRTTCKNEVDNLRQYREKKVEKGKQRRECHFYCLKAGDLIFIKSGNHKGNLAEVKTMQIHKGKYKIFFTYKNQKVDNPTISLSPEEYGQLKKNECSKVKIVRTRRGMIWRKYNRLEYENTYKDQYDKN

SEQ ID NO: 18853 - protein, 292 aa, unidentified; identical to SEQ ID NO: 2733
  REGION 1..292: note = metagenome

SEQ ID NO: 18854 - protein, 451 aa, unidentified
  REGION 1..451: note = Human gut metagenome
MSVAVISNIGERLMPTSEYRARKLLKSGKAVKCSYHPFTIQLTERKAGDVQPIELCMDTGYIHIGISVKSEKHEYLAEQIDTLTNERTRHDACRMYRRQRRGRKRYRQPQFNNRKRDKGWIAPSLEHKKDIHIQAISRINKVMPLTDITMEMGNFDTQVLRAKEEGKPLPQGADYQHGERYGTATLREAVFSRDNYKCQCCGKTISDGAILHVHHIKYRSRGGTNSMTNLATVCDKCHTPKNHKPGGKLYDWKPKLPDFKGTTFMTTIRWQLYNEVKSLFLDINIHVTYGAATKEQRRKLNIGKSHVNDAFVMGKFYPKHRANAVLYKKKRRNNRCLEKFYDAKYIDSRDGSKKTGQELFNGRINRNHKKDSENLHQYRLQKTTAGKRTVRKKHYSIQPHDIVIYENRKRETSGCHCNGTGVILLPDKKSVSIKKVKIYKYAGGYFKSAFN

SEQ ID NO: 18855 - protein, 420 aa, unidentified; identical to SEQ ID NO: 8934
  REGION 1..420: note = Human gut metagenome

SEQ ID NO: 18856 - protein, 431 aa, unidentified
  REGION 1..431: note = Human gut metagenome
MPNKVYVLNKHGRPLMPCSPAKARHLLDAGKAKVKKRTPFTIQLVYGSSGYTQEVILGVDAGSKTIGMSASTTKEELLSAEVKPRNDVVDLLSTRREFRRVRRNRKTRYRKPRFDNRVRSKHKEWLAPSVEVKIQEHITSIKRVCRILPVSKVVIETAEFDLQLLKAIADGKSVPQGEDYQKGEMYGHYNVRQYVLWRDNYTCQCCGAHATKKKEVRLHVHHLESRKVGGDAPDNQVTLCESCHEKLHKGLIAEKDFKKRKRRSTRDATFMGIMRKTLIQRLHAELTIPVAETRGYITKATREKLLVLPKSHTNDALAIAQGKHGFNVGYLPEIAQIDKICTIRPVRHHNRQLHKATILKGGIRKSNQTEKYVFGYRLFDKVQFNGQDCFIWGRRTTGIFTIKTINGKMIKDGISFKKLKLVEKSTSYLIA

SEQ ID NO: 18857 - protein, 455 aa, unidentified; identical to SEQ ID NO: 10285
  REGION 1..455: note = Human gut metagenome

SEQ ID NO: 18858 - protein, 431 aa, Moorena sp.; identical to SEQ ID NO: 14757

SEQ ID NO: 18859 - protein, 426 aa, Parasutterella sp.; identical to SEQ ID NO: 3045

SEQ ID NO: 18860 - protein, 512 aa, unidentified; identical to SEQ ID NO: 4350
  REGION 1..512: note = Human gut metagenome

SEQ ID NO: 18861 - protein, 470 aa, unidentified; identical to SEQ ID NO: 2925
  REGION 1..470: note = Human gut metagenome

SEQ ID NO: 18862 - protein, 419 aa, Butyrivibrio sp.; identical to SEQ ID NO: 9770

SEQ ID NO: 18863 - protein, 408 aa, unidentified
  REGION 1..408: note = Human gut metagenome
MVYVQDINGKPMMPTTRHGKVRRLLKDKKAVVVNLCPFTIKLMYVTSDYKQEIVLGVDAGTKHVGLSATTKSKELYSSEVILRNDIVDLLSTRRELRRTRRNRLRHRKHRFNNRIKSRRPGWVAPSVKYKIDAHIRVIDNVFSILPISRIVIEVAQFDTQKINNPNISGKEYQEGDQLRFWNVREYVLARDGHKCQYCKGKSKDAILNVHHIESRKTGGDSPSNLITLCETCHKEYHKGNIDLKIRRGKSLRDAAVMGIMKWRLYEELKSKYDRVSMTFGYVTKYNRINHDIEKSHVSDAFVISKNFNAIRLGYYYKVRLVRRHNRQIHKQKIPKGGIKRLNQSPFEVFGFRLFDRVMFENSYYFIFGRRKTGSFNIRDIDGKKQKDITYKKLKLSRCKRFMIQKEMN

SEQ ID NO: 18864 - protein, 406 aa, unidentified; identical to SEQ ID NO: 6079
  REGION 1..406: note = Human gut metagenome

SEQ ID NO: 18865 - protein, 410 aa, Desulfobacterium sp.; identical to SEQ ID NO: 5848

SEQ ID NO: 18866 - protein, 422 aa, unidentified
  REGION 1..422: note = Human gut metagenome
LNKRGKPLMPCSPAKARLLLKEKKAIVVRRTPFTIQLTIATGESKQPVSLGVDAGYKHVGLSASTEKAELYASEVELRKDITDLLSARRALRQSRRNRKTRYRAPRFDNRIRTKRKGWLAPSVENRINAHLSRIEAVLRLLPITKITVETASFDMQRLKNPDISGKEYQEGEQLGFWNVREYVLFRDGHVCRHCHGRSKDPVLNVHHLESRRTGSDSPDNLITLCETCHKALHRGEITLKAKRGQSFRAQAFMGIMRREVLNRLKASYPELKVHETYGYLTKHARIANGSVKSHGADAFCIAGNLGAERLGEFFFQKQTRRNNRQIRKLSILKGGIRKRNQAPFEAKGFRLFDKVACQGEEGFIFGRRSSGSFDVRKLDGTRISAGISCKKLRLLERRRTYLTEIRKEEALPPLPEGRGLRA

SEQ ID NO: 18867 - protein, 438 aa, unidentified
  REGION 1..438: note = Sediment metagenome
MDASLVCSSTTLPLNKLETVSVVGKVLGCNNPEVKNKRQQVARLKVFIPVLSIAGSPLMPCTFTKAKRLLKRGKAKIVNRNPLIIRLTFSCENQTQPIVLGVDTGYSTIGFSTVTGNKELVSGELLLDNNTNKRLTERKGYRRNRRNRLRYRKPRFDNRSIPKGWLPPSVRRRFDTHVKLIANLRKWIPITTIVVEMCKFDIQKIINPKIAGKGYQQGNLYEYNNLKDFLFFREQGKCQFCGKKIEINQKAHLHHVIPRAENGTDRPDNIALLHKDCHDKLHKGKFFKINKAKQYKTETFMSIISKKLQEILSCEITYGYITKTKRKLLGIEKSHANDAFVIAKGNAQERCAPYRVEQKRINNRILQTNRKGFIPSIRKQRYKIQNRDFVWINGNKYLCGGTSSRGKEVRYFYNNEKKFAGIKKIEKVYHTNSLVWVS

SEQ ID NO: 18868 - protein, 481 aa, unidentified
  REGION 1..481: note = Human gut metagenome
VRSKTTTHHVKLRQSRQVWLYQAVYNLGEGFLPSSEEKTAFYWLLIYRKEHGIMQYVYVLNKHGEPLMPCSPRKARLLLKQKKACVVKRTPFTIKLLYGSTGYKQPITLGVDAGSKHIGISATTEKHELYREEATPRNDVVDLLSARRAFRRSRRNRKTRYRAPRFNNRVHSKHKGWLAPSVEVKIREHITLIKRVCRILPITLIRVETAEFDTQRLKAMLESKPLPVGTDYQLGEMYDEYNVRQYVLKRDNYTCQCCGAHPTKTKAVKLHVHHIETRRTGGNAPNNLITLCTACHKALHAGKVTLDGKKRGKPLKDTAFMGIMRKTLLERLRKELKIPVQGTYGYITKYLREKHGIPKSHTNDARCISKNPLAIPCDTCYYAKAVRHHNRQLHKATILKGGIRKANQAPYIVKGYRLWDKVSYNGTECFITGRRTSGYFALKKLDGTVISNSISYKKLRLLEVATNYITERKRRGNSSHD

SEQ ID NO: 18869 - protein, 428 aa, Moorena sp.; identical to SEQ ID NO: 4440

SEQ ID NO: 18870 - protein, 432 aa, unidentified
  REGION 1..432: note = Human gut metagenome
MSSARYWHEEKFSGRKVSEMTDYAFVLDANGKQLAPTKEQKAWFLIRRKRATLVSKYPMVIQLKKKIPDNEICKDEVRCGIDDGGLHVGVALVQKCQTRNKVVFKGTIEQRNDVKHLMDVRRGYRSYHRYHKRYRPARFNNRSSSKREGRIAPSILQKRQATIRVINQLNKWINITNYWLEDVAIDIRALTDGYKPYRWQYQKSNRLDENIRKAVILRDGCRCMECGKSNCRLEVHHIKPRRLKGSSTLGNLITLCTKCHQKTEGVEELYMDRYFALLNSSDNRNLDYAQHVMIGKEWLREQLSNLGMLYLTNGGDTANKRIDWDITKSHSNDAICITDLRPDTCEIKEWVIKPMRRQSKAKTDNVLGIKHRDLVEYTFRNGETHIGYVTALYPEQNAINFQSPAKHCKKVNAGKCKVLWKYSKIYWLDNVS

SEQ ID NO: 18871 - protein, 419 aa, Moorena sp.; identical to SEQ ID NO: 2828

SEQ ID NO: 18872 - protein, 451 aa, Blautia sp.
MSVAVISKTGERLMPTSEYRTRKLLKSAKAIKYSYHPFTIQLTERETGDIQPIELCMDTGYIHIGISVKSEKHEYLADQIDTLTDERSRHDACRMYRRQRRNRKRYRQPRFNNRKKDKGWIAPSLEHKKDIHVQAISRINNVMPLTDITMEMGNFDTQVLKAKEEGKPLPQGADYQHGERYGIATLREAIFARDGYKCQCCGRTIKDGAILHVHHVKYRSQGGTNSMSNLATVCDKCHTPKNHKPGGKLYGWKPKLSSFKGATFMTTIRWQLYNEIKTLFPDIVIHITYGAATKERRRELNIDKSHVNDAFVMGQFHPKHRIKAVLYKKKRRNNRCLEKFYDAKYIDSRDGKKRSGQELFNGRINRNHKKDSENLHQYRLQKVTAGKRTVRKQHYKIQPHDIVIYENRKRETAGCHCNGTRMMLLPDKKSASIKKVKIYRYAGGYFKSAFN

SEQ ID NO: 18873 - protein, 451 aa, unidentified; identical to SEQ ID NO: 6577
  REGION 1..451: note = Human gut metagenome

SEQ ID NO: 18874 - protein, 414 aa, unidentified
  REGION 1..414: note = Human gut metagenome
MPCSPAKARLLLKEKKAIVKRRTPFTIQLTIATGESKQPVSLGVDAGYKHVGLSASTEKAELYASEVELRQDVSDLLSARRALRQSRRNRKTRYRAPRFNNRLRTKRKGWLAPSVENRINAHLSRIEAVLRLLPVTKITVETASFDLQLLKNPDISGKEYQEGEQLGFWNIREYVLCRDGHVCQHCYGRSKDPVLNVHHLESRRTGGDSPGNLITLCETCHKALHRGEITLKAKRGQSFRAEAFMGIMRWEVLNRLKASHPELEVNNTYGYRTKHARIANDIAKSHCADAFCIAGNLGAERLGEFFFQKQTRRNNRQIHKLSILKGGIRKRNQAPFEVNGFRLFDKVACQGEEGFIFGRRSSGFFDVRKLDGTRISAGISYKKLHLLEKRRTYLTEIRKEEALPPLPEGRGLRA

SEQ ID NO: 18875 - protein, 419 aa, unidentified; identical to SEQ ID NO: 5677
  REGION 1..419: note = metagenome

SEQ ID NO: 18876 - protein, 431 aa, unidentified
  REGION 1..431: note = Human gut metagenome
MPNKVYVINKHGRPLMPCSPAKARHLLDAGKAKVKKRTPFTIQLVYGSSGYTQEVILGVDAGSKTIGVSASTKKEELFAANVIPRNDVVDLLSTRRESRRARRNRKTRYRKPRFDNRVRSKHKGWLAPSVEVKIQEHITSIKRVCRILPVSKVVVETAEFDLQLLKAIADGKPVPQGEDYQKGEMYGHYNVRQYVLWRDNYTCQCCGAHATKKKEVRLHVHHLESRKTGGDAPGNLVTLCESCHEKLHKGLITEKDFKKRKRRSTRDATFMGIMRKTLMQMLCSELPIPVIEIRGYITKATREKLLVLPKSHTNDALAIAQGKQGFNVGYLPGIEQIDKIYTIRPVRHHNRQLHKAAILKGGIRKSNQAGKYVFGYRLFDKVQFNEQDCFIWGRRTTGIFTIKTINGKMIKDGISFKKLKLVEKSTSYLIA

SEQ ID NO: 18877 - protein, 456 aa, Moorena sp.; identical to SEQ ID NO: 2773

SEQ ID NO: 18878 - protein, 480 aa, Moorena sp.
MAEEEKQKLGKWITPWDAAQVPCSVADGLNRGERVASVSIGVKTFPNSAYEQERSGKSGQDVRVPVSNMRGEPLMPTTARKARKFLEQGKAKVVGYNPFTIQLLYGTGETKQEIVLGVDAGYAHIGYSAVTAKEELISGELELRTDIKRLLDKRRAYRRTKRNRLWYRKPRFLNRGKEGWLAPSIKHKLKSHIKLIERLNSIIPITKIVVEVASFDTQKMQNHEITGIEYQQGTLQGYNVRNYLLEKWKRKCAYCGQANVPLEVEHIIPKSRGGSDRVSNLTIACHKCNDEKGTQTAAEFGRLGIQNKAKKPLKSAAFMNIIRWKVVDHFKCKWTYGHKTKYGRIKAGLDKSHINDAFIIAGGKTQKHTGKNIIEKQVRRQNRSLYKANIQKGGMLKRNTVKEVKEFRRFDKVEYKNKEFFIFGLRSSGYFNLKNIEGEKVTDSVSLKKLTFIERARGKIAEVRRAIPPCAEAHSLLASG

SEQ ID NO: 18879 - protein, 447 aa, unidentified; identical to SEQ ID NO: 9829
  REGION 1..447: note = Human gut metagenome

SEQ ID NO: 18880 - protein, 406 aa, unidentified; identical to SEQ ID NO: 6526
  REGION 1..406: note = Human gut metagenome

SEQ ID NO: 18881 - protein, 512 aa, unidentified; identical to SEQ ID NO: 8121
  REGION 1..512: note = Human gut metagenome

SEQ ID NO: 18882 - protein, 449 aa, unidentified
  REGION 1..449: note = Human gut metagenome
PTFRLGKVRRLLKDGKAKIVKHHPFTIQLLYDSKTNTQPIEICEDVGYNYIGISVKSESHEYVSAQYDTLQDEKEHHDDCRKYRRTRRNRLRYRKPRFDNRKRGEGWLAPSLKHKKELNVNVVKMYCAVMPITHATVEVGSFDTMLVKAIQEGKAIPEGADYQKGPRYNLATLREAVFYHDNYTCQVCGRKVADGAILHMHHMFYWKGRHGNSLDELLTVCEKCHTPANHQKGGKLYGFGENVKFADLSSAAFMNTVRWQIVNELYAAFGKDFVTVTYGAMTKEKRIALRLEKSHNNDAYAMGEFHPNHRCTFEHYEKVRRNNRVLEKFYDSRYIDIRTGEMATGKALFNGRINRNHKKDSENLHKYRGKRLYKGHRALVRKKVNFNPGDLVSLNGEVLVVHGTHTNKKGAVNVEFKVPAKNGQKSASLKKLKIVKTTDSMHSAWKKVS

SEQ ID NO: 18883 - protein, 412 aa, unidentified; identical to SEQ ID NO: 6913
  REGION 1..412: note = Human gut metagenome

SEQ ID NO: 18884 - protein, 470 aa, Thermoanaerobacterium sp.; identical to SEQ ID NO: 15617

SEQ ID NO: 18885 - protein, 419 aa, unidentified
  REGION 1..419: note = Human oral metagenome
MLNNQKEYAFVLDAEGKKLDPTIIQNAWRLVRQKKATLIAKRPMTIQLKKVVDTLNNDEIRMGIDDGAKYVGLALVQKCKTKNKVIFVATMEHRIDVHKKIVQRHEYRRYRRYLKRYRKDKSLNRANSRKQGWISPTIKQKRHAVIRIVDVLSKYICIDSIYLEDVAIDIRVLTEGHQIYGEQYQISNRLDENLRKATVLRDNCKCQLCGKKNCRLEVHHITPRRMNGSNTIGNLITLCSDCHSKVTGREMEFADQFYSKIGKKRNNYGLIYASHVMIGKTWLREELAKRAQLTLTTGGDTANKRINWNLEKSHEVDAVCITSLRPEFVNVKKWRIKPLRHQIKKRKTIEVLRFRHRDIVSYVYRNGEYHEGYVTAIFPLSKRRKENLSFQSQTKHCCRVAINKCKFICRPNKFYWLSS

SEQ ID NO: 18886 - protein, 333 aa, unidentified
  REGION 1..333: note = Human gut metagenome
LDANNKQLTPTKEQKAWFLIRKKRATLVSKYPMVIQLKKKIPDKEICKDEVRCGIDDGGLHVGVALVQKCQTRNKVVFKGVIEQRNDVKHLIDVRCGYRRYHRYHKRYRSARFNNRNSSKREERIAPSILQKRQATIRVINQLNKWINITNYWLEDVAIDIRALTDGYKPYRWQYQKSNRLDENIRKAVILRDGCKCMECGKSNCRLEVHHIKPRRLKGSSTLDNLITLCTKCHQKTESVEELYMDRYFALLNSSDNKNLNYAQHVMIGKKWLREQLSNLGMLYLTNGGDTANKRIDWDIAKSHSNDAICITDLRPDTCEIKEWVIKPMRKQS

SEQ ID NO: 18887 - protein, 412 aa, unidentified
  REGION 1..412: note = gut metagenome
MPNKVYVINKHGRPLMPCSPAKARHLLDAGKAKVKKRTPFTIQLVYGSSGYTQEVILGVDAGSKTIGVSALTKKEELFAANVIPRNDVVDLLSTRREFRRARRNCKTRYRKPRFDNRVRSKHKGWLAPSVEVKIQGHITAIRRVCGILPVSKVVVETAEFDLQLLKAIEKGKPVPQGEDYQQGEMYGHYNVRQYVLWRDDYTCQCCGAHTTKKKEVRLHVHHLESRKTGGDAPSNLITLCDSCHEKLHKGLIAEKDFKKRKRRSTWDATFMGIMRKTLMQRLCSELPIHVVETRGYITKATREKLLVLPKSHINDALAIAQGKHGFNVGYLPGILQIDMIYTIRPVRHHNRQLHKATILKGGIRKSNQTGKYVFGYRLFDKVQFNGQDCFIWGRRTTGIFTIKTINGKMIKD

SEQ ID NO: 18888 - protein, 478 aa, Acidiferrobacter sp.; identical to SEQ ID NO: 4550

SEQ ID NO: 18889 - protein, 456 aa, Halomonas sp.; identical to SEQ ID NO: 2773

SEQ ID NO: 18890 - protein, 425 aa, Moorena sp.
MSTNYVLVLDTNRKPLNPCKPGMARSLLKAGKAAVFKQYPFTIILNKAVDDAPKPVQLKIDPGSKVTGLALVQDDKVLWGAELYHRGQQIKADLEDRRKLRRGRRNRKTRYRQPRFLNRTRPEGWLAPSMLHRVLTTMTWVRRLTKFVPVTGISLERVRFDMQKMINPEVSGVDYQQGELQGYEVREYLLEKWNRQCAYCQATDTRLEVDHIHPKSKGGSDRVSNLTVACHDCNQAKGNRNITDFLSGKSDLLNRILSQVKQPLLDAAAVNSTRNKIAEELIATGLPIEFGTGGQTKYNRCRLDLPKTHWLDAACVGVVVHLTLETKQCLTITASGHGNRQMAGVDKYGFPYRHRTRQQVHFGFRSGDIVRAVVPKGKKAGTHLGRVLCRKSGSFDIQTKSGRVTGINHKYCSTIHGRDGYAYVF

SEQ ID NO: 18891 - protein, 494 aa, unidentified
  REGION 1..494: note = Human gut metagenome
MTIVYVQNKDGKPLMPTTRYCYVRLLLKEKKARVVSRTPFTIQLNYDTPDVTQDLILGVDPGRTNIGVAVVKKDGSCVFSAHLETRNKDVPLLMKKRAAFRKNHRTLDRRRKRQRRAIAAGTIVESNTIEKLLPGYEKPVVCHYIRNKEARFNNRSRPAGWLTPTANHLLQTHINLIAKVTKFLPITKVVVELNRFAFMAMDNPNIRRWEYQQGPLYGLGSVEDAVYAQQDGHCLFCKKPIDHYHHVVPRHKGGSETLVNRCGLCAKHHDLVHKDKAWAEKLVTRKGGMNKKYHALSALNQIIPHLMEYLGSETPYDVYATDGKSTKGFRIAKNVPKEHYTDAYCIACSILDADTKVSAPAEPFKLKQFRRHDRQSCIRQMADRKYLLDGKVVATNRHKAIEQRSDSLEEFREAYGDAAVSQLTVRPHSPQYKDMNRIMPGAVMDFNGTIGVMQCSGGRNNGKVEFFKSTKGNKTTPKKCVLLAQNAGMVFIPA

SEQ ID NO: 18892 - protein, 494 aa, unidentified
  REGION 1..494: note = Human gut metagenome
MTMVYVQNKDGKPLMPTTRYCYVRLLLKEKKARVVCTTPFTIRLNYDTPNITQDLILGIDPGRTNIGVAVVKEDGSCVFSAHLETRNKEVPLLMKKRAAFRRQHRTQDRRRKRQRRAIAAGTTVESNTIERLLHGYEKPIVCHHIRNKEARFNNRSRPAGWLTPTANHLLQAHINLIAKAAKFLPITKVVVELNRFAFMAMDNPNIRRWEYQQGPLYGLGSVKDAVYAQQDGHCLFCKKPIDHYHHVVPRHKGGSETLANRCGLCEKHHALVHKDKAWAEKLVTRKGGMNKKYHALSVLNQIIPHLMEYLGSETPYDVYATDGKSTKGFRIAKNVPKEHYTDAYCIACSILDADTKVSAPAEPFKLKQFRRHDRQSCIRQMVDRKYLLDGKVVATNRHKSIEQKSDSLEEFREAYGDAAVSQLTVRPHSPQYKDMARIMPGAVMDFDGIVGVFKGSSGRNNGTPNYYNSTKGARVLTKRCALLAKNAGMVFIPA

SEQ ID NO: 18893 - protein, 360 aa, unidentified
  REGION 1..360: note = Human gut metagenome
MLVYVLSKNGQPLMPTHRCGFVRRLLNSQKAKVVRRCPFTIQLQYDTDCKTQPVTLGIDAGSKHIGVSATTESKVLYEADIELRNDIVDLLATRRQMRRARRSRKTRYRKARFDNRKRNDKWLAPSIQHKVNCHLEAVRFVHKLLPISKIIVEVASFDIQKIKNPLITSTDYQNGELLDWKNVREYVLFRDSHICQCCKGKSKDPVLQVHHIESRKTGGNAPNNLITLCKTCHNGYHHGTVKLPAKIKRGMKFNDATFMGIMRWGFYNQLKSLYPDVSLTYGYITKDIRISNGLAKTHFIDARCISGNPLATSDNTVYFLKKRRRHNRQIHKFNILKGGRKKRNQAAYLVKGYRPLDKVN

SEQ ID NO: 18894 - protein, 431 aa, unidentified; identical to SEQ ID NO: 15889
  REGION 1..431: note = Human gut metagenome

SEQ ID NO: 18895 - protein, 365 aa, unidentified
  REGION 1..365: note = Human gut metagenome
MYVTSDYKQEIVLGVDAGTKHVGLSATTKSKELYSSEVILRNDIVDLLSTRRELRKARRNRLRYRKPRFDNRVKSERPGWVAPSVKYKIDAHIRVIDNVCSILPISRIVIEVAQFDTQKINNPEISGKEYQEGDQLEFWNTREYVLARDGHKCQYCKGKSKDSILNVHHIESRKTGGDSPSNLITLCETCHKEYHKGNIDLKIRRGKSLRDAAVMGIMKWRLYEELKSRYDRVFMTFGYITKHNRIKYGIEKSHTSDAFVISMNINAKRIERQYLKRLIRRHNRQIHKMKILKGGGKKKNNQAPFEVFGFRLFDKVLYNNKIFFVYGRRKSGNFNIRDFNGENSKDVSRKKFKLIRGKRHPIILK

SEQ ID NO: 18896 - protein, 521 aa, Streptomyces sp.
MTTFSSREKTHRAVLPQRRALESAGADNPGSRDETACGLPTAVSGTGSEHGRGEILPEGIRPAGRHPNPAPAGKGEVREGHPMVFVLDKHHQPLMPCTSARARKLLSQGRAVVHRHTPFVIRLKDRTAAASEVTGVELGIDPGSRFTGIALFRTVGDANETARHGLFAIELAHRGGPISDRLTSRSTLRRARRQRNLRYRAPRFNNRSRPEGWLAPSLRHRVETTTAWVDRIARWAPVRTVHVELAAFDTQAMSAGKSASDAEYRRGTLEGMEVREYLLTKWSRACAYCGATGVPLNIDHIHPRSRGGSDRISNLTLACVPCNERKSNRPVEDFLKKKPARLSKVLQQAQAPLRDAAAMNATRWALVRTLEARHEDVRPSSGGRTRWNRQRTATPKSHTLDALCVGVFESVARHPATIHVVMATGRGTYRRTSPDRYGFPRLSLPRTKQHFGYATGDLVRASVPTGKRQGSHTGRVAVRATGNFNIKTLRGLVQGVHHRHVRLLQRADGYAYATRTEATCA

SEQ ID NO: 18897 - protein, 430 aa, unidentified; identical to SEQ ID NO: 6608
  REGION 1..430: note = Human gut metagenome

SEQ ID NO: 18898 - protein, 442 aa, unidentified
  REGION 1..442: note = Human gut metagenome
MVTVQQSTHHLPFGRVFIRRNLFMVYVISQDGKPLMPCSDPIARLLLKQGKAKVKKREPFTIKLTYETTNYTQGLTLGVDTGSGTIGTAVSKDNGDIVYMSEVVVRNDITDKMTQRAKYRRNRRNRKTRYRKARWLNRASSIKKDRFSPTMQSKLHSHVREIEYIQSILPITEMVFETGQFDMQLMKNPSLANPKVRPWGYQKGANYGFENTKAMVLNRDNYTCQCCKGKHKDSKLEVHHIVFRSQGGSDEESNLLTLCHTCHKDLHSGKINPKLSGKVKGNLKYATQMNSIRKQLFRCYPNAIETFGYVTKANRLHLGVAKEHYYDACTIATQGNAFNVKSNLYKKKCVSDGDFQKTKGIRSEEPIVTDKICGFRKFDKVRYFGNDYFIKGRMSTGYAILMDIDGNKIDFSTMPRGYKTPKLSNCKRITARSTVMTQVKVV

SEQ ID NO: 18899 - protein, 470 aa, unidentified
  REGION 1..470: note = Human gut metagenome
MSVFVVGLNGCRLMPVSERKARLLLKGGKASVYRKVPFTIKLNYKTGSTVQPGYLGIDTGSQHIGVSVVQKDGTVLHKEEIGLRDSMSKRKLLESRASSRRGRRYRKTRYRHPKWKPKTKRIFNEKADRKGRHWKKQKNTFTSKRQAGWLPPSLQSKTDHHIQWIRKLLDLLPEGYRLSIELGRFDPARMKDPEIHGELYQKGPQYDYENVRAYVLARDGYTCRVCKKKGGKLHVHHILYRSRGASDNPKYMAAVCSKCHTTENHLPGGILYQWMQDQKKFTRGLRDATFMNILKKRLRKAFPDAVFTYGNITKADREKLELPKSHGNDATAIALVKTEVKSVKDEEPVIHIQQVRRKKRSLHEETPRKGRKEPNRTASRSDKNTKSVTVTKGSGEKKASMTACLFDRVELDGKKGWITGFTGTSCYVKDKEDNYICTSSKYKQVSISRLRILHHCGNWAIGAEKPLGKG

SEQ ID NO: 18900 - protein, 442 aa, unidentified
  REGION 1..442: note = Human gut metagenome
MVYVLNKDGQPLMPTNRHGKIRRLLKTNKAKVIKRCPFTIQLLYDTTNHTQDITLGVDAGSKHIGLSATTEDKVLFEADAELRNDISKLLEARYTFRRSRRNRKTRYRKKRFDNRVSSKHKGWLAPSIEHKIQSHFAMVEKVHRILPVTKIVVETASFDTQLLKAQLEGKPIPQGTDYQNGELAGWNIREYIFHRDNYTCQWCKGKSKDPVLVTHHHADWKGDHTNKPSSLITLCNTCNDSKYHKKEANRLWGWEPKITNSYKHAVFMGVMRWTFYNRLKEIYPNVSMTYGYITKNTRIENNLPKAHYVDARCISGHPEAKSNGEYFYYKKVRCHNRQLHKANTLKGGIRKRSQAEYTVKGFRLFDRVEYQNNEYFVFGRRASGFFDIRTLDGQKVNKGSISFKKLKLKETSKTYLIERRMADTGVSLAPLTTEVTSLRQTG

SEQ ID NO: 18901 - protein, 427 aa, Mastigocoleus sp.
MQNHVFVVDQRRQRLDPIHPKRARRLLEKGKAAVLRMYPFTIILKQVITNPTVQSCQIKIDPGSKVTGFALVRGGEVIWGMELEHRGEQIKAKLLDRRSVRRNRRNRKTRYRKPRFLNRKRPEGWLPPSLEHRVKTIETWVIRLMRFAPTDQIIVERVKFDMQKMQNPDISKEEYQQGTLHGYEVREYLLEKWDRKCTYCGVKDVPLQIEHIHPKSKGGSNRVSNLCLACDKCNKKKGNKPVEDFLKNKPTLLAKIKAQAKKPLKDAAAVNATRDAIIKMVKFFDWFHEIKTGTGGQTKYNRTRLNLPKEHWIDAACVGDVDNLILLTKQPLKVRCTGHGTRQMCRTDKHGFPKRHVPRDKFVKGFQTGDIVKAVVTKGKKIGTYFGRVAVRKSGSFNISSKAGLIQGINYKYCNLIHRRDGYSYSF

SEQ ID NO: 18902 - protein, 502 aa, unidentified; identical to SEQ ID NO: 2616
  REGION 1..502: note = Human gut metagenome

SEQ ID NO: 18903 - protein, 423 aa, unidentified; identical to SEQ ID NO: 4062
  REGION 1..423: note = Human gut metagenome

SEQ ID NO: 18904 - protein, 489 aa, unidentified
  REGION 1..489: note = Human gut metagenome
MDMVYVLNKDGKPLMATTRGGRVRYLLKEKKARVVSSTPFTIQLNYDTPDITQDLILGIDPGRTNIGVAVVKEDGQCVFSAHLETRNKDVPLLMKKRAAFRRNHRTLDRRRKRQRRAKAAGTTIADGSAERLLPGYEKPIVCHYIRNKKARFNNRKRPQGWLTPTANHLLQTHINLIAKIAKFLPITKVVVELNRFAFMAMDNPNIRRWEYQQGPLYGLGSVEDAVYAQQDGHCLFCKKPIDHYHHVVPRHKGGSETLANRCGLCERHHALVHKDKAWAEKLVTRKGGMNKKYHALSVLNQIIPHLMEYLGSETPYDVYATDGKSTKGFRIAKNVPKEHYTDAYCIACSILDTNIKVSAPVEPFELKQFRRHDRQSCIRQMVDRKYLLDGKVVATNRHKSIEQKSDSLEEFREAYGDAAVSQLTVKPHPPQYKDMTRIMPGAVMDFNGTIGVMQSSIVGRFYKSTKGYKATPRRCVLLAQNAGMVFLPA

SEQ ID NO: 18905 - protein, 424 aa, unidentified; identical to SEQ ID NO: 18309
  REGION 1..424: note = Human gut metagenome

SEQ ID NO: 18906 - protein, 427 aa, Moorena sp.; identical to SEQ ID NO: 3660

SEQ ID NO: 18907 - protein, 418 aa, unidentified; identical to SEQ ID NO: 2425
  REGION 1..418: note = Human gut metagenome

SEQ ID NO: 18908 - protein, 518 aa, unidentified; identical to SEQ ID NO: 7632
  REGION 1..518: note = Human gut metagenome

SEQ ID NO: 18909 - protein, 470 aa, unidentified; identical to SEQ ID NO: 2825
  REGION 1..470: note = Human gut metagenome

SEQ ID NO: 18910 - protein, 426 aa, unidentified; identical to SEQ ID NO: 2776
  REGION 1..426: note = Bioreactor metagenome

SEQ ID NO: 18911 - protein, 443 aa, unidentified; identical to SEQ ID NO: 4257
  REGION 1..443: note = Human gut metagenome

SEQ ID NO: 18912 - protein, 470 aa, unidentified; identical to SEQ ID NO: 2825
  REGION 1..470: note = Human gut metagenome

SEQ ID NO: 18913 - protein, 371 aa, unidentified
  REGION 1..371: note = gut metagenome
MVYVQDINGKPMMPTTRHGKVRRLLKDKKAVVVNLCPFTIKLMYVTSDYKQEIVLGVDAGTKHVGLSATTKSEELYSSEVILRNDIVDLLSTRRELRRTRRNRLRYRKPRFDNRVKSKRPGWVAPSVRYKIDAHIRVIDNVCSILPISRIVIEVAQFDTQKINNPNISGKEYQEGNKLGFWNVREYVLARDGHKCQYCKGKSKSKILNVHHIESRKTGGDSPSNLITLCEICHKEYHKGNIDLKIRRGKSLRDAAVMGIMKWRLYEELKSRYDRVFIERQYLKRLIRRHNRQIHKMKILKGGKKKNNQAPFEVFGFRLFDKVLYNNKIFFVYGRRKSGSFNVRDFNGENSKDVSRKKFKLIRGKRHPIILK

SEQ ID NO: 18914 - protein, 431 aa, Escherichia coli; identical to SEQ ID NO: 4170

SEQ ID NO: 18915 - protein, 513 aa, unidentified
  REGION 1..513: note = Human gut metagenome
VLEELLSRTEYIYVLGTDGKPQMPTKRKRHILKLLNTGKARIAEKVPFTIQLKYENIPVLQPVTLAEDPGRTNIGVAVLSPLGNLMFAAVIETRNKEIKKLMADRKAHRQASRRGERRARQRLAKKYGTIIKAGMAMRKLPQYAADKFVACKFIRNTEARFCNRKRRPDWLTPTVNHLVQTHLNVIKKISRYLPVTDIAIEVNRFAFMQMENPNASGVDFQTGPLRGFDDVKAAIREQQNGKCLMCKNDIEHFHHMVPLSKGGSDTIQNQVGLCPKCYAKVHTDTSFRKKLGDKKSGLLKKYGALSALNQAIPFICKDLLAEYGKEHVHFCTGKETSLIRTSLGYEKTKDNQMHEVDAYCIGLASLELEDIKSQSFVNTYKIKQFRRQDRSIIHHQTERSYYLDEQKIATNRKPRFEQTGNALSDWYKKQVKACDKAKADKMLSTLKVKKSSRSYNSEGRLMSGAVFSYNGQRHVMSGQLTGGRYLRAYGDTKTNYPVSKCNILRSNEGLVFI

SEQ ID NO: 18916 - protein, 431 aa, unidentified; identical to SEQ ID NO: 4463
  REGION 1..431: note = Human gut metagenome

SEQ ID NO: 18917 - protein, 413 aa, unidentified; identical to SEQ ID NO: 11197
  REGION 1..413: note = Human gut metagenome

SEQ ID NO: 18918 - protein, 431 aa, Escherichia sp.; identical to SEQ ID NO: 10059

SEQ ID NO: 18919 - protein, 424 aa, unidentified; identical to SEQ ID NO: 3351
  REGION 1..424: note = Human gut metagenome

SEQ ID NO: 18920 - protein, 393 aa, Moorena sp.; identical to SEQ ID NO: 5287

SEQ ID NO: 18921 - protein, 465 aa, unidentified; identical to SEQ ID NO: 5709
  REGION 1..465: note = Human gut metagenome

SEQ ID NO: 18922 - protein, 425 aa, Moorena sp.; identical to SEQ ID NO: 13789

SEQ ID NO: 18923 - protein, 424 aa, Anaerostipes sp.; identical to SEQ ID NO: 3434

SEQ ID NO: 18924 - protein, 406 aa, unidentified; identical to SEQ ID NO: 12874
  REGION 1..406: note = Human gut metagenome

SEQ ID NO: 18925 - protein, 451 aa, unidentified; identical to SEQ ID NO: 5203
  REGION 1..451: note = Human gut metagenome

SEQ ID NO: 18926 - protein, 416 aa, unidentified
  REGION 1..416: note = Human gut metagenome
MVYVLDKNGQPLMPTDRHRKVRLMLQSGQAKVIKRCPFTIQLNYDSGHQTQEISLGIDAGSKHIGVSATTKIKVLYEADVELRNDIVNLLSSRRELRRGRRNRKTRYRQAKFNNRRRGNGWLAPSIRQKIGTHLTVVKNICKILPISRIMVETASFDIQKIKNPDIQGAEYQQGDQLEFWNVREYVLFRDGHTCQCCKGKSKDKILNVHHIGSRKTGGNAPNNLITLCETCHTGYHKGTVQLPKAIKRGIRFKDAAFMGIMRWVFYEALKQQYEPVGTPVHNTYGYITKHTRIAYDLPKEHYVDARCISGNPEASSNGEYYYQKKVRCHNRQIHKLTVLKGGIRKQNQATYLVKGYRLFDKVSYQGKGYFVFGRRQSGFFDIRTLSGEKVNKGSLSCKKLKFIATRTYYLTERRAV

SEQ ID NO: 18927 - protein, 376 aa, Moorena sp.; identical to SEQ ID NO: 16201

SEQ ID NO: 18928 - protein, 425 aa, unidentified; identical to SEQ ID NO: 16091
  REGION 1..425: note = Human gut metagenome

SEQ ID NO: 18929 - protein, 427 aa, Alistipes sp.
LRVFVRNKRGKPLMPCSPAKARLLLKEKKAIVKRRTPFTIQLTIATGETKQPVSLGVDTGYKHVGLSASTEKAELYASEVELRQDITDLLSARRALRQSRRNRKTRYRAPRFDNRIRTKRKGWLAPSVENRINAHLSRIEAVLRLLPVTKITVETASFDLQLLKNPDISGKEYQEGEQLGFWNIREYVLCRDGHVCQHCYGRSKDPVLNVHHLESRRTGGDSPGNLITLCETCHKALHRGEITLKAKRGQSFRAEAFMGIMRSEVPNRLKASHPELEVNNTYGYRTKHARIANDIAKSHCADAFCIAGNLGAERLGEFFFQKQTRRNNRQIHKLSILKGGIRKRNQAPFEVNGFRLFDKVACQGEEGFIFGRRSSGFFDVRKLDGTRISAGISCKKLHLLEKRRTYLTEIRKEEALPPLPEGRGLRA

SEQ ID NO: 18930 - protein, 442 aa, Moorena sp.
VVSPTSHYNIVKEHITNSEALTMQNYVFVIDTNFQPLNPIPPKKARRLLDKGKAAVFRMYPFTIILKTSVMNPTISPCQLKIDPGSKVTGFALVQNNQVIWGMELEHRGGLIKKKLESRRAVRHRRRNRHTRYRKPRFLNRKRPEGWLPPSLEHRILTIQTWVKRLIKFCPIQEIWVERVKFDTQKMENPEINGVQYQQGELRGYEVREYLLEKWGRECTYCGKQSVPLQIEHIHPKSFGGSNRVSNLCLACEKCNQRKGNKPIEEFLKKKPNLLQKIKNKAKQPLKDAAAVNATRNKLVKVLESIKSVVTGTGAQTKYNRTKFGFPKEHWIDAACVGDIETLVLRTSQPLLVNCKGHGGRQKAALNKYGYPIRHNPLKPIKGWCSGDIAKNLLTGEFGRVNPRSKSNSFNYTIPGEKAISLHVKNLVRVHKKDGYTYGFCQ

SEQ ID NO: 18931 - protein, 376 aa, unidentified
  REGION 1..376: note = Human gut metagenome
PVSLGVDAGYKHVGLSASTENAELYASEVELRQDITDLLSARRALRQSRRNRNTRYRAPRFDNRIRTKRKGWLAPSVENRINAHLSRIETVIRLLPVTKITVETTSFDMQLLKNSDIAGKKYQEGEQLGFWNVREYVLFRDGHVCQHCHGRSKDPVLNVHHLESRRTGGDSPGNLITLCETCHKALHRGEITLKAKRGPSFRAETFMGIMRWEVLDRLKASHPKLEVQNTYGYRTKHARIVNGIAKSHCADAFCIAGNLGAERLGEFLFQKQTRRNNRQIHKLSILKGGIRKRNQVPFEVKGFRLFDKVACKGEEGFIFGRRSSGYFDVRKLDGTHISAGISYKKLRLLEKRQTYLTEIRKEEALPPLPEGRGLRA

SEQ ID NO: 18932 - protein, 415 aa, unidentified; identical to SEQ ID NO: 3582
  REGION 1..415: note = Human gut metagenome

SEQ ID NO: 18933 - protein, 529 aa, unidentified
  REGION 1..529: note = Candidatus Poribacteria bacterium
MIQIMGELAKVRHFMLKIAVVDQNKQVLEPCHPAVARQLLRAGKAAVLKQYPFTIILKRSVVETHTTDYTLSVDPGSQCTGIAITDSENRIVIKIELHHRGKAIKKGLSARAGHRRSRRTRKLRYREPRWRNRARKAPTLTADGWQYKKVDRAVTSKDGKPKQKWHPSQKGWIPPSLMSRVFNIETWVRRLCKVYPITHLAVEHVKFDTQKMANPEIEGVEYQQGTLHGYEVRQYLLEKFNHKCFYCGISNERLEIEHIIPEAKGGTHRVSNLTVSCKPCNREKGDRLPDEIGGTLGKRVEQALKAAGEPMKDAATVNSIRWKISETLEHTGLPLFYGTGGRTKHNRTQADLDKTHYYDAASVNCVPIDDGTHHPVLSIHAVGYGYRADLGDSKIYTSGYMKTVKVKDANNKIVMIERKDRKGKPYKMPKINKEKSVPAPGFRGPQIRIERCAGFARLDMVEIQNRTGRFIGSLNCFDETATGKPQKVRVKVDFTKPDGRTSGNITQIKKIMSRDGYAYTHHKPTPRRR

SEQ ID NO: 18934 - protein, 493 aa, unidentified
  REGION 1..493: note = Human gut metagenome
MAVVYVISASGKPLMPTTRCGHVRGLLNEGKARVVEREPFTIQLKYETPDVTQPLYLGIDPGRTNVGAAVVCEDGECVFTAQLTTRNKDVPKLMKARKQFRMAHRRLKRRCKRQRRAKAAGTLSQKGEFQRLLPGYEKPILCKGIRNKEARFNNRQRPVGWLTPTANHLLLTHLNMVKKLQKLLPITDVVLEVNRFAFMAMENPSIRRWQYQRGPLYGKDCVEDAVYAQQDGHCLFCGRPIAHYHHVVPQHKNGSDTLENRVGLCNEHHDLVHKDRAWEAKMKETKAGLNKKYHALSVLNQIIPALTEQLTELFPQHAFVTTGKDTADFREDHGIAKEHYLDAYCIACSVLTEPDRVSAPTAKPYRLMQFRRHDRQVCHKENIKRVYLLDGKAVATNRHKAIEQKDDSLEEFRRTHTQQEVSSLTVKDHQPIYKDMQRFMPGGVFLCNGKVHTLLGSQGRYKGMPYYYIGTDGSRNNATRCIFLQQNCGLRWV

SEQ ID NO: 18935 - protein, 413 aa, unidentified; identical to SEQ ID NO: 6473
  REGION 1..413: note = Human gut metagenome

SEQ ID NO: 18936 - protein, 418 aa, unidentified
  REGION 1..418: note = Human gut metagenome
MVYVVANDGQPLMPTERHGKVCRMLKSGMAKVVKKCPFTIQLQYESERNVQPVSLGVDAGSKHIGISATTKTKVLYESDVELRDDIVKLLATRRQLRRRRRSRKTRYRPARFDNRRRKEGWLAPSIRQKIESHLTVVANACKILPINQIIVETASFDIQKIKDPEIQGIEYQQGEQMDFWNIREYVLFRDGHTCQCCKGKSKDKVLNVHHIESRKTGGNAPNNLITLCETCHKGYHNGTVTLPKNIKRGMKFKDAAFMGIMRKTLMERLRAELAIQVVETKGYITKYTRVELLKLDKTHTNDALAIAQGRRGFGVEELTTIPQSDYIYRIRPVRHHNRQLHKATILPGGIRKSNQAPRYVRGFRLFDKVSYLGEDCFIWGRRSSGSFLLKLLDGTKVKDGVGYKRISLLERSASYLIS

SEQ ID NO: 18937 - protein, 424 aa, Moorena sp.; identical to SEQ ID NO: 4427

SEQ ID NO: 18938 - protein, 544 aa, unidentified
  REGION 1..544: note = Human gut metagenome
MKQKKQKVMVYILNKKGKPLMPTTRCGHVRKLLDSKKAVVVNSNPFTIRLKYDTPNGIQDVFAGIDSGRENIGSGASNEDGDCLYLGELKTSNKSIKLKMTERAGFRKERRRHDRQNKQRKARKDHTEIQNGNADICRTTISCKSVQISYPAAEKSVTHKIIRGKEGKFANRHRDEGWITPSARQLVQMHMNDLKSMCKILPISHVTLERVAFDFQKLENENIKVWEYGKGKLYGYDSPEEYIHDVQDGKCLVCGKPHIDYLHHIIPRSKGGSDKVSNIAGLCYDCHYGPMGVHNCQDTQNRLPELKNEANKQYKVSLLNSVMTVLIEEMDKFCKANSIIFSICEGHDTAKVRDMYDLQKDHCFDGFAISLVGRNVESVDVIPDRIYQKQRYKKKSKNIIQKRNCREYYDGKKLVAVNRHKGTDQKADSLEEYMNTYAETHTADECKNQFESLTVKPARRTYTFHKEGRICPFHIGDKVRYEKKNKIKGNTKVDTFICEGIRFVKDENKAEVKHNKTKSKKMKFCRVLESGCTPYVDYRKLALM

SEQ ID NO: 18939 - protein, 436 aa, unidentified
  REGION 1..436: note = Sutterellaceae bacterium UBA7100
TGRKTEETNLRVFILNKRGKPLMPCSPAKARLLLKEKKAVVVRRTPFTIQLTIATGETKQPVSLGVDAGYKHVGLSASTEKAELYASEVELRQDVSDLLSARRALRQSRRNRKTRYRAPRFDNRIRTKRKGWLAPSVENRINAHLSRIETVLRLLPVTKITVETASFDMQLLKNPDIAEKEYQEGEQLGFWNVREYVLFRDGHVCQYCHGRSKDPVLNVHHLESRRTGGDSPGNLITLCETCHKALHRGEIKLRAKRGQSFRAETFMGIMRWEVLNRLKASHSKLEVNNTYGYLTKHARIKSGITKSHCSDAFCIAGNLGAKRLGEFLFQKQTRRNNRQIHKLSILKGGIRKRNQAPFEINGFRLFDKVACKGEEGFIFGRRSSGSFDVRKLDGTRISAGISYKKLRLLQKRQTYLTEIRKEEALPPLPEGRDLRA

SEQ ID NO: 18940 - protein, 527 aa, unidentified
  REGION 1..527: note = Human gut metagenome
VLNKDGKPLMPTTRGGHVRHLLKEQKARVVQSNPFTIQLLYKTNDAVQPLYLGIDPGRTNIGVAVVKADGTAVFTAHLKSRNKEIPKLMQDRKRARRARRTNGRRHRRQRRAKANGTISKKCVKQTTAQNGSVSKRAKDIGVIKRRLPGCEKDVLCIGIKNKETKFTNRTRPEGWLTPTANQLLQTHINLVKKIQKFLPISDVVLEVNKFAFMRLNNPNIQKWQYQQGPLYKKESLESAVSEIQEHHCLFCKKPIDHYHHVVPKSENGSNTIANIVGLCAEHHNLVHKDVAWQEKLAEEKTGLNKKYGALSVLNQIIPALTNKLSVLFPKHFFVTAGKSTHDYRAAHGVSKDHWLDAYCIACSVLPSNVCDSNINNHVPYELKQFRRHDRRVLHKANMSRVYTLNGKAVATNRHKAIKQTTDSLEEFRQNYPDDVYKLKVKEHHPAYRNLNRNYPGSVFLVGKQAHVMQGIASSKDGKTTKYNDTNATTITAGKCKFVAKNSGILFVQCKFRKALSDGTTKKLQYPV

SEQ ID NO: 18941 - protein, 393 aa, Moorena sp.; identical to SEQ ID NO: 5287

SEQ ID NO: 18942 - protein, 450 aa, Moorena sp.; identical to SEQ ID NO: 2935

SEQ ID NO: 18943 - protein, 482 aa, Sutterella sp.; identical to SEQ ID NO: 3624

SEQ ID NO: 18944 - protein, 446 aa, Moorena sp.; identical to SEQ ID NO: 16792

SEQ ID NO: 18945 - protein, 512 aa, unidentified; identical to SEQ ID NO: 5811
  REGION 1..512: note = Human gut metagenome

SEQ ID NO: 18946 - protein, 414 aa, unidentified
  REGION 1..414: note = Human gut metagenome
MVYVINKQGQALMPTERFGKVRRLLKNSLAHVVCRIPFTIQLDYDTTDYTQPVSLGVDAGSKHIGISATTSEKELYAADVELRNDIVDKLSTRRELRRTRRSRLRYRKARFNNRVSSKRKGWLAPSVENKIQTHLTVVEKINKFLPITNIVVEIASFDIQKINNPIISGSEYQQGEQLDFFNVREYVLFRDNHICQHCKGKSKDKVLNVHHIESRKAGGDSPNNLITLCETCHKAYHRGEFELNVKRGKSFRDSAFMGIMRWSFYDRLKNIYPNVSMTFGYITKNTRITNNLPKDHYVDARCISGNPTAKPLGYYFYQKKVRCQNRQIHKANFLKGGRKKLNQAPFLVKGFRLFDLVEYQKELYYIFGRRSSGSFYIRKLDGTKVNKGSINCKYLRLIATRKSILTEKRMQVNL

SEQ ID NO: 18947 - protein, 424 aa, unidentified; identical to SEQ ID NO: 3232
  REGION 1..424: note = Human gut metagenome

SEQ ID NO: 18948 - protein, 519 aa, unidentified; identical to SEQ ID NO: 17739
  REGION 1..519: note = Human gut metagenome

SEQ ID NO: 18949 - protein, 430 aa, unidentified; identical to SEQ ID NO: 8226
  REGION 1..430: note = Human gut metagenome

SEQ ID NO: 18950 - protein, 430 aa, unidentified
  REGION 1..430: note = Human gut metagenome
MPKVYVLNRHGRPLMPCTPAKARHLLDAGKAKVRHRTPFTIQLLYGSTGYTQEVILGVDAGSKTIGLSAATETEELFSAEVKPRNDVVELMPARRQFRCARRNRTTRYRKPRFDNRVRSKHKGWLAPSVEVKIQEHMTAIRRACAILPVSKVVVETAEFDLQLLKAVAEGKPVPQGEDYQKGEMYGHYNVRQYVLWRDSYTCRICGMHGSVRKGVPLHVHHLESRRVGGDAPDNLVTLCTACHDKLHKGIIMAADIKKRKRRSTRDATFMGIMRMTLLRRLREQLPVPVVETRGYITKATRENLLVLPKSHTNDALAIAHGPQGFRAEYLPNIRQADRLYTIRPVRHHNRQLHKATILKGGVRKANQAEKYICGFRLYDKVLYNGIECFVWGRRTSGSFLLRQLNGEKVKDGVSYKHLKLLERSQSYLVA

SEQ ID NO: 18951 - protein, 414 aa, unidentified
  REGION 1..414: note = Human gut metagenome
MPCSPAKARLLLKEKKAIVKRRTPFTIQLTIATGESKQPVTLGVDAGYKHVGLSASTEKAELYASEVELRQDVSDLLSARRALRQSRCNRKTRYRAPRFNNRLRTKRKGWLAPSVENRINAHLSRIEAVLRLLPVTKITVETASFDMQLLKNPDIAGKEYQEGEQLGFWNVREYVLFRDGHVCQHCYGRSKDPVLNVHHLESRRTGGDSPGNLITLCETCHKALHRGDITLKAKRGKSFRAEAFMGIMRWEVLNRLKASHPELEVHNTYGYRTKHTRIVNGIDKSHCADAFCIAGNLGAKRLGEFFFQKQTRRNNRQIHKLSILKGGIRKRNQAPFEINGFRLFDKVACKGEEGFIFGRRSSGSFDVRKLDGTRISAGISCKKLHLLEKRRTYLTEIRKEEALPSLREGRGLRA

SEQ ID NO: 18952 - protein, 512 aa, unidentified; identical to SEQ ID NO: 5238
  REGION 1..512: note = Human gut metagenome

SEQ ID NO: 18953 - protein, 435 aa, unidentified
  REGION 1..435: note = IscB polypeptide
MVYVISKDGKPLMPTERYGKVRKLLKQKLAKVVRLRPFTIQLQYVTTTYTQPVSLGIDSGYTYVGYSVTTDKKELMCGVLTLLGSISERISKKRMYRQLRRSRLRYRKCRFNNRKKPQGWFPPSIQHKADSHIKFIELLKSILPITRTTIEVAAFDIQKIKDPNISGLDYQNGEQKGFYNLREYILYRDNYTCQLCGKKNVALRVHHIGYWKGDQTNKPSNLITLCNNCASAKNHLPNGKLYGWEPKLKPFKEETFMSILRKRLANTLNCNFTYGYLTKTRRIELNLEKTHYNDAFCIAGGTENHTRIEPINFGQTRRNNRSLETFYDAKYIDIRTGKSVKGVELFNGRTTRNKNLNSEDLHKYRGKKLSKGRRQIRRKRYPYQHNDLVKFNGKVYIVNGTSNYGTYILLQGLSKAVRTNLIQPYKFSKGMYAYR

SEQ ID NO: 18954 - protein, 426 aa, unidentified; identical to SEQ ID NO: 7027
  REGION 1..426: note = Human metagenome

SEQ ID NO: 18955 - protein, 469 aa, Streptomyces sp.; identical to SEQ ID NO: 4670

SEQ ID NO: 18956 - protein, 463 aa, Moorena sp.
MAVFVMDRSGRPLMPCTEKRARLLLARGRARVHKVMPFTIRVVDRLVEDCEFQALRIKLDPGSKTTGMALVRETAQNGVVIINLFELMHRGQQISEALTARRGHRRLRRGKLRYRAPRFLNRGNKGKGWLAPSLQHRVDTTLAWVNRIQRYAPVSAISTELVRFDMQALENPDIEGAQYQQGTLAGYEVREYLLEKWSRTCAYCGVKNVPLQIEHIHPKSKSGSDRISNLTLACQCCNQKKGVLPIKVFLAKQPERLKRIQAQAKRPLKDAAAVNATRWALVNALKATGLAVETASGGKTKFNRSQLGIPKTHALDAACVGHVHAMTGWQKPTLCIKATGRGSYQRTRLDKFGCVRGYLTRSKSIQGFQTGDMVKAIVTKGKKAGCHIGRVAVRASGSFNIQTRHGLVQGVSHRYCTVVQRGDGYGYQLVAKTDATGTPPKQGDALHPALYLPGLKAEVLRVN

SEQ ID NO: 18957 - protein, 397 aa, unidentified
  REGION 1..397: note = Human gut metagenome
VTTILKTCFAASNLAKIVVLMDAWDIIVILNKRGKPLMPCSPAKARLLLKEKKAIVVRRTPFTIQLTIATGEAKQPVSLGIDAGYKHVGLSASTEKAELYASEVELRQDITDLLSARRALRQSRRNRKTRYRAPRFNNRLCTKRKGWLAPSVENRINAHLSRIKAVLRLLPVTKITVETASFDLQLLKNPDISGKEYQEGEQLGFWNIREYVLCRDRHVCQHCYGRSKDPVLNVHHLESRRTGGDSPGNLITLCETCHKALHRGEITLKAKRGQSFRAEAFMGIMRWEVHNRLRALHPGIEVSNTYGYRTKHARIANGIAKSHCADAFCIAGNLGAERLCEFFFQKQTRRNHRQIHKLSILKGGIRKRNQAPFEVKGFRLFDKVACQGEEGFIFGRR

SEQ ID NO: 18958 - protein, 406 aa, unidentified; identical to SEQ ID NO: 2752
  REGION 1..406: note = Human gut metagenome

SEQ ID NO: 18959 - protein, 417 aa, unidentified
  REGION 1..417: note = Human gut metagenome
MPCSPAKARLLLKEKKAIVKRRTPFTIQLTIATGEAKQPVTLGVDSGYKHIGLSATTEKAELYASQVELRQDITDLLSARLALRRSRRSRKTRYRAPRFDNRVASKRKGRLAPSVENRIAAHMSRVEAVMRVLPVTAITVETAAFDTQLLKNPDIAGAAYQQGEQLGFWNVREYVLFRDGYVCQHCRGKSKDPILNVHHIESRRTGGDAPNNLITLCETCHKAFHRGEIKLKVKRGKSFKAETFMGIMRWTLLERLKKAHPELSVRNTYGYLTKHKRISHGIAKSHCADAYCIADNLGAKRLEGFFFQKQTRKHNRQIHKLSILKGGLRKKNQAPYEVKGFRLFDKVICKGEEAFIFGRRTSGSFDVRRLDGTRISAGISYKKLRLLEPRTTYLTEFRKEAALPPLHKCRGFRAEFL

SEQ ID NO: 18960 - protein, 451 aa, Scytonema sp.; identical to SEQ ID NO: 2763

SEQ ID NO: 18961 - protein, 431 aa, unidentified
  REGION 1..431: note = Human gut metagenome
MPNKVYVINKHGRPLMPCSPAKARHLLDEGKAKVKKRTPFTIRLVYGSSGYTQEVILGVDAGSKTIGMSASTTKEELLSAEVKPRNDVVDLQSTRREFRRARRNRKTRYRKPRFDNRVRSKHKGWLAPSVEVKIQEHITAIRRVCGILPVSKVVVETAEFDLHLLKAIADGKPVPQGEDYQKGEMYGHYNVRQYVLWRDGYTCQCCGAHATKKKEVRLHVHHLESRKVGGDAPDNQVTLCESCHEKLHKGLIAEKDFKKRKRRSTRDATFMGIMRKTLMQRLCSELPIPVVKTRGYITKATREKLLVLPKSHTNDALAIAQGKRGFNVGYLPEIAQIDKIYTIRPVRHHNRQLHKATILKGGIRKSNQTEKYVFGYRLFDKVQFNGQDCFIWGRRTTGIFTIKTINGKMIKDGISFKKLKPVEKSTGYLIA

SEQ ID NO: 18962 - protein, 356 aa, unidentified
  REGION 1..356: note = Human gut metagenome
KDVLCIGIKNKEAKYTNRARLEGWLTPTANQLLQTHINLVKKIQKFLPISDAVLEVNKFAFMRLDNPNIQKWQYQQGPLYQKGSLENAVSEMQEHHCLFCEKPIEHYHHVVPKSENGSNTIANIVGLCAEHHNLVHKDVAWQEKLVEEKTGLNKKYGALSVLNQIIPALTKELSFLFPKHSFMTNGKSTHDYRAAHGISKDHWLDAYCIACSVLPIDVCDSTINNCVPYELKQFRRHDRRALNNENMNRVYTLNDKVVATNRHKATEQEAASLEEFRKEHPNDVCKLKVKEHHPTYRNMNRNYPGSVFLVGKQIHVMQGIASSKDGKATKYNDTRATTIAAGKCKFVAKNSGILFV

SEQ ID NO: 18963 - protein, 421 aa, unidentified
  REGION 1..421: note = Human gut metagenome
MRGRPLMPCSPAKARHLLKAGKAVVRRRTPFTIQLRIATGETKQSVTLGVDAGAKHVGLSAATEKEEVFASEVELRQDITGLLAARLSLRRERRQRKTRYRAPRFLNRVRSKHNGWLPPSVENRIQAHLSRIDAICGLLPVTKIVIETASFDIQKIKHPDVEGTDYQQGDQLGFWNVREYVLFRDGHVCQHCHGHAKDKILNVHHLESRQTGGDAPNNLITLCETCHKACHAGKIKLKVKRGQSFREEAFIGIMRWTLLDRVRKAHPGLPVENTYGYLTKNTRITLGLPKAHCVDAYCIAGNLKAVRRGVYLHQRQVRKHNRQIHKCTVLSKTLKDGTKIGYRKLNQTPHLVKNFRLFDKVRCLGQTGFIFGRRSSGYFDVRRLDGVKLSSGISYRKLTLLEKRSTYLTELRKEDGASSPV

SEQ ID NO: 18964 - protein, 499 aa, unidentified
  REGION 1..499: note = Human gut metagenome
MRYVYVLDQEGRPLMPTSRFRKVRRMLKTGQARAVSTLPFTIQLTYRPKTQERQAVVAGIDPGRTNIGLAAVREDGICLYQAHGTTRNKEIVNLMSDRLASRRASRRGERLARKRLAKRLHTTAKKLLDRILPGYREPLAVKDIINTEARFNNRLRPQGWLTPSATQLLRTHVNLLKKMQEILPVSDVVVELNRFAFLQLDQPGVRKKDIDFAHGALYGTGGLHAAVRELQQDRCLLCREGEIEHFHHIIPRSRRGSDTLANLAGLCERCHELVHKHAEAADRLRERKNGLEKRYGGTSVLNQIIPTLMQNLGECFPGHAFATTGWKTKEFREAHELEKDHAVDAYSIAGSILQPSVLDLAVEGYEILQFRRHSRANINHQTERTYLLDNKTVAKNRHKRMDQKTDSLQEWYEDAAARYGEKQADRLRSRLTVKKSTRYYNSKDRLLPGTIFSYEGKRYVLTGQLTGGAYYRAYGQGKKNFPAKKVRILCQNEGLVYAS

SEQ ID NO: 18965 - protein, 419 aa, unidentified; identical to SEQ ID NO: 4877
  REGION 1..419: note = Human gut metagenome

SEQ ID NO: 18966 - protein, 432 aa, unidentified
  REGION 1..432: note = bioreactor sludge metagenome
MQRVLVIDRHKQPLMPCHPARARELLRDGKAAVYRRFPFTVILTDRENGDVQSVAFKVDPGSKQTGIALVADFKRGKRVIWAAVLEHRGRQIKDALESRRALRRSRRNRHTRYRAPMFDNRRRPSGWLPPSLQSRVENVLTWLCRLNRACPLDSVSQELVRFDTQLLQNAEISGVEYQQGELVGYEVREYLLEKWQRTCAYCGAKDMPLEIEHITPKTRGGSNRVSNLTLACHHCNQKKGTQTAAEFGFPEVQKRAKQPLKDATAVNASRWALYHRLKTTGLPVEIGTGGRTKSNRTQQAYPKAHWIDAACVGESGDRVHIVPDHIALHIKATGHGSRQMCRTDAYGFPIRYRLPQKRHFDFQTGDMVKANVLSGKYSGRHIGRVACRATGSFDIKTDYGKVTVNHKTCQIIHRSDGYTYYRKEEQRLPPQP

SEQ ID NO: 18967 - protein, 436 aa, unidentified
  REGION 1..436: note = Human oral metagenome
MTRTLTTQTTQACVLDRQGKPLMPTTRLGKVYRLLKTQKAHIVSYEPFTIQLDYQPDTQVIQPMTLGVDSGAIHSGYSVANEHREYYSAEVVARNDISNRLSDRRMYRQNRRSRKTRYRKPRYSNRKNKKKGWLPPSLEQKVAVQVNEIDHIPRYFPIETIIVETAEFDIQKIKNPDIYGIEYQQGTLQGYNIRNYLLEKHGRKCFYCGKAVSGFEVEHMLPKSKGGSNRIDNLTLSCHDCNETKGTLTAEEFIQQTLSAKKAASKLKQLPNEKRLFKYMAYMNATRWALYDAIKERYPNVKMTYGYITKYNRIQAGLPKAHHIDAKCITGFPTVPSMSQTVVKVKMRRHNRQLHRATFSKGHVRKAASLPTTVFGFQLYDLVCFNNRRYYIKGRRSSGVFALVSVGGLKDENRNYKKLTLLAHTNAYLTNHYVNA

SEQ ID NO: 18968 - protein, 427 aa, Enterococcus sp.; identical to SEQ ID NO: 5630

SEQ ID NO: 18969 - protein, 461 aa, Parasutterella sp.; identical to SEQ ID NO: 3646

SEQ ID NO: 18970 - protein, 414 aa, unidentified
  REGION 1..414: note = Human gut metagenome
MPCSPAKARLLLKEKKAIVKRRTPFTIQLTIATGESKQPVSLGVDAGYKHVGLSASTEKAELYASEVELRQDITDLLSARRALRQSRRNRKTRYRAPRFNNRIRTKRKGWLAPSVENRINAHLSRIEAVLRLLPVTKITVETASFDMQLLKNPDIAGKEYQEGEQLGFWNVREYVLFRDGHVCQHCHGRSKDPVLNVHHLESRRTGGDSPGNLITLCETCHKALHRGEIKLKAKRGRSFRAETFMGIMRWGVLNRLKASHPKLEVHNTYGYRTKHARIANGIAKSHCADAFCIAGNFGAKRLGEFFFQKQTRRNNRQIHKLSILKGGIRKRNQAPFEVNGFRLFDKVACQGEEGFIFGRRSSGYFDVRKLDGTRISASISCKKLRLLEKRRTYLTEIRKEEALPSLSEGRGLRA

SEQ ID NO: 18971 - protein, 461 aa, Parasutterella sp.; identical to SEQ ID NO: 3646

SEQ ID NO: 18972 - protein, 442 aa, unidentified; identical to SEQ ID NO: 16323
  REGION 1..442: note = Human gut metagenome

SEQ ID NO: 18973 - protein, 578 aa, Moorena sp.
MVYVYVLDKHGKPLMPTTRCGHVRKLLKNGKAVVVSTTPFTIRLKYESTHFTQPVHEGIDTGRENIGDAASLEDGRNVFLADVRTNNKSIKKKMTERAGFRRERRRHRRIRKQRRAMHDKTTMQKGKADTVRTKRACQSVEISYPKMEKAVTHKVIRGKESKFANRRRPEGWITPSARQVIQITLNEIKQTAKILPVTDISLERVAFDFQKLENTNIRKWQYGKGPLYGYKSYKDYIWDEQHGKCACCGKPIEEYHHIHHRADGGIDNVKNIIGLCHHCHEEIHNSKEAEERLAELKQGVMQKYYVGLLNSVMPALIDAVRTYCKEHGLTLTITDGQQTSETRKKYGLEKDHCIDAYAISLAERDVSTVRPADTIYMKRRFKKKTKAFIAARNQRVYKLDGKAVAYNRHKALNQKTDSLEEYLSQYKASHSAKDVQCLMHRMKIEPARRTYTYRKQGLVAPVRPGDLVLYRKVRKVKGDVKTEVFPAVSVEYTEIAKKANGVVTKERVWKIGVDDTHIRKAKFCSVLNHSCVQFTGSESTSAYLKKVAEEAAERKKKAAKKAAEHKTKAAEGAAKASA

SEQ ID NO: 18974 - protein, 444 aa, unidentified
  REGION 1..444: note = Human gut metagenome
KKRKDSRRARRTNGRRCRRQRRAKANGTISKKCVKQTTAQNGSVSKRAKEIGVIKRHLPGCEKDVLCIGIKNKEAKFSNRTKSEGWLTPTANQLLQTHINLVKKIRKFLPISDVVLEINKFAFMQLDNPNVQKWQYQQGPLYQKANLEEAVSEMQEHHCLFCKKPIAHYHHVVPQSENGSNTIGNIVGLCTKHHDLVHKDTAWQKKLAKKKTGLNKKYGALSVLNQIIPALTKELGSLFPKHFFATNGKSTYDYRAAHGVRKDHWLDAYCIACSVLPNDVCDKNINSRVLYELKQFRRHDRRALNNENMSRVYTLNENVVATNRHKATKQTTDSLEEFRQNHPDDACKLKVKEHHPTYRNMSRNYPGSVFLVGNQVHVMQGVAGSKDGKATTYKDTNANSIAAGKCKFVAKNSGILFVYYKLKVVKPRKIFNNLCLAKSLNFWR

SEQ ID NO: 18975 - protein, 430 aa, unidentified; identical to SEQ ID NO: 4817
  REGION 1..430: note = Human gut metagenome

SEQ ID NO: 18976 - protein, 434 aa, unidentified
  REGION 1..434: note = Human gut metagenome
LSGELLSAAVVQTRNKEIVKLMEKRKQHRRASRNGERKARQRLAKKCHTMLKVGSLMRKLPMYGKDKRVKCLVIRNTEARFCNRKRKDGWLTPSAEHLVRTHINLIHKMQKFLPITDVAIEINRFAFLSLEDPSVSGVDFQKGPLKGYDNLNAAVEDLQDGHCLMCDRPIEHRHHIVPRSMQGSNTIENIAGLCCKCHEKVHKNAAFEKRLKKKKAGLDKRYAAISVLNQAIPFICKQLEQEFGKEHVHYCSGKDTAMVRRSFGYHKTKEEQLHEVDAWCIAVLSLQQIPEKAPEFDHVYKIMQFRRQDRSRIKAQTSRTYYYDGKKVAKNRKKAEGQKEDSLQEWRECHVTLYGEEQARKMISQLKVRKSIRRYNRLDRLMPGAVFYYKGTRYVMRGQHNKGQYLQAVGMGSKDFPVKDCKIVAQNEGLVFVS

SEQ ID NO: 18977 - protein, 420 aa, unidentified; identical to SEQ ID NO: 6017
  REGION 1..420: note = gut metagenome

SEQ ID NO: 18978 - protein, 570 aa, unidentified
  REGION 1..570: note = Human gut metagenome
MTNDYVFVVDRKGNPLMPTKRRGRVRHLLKEGKAVVIKTHPFTVKMKYDAGHYTQPMYEGIDSGRQNIGNAVSRENGENVLLEDVRTNNKSIKKNLMKRKAHRQERRRNNRHSRQRKAIHDGTEIKNGDDDKWHTDKDCKSVKVSYPAADNAVTHKVIRGKEGKFANRKRPDGWITPSARQIVQLTLNMVKETCSIMPIRRISFERVAFDFQKLANQNIHAWEYGKGPLYGFKTYKDYIYSEQQGKCPFCGKPITQYHHIIPRSAGGIDNVKNIIGLCDEHHTMVHNDVAFAETLSDAKAGVEQEYYAGLLNSAVPALIEALSVYCKEKGIELLITDGRTTRETRVKYGFDDKKDHCIDAYAISLADRNVKNISFAGHIIMKRRYKKKSKNIISARNQRIYELDGQVIACNRHKAENQKENSLEEFLTQYRETHTEKEVQQMMHHIRILPAVRSYTFHKDGLKAICHPGDIVEYKKLNKTSGKMKRNIFVCTSVNFDGKDKHGDYCAAENHIGYDNGKGNGNRKAKFCTVLDSSCLQCTGIERTDDYIAQLKADPSKKKGNKNLWLTNVY

SEQ ID NO: 18979 - protein, 288 aa, unidentified
  REGION 1..288: note = Human gut metagenome
LQFYRKEHSIMQYVYVLNKHGEPLMPCSPGKARLLLKHQKACVVKRTPFTIKLLYGSAGYKQPITLGVDAGSKHVGLSASTEKRELYSEEFTPRNDVVELLSTRRQNRRSRRNRKTRYRAPRFNNRIHSKHKGWLAPSVEVKIQEHITVIKRICRILPITLVRVETAEFDTQRLKAMLAGKPLPVGTDYQLGEMYDEYNVRQYVLKRDHYTCQCCGAHNTAEKVVKLHVHHLESRKTGGNAPSNLVTLCTTCHKNLHKGKVTLDGKERDKPLRDAAFMGIMRKTLMAR

SEQ ID NO: 18980 - protein, 524 aa, unidentified; identical to SEQ ID NO: 10783
  REGION 1..524: note = SAR202 cluster bacterium bin 87

SEQ ID NO: 18981 - protein, 442 aa, unidentified; identical to SEQ ID NO: 2903
  REGION 1..442: note = Human gut metagenome

SEQ ID NO: 18982 - protein, 455 aa, unidentified
  REGION 1..455: note = IscB polypeptide
MQKLSVKLKNTPRNTPLVPCSVSSVLNRAERLSVQNKVLTDNNSEVDLRLPAGGPKAITPVFVLSRDGSPLMPCKPAKARHLVRDRRAKVIRRSPFTIQLLWDCEKNIQSVTLGIDPGYKNIGFSAVTDQKELISGEVKLRSNMSKKLADRSMYRRGRRIRFWYREPRFNNRVASKKKGWLAPSIRHKLDSHIKLVKQIKELLPISSVVVEVANFNIQKIKNPEVKGIEYQRGEQLGFWNVREYVLHRDNHTCQKCKGKSGDKILQVHHIKGKKEGATDRPEELITVCKTCHRRHHKGIDIIPIKEIKNFKPETFMSTIRWKLVDILKSEYTYGYITKHNRIGLGLAKSHSNDAFCIANGNEQLRVRSFSVVQKKKNNRRLQVDRKGYKPGIRRQRYPYQPYDLVKVQGNVFTSKGTSCYGTCILLKNQLDGVKSISTKKLDDWHISAKTLVWTN

SEQ ID NO: 18983 - protein, 419 aa, unidentified; identical to SEQ ID NO: 6954
  REGION 1..419: note = Human gut metagenome

SEQ ID NO: 18984 - protein, 431 aa, unidentified
  REGION 1..431: note = Human gut metagenome
MPNKVYVINKHGRPLMPCSPAKARHLLDEGKAKIKKRTPFTIQLVYGSSGYTQEVILGVDAGSKTIGMSTSTKKEEVFAADVTPRNDVVDLLSTRREFRRARRNRKTRYRKPRFNNRVRSKHKGWLAPSVEVKIQEHITSIKMVCRILPVSKVVVETAEFDLQLLKAIADGKSVPQGEDYQKGEMYGHYNVRQYVLWRDNYTCQCCGAHATKKKEVRLHVHHLESRKVGGDAPSNLITLCDSCHEKFHKGIITAANLKKRKRRSMRDATFMGIMRKTLIQRLRAELTIPVAETRGYITKATREKLLVLPKSHINDALAIAQGKHGFNVGYLPEIAQIDKIYTIRPVRHHNRQLHKATILKGGIRKSNQAEKYVFGYRLFDKVQFNGQDCFIWGRRTTGIFTIKTINGKMIKDGISFKKLKPVEKSTSYLIA

SEQ ID NO: 18985 - protein, 456 aa, Nitrincola sp.; identical to SEQ ID NO: 11949

SEQ ID NO: 18986 - protein, 456 aa, unidentified; identical to SEQ ID NO: 6138
  REGION 1..456: note = Human gut metagenome

SEQ ID NO: 18987 - protein, 418 aa, unidentified
  REGION 1..418: note = Human gut metagenome
MVYVLGQDGHPLMPTCRHGKVKRMLKSGMAKVVKKCPFTIQLQYESTTHTQKINLGIDAGSKTIGVSATTESKVLYESEVVLRNDIVELLSGRRALRRSRRNRKTRYRKPRFDNRRRPDGWLTPSIRQKIKTHVTVVENVMKILPVTKIIVETASFDIQKIKNPKIEGAEYQYGEQLDFWNVREYVLFRDGHTCQCCKGKSKDNILNVHHIESRKTGGNAPNNLITLCETCHKAYHKGVITLPKEIHRGMRFRDAAFMGIMRWAFYDRLKELYTPFGVEVINTYGYITKNTRIEHGLPKEHYVDARCISGNPAAKPLGHYYFQKKVRCHNRQIHKNTILKGGIRKRNQAAYLVNGYRLFDKVKYQNQEYFIFGRRSSGFFDIRTLDGTKVNKGSISCKKLQLVEKSKHYLTEQRKVTA

SEQ ID NO: 18988 - protein, 374 aa, unidentified
  REGION 1..374: note = Human gut metagenome
LNYDSGHQTQEISLGIDAGSKHIGVSATTKIKVLYEADVELRNDIVDLLSSRRELRRGRRNRKTRYRQAKFNNRRLGNGWLPPSIRQKIGTHLTVVENICKILPISRIMVETASFDIQKIKNTDIQGAEYQQGDQLGFWNIREYVLFRDNHTCQCCKGKSKDKILNVHHIESRKTGGNAPNNLITLCEICHTGYHKGAVQLPKTVKRGMRFKDAAFKGIMRWAFYEALKQQYEPVALVHNTYGYITKHTRIEHNLPKEHYVDARCISGNPDAFPSGEYYYQKKVRCHNRQIHKLTILKGGIRKQNQATYLVKGYRLFDKVSYQGKGYFVFGRRQSGFFDIRTLSGEKVNKGSLSCKKLKFIATRTYYLTERRAV

SEQ ID NO: 18989 - protein, 279 aa, unidentified; identical to SEQ ID NO: 5082
  REGION 1..279: note = Human gut metagenome

SEQ ID NO: 18990 - protein, 453 aa, unidentified
  REGION 1..453: note = Human gut metagenome
MLMAVAVVSRTGVPLMPTSPYRARKLLASGKAEKYGYDPFTIRLTERETGDTQPVELCMDTGYIHIGVSVKSEKHEYLALQIDTLTDEKKKHEKCREKRRNRRSRKRYRKPRFDNRKRDKGWLAPSLEHKKEIHVRAAERICRVIPVTDITMEMGNFDTQALKAREEGRPLPQGTDYQQGERYGTATLREAVFSRDNYTCLCCGRTMKDGAYFHVHHIQYRSQGGTDRMANLATVCEKCHTPANHQPGGKLYNWKPEIKSFKGATFMTAVRWQMYREIKEKIPDVSIHLTYGAATKERRRALDIEKSHVNDAFVMGCFHPNHRARPELYIKKRRNNRILESFYDARYIDSRDGKKKPGKELFNGRISRNHKKDSENLHKYRLRKVSKGKRSIRKKHYPIQPHDILVYCGRKYETAGCHNLGTGAILLPERRSIAVSKLKIYRYSGGYYKAEFN

SEQ ID NO: 18991 - protein, 545 aa, unidentified
  REGION 1..545: note = Human gut metagenome
VQFAWWLCHPKPSDNIEDVNHETALMLLRIKAGTETFGTAPCGSGPKAEGVSHERKSMNIVSVVTNTNKPLMPTSPYRARKLLSSGKAKIVKHRPFTILLVNRSDGNVQEIEYKSDTGYLHVGISVCSEKREFVREQRDLLPDEREKHNDRRKYRRTRRNRKRYRKARFDNRIGKIRKKEKNKHVWLPPSLDHKVDAQVQLFLRLYQVMPIKRAVFEMGQFDPALMKALEKGEAAPQGIDYQMGERYQIATRRAAVFTRDRYACVFCGRSIKDHAILHVHHIGFWKQDRSNRLDNLATCCEQCHTSENHRPGGILYGVEPKLESLASATYMNVVRFELLQRLKEAAPDVEFHISYGAKTSVIRKQRSISKSHTNDAYCLGQYFPKLRAEEIGFQKIRRNDRILQKFYDAEYLDSRDGTTKKGKELTNGRISRNHMKDHKNLHQYRGKKLSKGRVTIRRGRSSLKTGSLVRFDGEVLTVHGTHRSRKKNKAGHIKVSVNVEFECPSKTGRKSAALSKCQIISRSYNTGWKQIQLRKEEQGRIAAVV

SEQ ID NO: 18992 - protein, 417 aa, unidentified
  REGION 1..417: note = Human gut metagenome
MPCSPAKARLLLKEKKAIVKRRTPFTIQLTIATGEAKQPVTLGVDSGYKHIGLSATTEKAELYASQVELRQDITDLLSARLALRRSRRSRKTRYRAPRFDNRVASKRKGRLAPSVENRIAAHMSRVEAVMRVLPVTAITVETAAFDTQLLKNPDIAGAAYQQGEQLGFWNVREYVLFRDGHVCQHCRGKSKDPILNVHHIESRRTGGDAPNNLITLCETCHKAFHRGEIKLKVRRGKSFKAETFMGIMRWTLLERLKKAHPELRVRNTYGYLTKHKRISHGIAKSHCADAYCIADNLGAKRLEGFFFQKQTRKHNRQIHKLSILKGGLRKKNQAPYEVKGFRLFDKVICKGEEAFIFGRRTSGSFDVRRLDGTRISAGISYKKLRLLEPRTTYLTEFRKEAALPPLHKCRGFRAEFL

SEQ ID NO: 18993 - protein, 444 aa, unidentified
  REGION 1..444: note = Human gut metagenome
MSVLVIGRNGRALMPTNPRKARLLLKKKTASVVCRHPFTIQLLYKTGCATQEGCIGIDTGSQHIGVGITCGDRVILKDEHALRSSMEKRSLLATRAVMRRGRRYRKVRYRKPKWRHHTKRMYFEKANRRGQHWRKVKTTTQSPRLKGWLPPSLQSKCDHHFRIIDRYLKYLPDPITRNLVIEAGRFDMARMNDPTIHGEMYQRGPMYDAENLRAYIFARDNYQCVCCKAKAGTTRKADGTTVKLVAHHILFRSRGATDNPKYIISVCDHCHTTKAHQPGGILYSWMENNKKVARGLRDATFMNILRKRLFARYPQAAFTYGNITAADRKQLRLPKSHANDAVAISLFGKEASTVKNICQTMHYKQIRKSKRSLHEAIPRKGRKNPNTKAVRNKKNTTQVNGFKLWDSVLADGKKLFICSFTGTSAYLIDKNGCYISQPGKTYKQ

SEQ ID NO: 18994 - protein, 552 aa, Streptomyces sp.; identical to SEQ ID NO: 8417

SEQ ID NO: 18995 - protein, 430 aa, unidentified; identical to SEQ ID NO: 6597
  REGION 1..430: note = Human gut metagenome

SEQ ID NO: 18996 - protein, 408 aa, unidentified; identical to SEQ ID NO: 8687
  REGION 1..408: note = Human gut metagenome

SEQ ID NO: 18997 - protein, 408 aa, unidentified
  REGION 1..408: note = Human gut metagenome
MVYVQDIDGKPMMPTTRHGKVRQLLKDNKAVVVNTCPFTIKLTYKTSDYKQEIVLGVDAGTKHVGLSATTKSKELYSSEVILRSDIVDLLSTRRELRRTRRNRLRYRKPRFDNRIKSKRTGWVAPSVRHRIDAHIRVIDNVCSILPISRIIVEVAQFDTQKIKNPNISGNEYQEGNQLGFWNVREYVLTRDGHKCQHCKGKSKDPILNVHHIESRKTGGDSPSNLITLCETCHKEYHKGKIDLRVKRGKSLRDAAVMGIMKWKLYEELRSRYDNVSMTFGYITKYNRIKYGIEKSHISDAFVISKNFNALRLGYHYKVRLVRRHNRQIHKQKVLKGGVKKPNQSSFEVFGFRLFDRVMFEGNCYFIFGRRKSGSFNIRDIDGGNQRDITYKKLKLLRCKRFMIQKETN

SEQ ID NO: 18998 - protein, 424 aa, unidentified; identical to SEQ ID NO: 5075
  REGION 1..424: note = Human gut metagenome

SEQ ID NO: 18999 - protein, 512 aa, unidentified
  REGION 1..512: note = Human gut metagenome
MSTVYVLNKDGKPLMPTTRGGHVRHLLKEQKARVVRAKPFTIQLLYETNDVVQPLYLGIDPGRTNIGVAVVKANGTAVFTAHLETRNKEVPKLMQDRKKARRARRTNGRRCRRQRRAKANGTISKKCVKQDTAQSKNPSKRAKEIGIIKRRLPGYKKDVLCIGIKNKEAKYTNRTRPEGWLTPTANQLLQTHINLVRKMQKFLPISDVVLEVNKFAFMRLDNPNIQKWQYQQGPLYKKESLESAVSEIQEHHCLFCKKPIDHYHHVVPQHKNGSNTIGNIVGLCAKHHDLVHKDSAWEKKLAKKSTGLYKKYGALSVLNQIIPALTNKLSVLFPKHFFVTAGKSTHDYRAAHGVSKDHWLDAYCIACSVLPSNVCDSNINNHMPYVLKQFRRHDRRVLNNENMNRVYTLNNKAVAINRHKAKDQKTVSLEEFRKEHPDDVCKLKVKEHHPTYRNMNRNFPGSVFLVGKQIHVMQGIASSKDGKATKYNDTSATAIAAGKCKFVAKNTGILFV

SEQ ID NO: 19000 - protein, 420 aa, unidentified; identical to SEQ ID NO: 8221
  REGION 1..420: note = Human gut metagenome

SEQ ID NO: 19001 - protein, 438 aa, Thermoanaerobacter sp.; identical to SEQ ID NO: 8125

SEQ ID NO: 19002 - protein, 418 aa, unidentified; identical to SEQ ID NO: 4327
  REGION 1..418: note = Human gut metagenome

SEQ ID NO: 19003 - protein, 415 aa, Parasutterella sp.; identical to SEQ ID NO: 14058

SEQ ID NO: 19004 - protein, 476 aa, unidentified; identical to SEQ ID NO: 13038
  REGION 1..476: note = Human gut metagenome

SEQ ID NO: 19005 - protein, 427 aa, unidentified; identical to SEQ ID NO: 6338
  REGION 1..427: note = IscB polypeptide

SEQ ID NO: 19006 - protein, 475 aa, Blautia sp.; identical to SEQ ID NO: 4128

SEQ ID NO: 19007 - protein, 422 aa, unidentified
  REGION 1..422: note = Human oral metagenome
VVVYVISKDGQPLMPTMRFGKVRRLLRDKKAKVVRRCPFTIKLLYEPSTNVVQECYCGVDTGSKHIGVAVIGNDKVLYKSQTELRSDIKKKMERRKVFRKLRRFRKTRYRKSRFLNRKNSIKKDRLPPSVRHKVQAHIDEIEFCKKILPISGLILEVSQFDTALMKNPSLIDEIVRRWGYQQGFNYGYSSRREAILHRDNYTCQCCGKKNCRLEVHHIKFRRNGGTDDEENLITLCEDCHKGIHAGTVELNKKPKKSKGLKHATHMSIIRSRLLKVYPQAIETFGFVTKANREHLRLPKNHYIDACVIASGGLEFKELDAIFYKRRVSKGDYQLRQGPHSERKIPVGKIQCFRKFDKVKYFGKEYIIKGRMSSGFALLMDIFGNKIDFSYMPRGYKIPKLSNCKRISARRSALCVRVINLHT

SEQ ID NO: 19008 - protein, 501 aa, Desulfotomaculum sp.; identical to SEQ ID NO: 2400

SEQ ID NO: 19009 - protein, 470 aa, unidentified; identical to SEQ ID NO: 2825
  REGION 1..470: note = Human gut metagenome

SEQ ID NO: 19010 - protein, 456 aa, unidentified
  REGION 1..456: note = Human gut metagenome
VWLYQAVYNLGEGFLPSSEERTAFYWLLIYRKEHGIMQYVYVLNKHGEPLMPCSPGKARLLLKQQKACVVKRTPFTIKLLYGSAGYKQPITLGVDAGSKHVGLSASTEKRELYREEFTPRNDVVDLLSTRRQNRRSRRNRKTRYRAPRFDNRVHSKHKGWLAPSVEVKIQEHITVIKRICRILPITLVRVETAEFDTQRLKAMLEGKPLPVGTDYQLGEMYDEYNVRQYVLKRDHYTCQCCGAHTTTKKTVKLHVHHLESRKVGGNAPSNLITLCTTCHDALHKGKVSLDGKERGKPLRDAAFMGIMRKTLMARLRDELSIPVQGTYGYITKMRREQNDIKKSHVNDARCISKHPLAEPCSVCYRTKAIRHHNRQTHKANFSKGGTRQRSQMPYVVEGYRLWDKVLYKGQECFVSGRRASGSFTLKKLDGTRISKGVTFKKLRLLETATNYLIERM

SEQ ID NO: 19011 - protein, 424 aa, unidentified; identical to SEQ ID NO: 3434
  REGION 1..424: note = Human gut metagenome

SEQ ID NO: 19012 - protein, 462 aa, unidentified; identical to SEQ ID NO: 9356
  REGION 1..462: note = Human gut metagenome

SEQ ID NO: 19013 - protein, 434 aa, Moorena sp.; identical to SEQ ID NO: 8083

SEQ ID NO: 19014 - protein, 409 aa, Bacillus sp.; identical to SEQ ID NO: 17251

SEQ ID NO: 19015 - protein, 451 aa, unidentified
  REGION 1..451: note = Anaerobic digester metagenome
MWTYHYFVVSYYSLRRVNVVFVISKEGKPLMPTKNHAKVRILLKHKKAKVIRRKPFTIQLLYETTTYTQPITLGIDSGYSYIGFSAITEKEELICGEVKLLQGISERLKERAMYRRQRRSRLRYRKPRFDNRKRHNDWLAPSIQHKFDSHIRFINFLKKILPVTDVVIEVANFDTHKLKNPDVEGIGYQQGEQKDFYNLREYILYRDNYKCQLCGREDLPLEVHHIGFWKQDRTNRPSNLITLCIKCHTPKNHQENGKLWGLEPILKPLKEATFMSTVRWKLVNILNCKYTYGYITKFKRVALGLEKTHYNDAFCIAGGINQARTKPIIFEQIRRNNRSLEKFYDAKYIDIRTGKVATGQELFCGRRTRNKNYNTENLRKYRGQKISKGQRRIRTQKYFCQPKDIVIYNGKKYVVKGVQNKGNYIKLEKLNKPVKVSLVKPYEFRKGFCVV

SEQ ID NO: 19016 - protein, 512 aa, unidentified; identical to SEQ ID NO: 5824
  REGION 1..512: note = gut metagenome

SEQ ID NO: 19017 - protein, 450 aa, Clostridium sp.; identical to SEQ ID NO: 9104

SEQ ID NO: 19018 - protein, 423 aa, Moorena sp.; identical to SEQ ID NO: 3612

SEQ ID NO: 19019 - protein, 414 aa, unidentified
  REGION 1..414: note = Human gut metagenome
MPCSPAKARLLLKEKKAIVKRRTPFTIQLTIATGESKQPVTLGVDAGYKHVGLSASTEKAELYASEVELRQDVSDLLSARRALRQSRRNRKTRYRAPRFNNRLRTKRKGWLAPSVENRINAHLSRIEAVLRLLPVTKISVETASFDMQLLKNPDIAGKEYPEGEQLGFWNVREYVLFRDRHVCQHCYGRSKDPVLNVHHLESRRTGGDSPDNLITLCETCHKALHRGDITLKAKRGKSFRAEAFMGIMRWEVHNRLRALHPGIEVSNTYGYRTKHARIANGIAKSHCADAFCIAGNLGAERLCEFFFQKQTRRNNRQIHKLSILKGGIRKRNQAPFEVKGFRLFDKVACQGEEGFIFGRRSSGFFDVRKLDGTRISAGISYKKLHLLEKRQTYLIEIRKEEAFPPLPEGRGLRA

SEQ ID NO: 19020 - protein, 406 aa, unidentified; identical to SEQ ID NO: 2752
  REGION 1..406: note = Human gut metagenome

SEQ ID NO: 19021 - protein, 412 aa, unidentified; identical to SEQ ID NO: 18030
  REGION 1..412: note = Human gut metagenome

SEQ ID NO: 19022 - protein, 477 aa, unidentified; identical to SEQ ID NO: 5307
  REGION 1..477: note = Human gut metagenome

SEQ ID NO: 19023 - protein, 407 aa, Methanohalophilus sp.
MYVFVLNRNKQPLMPTNPAKARILLKSGKAKVVRRNPFTIKLLYSTSDYTQPCLAGMDTGSNRIGCAVMTNNKVVYQSEITVRNDVSKKMQQRAMYRRTRRARKTRYRPARFNNRRNSRKFNRLPPSIRSKIESHLREHRFIESILPVSKWIVETASFDIHKIINPNVTGTEYQNGNLKGFYNVKSYVLNRDNYTCQHCKGKNKDNQLQCHHIKFRSNGGSDTPENLITLCKTCHEDLHDGKFSITKQQKVTKHATEVGIVKSQLIKSNWNFKKTFGYETKYKREQVLNLPKTHYNDAVAICCNDKTQSIHKDNIVYFKKHVSKGDYQQRKGKRSEKTIPTGKLHGIRKFDLIETIKGIGFVKGKRTSGYFSIMDIFGNIIHSSVNVKKECKRVSARTTTITQKVTI

SEQ ID NO: 19024 - protein, 453 aa, unidentified
  REGION 1..453: note = Human oral metagenome
LDTVAVISASGKKLMPTNSYRARRLLKSRRAVIHKYRPVFTIKLVDRTNGYTQPIEYKCDTGYQNIGISICSDTKEFVNEQRDLLKDEVKKHSDSRRYRRTRRNHLRYRKKRFDNRRGMISRDGFAPSIRNKRDVHVRLYEEYYKIFPIAKAVFEMGQFDTQVLKAIEAGLPVPKGADYQRGEQYGYATLREAVFARDDYKCICCGKSAIKDGVKLRIHHIGYLSGDRSNRMANLGSVCENCHTPNNHKYGGKLYNLKPKLKELKGATFMTTVRYSMIKNLKAATPNVDIKVTYGAATKLARKDLNVRKTHSNDAYCMGEFHPKHRSDFKHYKKCRRNNRVLSRFYDAKYRDLRDGSTKTGSQLSCGRTNRKISRHTKLDERIYRAHKISEGRISTRRQHYSLRPGDKVLYDGKVYFAKGVQSNGTSIKLANGKVCPLKKVNILQHCNAWAII

SEQ ID NO: 19025 - protein, 557 aa, unidentified; identical to SEQ ID NO: 3108
  REGION 1..557: note = Human gut metagenome

SEQ ID NO: 19026 - protein, 424 aa, unidentified; identical to SEQ ID NO: 3232
  REGION 1..424: note = Human gut metagenome

SEQ ID NO: 19027 - protein, 424 aa, Moorena sp.; identical to SEQ ID NO: 2430

SEQ ID NO: 19028 - protein, 275 aa, unidentified
  REGION 1..275: note = Human gut metagenome
KGSLENAVSEMQEHHCLFCEKPIEHYHHVVPKSENGSNTIANIVGLCTEHHNLVHKDATWQKKLAKEKVGLVKKYSALSVLNQIIPALTKEMNSLFPKHFFVTNGKSTYDYRTAHGVSKDHWLDAYCIACSVLPNDVCDSNINSHVPYELKQFRRHDRRVLHKANMSRVYTLNGKTVATNRHKAIKQTTDSLEEFRQSHPGDVCKLKVKEHHPAYRNLNRNYPGSVFLVDGQVHVMQGVSGSHNGKADGYYNTNGNAYPYYKCKFVVKNEGIVFA

SEQ ID NO: 19029 - protein, 423 aa, unidentified; identical to SEQ ID NO: 4062
  REGION 1..423: note = Human gut metagenome

SEQ ID NO: 19030 - protein, 431 aa, unidentified; identical to SEQ ID NO: 6230
  REGION 1..431: note = Human gut metagenome

SEQ ID NO: 19031 - protein, 460 aa, Fischerella sp.; identical to SEQ ID NO: 9149

SEQ ID NO: 19032 - protein, 411 aa, unidentified; identical to SEQ ID NO: 3917
  REGION 1..411: note = Human gut metagenome

SEQ ID NO: 19033 - protein, 472 aa, unidentified; identical to SEQ ID NO: 4432
  REGION 1..472: note = Human gut metagenome

SEQ ID NO: 19034 - protein, 457 aa, unidentified; identical to SEQ ID NO: 16359
  REGION 1..457: note = Human gut metagenome

SEQ ID NO: 19035 - protein, 424 aa, Microcoleus sp.; identical to SEQ ID NO: 8723

SEQ ID NO: 19036 - protein, 415 aa, unidentified; identical to SEQ ID NO: 5047
  REGION 1..415: note = Human gut metagenome

SEQ ID NO: 19037 - protein, 427 aa, unidentified
  REGION 1..427: note = metagenome
LRVFVLNKRGKPLMPCSPAKARLLLKEKKAIVVRRTPFTIQLTIATGESKQPVSLGVDAGYKHVGLSASTEKAELYASEVELRKDITDLLSARRALRQSRRNRKTRYRAPRFDNRIRTKRKGWLAPSVENRINAHLSRIEAVLRLLPITKITVETASFDMQRLKNPDISGKEYQEGEQLGFWNVREYVLFRDGHVCRHCHGRSKDPVLNVHHLESRRTGSDSPDNLITLCETCHKALHRGEITLKAKRGQSFRAQAFMGIMRREVLNRLKASYPELKVHETYGYLTKHARIANGIVKSHGADAFCIAGNLGAERLGEFFFQKQTRRNNRQIHKLSILKGGIRKRNQAPFEAKGFRLFDKVACQGEEGFIFGRRSSGSFDVRKLDGTRISAGISCKKLRLLERRRTYLTEIRKEEALPPLPEGRGLRA

SEQ ID NO: 19038 - protein, 456 aa, unidentified; identical to SEQ ID NO: 7816
  REGION 1..456: note = Human gut metagenome

SEQ ID NO: 19039 - protein, 413 aa, unidentified
  REGION 1..413: note = Human gut metagenome
MTSYSFVLDANGKQLAPTKEPKAWFLIRKKRAALVSKYPMVIQLKKEIPEKEICQDEIRCGIDDGGLHVGIALVQKCKTKNKVVFKGTIEQRNDVKHLMEVRRNYRRYHRYHKRYRQARFDNRKSSKREGRIAPSILQKRQATIRVIHWLNKWINITNYWLEDVSVDIRALTDGYQSYRWQYQKSNRLDENIRKAAILRDDGKCMECGKSNCRLEVHHIKPRRRNGSNTLDNLITLCESCHQKTEGQEELYMDRYFSLLKSSDNKNLNYAQHVMIGKMWLRKQLSGLGVLYLTSGGDTANKRIDWNIEKSHANDAVCITDLRPDTCDVKEWTMKPMRRQSKAKTDHVLGIHHRDLVEYTFKNGETHRGYVTALYPEQKAINFQSPTKHCKKVNARKCKLLWKYSKIYWFENAS

SEQ ID NO: 19040 - protein, 501 aa, Moorena sp.; identical to SEQ ID NO: 7018

SEQ ID NO: 19041 - protein, 420 aa, Bacillus sp.
MHAMFVYVLNQHGQPLMPCKPRKARLLLKQKKAKVVKRTPFTIQLLHGSSGYKQKISLGVDAGTKKVGLSATTEKEVLFEGEAELRTDIQKLLATRREFRRSRRNRTTRYRKPRFENRKKPKGWLAPSVQHKVNSHIKLIQLMYDILPITELTIEVAQFDTQKLKNPTIHGDDYQKGEQLGFWNVREYALFRDKHTCQKCKGRSKDKILNVHHIESRKTGGDRPDNLITLCKTCHDEIHRLKLEHTIKRERTSLRDATQMTVMRWFIYNRVKELYPHARLTYGYLTKNTRITNTLPKSHIVDARCISGNPLAKQNDYVFHLKFVRKNNRQLHKATIRKGGVRQNNKAERYVKGFQLFDKVLYEGKESFIFGRRKTGYFDLRLLDGTKIHASASYKKLKRVECAHTLLIERREGQFLPQIN

SEQ ID NO: 19042 - protein, 406 aa, unidentified; identical to SEQ ID NO: 2752
  REGION 1..406: note = Human gut metagenome

SEQ ID NO: 19043 - protein, 430 aa, Moorena sp.
MQNYVFVIDTNKQPLNPISPKKARRLLDKGKAAVFRMYPFTIILKTAVDNPTISPCQLKIDPGSRFTGFALVQNNQVIWAMELEHRGGLIKKKLEARSAVRRGRRNRHTRYRKPRFLNRRRSEGWLAPSLEHRVLTIETWVKRLIKFCPINEIWVERVKFDTQKMQKPEISGVAYQQGELAGYEVREYLLEKWGRECAYCGKQNVPLQIEHIHPKSKGGSNRVSNLCLACEKCNQRKGNKPIEEFLKKKPSLLQKIKSKAKQPLLDAAAVNTTRNKLVKVLRSVKPVVTGTGAQTKYNRTRLGFSKQHWIDAACVGDIEMLTLKTSQPLLVTCKGPGGRQKAALNKYGYPVRHNPLKPIKGWITGDIAKHQKLGIGKVTPRTKGSFGFTPLGMKGYKSCNPQDISAIHRKDGYTYSFCELLPESSRKWSS

SEQ ID NO: 19044 - protein, 381 aa, unidentified
  REGION 1..381: note = Human gut metagenome
MTALEERLSKTEYIYVLGFDGKPQMPTRRKRHVLKLLKTGRARIAEDIPFTIQLTYRNAPVLQPVTLAEDPGRTNIGAAVLSPLGDLLFAAVIETRNKEIKKLMADRKKSRQASRRGERKARQRLAKRYGSMLKSGMIMRKLPMYAADKFVTCKFIRNTQARFCNRKRCPDWITPTVQHLVQTHLNIIRKISRYLPVTDIAIEVNRFAFMHMENPKAVGVDFQNGPLKGYGDVKEAIRTQQHGKCLMCKKPIGHFHHIVPRSRGGSDTIQNLAGLCTEFHTKVHTDTAFRKDFDEKKSGQLKKYGALSALNQAVPFICKKLLEEYGEEHVHFCRGLDTSLIRTALGFEKTKKNQMHEVDAYCIGLAALEVNEVKTPAFDHT

SEQ ID NO: 19045 - protein, 515 aa, unidentified
  REGION 1..515: note = Human gut metagenome
MTALEERLSKTEYIYVLGFDGKPQMPTRRKRHVLKLLKTGRARITEDIPFTIRLTYRNVPVLQPVTLAEDPGRTNIGAAVLSPLGDLLFAAVIETRNKEIKKLMTDRQKSRQASRRGERKARQRLAKRYGSMVKSGMVMRKLPMYAADRFVTCKFIRNTQARFCNRKRCTDWITPTVQHLVQTHLNIIRKISRYLPVTDIAIEVNRFAFMHMENPEAMGVDFQNGPLKGYGDVKEAIRTQQHGKCLMCKKPIAHFHHIVPRSRGGSDTIQNLAGLCTEFHTKVHTDTAFRKDFDEKKSGQLKKYGALSALNQAVPFICKKLLEEYGEEHVHFCRGLDTSLIRTALGFEKTKKNQMHEVNAYCIGLAALEVNEVAAPAFDHTFQIRQFRRQDRSIIHHQTGRSYYQGKEKVAQNRKPGFEQKTTALSQWYKEQVRIHGEKEAEKLRSQLRVEKSCRHYNDMDRFLPGAVFLYEGKRYVLSGRITNGKYLRACGQGMKNFPAAECTFIRHNAGLVFI

SEQ ID NO: 19046 - protein, 319 aa, unidentified
  REGION 1..319: note = Human metagenome
VEQNLRVFVLNKRGKPLMPCSPAKARHLLKEKKAIVVRRTPFTIKLTIATGESKQPVSLGVDAGYKHVGLSASTEKAELYASEVELRQDITDLLSARLALRRSRRNRKTRYLAPRFDNRIRTKRKGWLAPSVENRINAHLSRIEAVLRLLPVTKITVETASFDMQLLKNPDIAEKEYQEGEQLGFWNVREYVLFRDGHVCQYCHGRSKDPVLNVHHLESRRTGGDSPGNLITLCETCHKELHRGEITLKAKRGQSFRAETFMGIMRWEVLDRLKASHPKLEVQNTYGYRTKHARIVNGIAKSHCADAFCIAGNLGAERL

SEQ ID NO: 19047 - protein, 422 aa, unidentified
  REGION 1..422: note = Human gut metagenome
LNKRGKPLMPCSPAKARLLLKEKKAIVVRRTPFTIQLTIATGESKQPVSLGVDAGYKHVGLSASTEKAELYASEVELRKDITDLLSARRALRQSRRNRKTRYRAPRFDNRIRTKRKGWLAPSVENRINAHLSRIEAVLRLLPITKITVETASFDMQRLKNPDISGKEYQEGEQLGFWNVREYVLFRDGHVCRHCHGRSKDPVLNVHHLESRRTGSDSPDNLITLCVTCHKALHRGEITLKAKRGQSFRAQAFMGIMRREVLNRLKASYPELKVHETYGYLTKHARIANGIVKSHGADAFCIAGNLGAERLGEFFFQKQTRRNNRQIHKLSILKGGIRKRNQAPFEAKGFRLFDKVACQGEEGFIFGRRSSGSFDVRKLDGTRISAGISCKKLRLLEKRRTYLTEIRKEEALPPLPEGRGLRA

SEQ ID NO: 19048 - protein, 536 aa, unidentified; identical to SEQ ID NO: 2718
  REGION 1..536: note = Human gut metagenome

SEQ ID NO: 19049 - protein, 446 aa, Pseudomonas sp.
VAVYVLDKTGTPLMPCSEKRARLLLERGRARIHRQVPFVIRLVDRRQADSALQSLTLKFDPGSKFTGIALVRQKGQRVSVLSLMELAHRGAAIRQAMQQRAAFRRRRRGQNLRHRTPRFDNRTRPEGWLPPSLRHRLDTTLGWVGRMRNWAPISDLAVERVKFDMQAMQNPEISGVKYQQGELAGYEVREYLLEKWGRCCAYCDAENTPLEIEHIVPRSAGGSDRVPNLTLACRPCNQRKGNQPVEVFLKARSELLARIKAKAKVPLRDAAAVNATRNALFRALLDTGLSVTTGTGAQTKFNRRCLGLPKTHALDAASVGEIRAIEHWQRPTLAIKATGRGEYQRTRLTAHGFPRGYLTRQKRHFGFQTGDQVRAEVPTGKKAGTHQGRVAVRKTGSFNIQTPDGVVQGIHHRHCTLIQRADGYAYSHIQTDSPQSQKEAARAEVR

SEQ ID NO: 19050 - protein, 452 aa, Lactobacillus sp.
MSEIQKVNYIYVVDSNGTPLMPTSRLGMVRRWLKTGQARWFGNSRKIIQFVRPVTTNTQELTLGVDAGFHLGLAVVGNKREYYASESLRKSEKDRITSRRELRRTRRNRLRYRQARFDNRRRKASWLAPSVQHRLDFTIKEIKRLYTFLPIAKLVVEVAPFDNQKLLNPNIKTWEYTHGKTHGFKTIKDYLLARDNYRDALDGKQYPASQLRVHHLVQRKDGGTDQPDNLVLLSDINHTQANHNNGILAKLRENRQKTLDYRGAYFMNILATRLSDYFDNYTTTQGYLTANLRQKYQLEKSHLNDAFIIAGGTDTTLRTNNVYSRQKLRNNNRVLQKFYDAKYIDSRDNKTKPGKELSSGRTRRSRELNYDNLKQFRKTKVKKGRVSIRRNHYQLRPHDVVLNTKTNKIETITGVQNSGTVIKFQTGKTCSIKNVVSLYHVNGMLEKKIENI

SEQ ID NO: 19051 - protein, 409 aa, unidentified; identical to SEQ ID NO: 8791
  REGION 1..409: note = Human gut metagenome

SEQ ID NO: 19052 - protein, 512 aa, unidentified
  REGION 1..512: note = Human gut metagenome
MSTVYVLNKDGKPLMPTTRGGHVRHLLKEQKARVARTKPFTIQLLYETDDAVQPLYLGIDPGRTNIGIAVVKADGTAVFTAHLETRNKEIPKLMQDRKKARRARRTNGRRCRRQRRAKANGTISKKCVKQTTAQNGSVSKRAKDIGVIKRRLPGCEKDVLCIGIKNKETKFTNRTRPEGWLTPTANHLLQTHINLVKKIQKFLPISDVVLEVNKFAFMRLDNPNIQKWQYQQGPLYQKGSLENAVSEMQEHHCLFCDKPIDHYHHVVPQSENGSNTIANIVGLCAEHHNLVHKDAAWQKKLAEEKVGLNKKYGALSVLNQIIPALTNKLSVLFPKHFFVTAGKSTHDYRATHGVSKDHWLDAYCIACSVLPSNVCDSNINNHMPYELKQFRRHDRRVLNNENMNRVYTLNNKAVAINRHKAKDQKTVSLEEFRKEHPDDVCKLKVKEHHPTYRNMNRNFPGSVFLVGKQIHVMQGIASSKDGKATKYNDTSATAIAAGKCKFVAKNTGILFV

SEQ ID NO: 19053 - protein, 237 aa, unidentified; identical to SEQ ID NO: 5189
  REGION 1..237: note = Human gut metagenome

SEQ ID NO: 19054 - protein, 470 aa, unidentified; identical to SEQ ID NO: 2883
  REGION 1..470: note = Human gut metagenome

SEQ ID NO: 19055 - protein, 423 aa, Parasutterella sp.; identical to SEQ ID NO: 9664

SEQ ID NO: 19056 - protein, 453 aa, unidentified
  REGION 1..453: note = Human gut metagenome
MSVAVVSKTGMLLMPTSEYRARKLLKSKKAIIHGYHPFTIQLTERGTGYIQPVELCMDTGYIHIGTSVKSEKHEYLGEQIDTLTDERRKHDACRMYRRQRRNRKRYRQPRFNNRERDDGWIAPSLEHKKTIHIQAISRICKVMPVTDITLEMGNFDTQVLKAREEGKPLPQGLDYQHGERYSVTTLREAVFLRDGYTCQCCGRTIKDGAILHAHHVVYRSQGGTNRISNLITVCDKCHTPANHKPGGKLYGWKPKVASFKGATYMTTIRWKLYNEVKVLFPDIDIHIAYGAETKERRRAFDITKSHVNDAFVMGQFHPKHRSKPVCYKKKRRNNRCLEKFYDAKYIDSRDGKKRTGQELFNGRISRNRKKDSKNLHQYRRQKISAGKRAIRKQHYAIQPHDIVIFNGEKFETSGCHNNGTRVILLPQKKSVAIKKLNIYRYAGGYFKSAFNQK

SEQ ID NO: 19057 - protein, 418 aa, unidentified; identical to SEQ ID NO: 4327
  REGION 1..418: note = Human gut metagenome

SEQ ID NO: 19058 - protein, 512 aa, unidentified
  REGION 1..512: note = Human gut metagenome
MSTVYVLNKDGKPLMPTTRGGHVRHLLKEQKARVVRAKPFTIQLLYETNDVVQPLYLGIDPGRTNIGVAVVKANGTAVFTAHLETRNKEVPKLMQDRKKARRARRTNGRRCRRQRRAKANGTISKKCVKQDTAQSKNPSKRAKEIGIIKRRLPGYKKDVLCIGIKNKEAKYTNRTRPEGWLTPTANQLLQTHINLVRKMQKFLPISDVVLEVNKFAFMRLDNPDIQKWQYQQGPLYQKGSLENAVSEMQEHHCLFCDKPIDHYHHVVPQSENGSNTIANIVGLCAEHHNLVHKDAAWQKKLAEEKVGLNKKYGALSVLNQIIPALTNKLSVLFPKHFFVTAGKSTHDYRAAHGVSKDHWLDAYCIACSVLPSNVCDSNINNHMPYELKQFRRHDRRVLNNENMNRVYTLDNKAVAINRHKATEQEAASLEEFRKEHPNDVCKLKAKEHHPTYRNMNRNYPGSIFLVGKHVHIMQGIAGSKDGKATTYKDSNANSITASKCKFVAKNSGILFV

SEQ ID NO: 19059 - protein, 413 aa, unidentified; identical to SEQ ID NO: 14501
  REGION 1..413: note = Human gut metagenome

SEQ ID NO: 19060 - protein, 512 aa, unidentified; identical to SEQ ID NO: 3720
  REGION 1..512: note = Human gut metagenome

SEQ ID NO: 19061 - protein, 442 aa, unidentified; identical to SEQ ID NO: 2903
  REGION 1..442: note = Human gut metagenome

SEQ ID NO: 19062 - protein, 408 aa, unidentified
  REGION 1..408: note = metagenome
MVYVQDIDGSPLMPTTRHGKVRRLLKSKKATVVNLCPFTIRLLYDTTGYKQEITLGVDAGTKHVGLSATTKSKELYASEVILRSDVVDLLSTRRELRRARRYRLRYRKPRFNNRVKYKKDKWIAPSIRQKIDSHIRIIGFVYSILPVSKLIIEVAQFDTQKIKNPEISGKEYQEGEQLGFWNVREYVIARDGHKCQYCKGKSKDPILNIHHIESRKTGGDSPSNLITLCETCHKEFHKGNIKLKVSRGKSLRDAAVMGIMKWKLYEELRSRYDNVSMTFGYITKYNRIKYGIEKSHISDAFVISKNFNALMLEYHYKVRLIRRHNRQIHKQKVLKGGVKKPNQSSFEVFGFRLFDRVMFEGNYYFIFGRRKSGSFNIRDIDGGNQRDVTYKKLKLLRCKRFMIQKEMN

SEQ ID NO: 19063 - protein, 353 aa, unidentified; identical to SEQ ID NO: 17570
  REGION 1..353: note = Human gut metagenome

SEQ ID NO: 19064 - protein, 501 aa, Moorena sp.; identical to SEQ ID NO: 9337

SEQ ID NO: 19065 - protein, 440 aa, Clostridium sp.; identical to SEQ ID NO: 10253

SEQ ID NO: 19066 - protein, 431 aa, unidentified
  REGION 1..431: note = Human gut metagenome
MPNKVYVINKHGRPLMPCSPAKARHLLDAGKAKVKKRTPFTIQLVYGSSGYTQEVILGVDAGSKTIGVSASTKKEELFAANVIPRNDVVDLLSTRREFRRARRNRKTRYRKPRFDNRVRSKHKGWLAPSVEVKIQEHITSIKRVCRILPVSKVVIETAEFDLQLLKAIADGKPVPQGEDYQKGEMYGHYNVRQYVLWRDDYTCQCCGAHATKKKEVRLHVHHLESRKVGGDAPDNQVTLCESCHEKLHKGLITAKDFKKRKRRSTRDATFMGIMRKTLMQMLCSELPIPVVKTRGYITKATREKLLVLPKSHTNDALAIAQGKRGFNVGYLPEIAQIDKIYTIRPVRHHNRQLHKATILKGGIRKSNQTEKYVFGYRLFDKVQFNGQDCFIWGRRTTGIFTIKTINGKMIKDGISFKKLKPVEKSTSYLIA

SEQ ID NO: 19067 - protein, 494 aa, unidentified; identical to SEQ ID NO: 11168
  REGION 1..494: note = Human gut metagenome

SEQ ID NO: 19068 - protein, 420 aa, unidentified
  REGION 1..420: note = Human gut metagenome
MQYVYVLNKHGEPLMPCSPRKVRLLLKQKKACVIKRTPFTVKLLHGSAGYKQPVTLGVDAGSKHIGISATTEKHELYREEATPRNDVVDLLSARRAFRRSRRNRKTRYRAPRFNNRVHSKHKGWLAPSVEVKIQEHITLIKHVFRILPVTLVRVETAEFDTQRLKAMLEGKPLPVGTDYQLGEMYDEYNVRQYVLKRDNYTCQCCGAHSTKTKGVKLHVHHIETRRTGGNAPNNLITLCKACHKALHAEKVTLDGKKRGKPLKDAAFMGIMRKTLMERLRKELKIPVQGTYGYITKYLREKNGIPKSHTNDARCISKNLLAIPCDTCYYTKAVRHHNRQLHKATILKGGIRKANQAPYIVKGYRLWDKVAYNGTECFITGRRTSGYFALKKLDGTVVSNSISYKKLRLLEAATNYITERK

SEQ ID NO: 19069 - protein, 307 aa, unidentified
  REGION 1..307: note = Human gut metagenome
MQLEDPAICGVDFQTGPLKGYDDRDAAVYDLQDGKCLMCKHEITQYHHIVPRSRNGSNTIGNIAGLCDQCHDRVHKDADFAEQMKEKKEGMDKKYGALSVLNQAIPFICKQLETEFGRGHVHYCTGRETSLVRQSTGYQKTRKNQLHEVDAWCIGALALAEIPENVPDFKEIHLIRQFRRQDRSLVNAQTERVYKLGGKMVAKNRKKRTGQEIYALEDWYNRQVETYGKQEADCMRSRLKITKSRRRYNNPNRMMPGAVFLYEGVRYVMRGQHSKGAYLQAVGMENRDFPVRKCKILTRNTGLVFVS

SEQ ID NO: 19070 - protein, 450 aa, Clostridium sp.; identical to SEQ ID NO: 10358

SEQ ID NO: 19071 - protein, 307 aa, Anoxybacillus sp.; identical to SEQ ID NO: 11077

SEQ ID NO: 19072 - protein, 448 aa, unidentified; identical to SEQ ID NO: 8365
  REGION 1..448: note = Human gut metagenome

SEQ ID NO: 19073 - protein, 490 aa, unidentified; identical to SEQ ID NO: 3566
  REGION 1..490: note = Human gut metagenome

SEQ ID NO: 19074 - protein, 476 aa, unidentified
  REGION 1..476: note = Human gut metagenome
LKASGAEGVSHPSLPGKYKYKGGQLMSVAVISKTGERLMPTSEYRARKLLKSGKAIKHSYHPFTIQLTERETGDIQPIELCMDTGYIHIGISVKSEKHEYLAEQIDTLTDERGRHDACRMYRRQRRSRKRYRQARFNNRKRDQGWIAPSLEHKKKIHIQAISRINNVMPITDITLEMGNFDTQVLKAKEEGKPLPHGADYQHGGRYGIATLREAVFSRDGYKCQCCGRTIKDGVILHIHHIKYRSQGGTNSMSNLATVCDKCHTPKNHKPGGKLYNWKPKLSSFKGATFMTAIRWQLYNEVKALFPDIDIHITYGATTKERRRELDIDKSHVNDAVVMGQFHPKHRIKAVLYKKKRRNNRCLEKFYDAKYIDSRDGKKRSGQELFNGRINRNHKKDSENLHQYRLQKVTAGKRAVRKQHYKIQPHDTVIYENRKRETAGCHCNGTRMMLLPDKKSASIKKVKIYRYAGGYFKSAFN

SEQ ID NO: 19075 - protein, 457 aa, unidentified
  REGION 1..457: note = Human gut metagenome
MDAVAVISASGKPLMPTNPVRARKLIKKGKAVIYKYCPLFTIRLTERTDGDIQTIEYCCDTGYQHIGLSIKSRKHEYVNEQRDLLPNETERHNDSRKYRKARRRRKLRHRACRRDNRHDNQICKDGYAPSIRNKRDQHISLYRSYTEILPVERAVFEMGQFDTQVLKAIEKGEPLPQGKDYQHGERYGYATLREAVFARDDYTCICCGKNAFKDKRILCVHHLGFRIGDRTNGLANLATVCTKCHTPKNHQPKGKLYNLKPELKDFKGATFMTMVRWDMLDKLKAVSKGIQVDVTYGAATKEARRDLKIKKSHANDAYCMGSFYPSHRTDLKRYEKCRRNNRVLSKFYDATYIDIRDGKKKKANALGCNRTKRRESRRSEKNERIYRGEKISKGRIVLRTRRAVIRPGDIVYVGKKKYIVASSKNLGAQLKLADGSLLTTSKVTKIIHCGGWKRVTL

SEQ ID NO: 19076 - protein, 414 aa, unidentified
  REGION 1..414: note = Human gut metagenome
MVYVINKQGQALMPTERFGKVRRLLKNSLAHVVCRIPFTIQLDYDTTDYTQPVSLGIDAGSKHIGISATTSEKELYAADVELRNDIVDKLSTRRELRRTRRSRLRYRKARFNNRVSSKRKGWLAPSVENKIQTHLTVVEKIHKFLPITNIVVETAAFDIQKIKNPSISGSGYQQGEQLDFFNVREYVLFRDNHICQHCKGKSKDKVLNVHHIESRKTGGDSPNNLITLCETCHKAYHRGEFELNVKRGKSFRDSAFMGIMRWGFYDRLKNIYPNVSMTFGYITKNARITNNLPKDHYVDARCISGNPVAKPLGYYFYQKKVRCQNRQIHKANFLKGGRKKLNQAPFLVKGFRLFDLVEYQKELYYIFGRRSSGSFDIRKLDGTKVNKGSINCKYLRLVDTRKSILIEKRTQVNL

SEQ ID NO: 19077 - protein, 515 aa, unidentified
  REGION 1..515: note = Human gut metagenome
MTALEEKLSKTEYIYVLGFDGKPQMPTRRKRHVLKLLKTGRARIAEDIPFTIRLTYRNAPVLQPVTLAEDPGRTNIGAAVLSPLGDLLFAAVIETRNKEIKKLMADRQKSRQASRRGERKARQRLAKRYGSMVKSGMVMRKLPMYAADKFVICKFIRNTQARFCNRKRCPDWITPTVQHLVQTHLNIIRKISRYLPVTDIAFEVSRFAFMHMENPEAIGVDFQNGPLKGYGDVKEAIRTQQHGKCLMCKKPIAHFHHIVPRSRGDSDTIQNLAGLCTECHTKVHTDTAFRKDFDEKKSGQLKKYGALSALNQAVPFICKKLLEEYGEEHVHFCRGLDTSLIRTAFGFEKTKKNQMHEVDAYCIGLAALEVNEVETPAFDHTFQIRQFRRQDRSIIHHQTGRSYYQGKEKVAQNRKPGFEQKTTALSQWYKEQIRIHGEKEAEKLRSQLRVEKSCRHYNDMDRFLPGAVFLYEGKRYVLSGRITNGKYLRACGQGMKNFPAAECTFIRHNAGLVFI

SEQ ID NO: 19078 - protein, 442 aa, unidentified
  REGION 1..442: note = Human gut metagenome
MSTTVFVLDKKHRPLMPCRPARARRLLRAGRARVVKRFPFVIRLVDRTVEQSEVQPVLIKLDPGSRETGAAVVRDDGKKRHHALAFFVIKHRGGAIRDALKARSAFRRRRRSQNLRCRSPRFLNRVKPKGWLPPSLRHRVETTLSFVRRMCRYLPVSGIAAELVKFDSQKLQTPEVSGIEYQQGTLFEYEVREYLLEKFGRKCVYCGAEGVPLNIDHVVPRAKGGSNRVSNLVLACVSCNQKKGARSLEDFLKGKPEVLARVRRELKTPLRDAAAVNATRWVLFNELKATGLPVETGSGALTKFNRHAFGVEKEHWLDALCVGRLNGAVTRKGLNVLEIRCMGRGSRQRTRLTKYGFPRGYLMRQKCVHGFATGDMVEANVPKGKKAGLWRGRVAVRVSGSFNIQTPKGVIQGVGWKHCRLISHNDGYGYAWLGHAPHSSPA

SEQ ID NO: 19079 - protein, 515 aa, unidentified; identical to SEQ ID NO: 5111
  REGION 1..515: note = Human gut metagenome

SEQ ID NO: 19080 - protein, 419 aa, unidentified; identical to SEQ ID NO: 10960
  REGION 1..419: note = Human gut metagenome

SEQ ID NO: 19081 - protein, 428 aa, unidentified; identical to SEQ ID NO: 14557
  REGION 1..428: note = Candidatus Thiomargarita nelsonii

SEQ ID NO: 19082 - protein, 312 aa, unidentified
  REGION 1..312: note = Human gut metagenome
MPCSPAKARLLLKEKKAIVKRRTPFTIQLTIATGETKQPVSLGVDAGYKHVGLSASTEKAELYASEVELRQDITDLLSARRALRQSRRNRKTRYRAPRFDNRIRTKRKGWLAPSVENRINAHLSRIEAVLRLLPVTKITVETASFDLQLLKNPDISGKEYQEGEQLGFWNIREYVLCRDGHVCQHCYGRSKDPVLNVHHLESRRTGGDSPGNLITLCETCHKALHRGEITLKAKRGQSFRAEAFMGIMRWEVLNRLKASHSELKVHNTYGYLTKHARIENGIAKSHGATRLLNNIKHNAKKLQKQFVFPYLL

SEQ ID NO: 19083 - protein, 443 aa, Shewanella sp.; identical to SEQ ID NO: 16837

SEQ ID NO: 19084 - protein, 414 aa, unidentified; identical to SEQ ID NO: 14692
  REGION 1..414: note = Human gut metagenome

SEQ ID NO: 19085 - protein, 408 aa, unidentified
  REGION 1..408: note = Human gut metagenome
MVYVQDINGKPMMPTTRHGKVRRLLKENKAVVVSLCPFTIKLTYVTSDYKQEIVLGVDAGTKHVGLSATTKSKELYSSEVILRNDIVDLLSTRRELRKTRRNRLRYRKPRFDNRVKSERSGWIAPSVKYKIDAHIRVVENVCSILPISRIVIEVAQFDTQKIKNPNISGKEYQEGDQLGFWNTREYVLARDGHKCQYCKGKSKDKILNVHHIESRKTGGDSPSNLITLCETCHKEYHKGNIDLKIKRGKSLRDAAVMGIMKWRLYEELKSKYDNISMTFGYVTKYNRINHDIEKSHVSDAFVISKNFNAIRLGYYYKVRLVRRHNRQIHKQKIQKGGIKRLNQSPFEVFGFRLFDRVMFENSYYFIFGRRKTGSFNIRDIDGKSQKNITYKKFKLSRCKRFMIQKEMN

SEQ ID NO: 19086 - protein, 424 aa, Moorena sp.; identical to SEQ ID NO: 4383

SEQ ID NO: 19087 - protein, 422 aa, unidentified; identical to SEQ ID NO: 5333
  REGION 1..422: note = Human gut metagenome

SEQ ID NO: 19088 - protein, 415 aa, unidentified
  REGION 1..415: note = Human gut metagenome
MVYVVANDGQPLMPTERHGKVCRMLKSGIAKVVKKCPFTIQLQYESERNVQPVALGIDAGSKHVGVSATTKAKVLYESDVELRDDIVKLLATRRQLRLSRRSRKTRYRPVRFDNRKRKEGWLTPSIRQKIESHLTVVANVCKILPVSQIIVETASFDIQKIKNPDIQGIEYQQGEQMDFWNIREYVLFWDGHTCQCCKGRSKDKILNVHHIESRKTGGNAPNNLITLCETCHKGYHNGTVILPKNIKHGMQFKDAAFMGIMRWTFYNTLKEQYEPDIPVSMTYGYLTKNTRIEHGLPKEHYIDARCISGNPDAVSDGTYYYQKKVRCHNRQIHKQTILKDGVRKSNQAEYLVKGYRLFDKVRYQGREYFIFGRRKSGFFDIRTLSGEKVNKGSISVKKLTFADTRKNYLTERRTV

SEQ ID NO: 19089 - protein, 470 aa, Blautia sp.; identical to SEQ ID NO: 2925

SEQ ID NO: 19090 - protein, 451 aa, unidentified; identical to SEQ ID NO: 3061
  REGION 1..451: note = Human gut metagenome

SEQ ID NO: 19091 - protein, 384 aa, unidentified
  REGION 1..384: note = Human gut metagenome
MSKRKLMQSRASSRRGRRHRKTRYRHPKWRPKAKRVYCEIPDRKGRHWKKKEITFASKRAKGWLPPSLQSKTDHHIWWIKKLQDLLPEGYRLSIELGRFDPARLKDPEIHGELYQKGPQYDYENVRAYVLNRNRYTCQVCGKKGGKLHVHHILYRSHGATDDPQYMATVCSDCHNTENHQQGGILYQWMQKQKKFTRGLRDATFMNILRKRLIEAFPGATFTYGNITKADRERLRLPKSHGNDATAIAIVKTGIMTVKDKEPVIYIQQVRRKKRSLHEETPRKGRKEPNRKASRYDKNTKAVTVTKRKNKKKITITGCLFDRVELNGKKGWISGFTDKSCYVKDENDQYIRTSPKYKQVSLSKLKILHHCGNWAIGARQSLGKG

SEQ ID NO: 19092 - protein, 420 aa, unidentified
  REGION 1..420: note = Human gut metagenome
MQYVYVLNKHSEPLMPCSPGKARLLLKRQKACVVKRTPFTIKLLHGSAGYKQPITLGVDAGSKHVGLSASTEKRELYSEEFTPRNDVVELLSTRRQNRRSRRYRKTRYRAPRFNNRVHSKHKGWFAPSVEVKIQEHITVIKRICRILPITLVRVETAEFDTQRLKAMLAGKPLPVGTDYQLGEMYDEYNVRQYVLKRDNYTCQCCGAHTTAKKAVKLHVHHLESRKVGGNAPSNLITLCVTCHNNLHKGKITLDGKKRGKTLRDAAFMGIMRNTLLTRLHNELNIPVQNTYGYITKLLREQNDIKKSHVNDARCISKHPLAVPCSVCYRTKAIRHHNRQIHKAKILKGGIRKANQAPYIVKGFHLWDKVLYNGQECFISGRRSSGYFALRKLDGTAITNSISFRKLRLLEPATNYLIERM

SEQ ID NO: 19093 - protein, 431 aa, unidentified
  REGION 1..431: note = Human gut metagenome
MPNKVYVINKHGRPLMPCSPAKARHLLDAGKAKVKKRTPFTIQLVYGSSGYTQEVILGVDAGSKTIGMSASTTKEELLSAEVKPRNDVVDLLSTRREFRRARRNRKTRYRKPRFDNRVRSKHKGWLAPSVEVKIQEHITAIRRVCGILPVSKVVIETAEFDLQLLKAIADGKPVPQGEDYQQGEMYGHYNVRQYVLWRDGYTCQCCGAHATKKKEVRLHVHHLESRKVGGDAPDNQVTLCESCHEKLHKGLIAEKDFKKRKRRSTRDATFMGIMRKTLMQRLCSELPIPVVKTRGYITKATREKLLVLPKSHTNDALAIAQGKQGFNVGYLPEIAQIDKIYTIRPVRHHNRQLHKAAILKGGIRKSNQAGKYVFGYRLFDKVQFNGQDCFVWRRRTTGIFTIKTINGKMIKDGISFKKLKLAEKSTSYLIA

SEQ ID NO: 19094 - protein, 512 aa, unidentified; identical to SEQ ID NO: 5651
  REGION 1..512: note = Human gut metagenome

SEQ ID NO: 19095 - protein, 430 aa, Microvirga sp.; identical to SEQ ID NO: 7723

SEQ ID NO: 19096 - protein, 496 aa, unidentified
  REGION 1..496: note = Human gut metagenome
MRYVYVLDVDGKPLMPTCRFGKVRRMLKSGQAKAVDTLPFTIQLTYKPRTRILQPVTLGQDPGRTNIGMAAVRFDGKELGRFHCITRNKEIPKLMADRMAARKASRRGERLARKRLARKLHTTAKHLNGRILPGCSEPIAVKDIINTESRFNNRLRPEGWLTPTATQLLRTHINLFRKLSGILPVTDVAVELNKFAFMQLDNPEMKKREIDFCHGPLCGTGGLEAAVKEQQDGKCLLCGKESIGHYHHIVPRSRRGSNTIANIAGLCPKCHELVHKDADTAERLTEMKTGLMKKYGGTSVLNQIIPKLVETLADLFPGHFHVTNGWNTKEFREKHHLEKDHDVDAYCIACSHLKPEETLVETEPFEILQFRKHNRAIIHHQTERTYKLDGVTVAKKRMEQKTDSLEDWYVDMAKEHGKTQADAMRSRLTVIKSTRYYNTPGRMMPGTVFLYEGKRYVMTGQITNGKYYRAYGQEKRNFPAVKVRILTKNTGLVFVA

SEQ ID NO: 19097 - protein, 306 aa, unidentified
  REGION 1..306: note = Human gut metagenome
MPVAVISKTGERLMPTSEHRARKLLKSGKAIKYSYHPSTIQLTERESGDVQPIELCVDTGYIHIGISVKSEKHEYLAEQIDTLTDEKARHDACRMYRRQRRSRKRYRQPRFNNRKHNDRWIAPSLEHKKSIHIQAILRICKVMPVTDITLEMGNFDTQVLKAREEGKPLPQGVDYQHGERYGITTLREAVFARDGYTCQCCGRAIKDGAILHVHHIVYRSQGGTNRMSNLITVCDKCHTPANHKQGGKLYNWKPKIASFKGATYMTTIRWKLYNEVKALFPDIDINIHITYGAETKERRRAFDITK

SEQ ID NO: 19098 - protein, 416 aa, Parasutterella sp.; identical to SEQ ID NO: 10114

SEQ ID NO: 19099 - protein, 456 aa, unidentified
  REGION 1..456: note = Human gut metagenome
MSTCVCVLSNNGERLMPTIRLGKVRHLLKDGKAKIIKHHPFTIQLLYDSETNIQPIEICEDVGYNYIGISVKSQSHEYVSAQYDTLQDEKACHDSCRKLRRSRRNRLRYRKPRFDNRKRGEGWLAPSLKHKKELNVNVVKMYCAVMPITHATVEVGSFDTMLVKAIQEGKAIPEGADYQKGPRYNLATLREAVFYRDNYVCKVCGRKATEGAILHVHHMFYWKGRHGNSLSELITVCEKCHTPANHQKGGKLYGFGENVKFADLSGAAFMNTVRWQIVNELYAAFGKDFVTVTYGAMTKEKRIALHLEKSHNNDAYAMGNCHPAHRCEFGHYQKRCRNNRVLEKFYDATYIDTRTGDKAKGKELFNGRISRNHKKDSEDLHKYRSKKVSKGRRSIRRQRYAIQPYDTVRLESKSYITSGCHNKGTRLLIPANGKSKSVAISKVQVVCHAGAWIQII

SEQ ID NO: 19100 - protein, 518 aa, unidentified
  REGION 1..518: note = Human gut metagenome
LSNLKLIDALLEKTEYIYVLGIDGKPQMPTNRKVRIRSLFKSGRAKIVDTVPFTIRLVYENDAVLQSITIAEDPGRTNIGTAVLTQLGDLVFSTVVETRNKSIKKLMTDRKAHRQASRRGERKARQRLAKKHGSMIKAGMMMRKLPQYAADKFVTCKIIKNTEARFCNRKRMPDWLTPTVNHLVQTHINLIKKIEKYLPITDVAIEVNRFAFMQMENPNINGLDFQNGPLKGFDDVKAAIREQQHGKCLMCKNDIEHFHHIVPRSKGGSDTIQNQAGLCKKCHAKVHTDSEFLAKFKDKKEGLIKKYGALSALNQAVPFICKELIKIYGVEHVHFCTGKDTSLIRSSLGYEKTKENQMHEVDAYCIGLAAIGADKVKRPSFNNVFKIKQFRRQDRQRVHYQKERTYYLDGKKIATNRKPRFEQKGNALSDWYKEQIEAYGQHEAGKMRSRLTVKKSKRSYNTAKRLMPGCIFYYDGQRHVMTGQSSYGRYLRAYNCGTKDFHASKCQIIRFNTGLVFV

SEQ ID NO: 19101 - protein, 421 aa, unidentified
  REGION 1..421: note = Human gut metagenome
MRGQPLMPCSPAKARHLLKAGKAVVKRRTPFTIQLRIATGETKQNVTLGVDAGAKHVGLSAATEKEEVFASEVELRQDITGLLAARLSLRRDRRHRKTRYRAPRFLNRVRSKHKGWLAPSVENRIQAHMSRIDAVCRLLPVTKIVIETASFDIQKIKDPSVEGTDYQQGDQLGFWNVREYVLFRDGHVCQHCHGRSKDKILNVHHLESRQTGGDAPNNLITLCETCHKAYHAGKIKLKVKRGQSFRAEAFMGIMRWTLLDRVRKAHPGLPVENTYGYLTKHTRITHGLPKTHCVDAYCIAGNLKAVRRGVYLHQRQMRKHNRQIHKFTVLSKRLEDGTKIGYRKLNQSPYLVHGFRLFDKVRCLGQIGFIFGRRSSGYFDVRRLDGVKLSPSISWRKLTLLEKRSTYLTELRKQDGASSPV

SEQ ID NO: 19102 - protein, 465 aa, unidentified
  REGION 1..465: note = Human gut metagenome
MSTCACVLSKNGERLMPTIRLGKVRHLLKDGKAKIIKHHPFTIQLLYDSETNIQPIEICEDVGYNYIGISVKSQSHEYVSAQYDTLQDEKSCHDACRRMCRTRRNRLRYRQKRFDNRKRDKGWLAPSLKHKKELNVNVIKMYCEVVPITHATVEVGSFDTMLVKAIEEGKATPEGADYQKGPRYNLATLREAVFYRDNYTCQVCGREASEGAILHVHHMFYWKGRHDNSLSELITVCEKCHTPANHQKGGKLYGFGEDIKFANLSGAAFMNTVRWQIVNELYAAFGKPFVTFTYGAMTKEKRIALHLEKSHNNDAYAMGEFHPNCRCTFEHYEKVRRNNRILEKFYDSRYIDIRTGEIATGKELFNGRINRSHKKDSENLHKYRGKRIRKGYRALRRKKVALNPGDLVSLNGEILTVHGTHTKKNGSVNVEFKTPSKSGKKSTSLKKLKIIKTISPMRSAWDKVS

SEQ ID NO: 19103 - protein, 355 aa, unidentified; identical to SEQ ID NO: 12164
  REGION 1..355: note = Human gut metagenome

SEQ ID NO: 19104 - protein, 523 aa, unidentified
  REGION 1..523: note = Human gut metagenome
VPLSLNRQAEKKASTSAVTKHANARREEAAGMQSQYKGVTATNERKKNMVITLDKNKRPLGFMSERRCRILLEKKRAVLYRYFPTIVILKDVDARKLSRLSSYRIKIDPGAKYTGIAIVMDDTNEFMYAMQIEHRGEQIKKNLDTRRSARRNRRSRETGYRRPKWGNQCTAKEHRQSYDSRRDENWLPPSVKSTADNILSWIRRLCRWINITNCSIESVRFDTQLMENPDIEGVEYQQGTLYGYEVKEYLLEKYGHTCQYCGGKSNDPILEWEHMLPRSRGGSDRLKNATLACHNCNQDKGNHTLEEWQTILQDRIPKERGKQKELDQIRQKFVQQVMEGKAPLKGLRYAAWVNSSRRYSQRHLYLRFPELECSSGGRTKYNRNVLKYPKEHHYDALCVGEIPEDGFVDRTHGYYLYAKATGRGTRLRGQINQCGVIIRKWMDRSKTAFGFQTGDLVVADVPKDTKYKYKGHFSGRVMIRKSGSFDIRTLSGELVTVNAKFCRLLQNNSGYQMMIKRAIPLGN

SEQ ID NO: 19105 - protein, 442 aa, unidentified; identical to SEQ ID NO: 3791
  REGION 1..442: note = Human gut metagenome

SEQ ID NO: 19106 - protein, 446 aa, Lactobacillus sp.; identical to SEQ ID NO: 12236

SEQ ID NO: 19107 - protein, 476 aa, unidentified
  REGION 1..476: note = Human gut metagenome
LAASGTEGVSHPGLPGKYKHKGGQLMSVAVISKTGERLMPTSEYRARKLLKSGKAIKHSYHPFTIQLTERKTGNIQPIELCMDTGYIHIGISVKSEKHEYLTEQIDTLTDERSRHNARRMYRSQRRNRKRYRQPRFNNRKKDKGWIAPSLEHKKNIHVQAISRINNVMPLTDITMEMGNFDTQVLKAKEEGRPLPQGVDYQHGERYSIATLREAVFARDGYKCQCCGRTIKDGAILHVHHIKYRSQGGTNSISNLATVCDKCHTPKNHKPGGKLYGWKPKLPSFKGATFMTTIRWQLYNEAKALFPDIDIHITYGAATKERRRKLDIDKSHVNDAFVMGQFHPKHRIKAILCKKKRRNNRCLEKFYDAKYIDSRDGKKRSGQELFNGRINRNHKKDSENLHQYRLQKVTAGKRTVRKQHYSVQPHDIIIYESRKRETTGCHCNGARVMLLPDKKSVSIKKIKIYRYAGGYFKSTFN

SEQ ID NO: 19108 - protein, 428 aa, Enterococcus sp.; identical to SEQ ID NO: 4335

SEQ ID NO: 19109 - protein, 442 aa, unidentified; identical to SEQ ID NO: 5396
  REGION 1..442: note = Human gut metagenome

SEQ ID NO: 19110 - protein, 423 aa, unidentified; identical to SEQ ID NO: 3951
  REGION 1..423: note = Human gut metagenome

SEQ ID NO: 19111 - protein, 465 aa, unidentified; identical to SEQ ID NO: 16702
  REGION 1..465: note = Human gut metagenome

SEQ ID NO: 19112 - protein, 411 aa, unidentified; identical to SEQ ID NO: 6901
  REGION 1..411: note = Human gut metagenome

SEQ ID NO: 19113 - protein, 418 aa, unidentified; identical to SEQ ID NO: 5294
  REGION 1..418: note = Human gut metagenome

SEQ ID NO: 19114 - protein, 418 aa, unidentified; identical to SEQ ID NO: 7351
  REGION 1..418: note = Human gut metagenome

SEQ ID NO: 19115 - protein, 472 aa, unidentified; identical to SEQ ID NO: 8680
  REGION 1..472: note = Human gut metagenome

SEQ ID NO: 19116 - protein, 421 aa, unidentified; identical to SEQ ID NO: 8171
  REGION 1..421: note = Human gut metagenome

SEQ ID NO: 19117 - protein, 512 aa, unidentified
  REGION 1..512: note = Human gut metagenome
MSTVYVLNKDGKPLMPTTRCGHVRHLLKEQKARVVTSKPFTIQLLYEADDVVQSLYLGIDPGRTNIGVAVVKADGTAVFTAHLETRNKEIPKLMKKRKESRRARRTNGRRCRRQRRAKANGTISKKCVKHDTAQNGSVSKRAKEIGVIKRHLPGCEKDVLCIGIKNKEAKFSNRTRPEGWLTPTANQLLQTHINLVKKIQKFLPISDVVLEINKFAFMRLDNPNVQKWQYQQGPLYQKANLEETVSEMQEHHCLFCKKKIDHYHHVVPQHKNGSNTIDNIIGLCTQHHDLVHKDATWQKRLAKKKTGLNKKYGALSVLNQIIPALTKELSSLFPKHFFVTNGKSTYDYRAAHGVSKDHWLDAYCIACSVLPNDTCDKTINSRVPYELKQFRRHDRRALNNENMSRVYTFNGKMVATNRHKATEQTTDSLEEFRQRQPNDVCNLKVKERHPTYRNMNRNYPGSVFLVGNQVHVMQGIAGSKDGEATTYKDTNANSIAAGKCKFVAKNSGILFV

SEQ ID NO: 19118 - protein, 430 aa, unidentified
  REGION 1..430: note = Human gut metagenome
MPKVYVLNRHGRPLMPCTPAKARHLLDAGKAKVRHRTPFTIQLLYGSTGYTQEVILGVDAGSKTIGLSAATETEELFSAEVKPRNDVVELMSARRQFRRARRNRTTRYRKPRFDNRVRSKHKGWLAPSVEVKIQEHMTAIRRACAILPVSKVVVETAEFDLQLLKAVAEGKPVPQGEDYQKGEMYGHYNVRQYVLWRDSYTCRICGAHGSVRKGVPLHVHHLESRRVGGDAPDNLVTLCTACHDKLHKGIIMAADIKKRKRRSTRDATFMGIMRMTLLRRLREQLPVPVVETRGYITKATRENLLVLPKSHTNDALAIAHGPQGFRAEYLPNIRQADRLYTICPVRHHNRQLHKATILKGGVRKANQAEKYICGFRLYDKVLYNGIECFVWGRRTSGSFLLRQLNGEKVKDGVSYKHLKLLERSQSYLVA

SEQ ID NO: 19119 - protein, 415 aa, unidentified; identical to SEQ ID NO: 5047
  REGION 1..415: note = Human gut metagenome

SEQ ID NO: 19120 - protein, 431 aa, unidentified
  REGION 1..431: note = Human gut metagenome
MPNKVYVINKHGRPLMPCSPAKARHLLDAGKAKVKKRTPFTIQLVYGSSGYTQEVILGVDAGSKTIGVSASTKKEELFAANVIPRNDVVDLLSTRRESRRARRNRKTRYRKPRFDNRVRSKHKGWLAPSVEVKIQEHITSIKMVCRILPVSKVVIETAEFDLQLLKAIADGKPVPQGEDYQQGEMYGHYNVRQYVLWRDDYTCQCCGAHATKKKEVRLHVHHLESRKVGGDAPDNQVTLCESCHEKLHKGLIAEKDFKKRKRRSTRDATFMGIMRKTLMQRLCSELPIPVVKTRDYITKATREKLLVLPKSHTNDALAIAQGKQGFNVGYLPEILQIDKIYTIRPVRHHNRQLHKAAILKGGIRKSNQAGKYVFGYRLFDKVQFNGQDCFVWRRRTTGIFTIKTINGKMIKDGISFKKLKLVEKSTGYLIA

SEQ ID NO: 19121 - protein, 457 aa, unidentified; identical to SEQ ID NO: 14039
  REGION 1..457: note = Human gut metagenome

SEQ ID NO: 19122 - protein, 454 aa, unidentified
  REGION 1..454: note = Human gut metagenome
VSYTARYVPAYRIKHITKKEAPYMVYVLDIDGQPLMPTSRHRKVRKLLNSHLAKVVKRCPFTIQLLYQSTKETQPVSLGVDAGSRHIGLAATTEQKVVYQEELVPRNAVVKLLSARRALRSSRRSRKTRYRKPRFNNRVHSKHKGWLAPSVEVKIQEHITAIKRICQILPISDIHVETAEFDLQRLKAMEEGRPLPVGTDYQLGEQYDFYNTRQYVLHRDEYTCQCCGTHDNNVKLHVHHIESRQTGGDAPNNLITLCEHCHKLLHAGKTILPKGKKRGKSYRDATFMGIMRKTLLERLKKEIDVHVEGTYGYITKYWRERAGLEKSHINDAICISKHPYARPLETYYLTKAVRHHNRQIHKTKFSKGGIRKRNQAPYLVKGFRLFDKVLYQGESYFIFGRRITGYFDIRTLDGTKVNKGSTSYKKLRIQDTAEAYLTEVRAIPHMNEFTCVLA

SEQ ID NO: 19123 - protein, 324 aa, Enterococcus sp.; identical to SEQ ID NO: 12172

SEQ ID NO: 19124 - protein, 411 aa, unidentified; identical to SEQ ID NO: 2606
  REGION 1..411: note = Human gut metagenome

SEQ ID NO: 19125 - protein, 350 aa, Halomonas sp.
  SITE 350: note = misc_feature - Xaa can be any naturally occurring amino acid
MAVFVLDKKKQPLMPCSEKRARLLLARGRAVVHKRYPFTIRLKNRVGGEAQPLRLGIDPGSKTTGLALMRETEGELRHVLCLFELIHRGYQIKKALQQRAAFRRRRRSANLRYRAPRFNNRIKPKGWLAPSLQHRVDTVMAWVNRLSKSAPITGISQELVRFDTQKLENPEISGVEYQQGTLLGYEVREYLLEKWGRECAYCGTADTPLEIEHVVPRSRGGSNRVSNLTLSCHPCNAEKDSQTLTDFFATNKGLKKRLKANGLSADAQLERVQRQLKQPMRDASAVNATRWALFSALKTTDLPVAVSSGGHTKYNRQRLNIPKTHALDAACVGAFEKLHDWTVPTLTIKX

SEQ ID NO: 19126 - protein, 453 aa, Lactobacillus sp.; identical to SEQ ID NO: 2687

SEQ ID NO: 19127 - protein, 470 aa, unidentified
  REGION 1..470: note = Human gut metagenome
MSVFVVGLNGCRLMPVSERKARLLLKGGKASVYRKVPFTIKLNYKTGSTVQPGYLGIDTGSQHIGVSVVQKDGTVLHKEEIGLRDSMSKRKLLESRASSRRGRRYRKTRYRHPKWKPKTKRIYNEKADRKGRHWKKQKNTFTSKRQAGWLPPSLQSKTGHHIQWIRKLLDLLPEGYRLSIELGRFDPARMKDPEIHGELYQKGPQYDYENVRAYVLARDGYTCRVCKKKGGKLHVHHILYRSRGASDNPKYMAAVCSKCHTTENHLPGGILYQWMQDQKKFTRGLRDATFMNILKKRLRKAFPDAVFTYGNITKADREKLELPKSHGNDATAIALVKTEVKSVKDEEPVIHIQQVRRKKRSLHEETPRKGRKEPNRTASRSDKNTKSVTVTKGSGEKKASMTACLFDRVELDGKKGWITGFTGTSCYVKDKEDNYICTSPKYKQVSISRLRILHHCGNWAIGAEKPLGKG

SEQ ID NO: 19128 - protein, 414 aa, unidentified; identical to SEQ ID NO: 2588
  REGION 1..414: note = Human gut metagenome

SEQ ID NO: 19129 - protein, 426 aa, unidentified
  REGION 1..426: note = IscB polypeptide
VFVVDQNRKPQNPVHPAKARMLLDGQRAAVLRMFPFTIILKEVIADQPRTLRVSVDPGSRKTGIVLVEESSNRVVWAGEIEHRGMTIKKRMDARRTIRRSRRSRKTRHREPRFLNRTRPGSWLPPSLSSRVVNVETWIRRLSRWSPVGSISMELVKFDTQLMDNAEISGVEYQQGELQGYEVREYLLEKWSRNCVYCGVMGVPLQVEHITPRSRGGTNRVSNLAISCRDCNIEKGTMTAEEFGHPKIQEQAKRPLKDAAAVNATRWALFHRLKQTGLPLEVGTGGRTKFNRTRQGYPKAHWIDAACVGESGSKVRLDPSQTILAIGAKGWGSRQSCRMDRFGFPRTGPKGSRIVHGFRTGDLVKAMVLKGKFIGTHLGRVAIRATGSFTIDGVTTTSWKNCQIVQRVDGYSCSHSHSKENGNSSHD

SEQ ID NO: 19130 - protein, 457 aa, Moorena sp.
MSKTLPNQVFVLDTDKKPLTPCLPVIARKLLNAGKAKVFKLYPFTIILKKSVNDIPEPIEIRIDLGSKTTGIALIQGTQVIWGAQVTHRGQAIKSRLETRRAIRRSRRNRKTRYRKARFLNRTRPKGWLPPSWQHRVLTTMTWVSRLRKLAPIQSIAFELVSFDTQKMQNPEISGVEYQQGELQGYEVRQYLLEKWNRKCAYCGIENLPLQVEHINPRAKGGSNRVSNLCLACEKCNLKKGTQDVKDFLKKKPEILRKVMSQAKTPLKDAAAVNATKSALFQALKATAIELIYVGRGSLTKFNRTNLKFPKAHWIDAACCGDVSQGLTLAVNQPLLIKAMGWGSRQVVQTDKYGFPRSGYKPKKKVAGWNTGDIVSVIDGKHQGVKCKRIKTTRFKGNFDIRVNDSVISVSRNQIKPVHRNDGYNYSFVRDCREMSEKKVREHCVTYYRYEYLRRGC

SEQ ID NO: 19131 - protein, 445 aa, Petrotoga sp.; identical to SEQ ID NO: 7625

SEQ ID NO: 19132 - protein, 404 aa, unidentified
  REGION 1..404: note = Human gut metagenome
LRVFVLNKRGKPLMPCSPAKARLLLKEKKAIVVRRTPFTIQLTIATGEAKQPVSLGVDAGYKHVGLSASTEKAELYASEVELRQDVSDLLSARRALRQSRRSRNTRYRAPRFDNRIRTKRKGWLAPTVENRINVHLSRIETVLRLLPVTKITVETASFDTQLLKNPDIAGKEYQEGEQLGFWNVREYVLFRDGHVCQHCHGRSKDPVLNVHHLESRRTGGDSPGNLITLCETCHKALHRGEIKLKAKRGRSFRAETFMGIMRWGVLNRLKASHPKLEVHNAYGYRTKHARIVNGIDKSHCADAFCIAGNLGAERLCEFFFQKQTRRNNRQIHKLSILKGGIRKRNQAPFEIKGFRLFDKVASKGEESFIFGRRSSGYFDVRKLDGTRISAGISCKKLRLLEKRR

SEQ ID NO: 19133 - protein, 432 aa, Moorena sp.; identical to SEQ ID NO: 14025

SEQ ID NO: 19134 - protein, 408 aa, unidentified; identical to SEQ ID NO: 4614
  REGION 1..408: note = Human gut metagenome

SEQ ID NO: 19135 - protein, 424 aa, Calothrix sp.; identical to SEQ ID NO: 13167

SEQ ID NO: 19136 - protein, 470 aa, unidentified; identical to SEQ ID NO: 5472
  REGION 1..470: note = Human gut metagenome

SEQ ID NO: 19137 - protein, 415 aa, unidentified
  REGION 1..415: note = Human gut metagenome
MVYVLDKNGQPLMPTDRHRKVRLMLQSGQAKVIKRCPFTIQLNYDSGHQTQEISLGIDAGSKHIGVSATTKIKVLYEADVELRNDIVDLLSSRRELRRGRRNRKTRYRQAKFNNRRRGNGWLAPSIRQKIGTHLTVVENICKILPISRIMVETASFDIQKIKNPDIQGAEYQQGDQLEFWNVREYVLFRDGHICQCCKGKSKDKILNVHHIESRKTGGNAPNNLITLCEICHTGYHKGAVQLPKTVKRGMRFKDAAFMGIMRWAFYEALKQQYEPVALVHNTYGYITKHTRIAYNLPKEHYVDARCISGNPEASSNGEYYYQKKVRCHNRQIHKLTVLKGGIRKQNQATYLVKGYRLFDKVSYQGKGYFVFGRRQSGFFDIRTLSGEKVNKGSLSCKKLKFIATRTYYLTERRAV

SEQ ID NO: 19138 - protein, 431 aa, unidentified; identical to SEQ ID NO: 3401
  REGION 1..431: note = coral metagenome

SEQ ID NO: 19139 - protein, 465 aa, unidentified
  REGION 1..465: note = Human gut metagenome
MSTCVCVLSNSGERLMPTFRLGKVRHLLKDGKAKIVKHHPFTIQLLYDSKTNTQPIEICEDVGYNYIGISVKSQSHEYVSAQYDTLQDEKACHDSCRKLRRSRRNRLRYRKPRFDNRKRGEGWLAPSLRHKKELNVNVVKMYCAVMPITHATVEVGSFDTMLVKAIQEGKAIPEGADYQKGPRYNLATLREAVFYRDNYTCQVCGRKVADGAILHMHHMFYWKGRHGDSLNELLTVCEKCHTPANHQKGGKLYGFGEDIKFANLSGAAFMNTVRWQIVNELYAAFGKPFVTFTYGAMTKEKRIALHLEKSHNNDAYAMGEFHPNCRCTFEHYEKVRRNNRILEKFYDSRYIDIRTGEIATGKELFNGRINRSHKKDSENLHKYRGKRIRKGYRALRRKKVALNPGDLVSLNGEILTVHGTHTKKNGSVNVEFKTPSKSGKKSTSLKKLKIIKTISPMRSAWDKVS

SEQ ID NO: 19140 - protein, 408 aa, unidentified
  REGION 1..408: note = Human gut metagenome
MSEYIYVIGVDGDPQMPTKRKRHVEKLLQAGRARVFRQIPFTIQLTYENKPVLQPITIAEDPGRSNIGMAVVSLSGELFSAAVVQTRNKEIVKLMEKRKQHRRASRNGERKARQRLAKKCHTMIKAGSLMRKLPMYGKDKRVQCNVIRNTEARFCNRKREDGWLTPSAEHLVQTHINLIHKMQKFLPITDVAFEINRFAFLSLEDPSISGVDFQNGPLKGYDDLNAAIEDLQDGHCLMCNSPIEHRHHIVPRSMQGSNTIGNIAGLCCKCHERVHKDARFEDRLKKKKAGLNKRYAAVSALNQAIPFICKRLEQEFGKEHVHYCSGRDTSMVRRSFGYHKTKEEQLHEVDAWCIAVLSLRQIPEKAPEFDHVHELLQFRRQDRSRIKSQTSRAYYHEGKKIAKNRKKA

SEQ ID NO: 19141 - protein, 453 aa, unidentified
  REGION 1..453: note = Human gut metagenome
MSVAVVSKTGMLLMPTSEYRARKLLKSKKAIIHGYHPFTIQLTERETGYIQPVELCMDTGYIHIGTSVKSEKHEYLGEQIDTLTDERQKHDACRMYRRQRRNRKRYRQPRFNNRERDDGRIAPSLEHKKTIHIQALSRICKVIPVTDITLEMGNFDTQVLKAREEGRPLPQGLDYQHGERYSVTTLREAVFLRDGYTCQRCGRTIKDGAILHVHHVVYRSQGGTNRISNLITICDKCHTPANHKPGGKLYGWKPKVASFKGATYMTTIRWKLYNEIKALFPDIDIHITYGAETKERRRAFDITKSHVNDAFVMGQFHPKYRSKPVCYKKKRRNNRCLEKFYDAKYIDSRNGKTRTGQELFNGRISRNHKKDSENLHQYRRQKISTGKRTIRKQHYAIQPHDIVIFNGEKFETSGCHNNGTRVILLPQEKSVAIKKLNIYRYAGGYFKSAFNQK

SEQ ID NO: 19142 - protein, 416 aa, unidentified; identical to SEQ ID NO: 8117
  REGION 1..416: note = Human gut metagenome

SEQ ID NO: 19143 - protein, 533 aa, Acrocarpospora sp.; identical to SEQ ID NO: 12008

SEQ ID NO: 19144 - protein, 452 aa, Moorena sp.; identical to SEQ ID NO: 3322

SEQ ID NO: 19145 - protein, 428 aa, Moorena sp.; identical to SEQ ID NO: 4442

SEQ ID NO: 19146 - protein, 470 aa, unidentified
  REGION 1..470: note = Human gut metagenome
MSVFVVGLNGCRLMPVSERKARLLLDGGKASVYRKVPFTIKLNYKTGSTTQPGYLGIDTGSQHIGVSVVREDGTVLHKEEVSLRDSMTKRKLLETKASLRRGRRYRKTRYRHPKWRPKTKRVYSEVPDKKGRHWKKQKNTFTSGRPEGWLPPSLQSKTDHHIRWIRKLQGLLPEGYRLSIELGRFDPARMKDPGIHGDLYQKGPQYDYENVRAYVLDRDRYTCQVCKKKGGKLHVHHILYRSQGASDNPQYMATVCSSCHTTENHLPGGILYQWMLEQKKFTRGLRDATFMNILEKRLRKAFPDAVFTYGNITKVDREVLKLPKSHGNDATAIALVRTGVASVKDKEPVFYIQQVRRKKRSLHEETPRKGRKEPNRTAARNGKNTKAVTFTKRRGGKKTSVTACLFDRVELNGKKGWISGFTGTSCYMKDAEDNYIRTSGKYNQVSLSKLRILHHCGNWVIGARKPLGKG

SEQ ID NO: 19147 - protein, 413 aa, unidentified; identical to SEQ ID NO: 3023
  REGION 1..413: note = Human gut metagenome

SEQ ID NO: 19148 - protein, 440 aa, Lactobacillus sp.
MKGVQIMQNRVFVINKHGKALMPCKPRKARILLRDGKAKVLKKEPFTIQLLYGSAGYKQDISIGIDSGQRHIGLAVTSQDKVLFQGEVELRQDVKKLIDTRRIYRRSRRNRKTRYRKARFLNRIASKKDNWLPPSVASKVNHNINWIKRLLSVLPKADLHIEVGKFDMQKMKNPEINGEGYQQGDLYGYQTVKQFVLARDNYTCQACKKKGGKLKIHHIIYRSLGGTNTVDNLITVCSKCHTTKNHQTGILAKWCKDKKKVNKSYKGATFMNILRRRLFLAFPQVKFQYGAWTTLQRANLDLTKSHYNDAVAISGIRKIKAKPTSIMMFKQFRKKKRSLHEATARKGRKTPNITSKRNAKNTKYAKGFWLNDYVKIKDSNKKGYISGFMSKGTNVRLRDIFGEYVSNSDKSYTSTKNISLINHSNNWQKQVITEKQYVME

SEQ ID NO: 19149 - protein, 512 aa, unidentified
  REGION 1..512: note = Human gut metagenome
MSTVYVLNKDGKPLMPTTRCGHVRYLLKEKKARVVKTKPFTIQLLYKTNDVVQPLYLGIDPGRTNIGVAVVKADGTAVFTAHLETRNKEIPKLMKKRKDSRCARRTNGRRCRRQRRAKANGTISKKCVKQATAQNGSASKRAKKIGVIKRHLPGCEKEVLCIGIKNKEAKFNNRTRPAGWLTPTANQLLQTHINLIKKIQKLLPISDVVLEINKFAFMQLDNPNIQKWQYQQGPLYQKANLEEAVSEMQEHHCLFCKKKIDHYHHVVPQHKNGSNTIDNIVGLCTKHHDLVHKDTAWHEKLTKKKTGLNKKYGALSVLNQIIPALTKELSSIFPKHFFVTTGKSTYDYRAAHGVSKDHWLDAYCIACSVLPNDVCNSSINNRVPYELKQFRRHDRRALNNENMSRVYTLNDNVVATNRHKATKQTTDSLEEFRQNHPDDVCKLKVKEHHPTYRNMNRNYPGSVFLIGKQVHVMQGIAGSKDGEATTYKNTNANSIAAGKCKFVAKNSGILFV

SEQ ID NO: 19150 - protein, 424 aa, Planktothrix sp.; identical to SEQ ID NO: 11210

SEQ ID NO: 19151 - protein, 508 aa, Moorena sp.
MGAVFVVDKNGKPLMPTYSKPKVRRMLKDGRAEIFRHEPFTIQLTQRAGGYTQPVHYDTDSGYQYAGVSVKSEKHEFLHMQADMLEDKKGRYDDRRKYRCTRRNRLRHRPPRFDNRRKGEGWIAPSLAHRLENQVRLFQTMCGVCPITEAHIEVGRFDAQALDAVEKGLPLPEGIDYQHGPRYAFDTIREAVFARDQHTCQCCGASPSKKPGTILVVHHALYWKGDHTDRLPGLLTLCTNCHTSANHQKGGKLRGLAPNAATANKAPAAFMNVVRWMMRDRFQADGVPTTITYGAATKRERLSRNVAKTHANDAYCIGEFRPKHRSLEIHIAKRRRDARDGSIKSGKELSSGRTKRKEPRHGAKDLRRFRLKQLTKGCNAVRRKRYEIRPDDLVRTTDGRVYTVNGTQNRGATLQLRTTKTVLLTALVPKTGKEKELLPVETGQKLALKGRKEKHEVLSVDLASGKAVMRWYMGVKPENVTLLTGTYGGWTVVPAQAVNTCKKGETEK

SEQ ID NO: 19152 - protein, 453 aa, Moorena sp.; identical to SEQ ID NO: 12809

SEQ ID NO: 19153 - protein, 374 aa, unidentified
  REGION 1..374: note = Human gut metagenome
MPNKVYVINKHGRPLMPCSPAKARHLLDAGKAKVKKRTPFTIQLVYGSSGYTQEVILGVDAGSKTIGMSASTTKEELLSAEVKPRNDVVDLLSTRREFRRVRRNRKTRYRKPRFDNRVRSKHKEWLAPSVEVKIQEHITSIKRVCRILPVSKVVIETAEFDLQLLKAIADGKSVPQGEDYQKGEMYGHYNVRQYVLWRDNYTCQCCGAHATKKKEVRLHVHHLESRKVGGDAPSNLITLCDSCHEKFHKGIITAANLKKRKRRSMRDATFMGIMRKTLIQRLRAELTIPVAETRGYITKTTREKLLVLPKSHTNDALAIALGKHGFNVGYLPEIAQIDKIYTIRPVRHHNRQLHKVTILKGGIRKSNQAEKYVF

SEQ ID NO: 19154 - protein, 447 aa, Moorena sp.
MNRNRSPTEAKRKEVSRIVYVLNNDGHPLMSCSAARARHLLKANEAIVVGQEPFTIRLIVGIKNPVVQKVVLGLDMGAKNIGVSAVSQNRVLYQAKIELRDNIRKKMDRRKMFRKNKRSRKCRYRALRFNNRSRKDNWLSPSVKSKVDSMIKVVNLITDILPVSGINVELVNFDTQAIKQNTEKLLAGWMYQRGPLYEEENIKSYIRSLYHYICVYCKKPGDETDHIVPYSKGGTTTVDNLVCACHKCNQDKGNRTAEEFGYPRVQQRVKKSLKAAAHTQMAKTELVKQLRDIAPVKITYGHITKVNRKALGLPKSHSIDAVVIASEGTPVQIPQVEWRGRSIPRGNYRLYKGAHSHIKNQSARILFGFKQWDKVRLSDNQVGFIKGKRSTGYFCVSDIEGNVLNPSINYRCLQLLRKSSGIIWIENKRDNVSSPQINLGVSDAGDC

SEQ ID NO: 19155 - protein, 427 aa, Nostoc sp.; identical to SEQ ID NO: 5922

SEQ ID NO: 19156 - protein, 422 aa, Petrotoga sp.; identical to SEQ ID NO: 6564

SEQ ID NO: 19157 - protein, 379 aa, unidentified
  REGION 1..379: note = Archaeon sp.
VYLAQYWLITTPLRTNTPARVGQALSVPVINMHGKPLMPTTPGKARILLKHGKATVVQRAPFTIQLCYLNGKYTQDIKLGIDAGYSTIGFSATTDKRELISGELILRKKISKLIDQKRNYRRTRRSRLWHRKPQFNNRSKPKGWLAPSIQHKLETHLRLIKKLKKILPITKITIEVAKFDQQKMNNPEIKNVGYQQGELQGYEVREYLLEKWVRKCVYCGKNNLPLEIEHIIPKIRGGTNRVSNLTLACHRCNQKKGDKTAAEFGYPDIQKKANQTLKSTAFMNIVRKKVVNTLKCAWTYGHITKHDRIKMKLEKSHINDAFVIAGGTTQSRTIPYMTTQTRRNNRSIQTNRKGYKPSIRKQRYKLQPGDLVKYIKSLF

SEQ ID NO: 19158 - protein, 414 aa, unidentified
  REGION 1..414: note = Human gut metagenome
MVYVINKQGQALMPTERFGKVRRLLKNSLAHVVCRIPFTIQLDYDTTDYTQPVSLGVDAGSKHIGISATTSEKEMYAADVELRNDIVDKLSTRREQRRTRRSRLRYRKARFNNRVSSKRKGWLAPSVENKIQTHLTVVEKIHKFLPITNIVVETASFDIQKINNPSISGVEYQQGEQLDFFNVREYVLFRDNHICQHCKGKSKDKVLNVHHIESRKTGGDSPNNLITLCETCHKAYHRGEFKLNIKRGKSFRDAVFMGIMRWGFYDRLKNIYPNVSMTFGYITKNARITNNLPKEHYVDARCISGNPTAKPLGYYFYQKKVRCQNRQIHKANFLKGGRKKLNQAPFLVKGFRLFDLVEYQKELYYIFGRRSNGSFDIRKLDGTKVNKGSINCKYLRLISTRKSILTEKRTQVNL

SEQ ID NO: 19159 - protein, 414 aa, unidentified; identical to SEQ ID NO: 4524
  REGION 1..414: note = Human gut metagenome

SEQ ID NO: 19160 - protein, 408 aa, unidentified; identical to SEQ ID NO: 5772
  REGION 1..408: note = Human gut metagenome

SEQ ID NO: 19161 - protein, 452 aa, unidentified; identical to SEQ ID NO: 3325
  REGION 1..452: note = IscB polypeptide

SEQ ID NO: 19162 - protein, 332 aa, Parasutterella sp.; identical to SEQ ID NO: 9054
  SITE 14: note = misc_feature - Xaa can be any naturally occurring amino acid

SEQ ID NO: 19163 - protein, 416 aa, unidentified; identical to SEQ ID NO: 6135
  REGION 1..416: note = Human gut metagenome

SEQ ID NO: 19164 - protein, 414 aa, unidentified
  REGION 1..414: note = Human gut metagenome
MPCSPAKARLLLKEKKAIVVRRTPFTIQLTIATGETKQPVSLGVDAGYKHVGLSASTEKAELYASEVELRQDITDLLSARRALRQSRRNRKTRYRAPRFDNRIRTKRKGWLAPSVENRINAHLSRIEAVLRLLPVTKITVETTSFDMQLLKNSDITGKEYQEGEQLGFWNVREYVLFRDGHVCQHCHGRSKDPVLNVHHLESRRTGGDSPGNLITLCETCHKALHRGEITLKAKRGQSFRAETFMGIMRWEVLDRLKASHSKLEVQNTYGYRTKHARISNGIAKSHCADAFCIAGNLGAERLGEFLFQKQTRRNNRQIHKLSILKGGIRKRNQAPFEVKGFRLFDKVACQGEEGFIFGRRSSGYFDVRKLNGTHISAGISCKKLRLLEKRQTYLTEIRKEEALPPLPEGRGLRA

SEQ ID NO: 19165 - protein, 424 aa, unidentified; identical to SEQ ID NO: 8578
  REGION 1..424: note = Human gut metagenome

SEQ ID NO: 19166 - protein, 420 aa, unidentified
  REGION 1..420: note = Human gut metagenome
MQYVYVLNKHGEPLMPCSPGKARLLLKQQKACVVKRTPFTIKLLFGSAGYKQPITLGVDAGSKHVGLSASTEKRELYSEEFTPRSDVVELLSTRRQNRRSRRNRKTRYRVPRFDNRVHSKHKGWLAPSVEVKIQEHITVIKHICKILPISLVRVETAEFDTQRLKAMLTGKPLPVGTDYQLGEMYDEYNVRQYVLKRDHYTCQCCGTHNTAKKVVKLHVHHLESRKTGGNAPSNLVTLCTTCHKNLHKGRVTLDGKERGKPLRDAAFMGIMRKTLMVRLKEELPIPVQGTYGYITKMRREQNDIKKSHTNDARCISKHPLAEPCSVCYRTKAIRHHNRQTHKANFSKKGIRKRSQMPYLVEGFRLWDKVLYKGQECFVSGRRSSGSFALKKLDGTSISKGVTFKKLRLLEPATNYLIERM

SEQ ID NO: 19167 - protein, 399 aa, unidentified; identical to SEQ ID NO: 11792
  REGION 1..399: note = Human gut metagenome

SEQ ID NO: 19168 - protein, 313 aa, Moorena sp.; identical to SEQ ID NO: 12294

SEQ ID NO: 19169 - protein, 456 aa, Fervidobacterium sp.; identical to SEQ ID NO: 2394

SEQ ID NO: 19170 - protein, 411 aa, unidentified
  REGION 1..411: note = Human gut metagenome
MVYVQDIDGKPMMPTTRHGKVRRLLKDNKAVVVNTYPFTIKLTYKTSDYKQEIVLGVDSGTKHVGLSATTKSKELYASEVILRSDVVDLLSTRRGLRRTRRSRLRYRKQRFNNRVKSKKDGWIAPSVRHKIDSHVRIISFVYSILPVSKLIVEVAQFDTQKIKNPEISGKEYQEGEQLGFWNVREYVLARDGHKCQHCKGKSKDPILNIHHIESRKIGGDSPSNLITLCETCHKEFHKGNIKLKVSRGKSLRDAAVMGIMKWKLYEELKFRYDNVSMTFGYITKYNRINHGIEKSHVSDAFVISRNFNSCRLGYYYKRKLVRRHNRQIHKMKILKGGIRKRNQAPFKVFGFRLFDKVMFQGEEHFIYARRLSGQFNIRDINGENKKDVSCKKLKYVSHGLVSVKTNLFLSQ

SEQ ID NO: 19171 - protein, 441 aa, unidentified
  REGION 1..441: note = Human gut metagenome
MSVSVFVQDKKHRPLMPCRPARARRLLKSGRARVVRLFPFTIRLTDRLIEDSKLQPVLVKLDPGSRQTGVALVRADEKAHHYALFFVNLVHRGESIRDALTARRNCRRRRRGNLRHRAPRFLNRTKPQGWLPPSLRHRVDTATAWVAKLVKLAPVTGIVEELVKFDTQKLQNPEISGNEYQQGTLFEYEVREYLLEKFGRRCVYCGAENVPLNIDHVVPKARGGSNRISNLVLACVDCNEKKGSQPVEVFLKNRPEVLDRIKRRLKTSLAHAATVNATRWSLFSALKAFGLPVETGSGALTKFNRHTFGVPKEHWLDALCAGRVNGVHYPEGMGILQVRCTGRGNYQRTRVDKYGFPRGYLTRQKRVHGFATGDMVEVVVPSGKKAGTYRGRVAVRKSGYFNIQTPEGVIQGIGWRHCRLLSFNDGYGYAWLRPAPHSSPV

SEQ ID NO: 19172 - protein, 460 aa, unidentified; identical to SEQ ID NO: 7734
  REGION 1..460: note = Mouse gut metagenome

SEQ ID NO: 19173 - protein, 473 aa, Marinobacter sp.
VIDIPEGREASASVTRPVRAFIERKTMSVFVLDRRKQPRMPCTEKRARLLLGRRRAVVVRAYPFTIRLKDRTGGDTQPVRIKIDPGSKTTGIAVVRENGQKQHVLVLMELAHRGRQISQSLEQRRAFRRRRRNQLRYREPRFLNRTKPKGWLAPSLQHRVDTTKSLVNRLRSLVLVESISQELVRFDTQKMENPEVSGVEYQQGTLLGYEIREYLLEKWGRECAYCADTDTPLQIEHIDPKANGGSNRISNLTLACRPCNQEKGRHSLADFFASSKRLKNHQARLDRILKQCKKPLRDASAVNSTRWALYQALKQTALPVEVGTGGRTKFNRQRLSIPKTHALDAACVGEVEIVEGWDVPTLAIKSTGRGSYKRTRLTKYGFPRGYLMRQKKVQGFQTGDMVRAVVPTGTKAGTWLGRVAVRKTGSFNIQTSSSAIQGISHRHCVLTQRADGYGYHIQPNQRKEEGDRENESR

SEQ ID NO: 19174 - protein, 415 aa, Bacillus sp.; identical to SEQ ID NO: 16311

SEQ ID NO: 19175 - protein, 434 aa, Moorena sp.
MVFIIDANKQPLAPCHPARARKLLKAGRAAVWRTYPFTIILKEVKEPVLELLETRLKIDYGSRHTGLAILQGNKVVWMAQLDHRTDIKSKLKKRSGYRRRRRSANLRYRKPRFLNRIRPKGWLPPSLQSRVDNIETWIRRLRSVCPITHISYENCKFDTQLMCNPEISGIEYQQGVLQGYEVREYLLAKFSRRCVYCGAEGVPLEVEHLIPKSRPGSSDRVNNLGLACRLCNLKKGAQTAEEFGFLELYEQARKSYTEPAVLNATRWKVYEVLTATSLPVECGTGGRTKMNRIKLGLEKSHCLDACCIGASTPEVLIFKTTSVLYITAKGRGSHCRTNTNDSGFPVSYYARKTQFYGFKTGDMVRAVVSAGLKTSGDWRGRVLCRKTGYFDIKTKKGRICGVSHKYVSLVQNCDGYDYFVATSSPHLKVGASVA

SEQ ID NO: 19176 - protein, 442 aa, unidentified; identical to SEQ ID NO: 3234
  REGION 1..442: note = Human gut metagenome

SEQ ID NO: 19177 - protein, 470 aa, Moorena sp.; identical to SEQ ID NO: 4092

SEQ ID NO: 19178 - protein, 429 aa, unidentified
  REGION 1..429: note = Human metagenome
MLVYVLKQNGQPFMPTARFGKVRRLLKAKKAKVVRREPFTIKLFYEPETDVIQECYCGVDTGSKHIGVAVVSNDKVLYQSQTELRSDIKRKMDARRMYRYNRRSRKTRYRKPRFLNRGNSTKSDRLPPSVNHKVQAHIDEIEFCKKILPVSDLVVEVSQFDTALMKDPSLINEKVKHWGYQQGFNYGYSSRREAILHRDNYTCQCCGKKNCRLEVHHVKFKSNGGTDDEENLITLCEDCHKGVHAGTVVLNKKPKKSKNLKYATHMSIIRSYLLRKYPNAIETFGFVTSENRNHLKLEKDHYIDACVIASGGLKSKELDVIYRKRRVSIQDRVLTKGVRGEQKLPTGKIFGFKKFDKVEYLGETCFVKGRRSSGSFVLMDIDNNSIDFRDRGGNKEPSYKRIERINTRRSVLCIGKRIEREVGLIPILS

SEQ ID NO: 19179 - protein, 498 aa, unidentified
  REGION 1..498: note = Human gut metagenome
MPTTRGGHVRHLLKEQKARVVRAKPFTIQLLYETNDVVQPLYLGIDPGRTNIGVAVVKADGTAVFTAHLETRNKEIPKLMKKRKESRRARRTNGRRCRRQRRAKANGTISKKCVKQTTAQNSSVSKRAKEIGAIKRHLPGCKKEILCIGIKNKEAKFNNRTRPEGWLTPTANQLLQTHINLVKKIQKFLPISDVVLEVNKFAFMQLDNPNIQKWQYQQGPLYQKGGLESAVSEMQECHCLFCKKPIDHYHHVVPQHKNGSNTIDNIVGLCTKHHDLVHKDTAWHEKLTKKKTGLNKKYGALSVLNQIIPALTKELSSIFPKHFFVTTGKSTYDYRAAHGVSKDHWLDAYCIACSVLPNDVYDSSINNRVPYELKQFRRHDRRALHKENMNRVYTLNGKKVAANCHKAVEQTTDSLEEFRQNHPDDVCKLKVKEHHPEYRNPKRNFPGCVFLIGKQTHVMQGTNGSHNGKADGYYDTNGNSYPSGKCKFVAKNEGIVFA

SEQ ID NO: 19180 - protein, 512 aa, unidentified; identical to SEQ ID NO: 3720
  REGION 1..512: note = Human gut metagenome

SEQ ID NO: 19181 - protein, 422 aa, unidentified; identical to SEQ ID NO: 5333
  REGION 1..422: note = Human gut metagenome

SEQ ID NO: 19182 - protein, 475 aa, unidentified
  REGION 1..475: note = Human gut metagenome
ARIFRQVPFTIQLTYENEPVLQPVTIAEDPGRSNIGMAVVSLSGELLSAAVVQTRNKEIAKLMEKRKQHRRASRNGERKARQRLAKKCHTMFKAGFLMRKLPMYGKDKRVKCHVIRNTEARFCNRKRKDGWLTPSAEHLVRTHINLVHKMQKFLPITDVAVEINRFAFLSLEDPSVSGVDFQNGPLKGYDNLNAAVEDLQDGHCLMCKDPIEHRHHIVPRSIQGSNTIENIAGLCCKCHEKVHKNAAFEKRLKKKKAGLDKQYAAVSVLNQAIPFICKRLEQEFGKEHVHYCSGRETAMVRRSFGYHKTKEEPLHEVDAWCIAVLSLQQVPEKAPEFDHVHKIMQFRRQDRSRIKAQTSRTYYYEGKKVAKNRKKAEGQKEDSLQEWRECQITLYGEEQARKMTSQLKVRKSIRRYNRLDRLMPGAVFYYKGTRYVMRGQHGNGRYLQAVGMGNKDFPVKDCKIVIQNEGLVFLS

SEQ ID NO: 19183 - protein, 458 aa, Moorena sp.; identical to SEQ ID NO: 6535

SEQ ID NO: 19184 - protein, 462 aa, unidentified; identical to SEQ ID NO: 10791
  REGION 1..462: note = Human gut metagenome

SEQ ID NO: 19185 - protein, 353 aa, Arthrospira sp.; identical to SEQ ID NO: 3451

SEQ ID NO: 19186 - protein, 421 aa, unidentified
  REGION 1..421: note = Human gut metagenome
MASMQYVYVLNKHGEPLIPCSPGKARLLLKQQKACVVKRTPFTIKLLYGSAGYKQPITLGVDAGSKHVGLSASTEKRELYREEFTPRNDVVDLLSTRRQNRRSRRNRKTRYRAPRFDNRVHSKHKGWLAPSVEVKIQEHITVIKRICRILPITLVRVETAEFDTQRLKAMLKGKPLPVGTDYQLGEMYDEYNVRQYVLKRDNYTCQCCGAHPTEKKPVRLHVHHLESRHVGGNAPNNLITLCVACHKALHEGKITLDKGKKRGKPLRDAAFMGIMRNTLLARLKDELNIPVKQTYGYITKLLREKNKIPKSHVNDARCIAKAPNAKPCDTMLYTRALRHHNRQIHKAKILNGGIRKKNQAPYLVKGFRLWDKVRYNGEECFITGRRSSGYFALKKYDGTVISNSASYKKLMLLEAATNYIT

SEQ ID NO: 19187 - protein, 416 aa, Moorena sp.
MNQVFVLDTTKQPLNPVHPGYARLLLKQGKAAVYRRYPFTIRLSRRVEQPILSPLRIKVDPGSKTSGLALVNDASGDVVWAAELTHRGEQIKRDLDRRRAIRRKRRQRKTRYRKPRFTNRRKRRGTLPPSLESRVCNVLTWVCRLMKVCPVTNISQELVRFDTQALETPDIEGAQYQRGQLSGYEVREYVLLKWKHQCAYCDARDVPLELDHIDPRSRHGSNRVSNLTLACTPCNQRKSNQDVRQFLRDEPERLARILAQMKAPLRDAEAVNATRWMLNARLKTLGLPVECGSGGRTKCNRITRELPKTHWLDAVCVGRSTPESLIIKNIVPLQIRATGHGSRQMCRMDKYGFPRTGSKQHKRVQGFQTGDLVRAVVTSGTKQGTYVGKVAVRSRGTFNISTAHGVVTDIHHRFCV

SEQ ID NO: 19188 - protein, 322 aa, unidentified; identical to SEQ ID NO: 3988
  REGION 1..322: note = Human gut metagenome

SEQ ID NO: 19189 - protein, 433 aa, Lactobacillus sp.
MQNRVFVINKHGKALMPCKPRKARILLRDGKAKVLKKEPFTIQLLYGSAGYKPDISIGIDSGQRHIGLAVTSQDKVLFQGEVELRQDVKKLIDTRRIYRRSRRNRKTRYRKARFLNRIAKKKDNWLPPSVASKVNHNINWIKRLLSVLPKADLHIEVGKFDMQKMKNLEINGEGYQQGDLYGYQTVKQFVLARDDYTCQACKKKGGKLKIHHIIYRSLGGTNTVDNLITVCSKCHTTKNHQTGILAKWCKDKKKVNKSYKGATFMNILRRRLYTAFPQAKFQYGAWTTLQRADLELTKSHYNDAVAISGIRKIQAKPTSIMMFKQFRKKKRSLHEATARKGRKTPNITSKRNAKNTKYAKGFWLNDYVKIKDSDKKGYISGFSKTTCYIKDIFGNYLTTSDRYKQVALSKLDRLSHHNNWSKQEINENMYQMG

SEQ ID NO: 19190 - protein, 493 aa, unidentified; identical to SEQ ID NO: 3781
  REGION 1..493: note = Human gut metagenome

SEQ ID NO: 19191 - protein, 396 aa, unidentified
  REGION 1..396: note = Human gut metagenome
LLKQKKACVIKRTPFTVKLLHGSAGYKQPVTLGVDAGSKHIGISATTEKHELYREEATPRNDVVDLLSARRAFRRSRRNRKTRYRAPRFNNRVHSKHKGWLAPSVEVKIQEHITLIKHACRILPVTLVRVETAEFDTQRLKAMLEGKPLPVGTDYQLGEMYDEYNVRQYVLKRDNYTCQCCGAHSTKTKGVKLHVHHIETRRTGGNAPNNLITLCKACHKALHAEKVTLDGKKRGKPLKDAAFMGIMRKTLMERLRKELKIPVQGTYGYITKYLREKNGIPKSHTNDARCISKNPLAIPCDTCYYTKAVRHHNRQLHKATILKGGIRKANQAPYIVKGYRLWDKVAYNGTECFITGRRTSGYFALKKLDGTVVSNSISYKKLRLLEAATNYIIERK

SEQ ID NO: 19192 - protein, 392 aa, Anoxybacillus sp.
VVGSASVLHITSIYNMVEENMTCFMQRKGENPMVFVLDTNKRPLAPCHEAVARKLLKQGKAAIYRRFPFTIILKKSVDESEIKATYRLKIDYGSRHTGLAILRGQEVVWLGQLDHRTDIKERIDKRRAFRRARRNRKTRYRKPRFLNRKRKDGWLPPSLESRVQNIQTWVERLRKICPIEHISYENAKFDTQLMRNPEINGVEYQQGTLQGYEVREYLLEKFGRKCCYCGKENVPLEVEHIIPKSRGGTDRVDNLCLACHDCNQRKGSKTAEEFGYPHIQKQVKESLKDASAINSTRWKAYEVLKQTGLDVECGTGARTKMNRIRLDLPKTHYFDACCVGESTTNHLYFKTKEVLFIKAKGRGSRSRTNLDRYGFPRGYLARQKFFFGFQTG

SEQ ID NO: 19193 - protein, 419 aa, unidentified; identical to SEQ ID NO: 3670
  REGION 1..419: note = Human gut metagenome

SEQ ID NO: 19194 - protein, 431 aa, unidentified
  REGION 1..431: note = Human gut metagenome
MPNKVYVINKHGRPLMPCSPAKARHLLDAGKAKVKKRTPFTIQLVYGSSGYTQEVILGVDAGSKTIGMSASTTKEELLSAEVKPRNDVVDLLSTRREFRRARRNRKTRYRKPRFDNRVRSKHKEWLAPSVEVKIQEHITAIRRVCGILPVSKVVVETAEFDLQLLKAIADGKPVPQGEDYQKGEMYGHYNVRQYVLWRDDYTCQCCGAHATKKKEVRLHVHHLESRKVGGDAPDNQVTLCESCHEKLHKGLIAEKDFKKRKRRSTRDATFMGIMRKTLMQRLCSELPIPVVKTRGYITKATREKLLVLPKSHTNDALAIAQGKRGFNVGYLPEIAQIDKIYTIRPVRHHNRQLHKATILKGGIRKSNQTEKYVFGYRLFDKVQFNGQDCFIWGRRTTGIFTIKTINGKMIKDGISFKKLKPVEKSTSYLIA

SEQ ID NO: 19195 - protein, 420 aa, unidentified; identical to SEQ ID NO: 3153
  REGION 1..420: note = Human gut metagenome

SEQ ID NO: 19196 - protein, 450 aa, Moorena sp.; identical to SEQ ID NO: 2935

SEQ ID NO: 19197 - protein, 425 aa, unidentified; identical to SEQ ID NO: 3151
  REGION 1..425: note = Human gut metagenome

SEQ ID NO: 19198 - protein, 408 aa, unidentified
  REGION 1..408: note = Human gut metagenome
MVYVQDIDGKPLMPTTRHGKVIQLLKDKKAVVINTCPFTIKLMYKTSDYKQEIVLGVDAGTKHVGLSATTKSKELYSSEVILRSDIVDLLSTRRELRRTRRNRLRYRKPRFDNRIKSKRTGWVAPSVRHRIDAHIRVIDNVCSILPISRIIVEVAQFDTQKIKNPNISGNEYQEGNQLGFWNIREYVLTRDGHKCQHCKGKSKDPILNVHHIESRKTGGDSPSNLITLCETCHKEYHKGKIDLRVKRGKSLRDAAVMGIMKWKLYEELRSRYDNVSMTFGYITKHNRIKYGIEKSHISDAFVISKNFNALMLEYHYKVRLIRRHNRQIHKQKVLKGGVKKPNQSSFEVFGFRLFDRVMFEGNCYFIFGRRKSGSFNIRDIDGGNQRDITYKKLKLLRCKRFMIQKETN

SEQ ID NO: 19199 - protein, 428 aa, unidentified
  REGION 1..428: note = Human gut metagenome
LKVFVLNMRGQPLMPCSPAKARHLLKAGKAVVRRRTPFTIQLRIATGEMKQSVTLGVDAGAKHVGLSAATEKEEVFASEVELRQDITGLLAARLSLRRDRRHRKTRYRAPRFLNRVRSKHKGWLAPSVENRIQAHMSRIDAICGLLPVTKIVIETASFDIQKIKHPNVEGTDYQQGDQLGFWNVREYVLFRDGHVCQHCHGHSKDKILNVHHLESRQTGGDAPNNLITLCETCHKACHAGKIKLKVKRGQSFRAEAFMGIMRWTLLDRVRKAHPGLPVENTYGYLTKNTRIAMGLPKAHCVDAYCIAGNLKAVRRGVHLYQRQVRKHNRQIHKCTVLSKTLKDGTKIGYRKLNQTPHLVKNFRLFDKVRCLGQTGFIFGRRSSGYFDVRRLDGVKISSCISYRKLTLLEKRSTYLTELRKEDGASSPV

SEQ ID NO: 19200 - protein, 427 aa, Moorena sp.; identical to SEQ ID NO: 3216

SEQ ID NO: 19201 - protein, 415 aa, unidentified; identical to SEQ ID NO: 10543
  REGION 1..415: note = Human gut metagenome

SEQ ID NO: 19202 - protein, 411 aa, unidentified; identical to SEQ ID NO: 5658
  REGION 1..411: note = Human gut metagenome

SEQ ID NO: 19203 - protein, 413 aa, unidentified; identical to SEQ ID NO: 3695
  REGION 1..413: note = Human gut metagenome

SEQ ID NO: 19204 - protein, 461 aa, unidentified
  REGION 1..461: note = enrichment culture
LIRELKGNFMQKLDRRNTYIPVSASQADSSMALSLNREEALSEQSLKTLSNNPEVNQPQCKEGQNLRVSVKVYILNLRGKPLMPCSPREAKKLLREGKAIVIKRFPFTIQLLVTTGETKQKVTLGIDSGFENIGFSAVSETKELISGTVRLDGKTSKRLTERRMYRRNRRNRLWYRKPRFLNRSKPEGWLPPSVQRRYDTHLNLINRLKKILPIQEIIVEIANFDIQKIMTPDISGTDYQQGSLYGYQNMRSYLMAREHGKCQLCGKDFKKQQSHIHHCKQRNESGSNRAENLAILHQKCHEKLHKKGLKLSKPKSYKPNTFMSIIHKKFKQDIPDIVITYGYITFVNRNKLGLEKSHSTDSFVIANGNIQERTKDTDIKQVHRNNRVLQLNRKGFAPSIKREKSKVNPEDLFWVAGKQYICKGMFNKGQYITYGSTKNKEYFKFSQVEKTYSQGSFVWIM

SEQ ID NO: 19205 - protein, 493 aa, unidentified; identical to SEQ ID NO: 2644
  REGION 1..493: note = Human gut metagenome

SEQ ID NO: 19206 - protein, 407 aa, Succinivibrio sp.; identical to SEQ ID NO: 11987

SEQ ID NO: 19207 - protein, 430 aa, unidentified; identical to SEQ ID NO: 11678
  REGION 1..430: note = Wastewater metagenome

SEQ ID NO: 19208 - protein, 429 aa, unidentified
  REGION 1..429: note = Human gut metagenome
MPCSPAKARLLLKEKKAIVVRRTPFTIQLTIATGETKQPVSLGVDAGYKHVGLSASTEKAELYASEVELRQDITDLLSARRALRQSRRNRKTRYRAPRFDNRIRTKRKGWLAPSVENRINAHLSRIETVIRLLPVTKISVETTSFDMQLLKNSDTAGKEYHEGEQLGFWNVREYVLFRDGHVCQHCHGRSKDPVLNVHHLESRRTGGDSPGNLITLCETCHKALHRGEIKLKAKRGRSFRAETFMGIMRWGVLNRLKASHPKLEVHNTYGYRTKHARIANGIAKSHCADAFCIAGNFGAKRLGEFFFQKQTRRNNRQIHKLSILKGGIRKRNQAPFEVKGFRLFDKVACQGEEGFIFGRRSTGYFDVRKLDGTCISAGISYKKLHLLEKRRTYLTEIRKEEALPPLPEGRGRPRLNLMNLSTKTTFLFS

SEQ ID NO: 19209 - protein, 431 aa, unidentified; identical to SEQ ID NO: 4306
  REGION 1..431: note = Human gut metagenome

SEQ ID NO: 19210 - protein, 406 aa, unidentified; identical to SEQ ID NO: 5685
  REGION 1..406: note = Human gut metagenome

SEQ ID NO: 19211 - protein, 447 aa, unidentified
  REGION 1..447: note = Human gut metagenome
VPAYRFKHITKKEVPYMVYVLDIDGQPLMPTSRHGKVRRLLNSHLAKVVKRCPFTIQLLYQSTKETQPVSLGVDAGSRHIGLAATTEQKVVYQEELVPRNDVVKLLSARRALRSSRRSRKTRYRKPRFNNRVHSKHKGWLAPSVEVKIQKHITAIKRICQILPISDIHVETAEFDLQRLKAMEEGRLLPAGTDYQLGEQYDFYNTRQYVLHRDEYTCQCCGTHDNNVKLHVHHVESRQTGGEAPNNLITLCEHCHKSIHAGKMMLPKGKKRGKSYRDAAFMGIMRNTLLERLRKEVNVPVTMTYGYITKYWREKAGLEKSHINDAICISKHPYARPLETYYLTKAVRHHNRQIHKTKFSKGGIRKRNQAPYLVKGFRLFDKVLYQGESYFIFGRRITGYFDIRTLDGTKVNKGSTSYKKLRIQDTAEAYLTEVRAIPHMNEFTCVLA

SEQ ID NO: 19212 - protein, 303 aa, unidentified
  REGION 1..303: note = Human gut metagenome
APSVENRINAHLSRIEAVLRLLPITKITVETASFDMQRLKNPDISGKEYQEGEQLGFWNVREYVLFRDGHVCRHCHGRSKDPVLNVHHLESRRTGSDSPDNLITLCETCHKALHRGEITLKAKRGQSFRAQAFMGIMRREVLNRLKASYPELKVHETYGYLTKHARIANGIVKSHGADAFCIAGNLGAERLGEFFFQKQTRRNNRQIHKLSILKGGIRKRNQAPFEAKGFRLFDKVACQGEEGFIFGRRSSGSFDVRKLDGTRISAGISCKKLRLLEKRRTYLTEIRKEEALPPLPEGRGLRA

SEQ ID NO: 19213 - protein, 406 aa, unidentified
  REGION 1..406: note = Human gut metagenome
MVYVQDIDGKPLMPTTRHGKVRRSLKANKATVVNPCPFTIQLTYESTDHKRPVTLGIDAGAKHIGFSATTEKEELFACETILRTDIVDLLSTRSQNRRTRRSRLRYRKPKFNNRVFSKKKGWVAPSVKQRIDSHLNEVNEIHKILPITKIVIEAAQFDTHKMKNPNISGIDYQNGEQLGFWNVREYVLFRDGHKCSYCKGKSKDPILNIHHIESRKTGGDSPSNLITLRETCHKEYHKGDIDLKARRGKSLCGAAIMGIMKWRLYDELKSRYSNVSMTFGYITKYNRIKYGIEKSHTSDAFVISKNFNAKRIEYQYLKRLARRHNRQIHKMKILKGGKKKNNQAPFEVFGFRLFDKVLYNNEINFIYGRRKSGNFNIRDFNGENPKDVSYKKLKLIRGKRHPIILK

SEQ ID NO: 19214 - protein, 435 aa, Leptolyngbya sp.; identical to SEQ ID NO: 8219

SEQ ID NO: 19215 - protein, 423 aa, Moorena sp.; identical to SEQ ID NO: 3393

SEQ ID NO: 19216 - protein, 427 aa, Anabaena sp.; identical to SEQ ID NO: 14309

SEQ ID NO: 19217 - protein, 465 aa, unidentified
  REGION 1..465: note = Human gut metagenome
MSTCVCVLSNNGERLMPTFRLGRVRHLLKDGKAKIIKHHPFTIQLLYDSKTNTQPIEICEDVGYNYIGISVKSQSHEYVSAQYDTLQDEKSCHDACRRMRRTRRNRLRYRQKRFDNRKRDKGWLAPSLKHKKELNVNVIKMYCEVVPITHATVEVGSFDTMLVKAIEEGKATPESADYQKGPRYKLATLREAVFYRDNYTCQVCGRKANEGAILHVHHMFYWKGRHGNSLSELITVCEKCHTPANHQKGGKLYGFGEDIKFANLSGAAFMNTVRWQIVNVLNAAFGKPFVTFTYGAMTKEKRIALHLEKSHNNDAYAMGSFHPVNRCAFEHYEKVKRNNRILEKFYDSQYIDTRTGELTNGKSLFNGRISRSHKKDSENLHKYRGKRIRKGYRALRRKKVALNPGDLVSLNGEILTVHGTHTKKNGSVNVEFKTPSRGGKKSASLKKLKIVKATSSIHPAWEKVS

SEQ ID NO: 19218 - protein, 424 aa, unidentified; identical to SEQ ID NO: 8578
  REGION 1..424: note = Human gut metagenome

SEQ ID NO: 19219 - protein, 415 aa, unidentified; identical to SEQ ID NO: 2674
  REGION 1..415: note = Human gut metagenome

SEQ ID NO: 19220 - protein, 508 aa, Moorena sp.
MHQALQTLAMGATCGGHGQNSVVSVANHQLIEKEASVMKVFVIGRNGLGLMPTKPRLARILLSKGKAIVVKKRPFTIKLLYKTGSATQHCEVGIDTGSQHIGVAIVADDVVLTKEEWELRSSMEKRSLMETRKEYRSGRRYRKTRYRHPKFMPHTKRVYYEKAVTRHGHKTHWIKVKNEFTSYREDGWLAPSLQSKVDHHHRIIDSYLSALPKDTHLNIELARFDTHKAVDPDVTGEGYQYGPLYQQENLKAYVFARDNYTCQICGAKAGRVRKDGSTVKLIGHHINYRSNGTTNNPSGILSVCDKCHTQADHQPGGKLYQLMISNKKIARGLRDMTTVNIVVSQLRKMYPSAFFTYGNYTKANRDLMGLLKSHANDAVAIAKCQDILFTGNLTICDCNGTVYYKQVRRKKRSLHEANPRKGRKTLNRTAKRYSKNTKRVKGYDLYAKVTYDGQLGYISGFTGTSAYIQDWEGRYIRMQNKTYLSIPLSKLHKLDNGHNWLSRFIPSL

SEQ ID NO: 19221 - protein, 415 aa, Bacillus sp.; identical to SEQ ID NO: 2671

SEQ ID NO: 19222 - protein, 421 aa, unidentified
  REGION 1..421: note = Human gut metagenome
MRGQPLMPCSPAKARHLLKAGKAVVKRRTPFTIQLRIATGETKQNVTLGVDAGAKHVGLSATTEKEEVFASEVELRQDITGLLAARLSLRRDRRHRKTRYRAPRFLNRVRSKHKGWLAPSVENRIQAHMSRIDAVCRLLPVTKIVIETASFDIQKIKDPSVEGTDYQQGDQLGFWNVREYVLFRDGHVCQHCHGRSKDKILNVHHLESRQTGGDAPNNLITLCETCHKAYHAGKIKLKVKRGQSFRAEAFMGIMRWTLLDRVRKAHPKLPVENTYGYLTKHKRIALGLPKTHCADAFCIAGNLKAVRRGVYLHQRQMRKHNRQIHKFTVLSKRLEDGTKIGYRKLNQSPYLVHGFRLFDKVRCLGQIGFIFGRRSSGYFDVRRLDGVKLSPSISWRKLTLLEKRSTYLTELRKQDGASSPV

SEQ ID NO: 19223 - protein, 429 aa, Beggiatoa sp.; identical to SEQ ID NO: 11852

SEQ ID NO: 19224 - protein, 512 aa, unidentified; identical to SEQ ID NO: 4307
  REGION 1..512: note = Human gut metagenome

SEQ ID NO: 19225 - protein, 415 aa, unidentified
  REGION 1..415: note = Human gut metagenome
MVYVVANDGQPLMPTERHGKVCRMLKSGMAKVVKKCPFTIQLQYESERNVQPVSLGVDAGSKHIGISATTKTKVLYESDVELRDDIVKLLATRRQLRLSRRSRKTRYRPVRFDNRKRKEGWLAPSIRQKIGSHLTVVANVCKILPINQIIVETASFDIQKIKDPEIQGIEYQQGEQMDFWNIREYVLFRDGHTCQCCKGRSKDKILNVHHIESRKTGGNAPNNLITLCETCHKGYHNGTVILPKNIKHGMQFKDAAFMGIMRWTFYNTLKEQYEPDIPVHYTYGYITKNTRINHNLPKGHCIDARCISGNPDAVSDGTYYYQKKVRCHNRQIHKQTILKGGIRKSNQAEYLVRGFRLFDKVRYQGREYFIFGRRKSGFFDIRTLSGEKVNKGSISVKKLTFADTRKNYLTERRTV

SEQ ID NO: 19226 - protein, 470 aa, unidentified; identical to SEQ ID NO: 8190
  REGION 1..470: note = Human gut metagenome

SEQ ID NO: 19227 - protein, 421 aa, unidentified; identical to SEQ ID NO: 2846
  REGION 1..421: note = Human gut metagenome

SEQ ID NO: 19228 - protein, 424 aa, Moorena sp.; identical to SEQ ID NO: 7692

SEQ ID NO: 19229 - protein, 442 aa, unidentified
  REGION 1..442: note = Human gut metagenome
MSVSVFVLDKRKKPLMPCRPARARKLLNAGRARVVKTYPFTIRLVDRLLENSAVQPVAVKVDPGSEQSGMAVVRDDGKAHHHALFFINLVHRGKVIRDRLTGRRAFRHRRRSANLRYRAPRFLNRKRRKGWLPPSLQHRVDTTMSWVKKLRKLVPVTALWVENVKFDTQKLQNPEVSGVEYQQGTLFGFEVREYLLEKFGRRCVYCGAENTPLNIDHVVPRAKGGSDRVSNLVLACTDCNQKKGAQPLEAFLKDKPQQFERIRRQLKAPLRDAAAVNATRWALFNALKQTGLPVATGTGAQTKFNRKAFGIPKGHWLDALCVGRINGADYPEGMGILQVRCTGRGSYQRTRLNKYGFPRGHLMRQKRVHGFATGDMVKAVVPSGKKAGIHQGRVAVRVTGSFAIQKADGKVDGIHWRHCRLISHNDGYGYAWLRPAPHSSLV

SEQ ID NO: 19230 - protein, 424 aa, unidentified; identical to SEQ ID NO: 3232
  REGION 1..424: note = Human gut metagenome

SEQ ID NO: 19231 - protein, 396 aa, unidentified
  REGION 1..396: note = Human gut metagenome
VVRRTPFTIQLTIATGESKQPVSLGVDAGYKHVGLSASTEKAELYASEVELRKDITDLLSARRALRQSRRNRKTRYRAPRFDNRIRTKRKGWLAPSVENRINAHLSRIEAVLRLLPITKITVETASFDMQRLKNPDISGKEYQEGEQLGFWNVREYVLFRDGHVCRHCHGRSKDPVLNVHHLESRRTGSDSPDNLITLCETCHKALHRGEITLKAKRGQSFRAQAFMGIMRREVLNRLKASYPELKVHETYGYLTKHARIANGIVKSHGADAFCIAGNLGAERLGEFFFQKQTRRNNRQIHKLSILKGGIRKRNQAPFEIKGFRLFDKVACKGEESFIFGRRSSGYFDVRKLDGTRISAGISYKKLRLLEKRRTYLTEIRKEEALPPLPEGRGLRA

SEQ ID NO: 19232 - protein, 438 aa, unidentified
  REGION 1..438: note = Human gut metagenome
MTMVYVQNKDGKPLMPTTRYCYVRLLLKEKKARVVCTTPFTIQLNYDTSDITQDLILGIDPGRTNIGVAVVKENGQCVFSAHLETRNKEVPLLMKKRAAFRRNHRTLDRRRKRQRRAIAAGTTVESNTIERLLPGYEKPVVCHYIRNKEARFNNRSRPVGWLTPTANHLLQTHINLIAKVAKFLPITKVVVELNRFAFMAMDNPNIRRWEYQQGPLYGLGSVDDAVYAQQAGHCLFCKKSIDHYHHVVPRHKGGSETLANRCGLCEKHHDLVHKDKAWAEKLVTRKGGMNKKYHALSVLNQIIPHLMEYLGEETSYDVYATDGRSTKGFRIAKNVPKEHYTDAYCIACSILDANTKVSTPAEPFKLKQFRRHDRQSCIRQMVDRKYILDGKVVATNRHKAIEQKSDSLQEFREVYGDAAVSQLTVRPHSPQYKDMARI

SEQ ID NO: 19233 - protein, 545 aa, unidentified; identical to SEQ ID NO: 10741
  REGION 1..545: note = Human gut metagenome

SEQ ID NO: 19234 - protein, 521 aa, unidentified
  REGION 1..521: note = Human gut metagenome
LYIKMTSCTCTVFPAYNYAKASSSQGKHNLLLRQERLIVKEVTYMSTVYVLNKDGKPLMPTTRGGHVRHLLKEQKARVVRTNPFTIQLLYETDNLVQPLYLGIDPGRTNIGVAVVKTDGTAVFTAHLETRNKEIPKLMQGRKKARRARRTNGRRCRRQRRAKANGTISKKCVKQATAQNGSVSKRANEIGVIKRHLPGCEKEVLCIGIKNKEAKFSNRTRPEGWLTPTANQLLQTHINLVKKIQKFLPISDVVLEINKFAFMRLDNPNVQKWQYQQGPLYQKANLEETVSEMQEHHCLFCKKPIDHYHHVVPQHKNGSNTISNIVGLCTKHHDLVHKEAVWQEKLAKKKTGLNKKYGALSVLNQIIPALTKELSSLFPKHFFVTNGKSTYDYRAAHGVSKDHWLDAYCIACSVLPNDTCDKTINSRVPYELKQFRRHDRRALNNENMSRVYTFNGKMVATNRHKATEQTTDSLEEFRQRQPNDVCNLKVKEHHPTYRNMNRNYPGSVFLVGNQVHVMQGIA

SEQ ID NO: 19235 - protein, 431 aa, unidentified; identical to SEQ ID NO: 15055
  REGION 1..431: note = Human gut metagenome

SEQ ID NO: 19236 - protein, 453 aa, Lactobacillus sp.; identical to SEQ ID NO: 4050

SEQ ID NO: 19237 - protein, 453 aa, unidentified; identical to SEQ ID NO: 5967
  REGION 1..453: note = Human gut metagenome

SEQ ID NO: 19238 - protein, 465 aa, unidentified
  REGION 1..465: note = Human gut metagenome
MSTCVCVLSNNGERLMPTIRLGKVRHLLKDGKAKIVKHHPFTIQLLYDSKANTQPIEICEDVGYNYIGISVKSEFHEYVSVQYDTLQDEKDCHDGCRKLRRTRRNRLRYRQARFDNRKRDDGWLAPSLEHKKELNVNVIKMYCKVMPITHAIVEVGSFDTMLVKAIEEGKATPESADYQKGPRYNLATLREAVFYRDNYTCQVCGRKANEGAILHVHHMFYWKGRHGKSHSELITVCEKCHTPANHQKGGKLYGFGEDIKFANLSGAAFMNTVRWQIVNVLYAAFGKPFVTFTYGAMTKEKRIALHLEKSHNNDAYAMGSFHPVNRCAFEHYEKVKRNNRILEKFYDSQYIDTRTGELTNGKSLFNGRISRSHKKDSENLHKYRGKRICKGHRALRRKKVALNPGDLVSLNGEILVVHGTHTKKNGSVNVEFKTPSRGGKKSASLKKLKIVKTSNLMHSAWTKVS

SEQ ID NO: 19239 - protein, 465 aa, unidentified; identical to SEQ ID NO: 2709
  REGION 1..465: note = Human gut metagenome

SEQ ID NO: 19240 - protein, 411 aa, unidentified; identical to SEQ ID NO: 6901
  REGION 1..411: note = Human gut metagenome

SEQ ID NO: 19241 - protein, 426 aa, unidentified; identical to SEQ ID NO: 3614
  REGION 1..426: note = Human gut metagenome

SEQ ID NO: 19242 - protein, 460 aa, Moorena sp.; identical to SEQ ID NO: 5845

SEQ ID NO: 19243 - protein, 414 aa, unidentified; identical to SEQ ID NO: 12795
  REGION 1..414: note = Human gut metagenome

SEQ ID NO: 19244 - protein, 442 aa, Lactobacillus sp.; identical to SEQ ID NO: 3147

SEQ ID NO: 19245 - protein, 423 aa, unidentified; identical to SEQ ID NO: 8227
  REGION 1..423: note = Human gut metagenome

SEQ ID NO: 19246 - protein, 459 aa, unidentified; identical to SEQ ID NO: 7794
  REGION 1..459: note = mine drainage metagenome

SEQ ID NO: 19247 - protein, 421 aa, unidentified; identical to SEQ ID NO: 2738
  REGION 1..421: note = Human gut metagenome

SEQ ID NO: 19248 - protein, 515 aa, unidentified; identical to SEQ ID NO: 11080
  REGION 1..515: note = Human gut metagenome

SEQ ID NO: 19249 - protein, 515 aa, unidentified
  REGION 1..515: note = Human gut metagenome
MTALEERLSKTEYIYVLGFDGKPQMPTRRKRHVLKLLKTGRARIAEDIPFTIRLTYRNAPVLQPVTLAEDPGRTNIGAAVLSPLGDLLFAAVIETRNKEIKKLMADRKKSRQASRRGERKARQRLAKRYGSMVKSGMVMRKLPMYAADRFVTCKFIRNTQARFCNRKRCPDWITPTVQHLVQTHLNIIRKISRYLPVTDIAFEVNRFAFIHMENPKAMGVDFQNGPLKGYGDVKEAIRTQQHGKCLMCKKPITHFHHIVPRSRGGSDTIQNLAGLCPECHTKVHTDTTFRKDFDRKKSGQLKKYGALSALNQAVPFICKKLLEEYGEEHVHFCRGLDTSLIRTAFGFEKTKKNQMHEVDAYCIGLAALEVNEVETPAFDHTFQIRQFRRQDRSIIHHQTGRSYYQGKEKVAQNRKPGFEQKTTALSQWYKEQIRIHGEKEAEKLRSQLRVEKSSRHYNDMDRFLPGAVFLYEGKRYVLSGRITNGKYLRACGQGMKNFPAAECTFIRHNAGLVFI

SEQ ID NO: 19250 - protein, 258 aa, unidentified
  REGION 1..258: note = Human gut metagenome
LKVFVLNMRGQPLMPCSPAKARHLLMDKKAVVKRRTPFTLQLTIATGETKQDVTLGVDAGAKHIGLSASTEKEEVFASEVELRQDITGLLAARLAFRRARRHRKTRYRAPRFLNRVHSKHRGWLAPSVENRIQAHMSRIDAICGLLPVTKIVIETASFDIQKIKNPDVEGTDYQQGDQLGFWNVREYVLFRDGHVCQHCRGRSKDKVLNVHHLESRQTGGDAPNNLITLCETCHKAYHAGKIKLKVKRGQSFRAEAFM

SEQ ID NO: 19251 - protein, 456 aa, unidentified
  REGION 1..456: note = Human gut metagenome
MAYTYVLDMNKNPLMPCHNGGFIRTLLKEKKAKVVRNKPFTVQLLFEVRNKYKQDMTLGIDAGYKHIGFSVSTSKAEVFSAELEQECGMVERNKERRMYRRQRRSRLRYRKARFNNRIASKQKGWIAPSLKRKRDTHLRFIMMLKSIMPITKITVEIGLFDPALMKAIAEGRTLEGEDYQHGEAEGFENMKSYIRYRDGYTCQNPDCKCHRMSASDKEKLRFAVHHIGYYRNDRSNRPGNLITLCELSHTPENHQPGHLLYGWKPKIKSLKETAFMNIIRKEIVDTLKVIYPTTEIRYTYGYRTNMTRNEWHIKKSHHDDAFCIAGNYSKNRCNTLYFHQKRRNNRSLEIFYDAKYIDGRDGKRKSGKELFCGRTTRNKNYAGENLHKYRLKKISKGKRSIRRQHYFYQPKDIILFEGIKHVIKGSHCNGSRLILDTGKSVSVKKARIHKFSGGIY

SEQ ID NO: 19252 - protein, 456 aa, unidentified
  REGION 1..456: note = Human gut metagenome
MSTCVCVLSNSGERLMPTFRLGKVRRLLKDGKAKIVKHHPFTIQLLYDSKTNTQPIEICEDVGYNYIGISAKSKSHEYVSAQYDTLQDEKEHHDDCRKMRRTRRNRLRYRKPRFDNRKCDKGWLAPSLEHKKQLNISLIERYVSVIPITHATVEVGSFDTMLLQAIQKGKAKPESADYQKGPHYNLATLREAVFYRDNYTCQVCKRKIADGAILHMHHMFYWKGRHGYQLDELATVCEKCHTPANHQKGGKLFGYGEGKEFADLSGAAFMNAVRWQIVDALYTTYDKEFVTITYGAMTKEKRIALQLEKTHNNDAYAMGDYHPACRCKFRHYQKRRRNNRVLEKFYDATYIDARTGNKAKGKELFNGRINRNHKKDSENLHKYRSKKVSKGRRSIRRRRYAIQSYDTVRLEGKTYITSGCHNKGTRLLIPVNGKSKSVAISKVQVVCHAGAWIQIS

SEQ ID NO: 19253 - protein, 481 aa, unidentified; identical to SEQ ID NO: 10976
  REGION 1..481: note = Marine metagenome

SEQ ID NO: 19254 - protein, 412 aa, unidentified; identical to SEQ ID NO: 17658
  REGION 1..412: note = Human gut metagenome

SEQ ID NO: 19255 - protein, 424 aa, unidentified; identical to SEQ ID NO: 6692
  REGION 1..424: note = Human gut metagenome

SEQ ID NO: 19256 - protein, 419 aa, unidentified; identical to SEQ ID NO: 6355
  REGION 1..419: note = Human gut metagenome

SEQ ID NO: 19257 - protein, 430 aa, Moorena sp.; identical to SEQ ID NO: 3328

SEQ ID NO: 19258 - protein, 350 aa, unidentified
  REGION 1..350: note = Human gut metagenome
LQQTPSQGKHNLLLRQGRLIIKEVAYMSTVYVLNKNGKPLMPTTRCGHIRYLLKEKKARVVASKPFTIQLLYETNDVVQPLYLGIDPGRTNIGVAVVKTDGTAVFTAHLETRNKEIPKLMKKRKDSRRARRTNGRRCRRQRRAKANDTISKKCVKQATAQNGSVSKRAKEIGVIKRHLPGCEKEVLCIGIKNKEAKFSNRTRPEGWLTPTANQLLQTHINLVKKIRKFLPISDVVLEVNKFAFMRLDNPNVQKWQYQQGPLYQKASLEEAVSEMQERHCLFCKKPIAHYHHVVPQSENGSNTIDNIVGLCTKHHDLVHKDTTWQKKLAYITVCTKLLPGLSFKILLQICG

SEQ ID NO: 19259 - protein, 337 aa, unidentified
  REGION 1..337: note = Human gut metagenome
RREFRRARRNRKTRYRKPRFDNRVRSKHKGWLAPSVEVKIQEHITSIKRVCRILPVSKVVIETAEFDLQLLKAIADGKPVPQGEDYQKGEMYGHYNVRQYVLWRDNYTCQCCGTHPSKKKEVRLHVHHLESRKVGGDAPDNQVTLCESCHEKLHKGLIAEKDFKKRKRRSTRDATFMGIMRKTLMQRLCSELPIPVVKTRGYITKATREKLLVLPKSHINDALAIAQGKHGFNVGYLPGILQIDKIYTIRPVRHHNRQLHKATILKGGIRKSNQTEKYVFGYRLFDKVQFNGQDCFIWGRRTSGYFVVKTIDGKVIHNSASFKKLKLVERASNYLIA

SEQ ID NO: 19260 - protein, 512 aa, unidentified; identical to SEQ ID NO: 2745
  REGION 1..512: note = Human gut metagenome

SEQ ID NO: 19261 - protein, 433 aa, unidentified; identical to SEQ ID NO: 6602
  REGION 1..433: note = Microcoleaceae bacterium UBA10368

SEQ ID NO: 19262 - protein, 406 aa, unidentified; identical to SEQ ID NO: 3415
  REGION 1..406: note = Human gut metagenome

SEQ ID NO: 19263 - protein, 457 aa, unidentified
  REGION 1..457: note = Human gut metagenome
MDAVAVFSASGKPLMPTNPVRARKLIKKGKAVIYKYRPLFTIRLTERTDGDIQTIEYCCDTGYQHIGLSIKSRKHEYVNERRDLLPNETERHNDSRKYRKARRRRKLRHRACRRDNRHDNQICKDGYAPSIRNKRDQHISLYRSYTEILPVERAVFEMGQFDTQVLKAIEKGEPLPQGKDYQHGERYGYATLREAVFARDDYTCICCGKNAFKDKRILCVHHLGFRIGDRTNRLANLATVCTKCHTPKNHQPKGKLYNLKPELKDFKGATFMTMVRWDMLDKLKVVSKDIQVDVTYGAATKEARRDLKIKKSHANDAYCMGSFHPSHRTDLKRYEKCRRNNRVLSKFYDATYIDIRDGKKKKANALGCNRTKRRESRRSEKNERIYRGEKVSKGRIVLRTKRAVIRPGDIVYVGKKKYIVASSKNLGKQLKLADGSLLTTSKVTKIIHCGGWKTVTL

SEQ ID NO: 19264 - protein, 427 aa, unidentified; identical to SEQ ID NO: 4946
  REGION 1..427: note = Human gut metagenome

SEQ ID NO: 19265 - protein, 420 aa, unidentified
  REGION 1..420: note = Human gut metagenome
MQYVYVLSKHGEPMMPCSPGKARLLLKQQKACVVRRTPFTIKLLYGSAGYKQPITLGVDAGSKHVGLSASTEKRELYREEFTPRNDVVELLSTRRQNRRSRRNRKTRYRAPRFDNRVHSKHKGWLAPSVEVKIQEHITIIKRICKILPISLVRVETAEFDTQRLKAMLAGKPLPVGTDYQLGEMYDEYNVRQYVLKRDNYTCQCCGAHTTAKKLVKLHVHHLESRKTGGNAPSNLVTLCTTCHKNLHKGKVTLDGKERGKPLRDAAFMGIMRKTLMARLKEELPIPVQGTYGYITKMRREQNDIKKSHTNDARCISKHPLAEPCSVCYRTKAIRHHNRQTHKANFSKKGIRKRSQMPYLVEGYRLWDKVLYKEQECFVSGRRSSGSFTLKKLDGTSVSKGVTFKKLRLLEPATNYLIERM

SEQ ID NO: 19266 - protein, 418 aa, Moorena sp.; identical to SEQ ID NO: 4341

SEQ ID NO: 19267 - protein, 361 aa, unidentified
  REGION 1..361: note = Human gut metagenome
SASTEKAELYASEIELRQDITDLLSARRELRRARRNRKTRYRAPRFDNRIRTKRKGWLAPSVENRINAHLSRIEAVLRLLPVTKITVETASFDMQLLKNPDISGKEYQEGEQLGFWNVREYVLFRDGHVCQHCHGRSKDPVLNVHHLESRRTGGDSPGNLITLCETCHKALHRGEITLKAKRGQSFRAEAFMGIMRWEVLNRLKASHPELEVNNTYGYRTKHARISNGIAKSHCADAFCIAGNLGAKRLGEFFFQKQTRRNNRQIHKLSILKHGLRKRNQAPFEIKGFRLFDKVACKGEEGFIFGRRSSGFFDVRKLDGTRISAGISYKKLHLLEKRRTYLTEIRKEEALPPLPEGRGLRA

SEQ ID NO: 19268 - protein, 470 aa, unidentified; identical to SEQ ID NO: 2825
  REGION 1..470: note = Human gut metagenome

SEQ ID NO: 19269 - protein, 426 aa, unidentified
  REGION 1..426: note = Plant metagenome
VSKIFVIDQNKRPLAPIHPAQARQLLKNKKAAIYRQFPFTLILKESRTESPVSLNRLKIDPGAKHTGIALVNETSGEVVFAAELKHRGFAIRDALTSRRQLRRSRRARKTRYRKPRFLNRTRPSGWLAPSLQSRVDNIKTWVDKLRRFAPITSISQELVRFDMQLMRKPDIQGREYQQGTLAGYETREFLLEKWGRQCAYCQVLDVPLQIEHIHPRAKGGSNSISNLTLSCEKCNTKKGARDIKDFLKKDPSKLEKILKQAKRPLADAAAVNTTRFALLEVLKATGLPVETASGGLTKFNRSQHNLVKTHWLDAACVGTTPKLIIKGVKPLLIAANGHGSRQSCRTDKFGFPSRHVPREKIHFGFQTGDIVKSFVTTGKKIGNYVGKVAIRSSGSFNVSTKNGLVQGISHKFCKRIHAKDGYSYAY

SEQ ID NO: 19270 - protein, 545 aa, unidentified
  REGION 1..545: note = Human gut metagenome
VQFAWWLCHPKPSDNIEDVKHETALMLLQIKAGTETFGTAPCGSGPKAEGVSHERKAMNTVAVVTNTNKPLMPTSPYRARKLLSSGRAKIVKHRPFTILLVNRSDGNVQEIEYKSDTGYLHVGISVCSEKREFVREQRDLLPDEKEKHNDRRKHRRTRRNRKRYRKARFDNRIGKIRKKEKNKHVWLPPSLDHKVDAQVQLFLRLYQVMPIKRAVFEMGQFDPALMKALEKGESAPQGIDYQMGERYQIATRRAAVFTRDRYTCVFCERGIEDHAILHVHHIGFWKQDRSNRLDNLATCCEQCHTSENHRPGGILYGVEPKLKSLASATYMNVVRFELLRRLKEAAPDVEFHISYGAKTSVIRMQRSISKSHTNDAYCLGQYFPKLRAEEIVFQKIRRNDRILQKFYDAEYLDSRDGTTKKGKELTNGRISRNHMKDHKNLHQYRGKKLSKGRITIRRGRSSLKPGSLVRFNGEVLTVHGTHRSRKKNKAGHIKVSVNVEFERPSKTGRKSAALSKCQIISRSYNTGWKKIQLRKEGQGKIAAVG

SEQ ID NO: 19271 - protein, 426 aa, unidentified
  REGION 1..426: note = metagenomes
MLKPNFVLVIDTNLKPLIPCTPCIARKLLEAGKAAIYRQYPFTIVLKKAVTANPEPIELKLDPGSKVTGIALVQGQKVVFGAELTHRGQAIKMSLESRRAVRMGRRARHCRYRQARFLNRTRPKGWLAPSLAHRVKTTITWVKRFIKLAPIGSIVQELVRFDLQQHENPEISGTEYTQGTLAGFEVREYLLNKWDRKCTYCGIENVPLRIEHIHPKAKGGSNRISNLCLACEKCNLKKGTQDIEQFLSKKPDLLKRIKAQQKRPLKDAAAVNSTRWALFNQLQEAGLPVSTGSGGKTKFNRTRLKLEKTHWLDAACVGDLESLSVLTSQPLRIKATGHGSRQMCRINKYGFPCSKPKQSFTHCKTGDIVSITLTKPKVRFEVGTHKGRVKTPTEHGLEIKIGEYRLVVGDMTSVKFIHKQDGYSYQ

SEQ ID NO: 19272 - protein, 436 aa, Moorena sp.
LTKRTNPSNRSTHIMRVFVLDKNRKPLDPCHPAKARKLLKLGRAKVLRRYPFTIIVQDLDVDNCITHQHQLKIDPGAKTTGLAIVQGDRVIWGAELTHRGEHIREALTSRRQLRRSRRNRKTRYRQPRFLNRTRPKGWLPPSLMSRVHNILTWVNKLIKFCPVTGISQELVRFDTQKMLNPEVSGIEYQQGTLYGYELREYLLEKWNRTCAYCGANNTRLEIEHIKPKSKGGSDRVSNLAIACHNCNQAKGNLEIEEFLSSKPNILKRILSQAKKPLADAAAVNATRWKLHDELKSIGLPVEVGSGGLTKYNRCRQNLPKTHWLDAANVGKVDTLYIEDYQPLLITAKGHGKRQVCGTNKYGFPIRHNSRKKIHKGFQTGDIVRAVVTKGKKIGTYVGRIATRKTGSFDITTAKGRVSGISYKYCQAIHRKDGYSY

SEQ ID NO: 19273 - protein, 415 aa, unidentified
  REGION 1..415: note = Human oral metagenome
MFVYVISKTGQSLMPTTRFGKVRRLLRDKKAKVVRSCPFTIKLLYEPKTSIVQDVVLGQDTGSKHVGTACITNDKALYQSEVTLRDDIKSKMDNCRGFRRNRRYRKTRYRKPRFLNRINSTKKDRLPPSVQHKVQSHVDEIEFCKKILPISKIVLEVSQFDTQLMEKPWLQKYKWAYQKGVNYGFANARAHALDRDNYTCQCCGKKHVRLEVHHIIFRSQGGSDELENLITLCEKCHSAIHNGKIVLNLKGKQKRNLRHATQMSIIRSQLLKLYPDAEETFGYVTKANAENLGIEKKHYLDACVIASGGKEFKQSNLLFKKRRVARQNRQLCKGIRGEKKLPTGKIFGFKRFDKVKYLGEICFVKGRRSSGAFVLMDIDNNSIDFRDRGGRQNPSYKLLERLNTRRSTLCISQRI

SEQ ID NO: 19274 - protein, 424 aa, unidentified; identical to SEQ ID NO: 5075
  REGION 1..424: note = Human gut metagenome

SEQ ID NO: 19275 - protein, 512 aa, unidentified; identical to SEQ ID NO: 3741
  REGION 1..512: note = Human gut metagenome

SEQ ID NO: 19276 - protein, 436 aa, unidentified
  REGION 1..436: note = Human gut metagenome
MYWLIALNILKKKGSALMVYVLDINGQPLMPTTRHGKVRRLLNGHLAKVVKRCPFTIQLLYQSTKETQSTSLGVDAGSKHIGLAATTEKKVVYQEEFTPRNDVVKLLSARRILRHSRRNRKTRYRKPRFNNRVHSKHKGWLAPSVEIKIQEHITAIKRICQILPISEIHVETAEFDLQRLKALEDGNPLPVGTDYQLGEQYDFYNTRQYVLHRDGYTCQCCGTHDNNVKLHVHHIESRQTGGNAPNNLITLCEHCHKALHEGKIELPKGKKRGKSYRDAAFMGTMRNTLLERLKKEMDIPVMMTYGYITKYWREKTGLEKSHINDAICISKHPYAKPLDTCYLTKAVRHHNRQIHKANFSKGGIRKRNQAPYLVKGFRLFDKVLYQGKECFIFGRRVSGGMDVRLLDGVRINAFVGYKKLKLLESRKAYLIERRTC

SEQ ID NO: 19277 - protein, 423 aa, Moorena sp.
MRVFVLNKNRQPLDPCKPARARIILSTGKAKVYRRYPFTIILTEEIEEPITHTHQLKIDPGAKTSGLAIVQNSRVVWGGELTHRGFQIRDALTSRRQLRRARRNRKTRYRKPRFLNRPWSEGWLAPSLMSRVYNILTWVKKLTRLCPITGISQELVRFDTQKLQNPEISGIEYQQGTLYGYELREYLLEKWNRKCAYCGTTDTQLEIEHIKPKSKGGSDRISNLAIACHSCNQAKSNQEVEHFLSGKPDVLRRVKAQAKRPLADAAAVNATRWKLYHELKSIGLPVEVGSGGLTKFNRCRQNLPKTHWLDAANVGKIETLVIEVTHPLIITAKGHGTRQLCRTNKYGFPIRYCSRTKVHKGFQTGDIVRAVVTKGKKIGTYVGRVATRKSGSFNISTKSGLVQGISHKYCQFIHRKDGYAYTI

SEQ ID NO: 19278 - protein, 431 aa, unidentified
  REGION 1..431: note = Human gut metagenome
MDAWDIIVVLNKRGKPLMPCSPAKARLLLKEKKAIVKRRTPFTIQLTIATGESKQPVTLGVDAGYKHVGLSASTEKAELYASEVELRQDVSDLLSARRALRQSRRNRKTRYRAPRFNNRLRTKRKGWLAPSVENRINAHLSRIEAVLRLLPVTKITVETASFDLQLLKNPDISGKEYQEGEQLGFWNIREYVLCRDGHVCQHCYGRSKDPVLNVHHLESRRTGGDSPGNLITLCETCHKALHRGEITLKAKRGQSFRAEAFMGIMRWEVQNRLKASHPELEVNNTYGYRTKHARIANDIAKSHCADAFCIAGNLGAERLSEFFFQKQTRRNNRQIHKLSILKGGIRKRNQAPFEVNGFRLFDKVACKGEEGFIFGRRSSGFFDVRKLDGTRISAGISYKKLHLLEKRRTYLTEIRKEEALPPLPEGRGLRA

SEQ ID NO: 19279 - protein, 418 aa, unidentified; identical to SEQ ID NO: 4327
  REGION 1..418: note = Human gut metagenome

SEQ ID NO: 19280 - protein, 420 aa, unidentified; identical to SEQ ID NO: 4198
  REGION 1..420: note = Human gut metagenome

SEQ ID NO: 19281 - protein, 503 aa, Moorena sp.
MDTIYVLNRDGRPLMPMHSWGRVQRFLKSGRASVVSSLPFTIRLKKQIEDPELDRCILGIDPGRTNIGLCVTDGKGKPLFASVLETRNKEIPDLMRDRKQARQASRRGERKRRQRRAIHFDKSGETAMTEYWRVLPGTKKAVCQKHIRGQESKFMHWRRPKGWRTPTAEQLYRTHLNAVAKIEKLLPIADIVIEMNRFDFAKMENPGIRNWEYQRGRLFGFKNVQEAVIARQNGKCLLCGRPIEHVHHVRPRSQGGSDHIDNLAGLCCACHQKVHTDPAAKARLASEAKKRLKKYGALSVINQIMPALLDELAYRYLLWITTGWETAKTRRGCGLPEKEKDDGTHYIDAWCIAVSIMENRLYVPDSRDLDDVFHLMRQFRRHDRQKVEATKARSYYLDGRLVAKNRRPRTGQADGKDPKPALSEWRQGHEKDVARLTVRKSTRSYNDLKRVLPGAEVLCDEKRYVVKGKHNDRWIALDAADHTLEKAQSRFTLLHHNTGIVFV

SEQ ID NO: 19282 - protein, 414 aa, unidentified; identical to SEQ ID NO: 4971
  REGION 1..414: note = Human gut metagenome

SEQ ID NO: 19283 - protein, 535 aa, Streptomyces sp.
MRHVRSLNSNVTHTTPLSPKSLRAPASGATCPRRPHVRVISPDPCSLGNPRCVASGASREGRSLAPSYRVTSPGHHDLRISRGASMTTFFTGEQTHQAVLPQQPALESAGAYTPGSRDETAHGLPDPKPGTGVGHGRGETGAVRTRTRRRHARRLDPGSKATGIAVTDERDEVGAKGRTALVRRGLVSIELRHRGRQIHSGMVRRAGHRRRRRSANLRYRAPRRDNRTRPDGWLPPSLRHRIDSTMSLVARLCRYAPVLEIHVEQVAFDTALIAAAVSSREQDFSERTHAGSEIREFLLAKWERSCAYCGATGVLLNIEHVRPRSRGGSDRVANLVIACVPCNQAKGTARIDEFLADRPARLERVIARLRRPLHDVAAMNTTRLLLVKTLATHGVAVHTWSGGRTSWNRLAMGLPKSHTLDALATGVIDLERGDAVVRIPAQILVVRSTGRGSYARTTPDRYGFPRLQRPGGQHRITTLTSHFDVSHRNLRLLQRADGYTYGFADEIRLSEEHGPAYSGRTLKGGDPGNVRTPDA

SEQ ID NO: 19284 - protein, 470 aa, Blautia sp.; identical to SEQ ID NO: 2925

SEQ ID NO: 19285 - protein, 430 aa, unidentified
  REGION 1..430: note = Human gut metagenome
LKVFVLNMRGQPLMPCSPAKARHLLKAGKAVVKRRTPFTIQLRIATGETKQNVTLGVDAGAKHVGLSATTEKEEVFASEVELRQDITGLLAARLSLRRDRRHRKTRYRAPRFLNRVRSKHKGWLAPSVENRIQAHLSRIDAICGLLPVTKIVIETASFDIQKIKHPDVEGTDYQQGDQLGFWNVREYVLFRDGHVCQHCHGHAKDKILNVHHLESRQTGGDAPNNLITLCETCHKACHAGKIKLKVKLKRGQSFRAEAFMGIMRWTLLDRVRKAHPDLPVENTYGYLTKNTRITLGLPKAHCVDAYCIAGNLKAVRRGVYLHQRQVRKHNRQIHKCTVLSKTLKDGTKIGYRKLNQTPHLVKNFRLFDKVRCLGQTGFIFGRRSSGYFDVRRLDSVKISSCISYRKLTLLEKRSTCLTELRKEDGASSPV

SEQ ID NO: 19286 - protein, 413 aa, Lactobacillus sp.
MTSYAFVLDANGKPLAPAKEQKAWFLIRKKRAALVSKYPMVIQLKKEIPENEICKDEIRCGIDDGGLHVGIALVQKCKTKNKVVFKGTIEQRNDVKHLMEVRRSYRRYHRYHKRYRPARFDNRKSSKRKKRIAPSILQKRQAIIRVIHWLNKWINITNYWLEDVSIDIRALTDGYKPYRWQYQKSNRLDENIRKAAILRDGGKCMECGKLNCRLEVHHIKPRRRNGSDTLDNLITLCKSCHQKTEGQEELYMDRYFSLLKSSDNKNLNYAQHVMIGKEWLRKQLSSLGVLYLTNGGDTANKRIDWNIEKSHANDAVCITNLQPDTYDMKEWTVKPMRRQSKAKTDNVLGIKHRDLVEYTLKNGETHRGYVTALYPEQKAINFQSPTKHCKKVNARKCKLLWKYSKIYWFENAS

SEQ ID NO: 19287 - protein, 431 aa, unidentified; identical to SEQ ID NO: 13528
  REGION 1..431: note = Human gut metagenome

SEQ ID NO: 19288 - protein, 431 aa, unidentified; identical to SEQ ID NO: 15228
  REGION 1..431: note = Human gut metagenome

SEQ ID NO: 19289 - protein, 420 aa, unidentified
  REGION 1..420: note = Human gut metagenome
MQYVYVLSKHGEPMMPCSPGKARLLLKQQKACVVRRTPFTIKLLYGSAGYKQPITLGVDAGSKHVGLSASTEKRELYREEFTPRNDVVELLSTRRQNRRSRRNRKTRYRAPRFDNRVHSKHKGWLAPSVEVKIQEHITIIKRICKILPISLVRVETAEFDTQRLKAMLAGKPLPVGTDYQLGEMYDEYNVRQYVLKRDHYTCQCCGAHNTAEKVVKLHVHHLESRKTGGNAPSNLVTLCTTCHKNLHKGKVTLDGKERGKPLRDAAFMGIMRKTLMARLKEELPIPVQGTYGYITKMRREQNDIKKSHTNDARCISKHPLAEPCSVCYRTKAIRHHNRQTHKANFSKKGIRKRSQMPYLVEGYRLWDKVLYKEQECFVSGRRSSGSFTLKKLDGTSVSKGVTFKKLRLLEPATNYLIERM

SEQ ID NO: 19290 - protein, 423 aa, unidentified; identical to SEQ ID NO: 3951
  REGION 1..423: note = Human gut metagenome

SEQ ID NO: 19291 - protein, 499 aa, unidentified
  REGION 1..499: note = Human gut metagenome
MRYVYVLDVDGKPLMPTCRFGKVRRMLKSGQAKAVDTLPFTIQLTYKPRTRILQPVTLGQDPGRTNIGMAAVRFDGKELGRFHCLTRNKEIPKLMADRMATRRASRRGERLARKRLARKLHTTVKHLEGRMLPGCSEPIAVKDIINTESRFNNRLRPEGWLTPTATQLLRTHINLFRKLSGILPVTDVAVELNKFAFMQLDNPEMKKREIDFCHGPLCGTGGLEAAVKEQQDGKCLLCGKESIGHYHHIVPRSRRGSNTIANIAGLCPKCHELVHKDADTAERLTEMKTGLTKKYGGTSVLNQIIPKLVETLADLFPGHFHVTNGWNTKEFREKHHLEKDHDMDAYCIACSHLKPEETLVETEPFEILQFRKHNRAIIHHQTERTYKLDGVTVAKNRKKRMEQKTDSLEDWYVDMAKEHGKTQADAMRSRLTVIKSTRYYNTPGRMMPGTVFLYEGKRYVMTGQITNGKYYRAYGQEKRNFPAVKVRILTKNTGLVFVA

SEQ ID NO: 19292 - protein, 406 aa, unidentified; identical to SEQ ID NO: 3980
  REGION 1..406: note = Human gut metagenome

SEQ ID NO: 19293 - protein, 522 aa, unidentified
  REGION 1..522: note = Human gut metagenome
ALMLLQIKAGTETFGTAPCGSGPKAEGVSPERKAMNTVAVVTNTNKPLMPTSPYRARKLLSSGKAKIVKHRPFTILLVNRSDGNVQEIEYKSDTGYLHVGISVCSEKREFVREQRDLLPDEKEKHNDRRKYRRTRRNRKRYRKARFDNRIGKIRKAEKNKHVWLPPSLEHKVDAQVQLFLRLYQVMPIKRAVFEMGQFDPALMKALEKGEAAPQGIDYQMGERYQIATRRAAAFTRDRYACVFCGRSIKDHAILHVHHIGFWKQDRSNRLDNLATCCEQCHTSENHRPGGILYGVEPKLESLASATYMNVVRFELLQRLKEAAPDVEFHISYGAKTSVIRKQRSISKSHTNDAYCLGQYFPKLRAEEIGFQKIRRNDRILQKFYDAEYLDSRDGTTKKGKELTNGRISRNHMKDHKNLHQYRGKKLSKGRVTIRRGRSSLKPGSLVRFDGEVLTVHGTHRSRRKNKAGHIKVSVNVEFERPSKTGRKSAALSKCQIISQSYNTGWKKIQLRKEEQGKIAAVG

SEQ ID NO: 19294 - protein, 504 aa, unidentified; identical to SEQ ID NO: 3854
  REGION 1..504: note = Human gut metagenome

SEQ ID NO: 19295 - protein, 420 aa, unidentified; identical to SEQ ID NO: 5136
  REGION 1..420: note = Human gut metagenome

SEQ ID NO: 19296 - protein, 416 aa, Parasutterella sp.; identical to SEQ ID NO: 10114

SEQ ID NO: 19297 - protein, 417 aa, unidentified; identical to SEQ ID NO: 14385
  REGION 1..417: note = Human gut metagenome

SEQ ID NO: 19298 - protein, 444 aa, unidentified
  REGION 1..444: note = bioreactor sludge metagenome
MIYVISKDGKPLMPTKRRGKVRHLLKDGKAIIVKYEPFTIQLLYETTDHTQKIILGVDPGSKNLALTAITEKGNILYQAEVTLRTDIKENIRKKRTLRRARKQRKTPYRKRRFLNRKKPQGWLPPSIRARLHTHYQMVKSVASILPVTVIILEVGQFDTQAIINPDIEGTDYQNGQMKGFDSVKEFVKIRDNFTCHYKELRPDIICNDTLVVDHIIPKSKGGTSRPDNLITTCEKHNIEKNNLSYKEFTGKERPAAVSLKETPFMNILKDYLLPQVQHSAPVRYTFGLYTRRKRKEWSLEKSHLNDSIAITGIKPVIYSDTFYSIRQVRKKKRSLHEEIPRKGRSKPNRSSKRNRKNIKSIEHKGFKWSLWDKVYIPELDRTGFISGFTNKWVYIQEIDGSYLQLNGKYKQINPGKIKFICRNNNYIYIENKSNHRKDSPFIST

SEQ ID NO: 19299 - protein, 472 aa, Solobacterium sp.
VVDNRLLSIKPLINIGEGVIYSSICTGLSLQTYQKRKEVPCMVYVLDINGQPLMPTTRHGKVRRLLNSHLAKVVKRCPFTIQLLYQSTKEIQPVSLGVDAGSKHIGMAATTEKKVVYQEELSPRNDVVKLLSLRRASRSSRRSRKTRYRKPKFNNRVHSKHKGWLAPSVEVKIQEHITAIKRICQILPISEIQVETAEFDFQRLKAMKEWKPLPVGTDYQLGEQYDFYNTRQYVLHRDGYTCQCCGTHDNNIKLHVHHIESRQTGGDAPSNLITLCEHCHKALHKGKLELPKGKKRGKTYRDATFMGIMRKTLLERLRKEVDVPVSGTYGYITKYLREKTDLEKSHINDAICISKYPYAKPLDTYYLTKVVRNHNRQIHKSNFSKGGIRKRNQAPYLIKGFRLFDKVLYQGKEYFIFGRRATGYFDIRTLDGTKVNKGSISYKKLRIQDTAKAYLKEARAIPHMNKFTCVLA

SEQ ID NO: 19300 - protein, 424 aa, Moorena sp.
MRVFVLDKNKKPLDPCQPARARILLKQGRAKVFRRYPFTIIMRDLEELECVTHNHQIKLDPGSQTTGLAIVQEKVVVWGAELTHRGLQIRDGLTSRRQLRRSRRNRKTRYRQPRFLNRKRPDGWLAPSLMSRVYNIITWVKKLTRFCPITGISQELVRFDTQKMENPEISGTEYQQGTLYGYEVREYLLSKWNRKCAYCGVTDTPLEVEHIKPKSKGGSDRVSNLAIACRKCNQTKGNQEIEQFLSGKPDVIKRILSQAKRPLVDGAAVNSTRWKLYNELKALGLPIETGSGGLTKYNRCRQNLPKTHWLDAANVGKVDTLYIEVYQPLLISAKGHGTRQMCRTNKFGFPTRYVPRLKFVKGFQTGDIAKAVVTKGKKVGTYTGRIATRKTGSFNISTKHGLVQGISHQYCSIVHRKDGYAYSF

SEQ ID NO: 19301 - protein, 431 aa, unidentified; identical to SEQ ID NO: 9416
  REGION 1..431: note = Human gut metagenome

SEQ ID NO: 19302 - protein, 415 aa, unidentified
  REGION 1..415: note = Human gut metagenome
MVYVVANDGQPLMPTERHGKVCRMLKSGMAKVVKKCPFTIQLQYESERNVQPVSLGVDAGSKHIGISATTKTKVLYESDVELRDDIVKLLATRRQLCRSRRSRKTRYRPVRFDNRKRKEGWLAPSIRQKIGSHLTVVANACKILPINQIIVETASFDIQKIKDPEIQGIEYQQGEQMDFWNIREYVLFRDGHICQCCKGRSKDKILNVHHIESRKTGGNAPNNLITLCETCHKGYHNGTVILPKNIKHGMQFKDAAFMGIMRWTFYNTLKEQYEPDIPVSMTYGYLTKNTRIEHGLPKEHYIDARCISGNPDAVSDGTYYYQKKVRCHNRQIHKQTILKGGIRKSNQAEYLVKGYRLFDKVRYQGREYFIFGRRKSGFFDIRTLSGEKVNKGSISVKKLTFADTRKNYLIERRTV

SEQ ID NO: 19303 - protein, 450 aa, unidentified; identical to SEQ ID NO: 10517
  REGION 1..450: note = Human gut metagenome

SEQ ID NO: 19304 - protein, 522 aa, Moorena sp.; identical to SEQ ID NO: 16031

SEQ ID NO: 19305 - protein, 418 aa, unidentified; identical to SEQ ID NO: 5883
  REGION 1..418: note = Human oral metagenome

SEQ ID NO: 19306 - protein, 415 aa, unidentified; identical to SEQ ID NO: 10543
  REGION 1..415: note = Human gut metagenome

SEQ ID NO: 19307 - protein, 421 aa, unidentified; identical to SEQ ID NO: 2902
  REGION 1..421: note = Human gut metagenome

SEQ ID NO: 19308 - protein, 413 aa, unidentified
  REGION 1..413: note = Human gut metagenome
MTSYAFVLDANGKQLAPAKEQKAWFLIRKKRAALVSKYPMVIQLKKEIPENEICKDEIRCGIDDGGLHVGIALVQKCKTKNKVVFKGTIEQRNDVKHLMEVRRSYRHYHRYHKRYRPARFDNRKSSKRKKRIAPSILQKRQAIIRVIHWLNKWINITNYWLEDVSIDIRALTDGYKPYRWQYQKSNRLDENIRKAAILRDGGKCMECGKLNCRLEVHHIKPRRRNGSDTLDNLITLCKSCHQKTEGQEELYMDRYFSLLKSSDHKNLNYAQHVMIGKEWLRKQLSSLGVLYLTNGGDTANKRIDWNIEKSHANDAVCITNLQPDTYDMKEWTVKPMRRQSKAKTDNVLGIKHRDLVEYTLKNGETHRGYVTALHPEQKAINFQSPTKQCKKVNARKCKLRWKYSKIYWFENAS

SEQ ID NO: 19309 - protein, 465 aa, unidentified
  REGION 1..465: note = Human gut metagenome
MNTCVCVLGNNGERLMPTFRLGKVRRLLKDGKAKIVKHHPFTIQLLYDSKTNTQPIEICEDVGYNYIGISVKSKSHEYVSAQYDTLQDEKEHHDDCRMHRRTRRNRLRYRKPRFDNRKRGEGWLAPSLMHKKELNVNVVKMYCAVMSITHATVEVGSFDTMLVKAIQEGKVIPEGADYQKGPRYNLATLREAVFYRDNYVCKICGRKATEGAILHMHHMFYWKGRHGNSLDELLTVCEKCHTPANHQKGGKLYGFGEDVKFADLSGAAFMNTVRWQIVNELYVAFGKPFVTITYGAMTKEKRIALQLEKSHNNDAYAMGEFHPNLRCMFEHYEKARRNNRILEKFYDSRYIDIRTGEIATGKELFNGRINRNHKKDSENLHKYRGKRTYAGHRALLRKKVNLNPGDLVSLNGENLIVHSTHTKKNGSVNVEFKTPSRGGKKSASLKKLKIVKTSNLMHSAWTKVA

SEQ ID NO: 19310 - protein, 434 aa, unidentified; identical to SEQ ID NO: 6862
  REGION 1..434: note = Human metagenome

SEQ ID NO: 19311 - protein, 434 aa, Moorena sp.
MQNYVFVVDKNVVPLNPIRPKRARQLLNQNKAAVLRPFPFTLILKQEISNANIHPLTLKIDPGSKTTGFALLDGDKVVWLGELEHRGQRIKDSLEKRRTIRRNRRSRKTRYRKARFLHRTGSIRPLPPSVHHRALTVETWLKRFTRFVPINKIAIEQVKFDMAKMQNAEITGVEYQQGTLWGYEVREYLLEKWGRECTYCGKKDVPLQIEHIVPKSKGGSNRVSNLCLACEECNQKKGNKPVEEFLKNKLEKLKKIKSKMKTPLKDAAAVNASRNKLAWICEFIISGITGKRSDCEVGTGAQTKYNRTRLGLPKEHSIDAACVGSVDTLEFRTSQPLLIKAAGHRNKQYVRMNKFGFPASKPRKKYDIGWKTGDIAISINKGVKCLGRVLINDAKRFEMPINGKRISGKYGELTKLHRSDGYSYSFSANYSVSP

SEQ ID NO: 19312 - protein, 509 aa, unidentified
  REGION 1..509: note = Human gut metagenome
MVLTYVLSVDGKPLMPTTRCNRVAWLLKHSMAKVVSKNPFTIRLAYDTPDITQSLILGIDPGRTNIGLTVIRETGESVYTAHLETRNKKIPKLMKARKQFRTERRTLKRRRKRQCRAIASNTVSPKCVKTSNSQNSNESKKGMKQGVLERLLPGCDTPILCIGIKNKEARFDNRIRKTGWLTPTANHLLQTHLNAMNKICKILPVTKTVLEINKFAFMQLDNPCVKKWQYQRGQLFGYGSVEEVVYEQQNSHCLFCDKAIDHYHHVVPRSKRGSETLANRVGLCAEHHTLVHNDEKWNTKLIAKKQGMNKQYHALSVLNQIIPALSNALAKLFPDRFYATSGKSTYTFREAYGINKDHHIDAYCIAASILPDVNVKLSQTVYEIKQFRRHDRQVCHKANLNRRYALNGKVVATNRHKAMNQKTDSLEEYTTNGGKTENLTVIEHKAQYKRLDRIMPGAIFELDNKRKVMFKTDGFHNNQSDYVCFIDGSKIGYSKCNKPVTLNSGLVYC

SEQ ID NO: 19313 - protein, 465 aa, unidentified
  REGION 1..465: note = Human gut metagenome
MSTCVCVLSNNGERLMPTIRLGKVRHLLKDGKAKIIKHHPFTIQLLYDSKTNTQPIEICEDVGYNYIGISVKSESHEYVSAQYDTLQDEKEHHDDCRKYRRTRRNRLRYRKPRFDNRKRSEGWLAPSLEHKKELNVNVIKMYCKVMPITHAIVEVGSFDTMLVKAIEEGKATPESADYQKGPRYKLATLREAVFYRDNYTCQVCGRKANEGAILHVHHMFYWKGRHGNSLSELITVCEKCHTPANHQKGGKLYGFGEDIKFANLSGAAFMNTVRWQIVNVLYAAFGKPFVTFTYGAMTKEKRIALHLEKSHNNDAYAMGSFHPVNRCAFEHYEKVKRNNRILEKFYDSQYIDIRTGEIATGKELFNGRISRSHKKDSENLHKYRGKRICKGHRALRRKKVALNPGDLVSLNGEILVVHGTHTKKNGSVNVEFKTPSRGGKKSASLKKLKIVKTSNLMHSAWTKVA

SEQ ID NO: 19314 - protein, 412 aa, Moorena sp.; identical to SEQ ID NO: 14433

SEQ ID NO: 19315 - protein, 413 aa, Petrotoga sp.; identical to SEQ ID NO: 16705

SEQ ID NO: 19316 - protein, 414 aa, Parasutterella sp.; identical to SEQ ID NO: 11858

SEQ ID NO: 19317 - protein, 421 aa, unidentified
  REGION 1..421: note = Human oral metagenome
MFVYVLDKNGQPLMPTPRFGKVRRLLRDKKAKVVKRCPFTIRLLYEPETKIVQDIVLGVDTGSKYVGVACVGNSKVLYQSQIELRDDIERKMDSRRMYRRSRRNRKTRYRKPRFLNRRNSIRKDRYCPTIVSKYYSHEREIEFCKKILPIKDIVLEAEKFDTQLMEKPWLQEHKWAYQKGVNYGYANAREHALVRDSYTCQCCGKKNCRLEVHHIKFRSEGGSDTLENLITLCEDCHKAVHLGKITLKLKGKHKSNLRHAAQMSIIRSKLLKKYSDAIETFGFVTKANRENLSLKKDHYLDACVIASGGLEFELSDVLYRKRCVPVQNRVLTRGIRSERKIPTGKVHGFKRYDKVEYLGKVCFVKARRTKGDFVLMDIGNNSIDFRVIGGCQNPSHKKIKRLNTRRGVICIIQKVQNREER

SEQ ID NO: 19318 - protein, 457 aa, unidentified; identical to SEQ ID NO: 9139
  REGION 1..457: note = Human gut metagenome

SEQ ID NO: 19319 - protein, 439 aa, Halomonas sp.
MPCSEKRARLLLERGRAVVVNLTPFVIRLRDRCLSDCALQPTLLGIDPGSKETGLALMRLEENATDEQAPATRHVLCLFQLVHRGFQIRQALEQRAGFRRRRRSKNLRYRQPRFDNRTRKKGWLPPSLQHRVDTTMAWVDKLCRWAPVTHLSMELVRFDLQKMENPEISGIEYQQGTLLGYEVREYLLEKWGRECAYCGTGDTPLEIEHVVAKSRNGSSRVANLTVACHDCNQAKDSQWLADFFATNKGLKKRLKANGLSADVRLEHVQRQLKLPLLDAAAVNATRWALYGSLKTTGLPVTVGSGGRTKYNRQRLGIPKTHALDAACVGKFDTLKGWRVPTQVIKAMGRGSYQRTRLDKYGFPRGYLMRQKQVQGFQTGDRVRAIVPAGKKAGTHTGRVAIRKTGSFNIQTEQGAVQGISWRYCTLLQRGDGYGYHPLP

SEQ ID NO: 19320 - protein, 447 aa, unidentified; identical to SEQ ID NO: 5316
  REGION 1..447: note = Human gut metagenome

SEQ ID NO: 19321 - protein, 499 aa, unidentified
  REGION 1..499: note = Human gut metagenome
MRYVYVLDVDGKPLMPTCRFGKVRRMLKSGQAKAVDTLPFTIQLTYKPRTRILQPVTLGQDPGRTNIGMAAVRFDGKELGRFHCLTRNKEIPKLMADRMATRRASRRGERLARKRLARKLHTTAKHLEGRMLPGCSEPIAVKDIINTESRFNNRLRPEGWLTPTATQLLRTHINLFVRLAKILPVTDVAIELNKFAFMQLDNPEMKKREIDFCHGPLYGTGGLEATVKEQQDGRCLLCGKESIGHYHHIVPRSRRGSNTIANIAGLCPKCHELVHKDADTAERLTEMKTGLTKKYGGTSVLNQIIPKLVETLADLFPGHFHVTNGWNTKEFREKHHLEKDHDVDAYCIACSHLKPEETLVETEPFEILQFRKHNRAIIHHQTERTYKLDGVTVAKNRKKRMEQKTDSLEDWYVDMAKEHGKTQADAMRSRLAVIKSTRYYNTPGRMMPGTVFLYEGKRYVMTGQITNGKYYRAYDQEKRNFPAVKVRILTKNTGLVFVA

SEQ ID NO: 19322 - protein, 377 aa, unidentified
  REGION 1..377: note = Human gut metagenome
LYSQSKIAQSAQEYGVCRGGIENRRSRRNRKTRYRPPRFDNRVHSKHKGWLAPSVEVKIQEHITVIKRICRILPITLVRVETAEFDTQRLKAMLEGKPLPVGTDYQLGEMYDEYNVRQYVLKRDNYTCQCCGAHTTAKKAVKLHVHHLESRKMGGNAPGNLITLCITCHDALHKGKVSLDNKKRGKPMRDAAFMGIMRRTLMSRLREELPITVQGTYGYITKMQREQNDIKKSHVNDARCISKHPLAEPCSVCYRTKAIRHHNRQTHKANFSKGGIRKRSQMPYVVEGYRLWDKVLYKDRVTSEAMNVIADNTELAENFAETVKHEIETDDDTYAHIGFHLANNIRNQSPASEVLLTLCGWTIETLLDKTPPIAIED

SEQ ID NO: 19323 - protein, 450 aa, Moorena sp.; identical to SEQ ID NO: 2935

SEQ ID NO: 19324 - protein, 426 aa, unidentified; identical to SEQ ID NO: 9916
  REGION 1..426: note = Human gut metagenome

SEQ ID NO: 19325 - protein, 304 aa, unidentified
  REGION 1..304: note = Human gut metagenome
LAPSVENRINAHLSRIEAVLRLLPVTKITVETASFDLQLLKNPDISGKEYQEGEQLGFWNIREYVLCRDGHVCQHCYGRSKDPVLNVHHLESRRTGGDSPGNLITLCETCHKALHRGEITLKAKRGQSFRAEAFMGIMRSEVLNRLKASHPELEVNNTYGYRTKHARIANDIAKSHCADAFCIAGNLGAERLGEFFFQKQTRRNNRQIHKLSILKGGIRKCNQAPFEVNGFRLFDKVACKGEEGFIFGRRSSGFFDVRKLDGTRISAGISCKKLHLLEKRRTYLTEIRKEEALPALPEGRGLRA

SEQ ID NO: 19326 - protein, 423 aa, Moorena sp.; identical to SEQ ID NO: 9986

SEQ ID NO: 19327 - protein, 406 aa, unidentified; identical to SEQ ID NO: 2973
  REGION 1..406: note = metagenome

SEQ ID NO: 19328 - protein, 420 aa, unidentified
  REGION 1..420: note = Human gut metagenome
MQYVYVLNKHGEPLMPCSPRKARLLLKQKKAYVIKRTPFTVKLLYGSAGYKQPVTLGVDAGSKHIGISATTEKHELYREEATPRNDVVDLLSARRAFRRSRRNRKTRYRAPRFNNRVHSKHKGWLAPSVEVKIQEHITLIKHACRILPVTLVRVETAEFDTQRLKAMLEGKPLPVGTDYQLGEMYDEYNVRQYVLKRDNYTCQCCGAHSTKTKGVKLHVHHIETRRTGGNAPNNLITLCKACHKALHAEKVTLDGKKRGKPLKDAAFMGIMRKTLMERLRKELKIPVQGTYGYITKYLREKNGIPKSHTNDARCISKNPLAIPCDTCYYTKAVRHHNRQLHKATILKGGIRKANQAPYIVKGYRLWDKVAYNGTECFITGRRTSGYFALKELDGTVVSNSISYKKLRLLEAATNYIIERK

SEQ ID NO: 19329 - protein, 451 aa, unidentified; identical to SEQ ID NO: 5203
  REGION 1..451: note = Human gut metagenome

SEQ ID NO: 19330 - protein, 457 aa, unidentified
  REGION 1..457: note = Human gut metagenome
VWLYQAVYNLGEGFLPSSEERTAFYWLLIYRKEHGIMQYVYVLNKHGEPLMPCSPGKARLLLKQQKACVVKRTPFTIKLLYGSAGYKQPITLGVDAGSKHVGLSASTEKRELYREEFTPRNDVVDLLSTRRQNRRSRRNRKTRYRAPRFDNRVHSKHKGWLAPSVEVKIQEHITVIKRICRILPITLVRVETAEFDTQRLKAMLKGKPLPVGTDYQLGEMYDEYNVRQYVLKRDNYTCQCCGAHPTEKKPVRLHVHHLESRHVGGNAPNNLITLCVACHKALHEGKITLDKGKKRGKPLRDAAFMGIMRDTLLARLKDELNIPVKQTYGYITKLLREKNKIPKSHVNDARCIAKTPNAKPCDTMLYTRALRHHNRQIHKAKILNGGIRKKNQAPYLVKGFRLWDKVRYNGEECFITGRRSSGYFALKKYDGTVISNSASYKKLMLLEAATNYITERS

SEQ ID NO: 19331 - protein, 406 aa, unidentified; identical to SEQ ID NO: 7944
  REGION 1..406: note = Human gut metagenome

SEQ ID NO: 19332 - protein, 391 aa, unidentified
  REGION 1..391: note = Human gut metagenome
MPNKVYVINKHGRPLMPCSPAKARHLLDAGKAKVKKRTPFTIQLVYGSSGYTQEVILGVDAGSKTIGMSASTTKEELLSAEVKPRNDVVDLLSTRREFRRVRRNRKTRYRKPRFDNRVRSKHKEWLAPSVEVKIQEHITSIKRVCRILPVSKVVIETAEFDLQLLKAIADGKSVPQGEDYQKGEMYGHYNVRQYVLWRDNYTCQCCGAHATKKKEVRLHVHHLESRKVGGDAPSNLITLCDSCHEKFHKGIITAANLKKRKRRSMRDATFMGIMRKTLIQRLRAELTIPVAETRGYITKTTREKLLVLPKSHTNDALAIALGKHGFNVGYLPEIAQIDKIYTIRPVRHHNRQLHKVTILKGGIRKSNQAEKYVFGYRLFDKVQFNGQDCFI

SEQ ID NO: 19333 - protein, 423 aa, unidentified; identical to SEQ ID NO: 8227
  REGION 1..423: note = Human gut metagenome

SEQ ID NO: 19334 - protein, 424 aa, Moorena sp.
MSNYVFVIDPDKQPCNPVHPAKAQLLLNQKKAAVFRRYPFTIILNEKQKDVEANPLTLKIDPGSQTTGIAILNGENVVWGAELAHRGQQIKSDLESRRAIRRNRRNRKTRYRPARFLNRKREKGWLAPSLQHRVDTTLTWIKKLIRYCPVTNIVQELVRFDLQKMENPEISGIEYQQGELQGYEVREYLLEKWNRQCAYCGAKNIPLQIEHIHPKSKGGTNRISNLCITCEPCNLAKGTQDIKDFLSGKPSILKRVLSQAKSPLKDAAAINSTRWALLNALKSIGLPISTGSGGQTKFNRTRLNLPKTHWIDAACVGTIESLRIITKQPLLIKATGHGCRQMCRTDKFGFPSRYVPRLKFIKGFQTGDIVKAIVTSGKKIGTYVGRVAVRCSGSFNISTPQLIQGIGHKYCRAIHRKDGYSYSF

SEQ ID NO: 19335 - protein, 418 aa, unidentified; identical to SEQ ID NO: 4950
  REGION 1..418: note = Human gut metagenome

SEQ ID NO: 19336 - protein, 415 aa, unidentified; identical to SEQ ID NO: 3582
  REGION 1..415: note = Human gut metagenome

SEQ ID NO: 19337 - protein, 247 aa, unidentified
  REGION 1..247: note = Human gut metagenome
MQYVYVLNKHGEPLMPCSPRKARLLLKQKKACVVKRTPFTIKLLYGSTGYKQPITLGVDAGSKHIGISATTEKHELYREEATPRNDVVDLLSARRAFRRSRRNRKTRYRAPRFNNRVHSKHEGWLAPSVEVKIREHITLIKRVCRILPVTLVRVETAEFDTQRLKAMLEGKPLPVGTDYQLGEMYDEYNVRQYVLKRDNYTCQCCGAHSTKTNCMCIILRPVEQVAMRQTTLSRYAQIVTKRFMPER

SEQ ID NO: 19338 - protein, 422 aa, unidentified
  REGION 1..422: note = Human gut metagenome
MRGKPLMPCSAAKARILLKEKKAAVARRTSFTIRLTTAGGESKQPVSLGVDAGYKHVGLSASTEKAELYASEIELRQDITDLLSARLALRRARRSRKTRYRAPRFDNRVRSKRKGWLAPSVENRIAAHLSRIEAVLRILPVTKITVETASFDMQLLKNPDISGKGYQQGEQLGFWNVREYVLFRDGHVCRHCGGRSKDPVLNVHHLESRRTGGDSPGNLITLCETCHKALHRGEIKLSIKRGASFRAEAFMGIMRWKVLDRLKAAHPELEVRNTYGYLTKHARIEHGIAKSHCADAFCIAGNLKADRLGSFYYQKQTRRHNRQIHKLSILKGGVRKRNQAPYEVKGFRLFDKVACKGETAFIFGRRSTGSFDVRKLDGTRISAGISFKKLRLHERRRTYLTELRKEAALPPLPEGRGLRADF

SEQ ID NO: 19339 - protein, 428 aa, unidentified
  REGION 1..428: note = Human gut metagenome
LKVFVLNMRGQPLMPCSPAKARHLLKAGKAVVKRRTPFTIQLRIATGETKQNVTLGVDAGAKHVGLSATTEKEEVFASEVELRQDITGLLAARLSLRRDRRHRKTRYRAPRFLNRVRSKHKGWLAPSVENRIQAHMSRIDAVCRLLPVTKIVIETASFDIQKIKDPSVEGTDYQQGDQLGFWNVREYVLFRDGHVCQHCHGRSKDKILNVHHLESRQTGGDAPNNLITLCETCHKAYHAGKIKLKVKRGQSFRAEAFMGIMRWTLLDRVRKAHPGLPVENTYGYLTKNTRITLGLPKAHCVDAYCIAGNLKAVRRGVYLHQRQVRKHNRQIHKCTVLSKTLKDGTKIGYRKLNQTPHLVKNFRLFDKVRCLGQTGFIFGRRSSGYFDVRRLDGVKLSSGISYRKLTLLEKRSTYLTELRKEDGASSPV

SEQ ID NO: 19340 - protein, 465 aa, unidentified
  REGION 1..465: note = Human gut metagenome
MSTCVCVLSNSGERLMPTFRLGKVRRLLKDGKAKIVKHHPFTIQLLYDSKANTQPIEICEDVGYNYIGISVKSQSHEYASAQYDTLQDEKACHDSCRKLRRTRRNRLRYRKPRFDNRKRGESWLAPSLRHKKELNVNVVKMYCAVMPITHATIEVGSFDTMLVKAIQEGKAIPEGADYQKGPRYNLATLREAVFYRDNYVCKVCGRKATEGAILHVHHMFYWKGRHGNSLSELITVCEKCHTPANHQKGGKLYGFGEDIKFANLSGAAFMNTVRWQIVNVLYAAFGKPFVTFTYGAMTKEKRIALHLEKSHNNDAYAMGSFHPVNRCAFEHYEKVKRNNRILEKFYDSQYIDIRTGEIATGKELFNGRISRSHKKDSENLHKYRGKRICKGHRALRRKKVALNPGDLVSLNGEILVVHGTHTKKNGSVNVEFKTPSRGGKKSASLKKLKIVKTSNLMHSAWTKVA

SEQ ID NO: 19341 - protein, 414 aa, unidentified
  REGION 1..414: note = Human gut metagenome
MPCSPAKARLLLKEKKAIVVRRTPFTIQLTIATGETKQPVSLGVDAGYKHVGLSASTEKAELYASEVELRQDITDLLSARRALRQSRRNRKTRYRAPRFDNRISTKRKGWLAPSVENRINAHLSRIEAVLRLLPVTKITVETASFDLQLLKNPDISGKEYQEGEQLGFWNIREYVLCRDGHVCQHCYGRSKDPVLNVHHLESRRTGGDSPDNLLTLCETCHKALHRGEITLKTKRGQSFRAETFMGIMRWEVLNRLKASHSELKVHNTYGYLTKHARIENGIAKSHGADAFCIAGNLGAERLGEFFFQKQTRRNNRQIHKLSILKGALRKRNQASFEVKGFRLFDKVACQGEEGFIFGRRSSGFFDVRKLDGTRISAGISYKKLHLLEKRQTYLMEIRKEEAFPPLPEGRGLRA

SEQ ID NO: 19342 - protein, 406 aa, unidentified; identical to SEQ ID NO: 2874
  REGION 1..406: note = Human gut metagenome

SEQ ID NO: 19343 - protein, 430 aa, Moorena sp.; identical to SEQ ID NO: 3328

SEQ ID NO: 19344 - protein, 430 aa, unidentified
  REGION 1..430: note = Human gut metagenome
MPKVYVLNRHGRPLMPCTPAKARHLLDAGKAKVRHRTPFTIQLLYGSTGYTQEVILGVDAGSKTIGLSAATETEELFSAEVKPRNDVVELMSARRQFRRARRNRTTRYRKPRFDNRVRSKHKGWLAPSVEVKIQEHMTAIRRACAILPVSKVVVETAEFDLQLLKAVAEGKPVPQGEDYQKGEMYGHYNVRQYVLWRDSYTCRICGVHGSVRKGVPLHVHHLESRRVGGDAPDNLVTLCTACHDKLHKGIIMAADIKKRKRRSTRDATFMGIMRMTLLRRLREQLPVPVVETRGYITKATRENLLVLPKSHANDALAIAHGPQGFRAEYLPNIRQADRLYTIRPVRHHNRQLHKATILKGGVRKANQAEKYICGFRLYDKVLYNGIECFVWGRRTSGSFLLRQLNGEKVKDGVSYKHLKLLERSQSYLVA

SEQ ID NO: 19345 - protein, 451 aa, Blautia sp.; identical to SEQ ID NO: 5203

SEQ ID NO: 19346 - protein, 434 aa, unidentified
  REGION 1..434: note = Human gut metagenome
PGRTNIGVAVVKEDGSCVFSAHLETRNKEVPLLMKKRAAFRRNHRTQDRRRKRQRRAIAAGTTVTEGSVERLLPGYEKPVVCRYIRNKEARFNNRSRPAGWLTPTANHLLRTHINLIAKVAKFLPITKVVVELNRFAFMAMDNPNIRRWEYQQGPLYGLGSVEDAVYAQQDGHCLFCKKPIDHYHHVIPRRKNGSETLANWCGLCAKHHDLVHKDKVWADKLVTRKEGVNKKYHALSVLNQIIPHLLEYLGDETLYDIYATNGRSTKGFRIAKNVPKEHYTDAYCIACSILDTDIKVSAPVEPFELKQFRRHDRQACIRQMVDRKYLLDGKVVAANRHKAIEQKSDSLAEFREACGAAVVSQLTVKPHPPQYKDMARIMPGAVMDFGGAVGILQGSEGFHNGKPDYYKSTKGERVLTRRCALLAQNAGTVFIPA

SEQ ID NO: 19347 - protein, 427 aa, Parasutterella sp.; identical to SEQ ID NO: 6030

SEQ ID NO: 19348 - protein, 411 aa, unidentified; identical to SEQ ID NO: 13760
  REGION 1..411: note = Human gut metagenome

SEQ ID NO: 19349 - protein, 415 aa, Bacillus sp.; identical to SEQ ID NO: 2431

SEQ ID NO: 19350 - protein, 557 aa, Blautia sp.; identical to SEQ ID NO: 7395

SEQ ID NO: 19351 - protein, 408 aa, unidentified; identical to SEQ ID NO: 3257
  REGION 1..408: note = Human gut metagenome

SEQ ID NO: 19352 - protein, 416 aa, Parasutterella sp.; identical to SEQ ID NO: 10114

SEQ ID NO: 19353 - protein, 476 aa, unidentified
  REGION 1..476: note = Human gut metagenome
LEAADTEGVSHPGLPGKYKNKGGQLMSVAVISKTGERLMPTSEYRARKLLKSGKAIKHSYHPFTIQLTERKTGDIQPIELCMDTGYIHIGISVKSEKHEYLAEQIDTLTDERGRHDACRMYRRQRRSRKRYRQARFNNRKRDQGWIAPSLEHKKKIHIQAISRINNVMPITDITLEMGNFDTQVLKAKEEGKPLPQGADYQHGERYGIATLREAVFARDGYKCQCCGRTIKDGAILHVHHIKYRSQGGTNSMSNLATVCDKCHTPKNHKPGGKLYNWKPKLSSFKGATFMTTIRWQLYSEAKALFSDIDIYITYGAATKERRRELDIDKSHVNDAFVMGQFHPNHRIKAVLCKKKRRNNRCLEKFYDAKYIDSRDGSKKTGQELSNGRINRNHKKDSENLRQYRLQKVTAGKRTVRKQHYKIQPHDIVIYENRKRETAGCHCNGTRVMLLTDKKSASIKKVKVYRYAGGYFKSAFN

SEQ ID NO: 19354 - protein, 395 aa, Pseudomonas sp.
LQSLTLKFDPGSKFTGIALVRQKGQRVSVLSLMELAHRGAAIRQAMQQRAAFRRRRRGQNLRHRTPRFDNRTRPEGWLPPSLRHRLDTTLGWVGRMRNWAPISDLAVERVKFDMQAMQNPEISGVKYQQGELAGYEVREYLLEKWGRCCAYCNAENTPLEIEHIVPRSAGGSDRVPNLTLACRPCNQRKGNQPVEVFLKARSELLARIKAKAKVPLRDAAAVNATRNALFRALLDTGLSVTTGTGAQTKFNRRCLGLPKTHALDAASVGEIRAIEHWQRPTLAIKATGRGEYQRTRLTAHGFPRGYLTRQKRHFGFQTGDQVRAEVPTGKKAGTHQGRVAVRKTGSFNIQTPDGVVQGIHHRHCTLIQRADGYAYSDTPTDSAQPQKEAARAGAR

SEQ ID NO: 19355 - protein, 430 aa, unidentified
  REGION 1..430: note = uncultured Candidatus Competibacteraceae bacterium
MNKVFVLSSTKEPLMPTRPARARQLLTRGRAAVYRMQPFTIILKDRETGDTQPVEVKVDPGSKATGIALVGHFEQQGAVVLWGANVNHRGQTMKNNLESRASLRRGRRGRKTRYRQARFLNRTRNAGWLPPSVESRVGNTESVINRLATRCPITEVSIEIVKFDMQAMVNPEISGTEYQQGTLAGYELREYLLEKWHRTCAYCGAKDVPLQIEHIQPKALGGSNRVSNLTLACKPCNQKKGSQPITVFLKTKPELIKKIQAQAKAPLKDAAAVNASRWALKNRLEKRWPVSCGTGGRTKFNRTKQGYEKDHWRDAACVGESGERVLIREGMKPLIITAKGRGSHQVVRTDKFGFPRSKAGRIKRVHGFSTGDIVKLIQPKGKYAGTYIARLAGIRATGQFDIKTPTAKITANHKHFQLIQRNDGFEYAAS

SEQ ID NO: 19356 - protein, 461 aa, unidentified; identical to SEQ ID NO: 4910
  REGION 1..461: note = Human gut metagenome

SEQ ID NO: 19357 - protein, 413 aa, unidentified
  REGION 1..413: note = Human gut metagenome
LKVFVLNMRGKPLMPCSPAKARHMLKAGKAFVVRRTPFTIKLTIATGETKQDVTLGVDAGARHVGISATTEKEEVFASEVKFRQDITGLLADRLAFRRARRNRKTRYRAPRFNNRVRSKHKGWLAPSVENRIQAHMSRIEAVCRLLPVTKIVIETASFDIQKIRNPEVEGTGYQQGDQLGFWNVREYVLFRDGHICQHCRGRSKDPILNVHHLESRKTGGDAPNNLITLCETCHKAYHAGKIKLKVKRGQSFRAEAFMGIMRWTLLDRVRKTHPKLPVENTYGYLTKHKRIALGLPKTHCADAFCIAGNLKALRRGDFLFQQQTRKHNRQIHKCSILKGGVRKLNQAPFLVKGFRLFDKVRIGGQIGFVFGRRVRGTFNIRRLDKTVIGTDINCKKLSLLETRKTFLTELRKE

SEQ ID NO: 19358 - protein, 456 aa, unidentified
  REGION 1..456: note = Lachnospiraceae bacterium UBA7766
MLTYVLAADGSPLMPTYNISKVRRMLKDGRAVIAGHKPGFTIRLTYALPDQKTPHTQKIELCEDTGYQHIGVSVKSKKHEYVHLQVDTLADEKNHHDAQRRYRRNRRNRLRYRAPRFDNRTHSKKPGWIAPSLQHKADIHVRLVSTFQKVLPICDVYLEVGTFDTQVLEAKEKGLPIPEGSDYQHGTRYGIATLREAVFYRDGYKCQCCGKGIKDGRILRVHHIGYWKTPSDHTDRMGNLITVCTKCHTAANHKKGGKLFGWKPKMMPLTGAAFMNTVRWKIVQAVKDLDSNLTVHATYGADTKLSRRDHSITKTHANDAYCMGMFQPGHRAPEQLLKKKRRNNRVLSKFYDAKYIDSRDGVKKSGSDLSCGRTNRSEPRNGEQNLRIFHGKKVSKGRISVRRQRYPIQPGTQVMYKKHTYVAVGTHNNGRAVVLNLGKSVSVSKLRILHHAGAFV

SEQ ID NO: 19359 - protein, 429 aa, Petrotoga sp.; identical to SEQ ID NO: 5336

SEQ ID NO: 19360 - protein, 420 aa, unidentified; identical to SEQ ID NO: 8060
  REGION 1..420: note = Human gut metagenome

SEQ ID NO: 19361 - protein, 415 aa, unidentified; identical to SEQ ID NO: 16389
  REGION 1..415: note = Human gut metagenome

SEQ ID NO: 19362 - protein, 410 aa, unidentified
  REGION 1..410: note = Anaerobic digester metagenome
MRGKPLMPCKPRKARLLLKQGKAKVVKRDPFTIQLTIATGEAKQDISLGVDSGSKYIGISATTKKHVLFEAEVELRNDIVKLLADRRQYRRSRRYRKTRYRQARFLNRKKPEGWLAPSIQHKINSHIKIIDMLTKLLPITDITIEVASFDIQKIKNPDIQDKEYQQGDQLGFYNVREYVLWRDNYQCQGRKGCKNKILNVHHIESRKTGGNSPNNLITLCETCHNDYHAGKLKLNLKRGQMFKDATFMGVMRWATYNALKELYPNVKLTYGYITKHKRIKYGLEKSHRMDARCISGNPLAKPLDTYYYFKCVRKQNRQLHKATPSKGGVRKNNKAPRYLHGFQLFDKVSYQNQECFIFGRRTSGYFDLRKLDGTKVTASASVKKLKLIERSNTLLCERREGNSSPAYTIF

SEQ ID NO: 19363 - protein, 456 aa, unidentified
  REGION 1..456: note = Human gut metagenome
MSTCVCVLSNSGERLMPTIRLGKVRQLLKDGKAKIVKHHPFTIQLLYDSKTNTQPIEICEDVGYNYIGISVKSQSHEYVSAQYDTLQDEKACHDSCRKLRRTRRNRLRYRKPRFDNRKCSEGWLAPSLEHKKQLNIRLIERYVSVIPITHATVEVGSFDTMLLQAIQKGKSKPEGVDYQKGPRYNLATLREAVFYRDNYTCQVCGRKIADGAILHMHHMFYWKGRHGYQLDELVTACEKCHTPANHQKGGKLFGFGEDKEFANLSGAAFMNAVRWQIVDALYATYGKEFVTITYGAMTKEKRIALQLEKTHSNDAYAMGNCHPAHRCEFGHYQKRCRNNRVLEKFYDATYIDTRTGNKAKGKELFNGRISRNHKKDSEDLHKYRSKKMSKGCRSIRRQRYAIQPYDTVRLEGKTYITSGCHNKGTRLLIPANGKSKSVAISKVQVVCHAGAWIQII

SEQ ID NO: 19364 - protein, 440 aa, Moorena sp.; identical to SEQ ID NO: 3187

SEQ ID NO: 19365 - protein, 431 aa, unidentified
  REGION 1..431: note = Human gut metagenome
MPDKVYVISQLGHPLMPCSLAKARHLLDDKKTKVVKRMPFTIRLLYGSTKYIQPIILGVDAGSKTIGLSASTAKGEVFAAEVMPRNDVVENLSTRREFRRARRNRTTRYRKPRSDNRVRSNHERWLAPSVKVKIQEHITSIKRVCTILPISKVVIETAEFDLQLLKAIQEGKPIPEGEDYQKGEMYGSYNVCQYVLWRDNYTCICCGVRGTPKNPVRLHVHHFESRKYGGNAPDNHGTLCDDCHKKFHLGIIADVKLKTRRRQSTRDAAFMGIMRKTLMWRLRTELYIPVAETKGYITKATREKLLVLPKSHTRDTLAIAQGRHGFSIKEYAYVEPANHIYTVRPVRHHNRQLHKASILKGGIRKRNQASKYVFGFRLYDKVLYQGKACFVWGRRTSGTFLLRTIDGIKVKDGVSYRNLTLLERSSNYLIA

SEQ ID NO: 19366 - protein, 424 aa, unidentified; identical to SEQ ID NO: 3351
  REGION 1..424: note = Human gut metagenome

SEQ ID NO: 19367 - protein, 420 aa, unidentified; identical to SEQ ID NO: 15202
  REGION 1..420: note = Human gut metagenome

SEQ ID NO: 19368 - protein, 415 aa, unidentified; identical to SEQ ID NO: 6883
  REGION 1..415: note = Human gut metagenome

SEQ ID NO: 19369 - protein, 442 aa, unidentified
  REGION 1..442: note = Human gut metagenome
MVTVQQSTHHLPFGRVFIRRNLFMVYVISQDSKPLMPCSNPIARLLLKQGKAKVKRREPFTIKLIYETTDYTQDLTLGVDTGSETIGAAVSKDNGDIVYMSEVVVRNDITDKMTQRAKYRRNRRNRKTRYRKARWLNRSNSIKKDRFSPTMQSKLHSHVKEIEYIQSILPITEMVFETGQFDMHLMKDPSLANPKVRPWGYQKGTNYGFENTKAMVLNRDNYTCQCCKGKHKDSKLEVHHIVFRSQGGSDEESNLITLCHTCHKDLHSGKINLKLSGKVKGNLKYATQMNSIRKQLFRLYPNAIETFGYVTKANRLHLGVDKEHYYDACTIATQGNTFNVKSNLYKKKCVSDGDFQKTKGICSEQPIVTDKICGFRKFDKVRYFGKDYFIKGRMSTGYAILMDIDGNKIDFSTMPRGYKTPKLSNCKRITARSTVMTQVKVV

SEQ ID NO: 19370 - protein, 407 aa, Fervidobacterium sp.; identical to SEQ ID NO: 9479

SEQ ID NO: 19371 - protein, 298 aa, unidentified
  REGION 1..298: note = Human gut metagenome
VGFPGLRLVKIQEHITVIKRICRILPITLVRVETAEFDTQRLKAMLAGKPLPVGTDYQLGEMYDEYNVRQYVLKRDNYTCQCCGAHTTAKKTVKLHVHHLESRKVGGNAPSNLITLCTTCHNNLHKGKITLDGKKRGKTLRDAAFMGIMRNTLLTRLRNELNIPVQNTYGYITKLLREQNDIKKSHVNDARCISKHPLAKPCSVCYRTKAIRHHNRQIHKAKILKGGIRKANQVPYIVKGFRLWDKVLYNEQECFISGRRSSGYFALRKFDGTTITNSISFKKLRLLEPATNYLIERK

SEQ ID NO: 19372 - protein, 557 aa, unidentified; identical to SEQ ID NO: 3108
  REGION 1..557: note = Human gut metagenome

SEQ ID NO: 19373 - protein, 416 aa, unidentified; identical to SEQ ID NO: 6623
  REGION 1..416: note = Human gut metagenome

SEQ ID NO: 19374 - protein, 413 aa, unidentified; identical to SEQ ID NO: 2636
  REGION 1..413: note = Human gut metagenome

SEQ ID NO: 19375 - protein, 429 aa, Moorena sp.; identical to SEQ ID NO: 11852

SEQ ID NO: 19376 - protein, 465 aa, unidentified; identical to SEQ ID NO: 3603
  REGION 1..465: note = Human gut metagenome

SEQ ID NO: 19377 - protein, 494 aa, unidentified; identical to SEQ ID NO: 5675
  REGION 1..494: note = Human gut metagenome

SEQ ID NO: 19378 - protein, 442 aa, unidentified; identical to SEQ ID NO: 3218
  REGION 1..442: note = Human gut metagenome

SEQ ID NO: 19379 - protein, 413 aa, unidentified; identical to SEQ ID NO: 4044
  REGION 1..413: note = Human gut metagenome

SEQ ID NO: 19380 - protein, 411 aa, unidentified; identical to SEQ ID NO: 3917
  REGION 1..411: note = Human gut metagenome

SEQ ID NO: 19381 - protein, 417 aa, unidentified; identical to SEQ ID NO: 17640
  REGION 1..417: note = Human gut metagenome

SEQ ID NO: 19382 - protein, 427 aa, Mastigocoleus sp.; identical to SEQ ID NO: 18901

SEQ ID NO: 19383 - protein, 489 aa, unidentified
  REGION 1..489: note = Human gut metagenome
VTDVSTVYVLNKDGKPLMPTTRCGHVRYLLKEKKARVVKTKPFTIQLLYKTNDVVQPLYLGIDPGRTNIGVAVVKADGTAVFTAHLETHNKKIPKLMKKRKDSRRARRTNGRRCRRQRRAKANGTISKKCVKQATAQNGSASKRAKKIGVIKRHLPGCEKEVLCIGIKNKEAKFNNRTRPAGWLTPTANQLLQTHINLIKKIQKLLPISDVVLEINKFAFMQLDNPDIQKWQYQQGPLYQKANLEEAVSEMQEHHCLFCKKKIDHYHHVVPQHKNGSNTIDNIVGLCTKHHDLVHKDTAWHEKLTKKKTGLNKKYGALSVLNQIIPALTKELSSIFPKHFFVTTGKSTYDYRAAHGVSKDHWLDAYCIACSVLPNDVCDSSINNRVPYELKQFRRHDRRALHKENMSRVYTLNGKKVATNRHKATEQTADSLEEFRQNHPDDVCKLKVKEHHSEYRNPKRNFPGYVFLVGKRTHVMQGTSGSHNGKADG

SEQ ID NO: 19384 - protein, 422 aa, unidentified; identical to SEQ ID NO: 7962
  REGION 1..422: note = Human gut metagenome

SEQ ID NO: 19385 - protein, 250 aa, unidentified
  REGION 1..250: note = Human gut metagenome
KPLPVGTDYQLGEMYDEYNVRQYVLKRDHYTCQCCGAHTTTKKTVKLHVHHLESRKVGGNAPSNLITLCTTCHDALHKGKVSLDGKERGKPLRDAAFMGIMRKTLMARLRDELSIPVQGTYGYITKMRRERNDIKKSHVNDARCISKHPLAEPCSVCYRTKAIRHHNRQIHKANFSKGGIRKRSQMPYVVEGYRLWDKVLYKGQECFVSGRRASGSFTLKKLDGTRISKGVTFKKLRLLEPATNYLIERM

SEQ ID NO: 19386 - protein, 472 aa, unidentified; identical to SEQ ID NO: 4432
  REGION 1..472: note = Human gut metagenome

SEQ ID NO: 19387 - protein, 421 aa, unidentified; identical to SEQ ID NO: 6697
  REGION 1..421: note = Human gut metagenome

SEQ ID NO: 19388 - protein, 451 aa, unidentified; identical to SEQ ID NO: 18560
  REGION 1..451: note = Human gut metagenome

SEQ ID NO: 19389 - protein, 430 aa, unidentified; identical to SEQ ID NO: 4504
  REGION 1..430: note = Human gut metagenome

SEQ ID NO: 19390 - protein, 473 aa, unidentified; identical to SEQ ID NO: 3562
  REGION 1..473: note = uncultured beta proteobacterium

SEQ ID NO: 19391 - protein, 470 aa, unidentified; identical to SEQ ID NO: 2949
  REGION 1..470: note = Human gut metagenome

SEQ ID NO: 19392 - protein, 442 aa, unidentified; identical to SEQ ID NO: 10903
  REGION 1..442: note = Human gut metagenome

SEQ ID NO: 19393 - protein, 431 aa, unidentified
  REGION 1..431: note = Human gut metagenome
MPNKVYVINKHGRPLMPCSPAKARHLLDDGKAKVKKRAPFTIQLVYGSSGYTQEVILGVDAGSKTIGMSASTTKEELLSAEVKPRNDVVDLLSTRREFRRARRNRKTRYRKPRFDNRVRSKHKGWLAPSVEVKIQEHITSIKRACRILPVSKVVVETAEFDLQLLKAIADGKPVPQGEDYQKGEMYGHYNVRQYVLWRDNYTCQCCGTHPSKKKEVRLHVHHLESRKVGGDAPDNQVTLCESCHEKLHKGLIAEKDFKKRKRKSTRDATFMGIMRKTLMQRLCSELPIPVIETRGYITKATREKLLVLPKSHTNDALAIAQGKQGFNVGYLPGIVQINKIYTIRPVRHHNRQLHKATILKGGIRKSNQTEKYVFGYCLFDKVQFNGQDCFIWGRRTTGIFTIKTINGKMIKDGISFKKLKPVEKSTGYLIA

SEQ ID NO: 19394 - protein, 420 aa, unidentified; identical to SEQ ID NO: 7764
  REGION 1..420: note = Human gut metagenome

SEQ ID NO: 19395 - protein, 368 aa, unidentified
  REGION 1..368: note = Human gut metagenome
VQPLYLGIDPGRTNIGVAVVKTDGTAVFTAHLETRNKEIPKLMQGRKKARRARRTNGRRCRRQRRAKANGTISKKCVKQTTAQNGSVSKRAKKIGVIKRHLPGCEKKVLCIGIKNKEAKFSNRTRPEGWLTPTANQLLQTHINLIKKIRKFLPVNDVVLEINKFAFMQLDNPNIQKWQYQQGPLYQKASLEEAVSEMQEHHCLFCKKSIVHYHHVVPQSENGSDTIGNIVGLCTKHHDLVHKDTAWQKKLAKKKTGLNKKYGALSILNQIIPALTKELSSLFPKHFFATNGKSTHDYRAAHDVSKDHWLDAYCIACSILPNDTCDKNINGRVPYKLKQFRRHDRRALHKENMSRVYTLDGKKSCHKSA

SEQ ID NO: 19396 - protein, 512 aa, unidentified; identical to SEQ ID NO: 3720
  REGION 1..512: note = Human gut metagenome

SEQ ID NO: 19397 - protein, 414 aa, unidentified
  REGION 1..414: note = Human gut metagenome
LRVFVLNKRGKPLMPCSPAKARLLLKEKKAIVKRRTPFTIQLTIATGETKQPVSLGVDAGYKHVGLSASTEKAELYASEVELRQDITDLLSARRALRQSRRNRKTRYRAPRFDNRIRTKRKGWLAPSVENRINAHLSRIEAVLRLLPITKITVETASFDTQLPKNPDIAGKEYQEGEQLAFWNVREYVLFRDGHVCQHCHGRSKDPVLNVHHLESRRTGGDSPGNLITLCETCHKALHRGEIKLSAKRGQSLRAEAFMGIMRWEVLNRLKLSHPELEVNNTYGYRTKHARIANGIAKSHCADAFCIAGNLGAKRLGEFFFQKQTRRNNRQIHKFSILKDGIRKRNQAPFEVNGFRLFDKVACKGEEGFIFGRRSSGFFDVRKLDGTCISAGISYKKLHLLEKRRTYLTEIRKEE

SEQ ID NO: 19398 - protein, 427 aa, Mastigocladus sp.; identical to SEQ ID NO: 3596

SEQ ID NO: 19399 - protein, 512 aa, unidentified
  REGION 1..512: note = Human gut metagenome
MSTVYVLNKDGKPLMPTTRGWHVRYLLKEKKARVVTSKPFTIQLLYETDDVVQPLYLGIDPGRTNIGVAVVKTDGTAVFTAHLETRNKEIPKLMQGRKKARRARRTNGRRCRRQRRAKANGTISKKCVKQTTAQNGSASKHAKEIGVIKRHLPGCEKDVLCIGIKNKEAKFGNRTRPEGWLTPTANQLLKTHINLVKKIRKFLPISDVVLEINKFAFMRLDNPNIQKWQYQQGPLYQKASLEEAVSEMQEHHCLFCKKSIAHYHHVVPQSENGSNTIGNIVGLCTKHHDFVHKDTAWQKKLAKKKTGLNKKYGALSVLNQIIPALTKELSSLFPKHFFATNGKSTHDYRIAHDVSKDHWLDAYCIACSVLPNDTCDRTINSRVPYELKQFRRHDRRALHKENMSRVYTLNGKSVATNRHKATEQTTDSLEEFRQRKPNDVCKLKVKEHHPEYRNPERNFPGCVFLVGKHTHVMQGTSGSHNGKADGYYDTNGNSYPSGKCKFVAKNKGIVFA

SEQ ID NO: 19400 - protein, 512 aa, unidentified; identical to SEQ ID NO: 8121
  REGION 1..512: note = Human gut metagenome

SEQ ID NO: 19401 - protein, 424 aa, Planktothrix sp.; identical to SEQ ID NO: 4537

SEQ ID NO: 19402 - protein, 425 aa, unidentified
  REGION 1..425: note = Human gut metagenome
MLVYVVTKDKQPLMPCTQVIARLLLKQERVKVKRRKPFTIQLLYETTKYKQDLELAVDTGSGKLATAVRTEQDEIVYLSEVAVRNDITGKMTERRTKRRSRRHRKTRYRKPRFDNRRNLRRKDRFSPTMQSKIHSHVKEIEYIKSILPITRIILETGQFNPHRMKNPALANPNIRHWGYQKGPNYGYENTRAMVLDRDNHQCQYCHGKRKDRHLEVHHIVFRSQGGSDDAKNLITLCHTCHQALHKGKIHLDLEGMEKGTLKYATQMNSIRKQLLRRYPEAIETYGYITKANRLAMDLPKEHYIDACVIATEGRPFTINSLLYRKKCVSAGDFQQYHGKRSEIRQATGKIMGFRKYDKVRYFGKYYFIKGRMSTGYAVLMDINGDTVKFSDMPWGFKTPKLERMERIQARSTWMVMSEEVTPNIV

SEQ ID NO: 19403 - protein, 424 aa, unidentified; identical to SEQ ID NO: 3434
  REGION 1..424: note = Human gut metagenome

SEQ ID NO: 19404 - protein, 411 aa, unidentified; identical to SEQ ID NO: 3917
  REGION 1..411: note = Human gut metagenome

SEQ ID NO: 19405 - protein, 426 aa, Spirulina sp.
MSIPNFVFVLDTHRKPLTPCTPGMARSLLKAGKAMVFRLYPFTIILPKAVQATPEPLTLKLDPGSQVTGIALLQTTVLIWVAELIHRGQGIQAALLSRRQLRRSRRNRKTRYRQARFLNRTRPQGWLAPSLQHRVDTTVTWVKRLSKLAPMGGIVQELVRFDLQRMENAEISGVEYQQGELQGYEVREYLLEKFHRQCIYCGAKDLPLEVEHIHPRSRGGSNRVSNLTLACHSCNQAKGNQDVQDFLSGKPDLLQRVLSQAKAPLKDAAAVNATRWALFNALKATGLPVSTGSGGRTKFNRTRLGLPKRHYFDAACVGETEELTVLSEQPLLIRATGHGTRQMCRTDKFGFPVRYVPRFKFIQGFQTGDIVKAVVTSGKKVGIYIGRVAVRTSGYFNIATPRGLLQGISHKCCKALQKKDGYAYGY

SEQ ID NO: 19406 - protein, 470 aa, Anaerostipes sp.; identical to SEQ ID NO: 2825

SEQ ID NO: 19407 - protein, 443 aa, Anoxybacillus sp.
MVEENMTCFMQRKGENPMVFVLDTNKRPLAPCHEAVARKLLKQGKAAIYRRFPFTIILKKSVDESEIKATYRLKIDYGSRHTGLAILRGQEVVWLGQLDHRTDIKERIDKRRAFRRARRNRKTRYRKPRFLNRKRKEGWLPPSLESRMQNIKTWVERLRKICPIEHISYENAKFDTQLMRNPEINGVEYQQGTLQGYEVREYLLEKFGRKCCYCGKEGVPLEVEHIIPKSRGGTDRIDNLCLACRDCNQRKGSQTAEEFGYPHIQEMVKKTLKDASVVNATRWKVYEVLKQSGCEVECGTGARTKMNRIRLGLPKIHYFDACCVGKSTPLQLHFKTKEVLFIKAKGRGSRSRTNLDRYGFPRGYLARQKYFFGFQTGDMVKAVVPRGKYQGVWFGEVACRKTGSFDIKGKDGKRIAQGINYRYVQVIQRFDGYAYGKGVAELA

SEQ ID NO: 19408 - protein, 476 aa, unidentified
  REGION 1..476: note = Human gut metagenome
VSLLFYERISCMNTCVCVLSNSGERLMPTFRLGKVRRLLKDGKAKIIKHHPFTIQLLYDSKTNTQPIEICEDVGYNYIGISVKSQSHEYVSAQYDTLQDEKACHDSCRKLRRTRRNRLRYRKPRFDNRKRGEGWLAPSLKHKKELNVNIVKMYCTVMPITHATVEVGSFDTMLVKAIQEGKAVPEGADYQKGPRYNLATLREAVFYRDNYVCKICGRKATEGAILHMHHMFYWKGRHGNSLNELLTVCEKCHTPANHQKSGKLYGFGEKIKFADLSGAAFMNTVRWQIVNELYVAFGKPFVTITYGAMTKEKRIALQLEKSHNNDAYAMGEFHPNLRCMFEHYEKARRNNRILEKFYDSRYIDIRTGEIATGKELFNGRINRNHKKDSENLHKYRGKRTYAGHRALLRKKVNLNPGDLVSLNGENLIVHSTHTKKNGAVNVEFETPAKSGQKSASLKKLKIVKAANSIHPAWKKIS

SEQ ID NO: 19409 - protein, 415 aa, unidentified; identical to SEQ ID NO: 7357
  REGION 1..415: note = Human gut metagenome

SEQ ID NO: 19410 - protein, 465 aa, unidentified; identical to SEQ ID NO: 7667
  REGION 1..465: note = Human gut metagenome

SEQ ID NO: 19411 - protein, 443 aa, unidentified
  REGION 1..443: note = Human gut metagenome
LTKDENRPSGRTTGLRAEQAEPAGIRKGDTLKVFVLNMRGKPLMPCSPAKARHMLKAGKAFVVRRTPFTIKLTIATGETKQDVTLGVDAGARHVGISATTEKEEVFASEVALRQDITGLLADRLAFRRARRNRKTRYRAPRFNNRVRSKHKGWLAPSVENRIQAHMSRIEAVCRLLPVTKIVIETASFDIQKIRNPEVEGTGYQQGDQLGFWNVREYVLFRDGHVCQHCHGRSRDKILNVHHLESRKTGGDAPNNLITLCETCHKAYHAGKIKLKVKRGQSFRAEAFMGIMRWTLLDRVRKTHPKLPVENTYGYLTKHKRIALGLPKTHCADAFCIAGNLKALRRGDFLFQQQTRKHNRQIHRCSILKGGVRKLNQAPFLVKGFRLFDKVRIGGQIGFVFGRRVRGIFNIRRLDKTVIGTDINCKKLSLLETRKTFLTELRKE

SEQ ID NO: 19412 - protein, 424 aa, unidentified; identical to SEQ ID NO: 4955
  REGION 1..424: note = Human gut metagenome

SEQ ID NO: 19413 - protein, 423 aa, unidentified; identical to SEQ ID NO: 12332
  REGION 1..423: note = coral metagenome

SEQ ID NO: 19414 - protein, 431 aa, unidentified
  REGION 1..431: note = Human gut metagenome
MPNKVYVINKHGRPLMPCSPAKARHLLDAGKAKVKKRTPFTIQLVYGSSGYTQEVILGVDAGSKTIGVSALTKKEELFAANVIPRNDVVDLLSTRREFRRARRNCKTRYRKPRFDNRVRSKHKGWLAPSVEVKIQEHITAIRRVCGILPVSKVVVETAEFDLQLLKAIEKGKPVPQGEDYQQGEMYGHYNVRQYVLWRDDYTCQCCGAHTTKKKEVRLHVHHLESRKTGGDAPSNLITLCDSCHEKLHKGLIAEKDFKKRKRKSTRDATFMGIMRKTLMQRLCSELPIHVVETRGYITKATREKLLVLPKSHINDALAIAQGKHGFNVGYLPGILQIDMIYTIRPVRHHNRQLHKATILKGGIRKSNQTGKYVFGYRLFDKVQFNGQDCFIWGRRTTGIFTIKTINGKMIKDGISFKKLKPVEKSTSYLIA

SEQ ID NO: 19415 - protein, 493 aa, unidentified; identical to SEQ ID NO: 2644
  REGION 1..493: note = Human gut metagenome

SEQ ID NO: 19416 - protein, 426 aa, unidentified
  REGION 1..426: note = Soda lake metagenome
MLVFVFNKHGEQLMPCKPSKARRLLKKNKAKIVKYNPFTIQLLYGSSGYKQDIKVGVDLGAKNIGIAIQSNNKVIAKGEIELRTDVKSNLDTRRIYRSSRRNRKTRHRKPRFDNRKRKDNWLPPSIQSRIDNTFNWIDKFLMLLPKSKLNIEVGKFDIQKIMNPEIEGEEYQQGETYGYYNTRYYVFERDNYTCQVCKNKNKILQTHHIIYRSKGGSDRPKNLITVCVDCHTHENHQKGNIFWEWMQKGKKVPRYKETPFMNTIRKEVFRKHPNVNLVYGSWTTPNRKALGLEKTHFNDALTVSNIQDGFIDKINIFKIKQFRKKKRSLHEANPRKGRKVPNTKAKRNKKNTVCSNGFNLNDKVKLFGQTGWISGFCQGGAYVKNIYDEYITVPEKSYKQVSFKYLTFVCHNNNWKFTTFANSSHD

SEQ ID NO: 19417 - protein, 416 aa, Parasutterella sp.; identical to SEQ ID NO: 10114

SEQ ID NO: 19418 - protein, 512 aa, unidentified
  REGION 1..512: note = Human gut metagenome
MSTVYVLNKDGKPLMPTTRGGHVRHLLKEQKARVVRAKPFTIQLLYETNDVVQPLYLGIDPGRTNIGVAVVKANGTAVFTAHLETRNKEIPKLMQDRKKARRARRTNGRRCRRQRRAKANGTISKKCVKQTTAQNGSVSKRAKDIGVIKRRLPGCEKDVLCIGIKNKETKFTNRTRPEGWLTPTANQLLQTHINLVKKIQKFLPISDVVLEVNKFAFMRLDNPNIQKWQYQQGPLYKKESLESAVSEIQEHHCLFCKKPIDHYHHVVPQHKNGSNTIGNIVGLCAKHHDLVHKDSAWEKKLAQKSTGLNKKYGALGVLNQIIPTLTNELSSLFPKHSFVTNGKSTYDYRAAHGVSKDHWLDAYCIACSVLPSNVCDSNINNHMPYELKQFRRHDRRVLNNENMNRVYTLNNKAVAINRHKAKDQKTVSLEKFRKEHPDDVCKLKVKEHHPTYRNMNRNFPGSVFLVGKQIHVMQGIASSKDGKATKYNDTSATAIATGKCKFVAKNTGILFV

SEQ ID NO: 19419 - protein, 413 aa, unidentified; identical to SEQ ID NO: 7541
  REGION 1..413: note = Viral metagenome

SEQ ID NO: 19420 - protein, 442 aa, unidentified; identical to SEQ ID NO: 3234
  REGION 1..442: note = Human gut metagenome

SEQ ID NO: 19421 - protein, 414 aa, unidentified
  REGION 1..414: note = Human gut metagenome
MVYVINKQGQALMPTERFGKVRRLLKNSLAHVVCRIPFTIQLDYDTTDYTQPVSLGVDAGSKHIGISATTSEKELYAADVELRNDIVDKLSTRREQRRTRRSRLRYRKARFNNRVSSKRKGWLAPSVENKIQTHLTVVEKIHKFLPITNIVVETASFDIQKINNPIISGSEYQQGEQLDFFNVREYVLFRDNHICQHCKGKSKDKVLNVHHIESRKAGGDSPNNLITLCETCHKAYHRGEFELNVKRGKSFRDAAFMGIMRWSFYDRLKNIYPNVSMTFGYITKNTRITNNLPKDHYVDARCISGNPTAKPLGYYFYQKKVRCQNRQIHKANFLKGGRKKLNQAPFLVKGFRLFDLVEYQNDLYYIFGRRDSGFFDIRKLNGTKVNKGSINCKHLRLIATRKSILIEKRMQVNL

SEQ ID NO: 19422 - protein, 373 aa, Moorena sp.; identical to SEQ ID NO: 6300

SEQ ID NO: 19423 - protein, 453 aa, Lactobacillus sp.; identical to SEQ ID NO: 4050

SEQ ID NO: 19424 - protein, 433 aa, Scytonema sp.; identical to SEQ ID NO: 2739

SEQ ID NO: 19425 - protein, 424 aa, unidentified; identical to SEQ ID NO: 8578
  REGION 1..424: note = Human gut metagenome

SEQ ID NO: 19426 - protein, 412 aa, unidentified
  REGION 1..412: note = Human gut metagenome
MTNYAFVLDANGKQLAPTKEQKAWFLIRKKRATLVSKYPMVIQLKKEIPDEQIYKDEICCGIDDGGLHVGISLVQKCKTKNKVVFKGTMEQRKDVKHLMEVRKGYRRYHRFYKRYRQARFNNRKSSKRKERIAPSILQKRQATIRVINQLNKWINITNYWLEDVAIDIRALTDDYKAYRWQYQQSNRLDENIRKAVILRDGCKCMECGKSNCKLEVHHIKPRRSNGSNTLGNLISLCKKCHQKTEEQEEVYMNRYFSMLNSSDNKNLNYAQHVMIGKKWLIEQLSKLGTLTLATGGDTANKRIDWNIEKSHSNDAICIAGLQPDTCNVKEWTIKPMRRQSKAKTDNVLGINHRDLVEYTFRNGETHRGYVTALYPGQNAINFQSSTKHCKKVNAKKCKLIWKYSKIYWLANV

SEQ ID NO: 19427 - protein, 442 aa, unidentified
  REGION 1..442: note = Human gut metagenome
MSTSVFVLDKKHRPLMPCRPARARRLLRAGRARVVKRFPFVIRLVDRTVEQSEVQPVLIKLDPGSRETGAAVVRDDEKKRHHALAFFVIEHRGGAIRDALKARSAFRRRRRSQNLRCRSPRFLNRVKPKGWLPPSLRHRVETTLSFVRRMCRYLPVSGIAAELVKFDSQKLQTPEVSGIEYQQGTLFEYEVREYLLEKFGRKCVYCGAEGVPLNIDHVVPRAKGGSNRVSNLVLACVSCNQKKGARSLEDFLKGKPEVLARVRRELKTPLRDAAAVNATRWVLFNELKATGLPVETGSGALTKFNRHAFGVEKEHWLDALCVGRLNGVVTRKGLNVLEIRCMGRGSRQRTRLTKYGFPRGYLMRQKCVHGFATGDMVEANVPKGKKAGLWRGRVAVRVSGSFNIQTPKGVIQGVGWKHCRLISHNDGYGYAWLGHAPHSSPA

SEQ ID NO: 19428 - protein, 427 aa, Desulfobacter sp.
LFWIQTKKPQNPVHPAKARLLLTEGKAAVFRQFPFTIILKEKVLDVASNPLRIKIDPGSRETGIAVINDDSGEIVFAMELRHRGQQIKNNLESRRAIRRSRRNRKTRYRKPRFDNRTRAEGWLPPSLKSRVHNIETWVNRLCRFCNIQAISMELVRFDMQKIQNPEISGVAYQQGELMGYEVREYLLEKWDRTCAYCGKTDILLEIEHIVPRSKGGSNRVSNLTLACTACNRKKGNKPIEQFLSRKPGLLKRIQKQSKVPLKDAGAVNTTRWDLFRTLKKNGLPVETGSGGLTKFNRTTRGLHKTHWLDAACVGQSTPEKIFQIDKAVLIVKADGHGSRQMCRVNKFGFPRTTAKSTEKKVKGFQTGDIVKAVVTSGKKVGTYTGRVAVRKSGSFNIKTVDKTVQGISWKYCRLLHASDGYSYNTTC

SEQ ID NO: 19429 - protein, 442 aa, unidentified; identical to SEQ ID NO: 7396
  REGION 1..442: note = metagenome

SEQ ID NO: 19430 - protein, 452 aa, Lactobacillus sp.
MRIAAGNMIAGKGGKMEYENANRVFLLNKDGKPLMPCHPRKARLLLKSGKAFVVKKYPFTIQLKYGSYGYKQKVSLGVDTGQRHIGFAVTSQDKVLYQSEVELRQDVHKNLYTRSIYRRSRRNRKTRYLNRVHGKRDGLWLPPSVKGKVNHNIAWIKRYLAVLPNPDLHIEVGKFDMAKMVNPAISGKQYQEGSLHGWKNYEYYVLARDKYTCQLCHKHGEGVKLVVHHIVYRSQGGTDRVDNLITLCTNCHTTKNHQPSGKLYKWMKAKKKVTTHLKGATFMNILRKRIMAAFPEASYQYGYQTFFERKKFNLPKGHFTDAIAISGIREINQMPETVTMISQFRKKKRSLHEASARKGRKEPNRTSKRNAKNTKYARGLWLNDYVHVIGTNLRGYVQSYLSKGAYVRLSDGLGNYVTKDGKNYISTKLCKPITHNGNWQKAEQKLSLYEFK

SEQ ID NO: 19431 - protein, 452 aa, unidentified
  REGION 1..452: note = IscB polypeptide
MMQKLQVKFKNTPTDTPQVCSFVNSGLNRDQSPSVQGTVRTCNIPEVDHLQHTGGQNSRVSDIVYVINMRGEPLMPTSQQKARRLLREKKAKVIKRFPFTIQLLYSTGETKQNISCGIDSGYKSIGFSCRTDKRELISGEVTLENNVTRRLLEKRMYRRGRRNKLWYRKPRFLNRGIPKGWLPPSIERRYQTHLHVISRLKALLPITDIIIEVGNFDIQKIMNPEIQGKEYQQGPMYGYENRIAYLISREQGKCQCCKNKYKKGDGWRLHHIWGKEKDRPEDWALLHESCHEKLHKNHEEEILRKQKSKSYKDSTFMNIIRNKFQEDIDCQITFGYETHIKRNNLCLNKSHVNDAFVISGGENQERVNQYQVTQKHRNNRCLQLNRKGFRPSIKKNRSIIQPKDLFWVNGIKYSCKGMFNRGSYISYGSKKKEYFKFKEVEKIFRVGSLVWN

SEQ ID NO: 19432 - protein, 454 aa, unidentified
  REGION 1..454: note = Human gut metagenome
LDTVAVISASGRKLMPTNSYRARRLLKLKRAVIYKYRPVFTIKLVDRTNGYTQPIEYKCDTGYQNIGISICSDTKEFVNEQRELLKDEVKRHSDSRKYRRTRRNRLRYRKKRFDNRKGMISKDGFAPSIRNKRDVHIHLYEEYYKVFPITKAVFEMGQFDTQVLKAVEAGLPIPDGTDYQRGEQYGYATLREAVFARDNYKCICCGKSAVRDGVKLRIHHIGYLSGDRSNRMANLGSVCESCHTSKNHKPGGKLYSLKPELKTFKGATFMTTVRYSMVKKLKVMTPTVDIKVTYGAATKLARRVLSVKKTHSNDAYCMGEFHPKHRSDFKHYKKCRRNSRVLSRFYDAKYRDLRDGSVKTGSQLSCGRTNRKISRHAELDERIYRAHKISKGRVSTRRQHYSLRPGDKVLYDGKVYFVTGMQNSGTHVKLTNGKVCSLKKVHVLQHCNAWTAVI

SEQ ID NO: 19433 - protein, 512 aa, unidentified
  REGION 1..512: note = Human gut metagenome
MSTVYVLNKDGKPLMPTTRGGHVRHLLKEQKARVVASKPFTIQLLYETDDVVQLLYLGIDPGRTNIGVAVVKTDGTAVFTAHLETRNKEIPKLMKKRKESRRARRTNGRRCRRPRRAQANGTISKKCVKHDTAQNGSVSKRAKEIGVIKRHLPGCEKDVLCICIKNKEAKFSNRTRPEGWLTPTANQLLQTHINLVKKIQKFLPISDVVLEINKFAFMRLDNPNVQKWQYQQGPLYQKANLEEAVSEMQEHHCLFCKKPIAHYHHVVPQSENGSDTIGNIVGLCTKHHDLVHKDATWQKRLAKKKTGLNKKYGALSVLNQIIPALTKELSSLFPKHFFATNGKSTYDYRSAHGVSKDHWLDAYCIACSVLPNDVCDSGINNRVPYELKQFRRHDRRALNNENMSRVYTLNDNVVATNRHKATKQTTDSLEEFRQNHPDDVCKLKVKEHHPTYRNMNRNYPGSVFLIGKQVHVMQGIAGSKDGEATTYKDTNANSIAAGKCKFVAKNSGILFV

SEQ ID NO: 19434 - protein, 465 aa, unidentified; identical to SEQ ID NO: 10340
  REGION 1..465: note = Human gut metagenome

SEQ ID NO: 19435 - protein, 424 aa, unidentified; identical to SEQ ID NO: 17364
  REGION 1..424: note = Human gut metagenome

SEQ ID NO: 19436 - protein, 496 aa, Streptomyces sp.; identical to SEQ ID NO: 4777

SEQ ID NO: 19437 - protein, 544 aa, unidentified
  REGION 1..544: note = Human gut metagenome
MKQKKQKVMVYILNKKGKPLMPTTRCGHVRKLLDSKKAVVVSSNPFTIRLKYDTPNGVQDVFAGIDSGRENIGSGASNEDGDCLYLGELKTSNKSIKMKMTERAGFRKERRSHDRQNKQRKARKDHTEIQNGNADICRTTISCKSVQISYPAAEKSVTHKIIRGKEGKFANRHRDEGWITPSARQLVQMHMNDLKSMCRILPISHVTLERVAFDFQKLENENIKAWEYGKGKLYGYNSPEEYIHDVQGGKCLICGKPHIDYLHHIIPRSKGGSNKVSNLAGLCYDCHYGPMGVHNCQDTQDRLPELKNEANKQYKVSLLNSVMPVLIEEMDKFCKANSIIFSICGGHDTGKVRDMYDLQKDHCIDGFAISLAGRNVKSVDVMPDRIHQKQRYKKKSKNIIQKRNCREYYDGKKLAAVNRHKGTDQKADSLEEYMNTYAETHTADECKKHFESLTVKPARRTYTFHKEGRICPFHIGDKVRYEKKNKIKGNTKVETFICEGIRFPKDENKAKVEHNKTKSKKMKFCRVLEPGCTPYIDYRKLVLI

SEQ ID NO: 19438 - protein, 451 aa, Moorena sp.; identical to SEQ ID NO: 5203

SEQ ID NO: 19439 - protein, 423 aa, unidentified; identical to SEQ ID NO: 4062
  REGION 1..423: note = Human gut metagenome

SEQ ID NO: 19440 - protein, 424 aa, Moorena sp.
MRVFVLDKNKKPLDPCQPARARILLKQGRAKVFRRYPFTIIMRDLEELECVTHNHQIKLDPGSQTTGLAIIQEKVVVWGAELTHRGLQIRDGLTSRRKLRRSRRNRKTRYRQPRFLNRKRPDGWLAPSLMSRVYNILTWVKKLTRFCPITGISQELVRFDTQKMENPEISGTEYQQGTLYGYEVREYLLSKWNRKCAYCGVTDTQLEVEHIKPKSKGGSDRVSNLAIACRKCNQIKGNQEIEQFLSGKPDVLKRILSQAKRPLVDAAAVNSTRWKLYNELKALGLPIETGSGGLTKYNRCRQNLPKTHWLDAANVGEVDTLYIESYQPLLISAKGHGTRQMCRTNKFGFPTRYVPRFKFVKGFQTGDIAKAVVTKGKKIGTYTGRIATRKTGSFNISTKHELVQGISHKYCSIVHRKDGYSYSF

SEQ ID NO: 19441 - protein, 470 aa, unidentified; identical to SEQ ID NO: 7284
  REGION 1..470: note = Human gut metagenome

SEQ ID NO: 19442 - protein, 420 aa, unidentified; identical to SEQ ID NO: 6235
  REGION 1..420: note = Human gut metagenome

SEQ ID NO: 19443 - protein, 426 aa, Parasutterella sp.; identical to SEQ ID NO: 3045

SEQ ID NO: 19444 - protein, 415 aa, Bacillus sp.; identical to SEQ ID NO: 2431

SEQ ID NO: 19445 - protein, 426 aa, Microcoleus sp.
MSKPNYVLVVDTNRKPLNPCTPGVARSLLKAKKAKVFRRYPFTIILNQAVENKPKPMQLKLDPGSKTTGIALLQEEKVVWAGELTHRGQQIKDSLESRRALRRGRRHRKTRYRKARFLNRSRLKGWLAPSLQHRVETTLTWVNRLRRYAPITGISQELVRFDLQKQDNPEISGIEYQQGTLFGYEVREYLLAKWERKCAYCGVENVPLQVEHIHPRAKGGTDRVSNLCLSCEPCNLKKGTQDIEVFLRNKPDVLSHVLTQAKRPLKDAAAVNSTRWALFNRLKQTGLPVETGSGGKTKYNRIRLELSKHHYIDAACVGNVDNLQILTTQPLLIKATGHGTRQMCRTDKFGFPSRHVPRNKFVRGFQTGDIVKAAVTQGKKIGLYVGRVAVRSTGSFNISDKTGLVQGISHKYCQVVHRKDGYNYAC

SEQ ID NO: 19446 - protein, 338 aa, unidentified; identical to SEQ ID NO: 7376
  REGION 1..338: note = Human gut metagenome

SEQ ID NO: 19447 - protein, 406 aa, unidentified; identical to SEQ ID NO: 3980
  REGION 1..406: note = Human gut metagenome

SEQ ID NO: 19448 - protein, 371 aa, unidentified
  REGION 1..371: note = Human gut metagenome
LSKVKTMRVFVFNMRGRPLMPCSQRKARLLLRENKAMIYKYHPFTIQLTYTTGETKQDCHIGIDTGSKYIGAAVRSEDKVFWKGEIELRQDIRSNLDTKRIYRRSRRNRKTRYRKPRFLNRKRRDEWLPPSLQSRINHTFHWIDTLSSLVPNPILHIEVGKFDVAKMINPEIHGVDYQHGQTYGFFDERYFVFARDNYTCQCCGKSKNKILNTHHIIYRSNGGTNRVDNLITVCTDCHTSQNHRKGGIFYQWQEQHKKVKQYKEPPFMNTLRKRIFVAYPDAEITYGSETTPKRKAMKLDKTHYNDAIVISGINEIKENPEEWLLIKQFRKKKRSLHEATARKGRKKPNRNQTRNSKNTPYYKGFYLNDKV

SEQ ID NO: 19449 - protein, 451 aa, unidentified
  REGION 1..451: note = Human gut metagenome
MSVAVISKTGIVLMPTSEYRARKLLDSGKAIIYGYRPFTIQLTERETGDVQPVELCVDTGYIHIGVSVKSEKHEYLGLQVDTLTDEKAKHDDRRMYRRQRRNRKRYRKSRFDNRKRKSGWLAPSLEHKKEINLQIITAICGVYPIADITLEIGNFDTQVLKAKEEGKQIPQGTDYQHGERYGIATLREAVFTRDGYKCQCCDRGIKDGAILHAHHIQYRSQGGTNRMSNLITVCEKCHTPANHKPGGKLYGWKPKIASFKDATYMTAVRWQLYRKVKEMFPGIHVKITYGAETKERRRILDIKKSHVNDAFVMGQFHPKHRSLPVLYKKKRRNNRCLEKFYDAKYIDSRNGKTRSGQELFNGRISRNHKKDSENLHRYRKKKVSRGKRNIRVQRYKIQPHDIVLFDGKKYETTGCHNKGTRAILLPEKKSKSVEKLTIYKYAGGYYPSKFA

SEQ ID NO: 19450 - protein, 411 aa, unidentified; identical to SEQ ID NO: 3917
  REGION 1..411: note = Human gut metagenome

SEQ ID NO: 19451 - protein, 415 aa, unidentified; identical to SEQ ID NO: 2744
  REGION 1..415: note = Human gut metagenome

SEQ ID NO: 19452 - protein, 442 aa, unidentified; identical to SEQ ID NO: 2834
  REGION 1..442: note = Human gut metagenome

SEQ ID NO: 19453 - protein, 512 aa, unidentified; identical to SEQ ID NO: 11891
  REGION 1..512: note = Human gut metagenome

SEQ ID NO: 19454 - protein, 411 aa, unidentified; identical to SEQ ID NO: 6901
  REGION 1..411: note = Human gut metagenome

SEQ ID NO: 19455 - protein, 424 aa, unidentified
  REGION 1..424: note = Human gut metagenome
MRVFVFNMRGRPLMPCSQRKARLLLRENKAMIYKYHPFTIQLTYTTGETKQDCHIGIDTGSKYIGAAVRSEDKVFWKGEIELRQDIRSNLDTKRIYRRSRRNRKTRYRKQKFLNRKRRDEWLPPSLQSRINHTFHWIDTLSSLVPNPILHIEVGKFDVAKMINPEIHGVDYQHGQTYGFFDERYFVFARDNYTCQCCGKSKNKILNTHHIIYRSNGGTNRVDNLITVCTDCHTSQNHRKGGIFYQWQEQHKKVKQYKEPPFMNTLRKRIFVAYPDAEITYGSETTPKRKAMKLDKTHYNDAIVISGINEIKENPEEWLLIKQFRKKKRSLHEATARKGRKKPNRNQTRNSKNTPYYKGFYLNDKVSVFGKSGYITGFTSNAAYIKDENNDYITLPNKTYKQVSINKMKLECHNNNWQYIIKNAV

SEQ ID NO: 19456 - protein, 422 aa, unidentified; identical to SEQ ID NO: 11648
  REGION 1..422: note = Human gut metagenome

SEQ ID NO: 19457 - protein, 426 aa, unidentified
  REGION 1..426: note = Human gut metagenome
LAKDHYRSIDREETNLRVYVLNKRGEPLMPCSAAKARILLKEKKAKVKRRTPFTIQLTIATGETKQPVTLGVDSGYRHVGLSASTEKAELYASEIELRQDIPELLAARRALRGARRSRKTRYRAPRFDNRKRDKGWLAPSVENRIGAHVSRVEAVLRILPVTKIIVETASFDVQRIKNPDVQGVEYQEGEQLGFWNVREYVLFRDGHECQHCHGKSKDKVLNVHHIESRRTGGDAPNNLITLCETCHKAFHRGEIELKVKRGRSFQAETFMGVMRWSFFERLRASHPEIEVRNTYGYLTKDTRIANKIEKTHCADAFCIAGNLKAKRLGYYFFQKQTRRHNRQIHKLTILKGGVRKRHQTPYEIKGFRLYDKVLYRGKEAFIFGRRSSGYFDIRTLDGERISAAVNSKKLRLLEKRRTFLIELRRN

SEQ ID NO: 19458 - protein, 413 aa, unidentified; identical to SEQ ID NO: 3924
  REGION 1..413: note = Human gut metagenome

SEQ ID NO: 19459 - protein, 417 aa, unidentified
  REGION 1..417: note = Human gut metagenome
MPCSPAKARLLLKERKAIIKRRTPFTIQLTIATGEAKQPVTLGVDSGYKHIGLSATTEKAELYASQVELRQDITDLLSARLALRRSRRSRKTRYRAPRFDNRVASKREGWLAPSVENRIAAHMSRVEAVMRVLPVTAITVETAAFDTQLLKNPDVAGAAYQQGEQLGFWNVREYVLFRDGHVCQHCRGKSKDPILNVHHIESRRTGGDAPNNLITLCETCHKAFHRGEIKLKVRRGKSFKAETFMGIMRWTLFERLKKAHPELRVRNTYGYLTKHKRISYGIAKSHRADAYCIADNLGAKRLEGFFFQKQTRKHNRQLHKLSILKGGLRKKNQAPYEVKGFRLFDKVICKGEEAFIFGRRTSGSFDVRWLDGTRISAGINYKKLRLLEPRTTYLTEFRKEAALPPLHECRGFRAELL

SEQ ID NO: 19460 - protein, 353 aa, unidentified
  REGION 1..353: note = Human gut metagenome
GIDDGGLHVGVALVQKCHTRNKVIFKGVIEQRNDVKHLMDVRRGYRRYHRYHKRYRPARFNNRNSSKREGRITPSILQKRQATIRVVNQLNKWINITNYWLEDVAIDIRALTDGYKPYRWQYQKTNRLDENIRKAVILRDGCKCMECGKSNCRLEVHHIKPKRLKGSNTLGNLITLCAKCHQKTESVEELYMDRYFALLKSSDNKNLNYAQHVMIGKKWLREQLSNLGMLHLTNGGDTANKRIDWDITKSHSNDAICITDLKPDTCEIKEWVIKPMRRQSKAKADNVLGIKHRDLVEYTFRNGETHRGYVTALYPEQNAINFQSPTKHCKKVNARKCKVLWKYSKIYWLDNVS

SEQ ID NO: 19461 - protein, 279 aa, unidentified; identical to SEQ ID NO: 5082
  REGION 1..279: note = metagenome

SEQ ID NO: 19462 - protein, 440 aa, Sutterella sp.
MSTGLRAEQAEPAGIRKGDTLKVFVLNMRGKPLMPCSPAKARHMLKAGKAVVLRRTPFTISLTVATGETKQEVTLGVDAGAEHVGISATTEKEEVFASEVELRQDIKGLLADRLEFRRARRNRKTRYRAPRFDNRVRSKHKGWLAPSVENRIQAHISRIEAVCRVLPITKIVIETASFDIQKIKNPEVEGTDYLQGDQLGFWNVREYVLFRDGHVCRHCRGRSKDPFLNVHHLESRKTGGDAPNNLITLCETCHKAYHAGKIKLKARRGTPFRAEAFMGIMRWTLLERVRKAHLELPVENTYGYLTKHKHIVLGLPKTHCADAFCIAGNLSALRRGEFLYQRQTRKHNRQIHKCSILKGGVRKLHQAPFLVKGFRLFDKVKCKGRIGIIFGRRSSGYFDVRTLDGVRLSAGISSKKLMLLEKQTTFLTQLRKEVGASSPS

SEQ ID NO: 19463 - protein, 419 aa, unidentified; identical to SEQ ID NO: 8136
  REGION 1..419: note = Human gut metagenome

SEQ ID NO: 19464 - protein, 424 aa, unidentified; identical to SEQ ID NO: 4676
  REGION 1..424: note = Human gut metagenome

SEQ ID NO: 19465 - protein, 415 aa, Bacillus sp.; identical to SEQ ID NO: 7196

SEQ ID NO: 19466 - protein, 440 aa, unidentified
  REGION 1..440: note = Human metagenome
MSTGLRAEQAEPAGIRKGDTLKVFVLNMRSKPLMPCSPAKARHMLKAGKAVVVRRTPFTIKLTIATGETKQDVTLGVDAGARHVGISATTEKEEVFASEVALRQDITGLLADRLAFRRARRNRKTRYRAPRFNNRVRSKNKGWLAPSVENRIQAHISRIEAVCRVLPITKIVIETASFDIQKIKNSEVEGSGYQQGDQLGFWNVREYVLFRDGHVCQHCRGRSKDPILNVHHLESRKTGGDTPNNLITLCETCHKAYHTGKIKLKARRGTSFRAEAFMGIMRWTLLDRVRRAHPELPVENTYGYLTKHNRIALALPKTHCADAFCIAGNLNALRRGDFLFQRQTRTHNRQIHKCSILKGGVRKLNQAPFLVKGFRLFDKVKCKGGIGFVYGRRSSGFFDVRTLDGVRLSAGISYKKLMLVEKRTTFLTQLKKEHGASSPS

SEQ ID NO: 19467 - protein, 451 aa, unidentified; identical to SEQ ID NO: 10609
  REGION 1..451: note = Human gut metagenome

SEQ ID NO: 19468 - protein, 396 aa, unidentified; identical to SEQ ID NO: 4508
  REGION 1..396: note = Human gut metagenome

SEQ ID NO: 19469 - protein, 422 aa, Sutterella sp.; identical to SEQ ID NO: 3542

SEQ ID NO: 19470 - protein, 475 aa, unidentified; identical to SEQ ID NO: 4985
  REGION 1..475: note = Human gut metagenome

SEQ ID NO: 19471 - protein, 420 aa, unidentified; identical to SEQ ID NO: 8934
  REGION 1..420: note = Human gut metagenome

SEQ ID NO: 19472 - protein, 420 aa, unidentified; identical to SEQ ID NO: 3288
  REGION 1..420: note = Human gut metagenome

SEQ ID NO: 19473 - protein, 433 aa, unidentified; identical to SEQ ID NO: 6602
  REGION 1..433: note = Microbial mat metagenome

SEQ ID NO: 19474 - protein, 413 aa, unidentified; identical to SEQ ID NO: 7036
  REGION 1..413: note = Human gut metagenome

SEQ ID NO: 19475 - protein, 470 aa, unidentified; identical to SEQ ID NO: 2825
  REGION 1..470: note = Human gut metagenome

SEQ ID NO: 19476 - protein, 408 aa, unidentified; identical to SEQ ID NO: 5302
  REGION 1..408: note = Human gut metagenome

SEQ ID NO: 19477 - protein, 423 aa, unidentified; identical to SEQ ID NO: 3951
  REGION 1..423: note = Human gut metagenome

SEQ ID NO: 19478 - protein, 453 aa, unidentified; identical to SEQ ID NO: 5738
  REGION 1..453: note = Human gut metagenome

SEQ ID NO: 19479 - protein, 450 aa, Moorena sp.; identical to SEQ ID NO: 2935

SEQ ID NO: 19480 - protein, 490 aa, unidentified; identical to SEQ ID NO: 7139
  REGION 1..490: note = Human gut metagenome

SEQ ID NO: 19481 - protein, 394 aa, unidentified
  REGION 1..394: note = Human gut metagenome
LMLQSGQAKVIKRCPFTIQLTYNTGHQAQEISLGIDAGSKHIGVSATTKTRVLYEADVELRNDIVDLLSSRRELRRGRRNRKTRYRPARFDNRRREDGWLAPSIRQKIGTHLTVVENICKILPISRITVETASFDIQKIKNPDIQGAEYQQGDQLGFWNNREYVLFRDNHTCQCCKGKSKDKILNVHHIESRKTGGNAPNNLITLCEICHTGYHKGAIQLPKTVKRGMRFKDAAFMGIMRWAFYEALKQQYEPVGTPVHNTYGYITKHTRIEHNLPKEHYVDARCISGNPDAFPNGEYYYQKKVRCHNRQMHKLTILKGGIRKQNQATYLVKGYRLFDKVSYQRKEYFVFGRRKSGFFDIRTLSGKQVNKGSLSCKKLKFIATRMYYLIERRAV

SEQ ID NO: 19482 - protein, 424 aa, Caldicoprobacter sp.; identical to SEQ ID NO: 2397

SEQ ID NO: 19483 - protein, 517 aa, unidentified
  REGION 1..517: note = Human gut metagenome
VVYSHLLTRALRKETAMPANIYVLNHDGIPLMPSHSYGRVKRMLHTGKARIVGTKPFTIRLTYQINTPAIQPVILGMDPGRTNIGNCAVETSGEVLYASLVETRNKEIPKLMEERKGHRQMSRRGERKRLQRRAIRADKTGMARATEYWRMLTGQKKPIRCKVIRNQEVKFQNRKRPIGWLTPTAEQLARTHLNVVRKIQKILPVSAVVIEINRFDFARMENPDIENWEYQQGRLAGYADVREAVSRQQKGKCLLCGRKQIEHYHHIVPKSRGGSESIDNYAGLCMTCHEKVHQDEIARGKLQSKKKGIQKKYHALSVLNQIMPVLLRELPKLVPAFITTGYETHRIRDSVGLQEKQKDDDTHYMDAWCIAMSIVGTYETEPDFSGLYRMKQFRRHDRAKIKAQKERTYYHNGKAVAKNRHKRTGQADAKVPFPSLAEYLQEHPEHKGRLTVRKSTRSYNNTKRNLPGTVYTEYGNPFVLRATQSNGTRLYGMGEGMDYHKTVRCKLSQHNAGLVYI

SEQ ID NO: 19484 - protein, 420 aa, unidentified
  REGION 1..420: note = Human gut metagenome
MQYVYVLNKHGEPLMPCSPGKARLLLKRQKACVVKRTPFTIKLLHGSAGYKQPITLGVDAGSKHVGLSASTEKRELYSEEFTPRNDVVELLSTRRQNRCSRRNRKTRYRTPRFNNRVHSKHKGWLAPSVEVKIQEHITVIKRICRILPITLVRVETAEFDTQRLKAMLAGKPLPVGTDYQLGEMYDEYNVRQYVLKRDNYTCQCCGAHTTAKKAIKLHVHHLESRKVGGNAPSNLITLCTACHDNLHKGKVTLDGKKRGKTLRDAAFMGIMRNTLLIRLRNELNIPVQNTYGYITKLLREQNDIKKSHINDARCISKHPLAEPCSVCYRTKAIRHHNRQIHKAKILKGGIRKANQAPYIVKGFRLWDKVLYNGQECFISGRRSSGYFALKKLDGTAITNSISFRKLRLLEPAINYLIERM

SEQ ID NO: 19485 - protein, 418 aa, unidentified
  REGION 1..418: note = Human gut metagenome
MIYVRSKEGKALMPSERGGRIGYLLRHGKAHVVSRVPFVVQLDYESTTYTQEVSLGIDAGSKHIGVSASSERKELLAAQVELRSDVVNLLSTRRELRQTRRNRKTRYREQRFYNRKKKDGWLTPSVEQKVESHLKVIRLVHKLLPITKTTIEVAQFDAQKIKNTDIKGNEYQQGEQMGFWNVREYVLARDGHKCVHCKGKSRDPILNVHHLESRKTGGNSPSNLVTLCETCHKAYHRGEFELKIKRGTTLRDAAVMNIMRWAVYEQAKEEFRNVHLTYGYVTKHTRIENGITKTHAADAFCIAKNVHAIRLGTFFMCRCVPRHTRALHVANPKKGGIRRSCIASHKIGKSRFQRFDMVRWKGKECFIFGSTKGRPVLRDIKGIKMHENNSVNIKTISFLKRLRKNIIVEERTFESRII

SEQ ID NO: 19486 - protein, 440 aa, Moorena sp.
VFVLDKRKKPLMPCSEKRARKLLDAGRAVVVRVVPFTIRLKDRVGGEVQPLQVKLDPGSKTTGIALVRVEDEADPESGEMRRTVHPLWLGHLQHRGAAIREALQARRALRRRRRSQNLRHRAPRFDNRTRPEGWLAPSLRHRLETTLSWVQRLCRWTPVSALAVERVRFDMQAMQNPEITGVEYQQGTLHGYTVREYLLEKFQRQCAYCDASDVSLQVEHVQPRALGGSDRVSNLALACPPCNQKKAAQPVEVFLAKQPERLAKLRRQLKTPLHDAAAVNSTRNAIVQVLRKSGLPVEASDGGRTKYNRLALSVPKIYALDAACVGRVDAIGLWQRPVLGIKATGRGSYQRTRLDGSGFPRGYLTRSKWHYGFQTGDRIRAEVQTGKKAGSYTGRAAVRATGSFNIQIAGQPAVQGINHRHCRLIQRADGYGYAFQPKAA

SEQ ID NO: 19487 - protein, 406 aa, unidentified; identical to SEQ ID NO: 6079
  REGION 1..406: note = Human gut metagenome

SEQ ID NO: 19488 - protein, 512 aa, unidentified; identical to SEQ ID NO: 5811
  REGION 1..512: note = Human gut metagenome

SEQ ID NO: 19489 - protein, 430 aa, unidentified; identical to SEQ ID NO: 4504
  REGION 1..430: note = Human gut metagenome

SEQ ID NO: 19490 - protein, 418 aa, unidentified; identical to SEQ ID NO: 4950
  REGION 1..418: note = Human gut metagenome

SEQ ID NO: 19491 - protein, 413 aa, unidentified
  REGION 1..413: note = Human gut metagenome
LKVFVLNMRGKPLMPCSPAKARHMLKAGKAFVVRRTPFTIKLTIATGETKQDVTLGVDAGARHVGISATTEKEEVFASEVALRQDITGLLADRLAFRRARRNRKTRYRSPRFNNRVRSKHKGWLASSVENRIQAHMSRIDAVCRLLPVTKIVIEAASFDVQKIKNPTIEGTDYQQGDQLGFWNVREYVLFRDGHVCQHCHGRSRDKILNVHHLESRKTGGDAPNNLITLCETCHKAYHAGKIKLKVKRGQSFRAEAFMGIMRWTLLDRVRKTHPKLPVENTYGYLTKHKRIALGLPKTHCADAFCIAGNLKALRRGDFLFQQQTRKHNRQIHRCSILKGGVRKLNQAPFLVKGFRLFDKVRIGGQIGFVFGRRVRGTFNIRRLDKTVIGTDINCKKLSLLETRKTFLTELRKE

SEQ ID NO: 19492 - protein, 509 aa, unidentified; identical to SEQ ID NO: 5057
  REGION 1..509: note = Human gut metagenome

SEQ ID NO: 19493 - protein, 515 aa, unidentified
  REGION 1..515: note = Human gut metagenome
MTALEEKLSKTEYIYVLGFDGKPQMPTRRKRHVLKLLKTGRARIAEDIPFTIRLTYRNAPVLQPVTLAEDPGRTNIGAAVLSPLGDLLFAAVIETRNKEIKKLMADRQKSRQASRRGERKARQRLAKRYGSMVKSGMVMRKLPMYAADKFVICKFIRNTQARFCNRKRCPDWITPTVQHLVQTHLNIIRKISRYLPVTDIAFEVSRFAFMHMENPEAMGVDFQNGPLKGYGDVKEAIRTQQHGKCLMCKKPISHFHHIVPRSRGGSDTIQNLAGLCTECHTKVHTDTAFRKDFDEKKSGQLKKYGALSALNQAVPFICKKLLEEYGKEHVHFCRGLDTSLIRTALGFEKTKKNQMHEVDAYCIGLAALEVNEVETPAFDHTFQIRQFRRQDRSIIHHQTGRSYYQGKEKVAQNRKPGFEQKTTALSQWYEEQVRIHGEKESEKLRSQLRVEKSCRHYNDMDRFLPGAVFLYEGKRYVLSGRITNGKYLRACGQGMKNFPAAECTFIRHNAGLVFI

SEQ ID NO: 19494 - protein, 418 aa, unidentified
  REGION 1..418: note = Human gut metagenome
MVYVINKQGQALMPTERFGKVRRLLKNSLAHVVCRIPFTIQLDYDTTDYTQPVSLGIDAGSKHIGISATTSEKELYAADVELRNDIVDKLSTRRELRRTRRSRLRYRKARFNNRVSSKRKGWLAPSVENKIQTHLTVVEKIHKFLPITNIVVETASFDIQKINNPSISGSEYQQGEQLDFFNVREYVLFRDNHTCQHCKGKSKDKVLNVHHIESRKTGGDSPNNLITLCETCHKAYHRGDFELNVKRGKSFRDAAFMGIMRWGFYDRLKNIYPNVSMTFGYITKNTRITNNLPKEHYVDARCISGNPVAKPLGYYFYQKKVRCQNRQIHKANFLKGGRKKLNQAPFLVKGFRLFDLVEYQKELYYIFSRRNSGYFDIRKLDGTKVNKGSINCKYLRLVHKRKSILIEKRMQGAISPIN

SEQ ID NO: 19495 - protein, 518 aa, unidentified; identical to SEQ ID NO: 3878
  REGION 1..518: note = Human gut metagenome

SEQ ID NO: 19496 - protein, 418 aa, unidentified; identical to SEQ ID NO: 5466
  REGION 1..418: note = Human gut metagenome

SEQ ID NO: 19497 - protein, 408 aa, unidentified
  REGION 1..408: note = Human gut metagenome
MVYVQDINGKPLMPTTRHGKVRRLLKDKKAVVVNLCPFTIKLTYVTSDYKQEIVLGVDAGTKHVGLSATTKSKELYSSEVILRNDIVDLLSTRRELRRTRRNRLRYRKHRFNNRIKSRRPGWVAPSVRYKIDAHIRVIDNVCSILPISRIVIEVAQFDTQKIKNPNISGKEYQEGDQLGFWNTREYVLCRDGHKCQYCKGKSKSKILNVHHLESRKTGGDSPSNLITLCETCHKEYHKGNIDLKIRKGKSLRDAAVMGIMKWRLYEKLKSKYGCVSMTFGYVTKYNRIHNNIEKSHVSDAFVISKNFNAIRLGYYYKIRLVRRHNRQIHKQKIQKGGIKRLNQSPFEVFGFRLFDRIMFENSYYFIFGRRKIGRFNIRDIDGKSQRDITYSKLKLSRCKRFMIQKEMN

SEQ ID NO: 19498 - protein, 408 aa, unidentified; identical to SEQ ID NO: 8232
  REGION 1..408: note = Human gut metagenome

SEQ ID NO: 19499 - protein, 434 aa, Selenomonas sp.; identical to SEQ ID NO: 12372

SEQ ID NO: 19500 - protein, 423 aa, Moorena sp.; identical to SEQ ID NO: 6814

SEQ ID NO: 19501 - protein, 420 aa, unidentified; identical to SEQ ID NO: 2681
  REGION 1..420: note = Human gut metagenome

SEQ ID NO: 19502 - protein, 502 aa, unidentified; identical to SEQ ID NO: 2616
  REGION 1..502: note = Human gut metagenome

SEQ ID NO: 19503 - protein, 413 aa, unidentified
  REGION 1..413: note = Human gut metagenome
MSTCVCVLSNSGERLMPTIRLGKVRRLLKDGKAKIVKHHPFTIQLLYDSKTNTQPIEICEDVGYNYIGISVKSQSHEYVSAQYDTLQDEKACHDSCRKLRRTRRNRLRYRKPRFDNRKRGEGWLAPSLRHKKELNVNVVKMYCAVMPITHATVEVGSFDTMLVKAIQEGKAIPEGADYQKGPRYNLATLREAVFYRDNYTCQVCGRKVADGAILHMHHMFYWKGRHGDSLNELLTVCEKCHTPANHQKGGKLYGFGENVKFADLSGAAFMNTVRWQIVNKLYAAFGKDFVTVTYGAMTKEKRIALRLEKSHNNDAYAMGEFHPNCRYTFEHYEKVRRNNRILEKFYDSRYIDIRTGEIATGKELFNGRINRNHKKDSENLHRYRGKRTYAGHRALLRKKVNLNPGDLVSLNGE

SEQ ID NO: 19504 - protein, 406 aa, unidentified
  REGION 1..406: note = Human gut metagenome
MVYVQDIDGKPLMPTTRHGKVRRLLKSNKAVVVNLCPFTIRLTYISDSYKQEIVLGVDAGTKHVGLSATTKSKELYSSEVILRNDIVDLLSTRRELRRTRRNRLRYRKPRFNNRVKNKRPGWIAPSVRYKVDAHIRVIDNVCSILPISRIVVEVAQFDTQKIKNPDISGKEYQEGDQLGFWNVREYVLARDGHKCQYCKGKSKDSILNVHHIESRKTGGNSPSNLITLCETCHKEYHKGNIKLKVKRGTSLRDAAAMGIMKWKLFDKLKSLYPNVSMTFGYITKHNRIKHEIKKSHISDAFVISKNFEAKRPGYYFKEKLVRRHNRQIHKMKILKGGKKKMNQAPFKVFGFRLFDKVEFQGNEYFIYARRLSGYFNIRDINSENKKDVTYKKLTHIGHGLISVETG

SEQ ID NO: 19505 - protein, 512 aa, unidentified
  REGION 1..512: note = metagenome
MSTVYVLNKNGKPLMPTTRCGHIRYLLKEKKARVVTSKPFTIQLLYETDDVVQPLYLGIDPGRTNIGVAVVKTDGTAVFTAHLETRNKEIPKLMKKRKDSRRARRTNGRRCRRQRRAKANDTISKKCVKQATAQNGSVSKRAKEIGVIKRHLPGCEKEVLCIGIKNKEAKFSNRTRPEGWLTPTANQLLQTHINLVKKIRKFLPISDVVLEVNKFAFMRLDNPNVQKWQYQQGPLYQKASLEEAVSEMQERHCLFCKKPIAHYHHVVPQSENGSNTIDNIVGLCTKHHDLVHKDTTWQKKLAKKKTGLNKKYGAQSVLNQIIPALTERLNTLFPKHFFVTTGKSTYDYRAAHGVSKDHWLDAYCIACSVLPNDVCDSGINNRVPYELKQFRRHDRRALHKANMSRVYTLNDKAVATNRHKAIKQTTDSLEEFRQNHPDDVYKLKVKEHHPEYRNPKRNFPGCVFLVGKHTHVMQGTSGSHNGKADGYYDTNGNSYSSGKCKFVAKNEGIVFT

SEQ ID NO: 19506 - protein, 427 aa, Moorena sp.; identical to SEQ ID NO: 18817

SEQ ID NO: 19507 - protein, 449 aa, unidentified
  REGION 1..449: note = IscB polypeptide
MQKLSKRNTYKPTDSSLVCSSLTVSLNRDESLSEHGLKTFDNSLEGNQRPRTGGTKCIVYVQNKDGRPMMPCTPAKARHLLGAGNARVIQRNPFTIILSWQCEYNVQDITLGIDTGSKFIGFSAITTNKEVLSGTVILDTMQKKRLDKRRNYRKTRRSKKWYRKPRFLNRTKPKGWLPPSIERRYQAHLKIIEKIKHLLPITKTIIEIAQFDIQKLKNPETKGKEYQQGDLYEYSNKKLYIFAREKYTCQLCNKSTVGKKTNLHHIIPRGKGGTNKPNNLALLHKDCHKRLHKQNLHKKLNRPKQYREHTFMSIIAKRFKESPECRVTYGYKTHTDRNKQGLPKTHYNDAFIIAGGRIQERSSTQSVKQTKRNNRSIQKNRKGFAPAIRIQKFPIQPNDLVEYGGRTYRAKGTHCKGTRVVLEMYPKNRSININCLHQITYGKGLQFVA

SEQ ID NO: 19508 - protein, 529 aa, Moorena sp.; identical to SEQ ID NO: 8434

SEQ ID NO: 19509 - protein, 470 aa, unidentified
  REGION 1..470: note = Human gut metagenome
MSVFVVGLNGCRLMPVSERKARLLLKQGKAFVEQKVPFTIRLNYKTGSTTQLGYLGIDTGSQHIGVSVVREDGTVLHKEEIGLRDSMSKRKLLEAKASLRRGRRYRKTRYRHPKWRPKTKRVYCEVPDRKGRHWQKKKITFTSKRPKGWLPPSLQSKTDHHIRWIKKLQDLLPEGYRLSIELGRFDPARMKNPEIHGDLYQKGPQYDYENVRAYVLDRDRYTCQICKKKGGKLHVHHILYRSHGATDDPQYMVTVCSDCHSAQNHLPGGILYQWMQEQKRFSRGLRDATFMNILRKRLIRAFPEAVFTYGNVTKVDREKLKLPKSHGNDATAIALVKTGITAVKDKESVICIQQVRRKKRSLHEETPRKGRKEPNRTAARNNKNTKAVTVTKRQNKKKVSMTGCLFDRVELNGKKGWISGFTGKSCYVKDADDQYLSTSPKYKQVSLSKLRILHHCGNWIIGAKKTLGKG

SEQ ID NO: 19510 - protein, 485 aa, unidentified
  REGION 1..485: note = Oxalobacteraceae bacterium UBA5157
VPDGFRCFQERCILSVFVLDQKLRPLMPCREKRARKLLAAGRARIHRLYPFCIRIVDRALEDSVLQPLVIKIDPGSKVTGLAVCRISEAVDDDGVVAPVMHIQFLMELLHRGQTIKQSLHARSSMRRRRRGNLRYRQPRFDNRTRQAGWLPPSLLHRVLTIETWVNRIRNMAPITQIAQELVRFDMQKMQNPEIAGIEYQQGTLAGYELREYLLEKWNRECSYCGAKDLPLQMEHIVAKANGGSNRASNLCLGCESCNQKKGAKDIRAFLKNDPIRLAQILKHAKMSLRDAAAVNATRNALLKVLKATDLPVETGTGGRTKWNRSRLGIVKTHALDAACVGVVADVVSINAPALQITCMGRGTHSRTLLDQYGFPRTTLPRTKTFFGFKTGDMITAEVTKGKRIGSHKGRVAVRSSGYFNIQSGIKGMKAVQGIPHKDCRIAQRADGYNYLWKSVSDQPKAKASTAVQSAPCLTALKDGVSRSIF

SEQ ID NO: 19511 - protein, 428 aa, unidentified
  REGION 1..428: note = Human gut metagenome
LKVFVLNMRGQPLMPCSPAKARHLLKAGKAAVRRRTPFTIQLRIATGETKQSVTLGVDAGAKHVGLSAATEKEEVFASEVELRQDITGLLAARLSLRRERRQRKTRYRAPRFLNRVRSKHKGWLAPSVENRIQAHMSRIDAICGLLPVTKIVIETASFDIQKIKHPDVEGTDYQQGDQLGFWNVREYVLFRDGHVCQHCHGHAKDKILNVHHLESRQTGGDAPNNLITLCETCHKACHAGKIKLKVKRGQSFRAEAFMGIMRWTLLDRVRKAHPGLPVENTYGYLTKNTRITLGLPKAHCVDAYCIAGNLKAVRRGVYLHQRQVRKHNRQIHKCTVLSKTLKDGTKIGYRKLNQTPHLVKNFRLFDKVRCLGQTGFIFGRRSSGYFDVRRLDGVKISSCINYRKLTLLEKRGTCLTELRKEDGASSPV

SEQ ID NO: 19512 - protein, 420 aa, unidentified; identical to SEQ ID NO: 15202
  REGION 1..420: note = Human gut metagenome

SEQ ID NO: 19513 - protein, 402 aa, Arthrospira sp.; identical to SEQ ID NO: 18468

SEQ ID NO: 19514 - protein, 452 aa, unidentified
  REGION 1..452: note = Human gut metagenome
VTLAEDPGRTNIGLAALSLKGDLLFSAKVETRNKEIAKLMDKRRQSRRASRNGERKARQRLARKFGTMLKAGMLMRKLPQYAADKFITCHVIRNTQARFSNRKRPDGWLTPSARHLVQTHINLVHKMGRYLPVTDVALEVNRFAFMQMEDPSISGVDFQNGPLKGFDDLHAAVRDLQDGKCLLCKKEIEHFHHIVPRSRHGSNTIGNIAGLCTKCHEKVHKDEKAGKRLKDKKKGLDKKYGALSILNQAIPFICKELETEFGKEHVHYCTGRETALLRRSLGYHKTKKEQYHEVDAWCIGALSLDSIPEKAPDFTDVHTVIQFRRQDRALIQAQTSRSYKLDGETVAWNRKKRTDQKNDSLEDWYQKQVQLHGQKEADRMRSRLTVKISQRRYNNPERMLPGAVFLYKGKRYVMKGQHCNGVYLQAVGMGSRDFPVKECTIIKRNQGLVFLS

SEQ ID NO: 19515 - protein, 303 aa, unidentified
  REGION 1..303: note = Human gut metagenome
LRYRKPRFDNRIKSKRPGWVAPSVKYKIDAHIRVIDNVCSILPISSIVIEVAQFDTQKIKNPEILGKEYQEGDQLGFWNTREYVLARDGHKCQYCKGKSKDKILNVHHLESRKTGGDSPSNLITLCETCHKEYHKGNIDLKIKRGSSLRDAAVMGIMKWKLYEELRSRYDRVSMTFGYITKHNRIKYGIEKSHTSDAFVISMNINAKRIERQYLKRLIRRHNRQIHKMKILKGGKKKNNQAPFEVFGFRLFDKVLYNNKILFVYGRRKSGSFNIRDFNGENSKDVSRKKFKLIRGKRHPIILK

SEQ ID NO: 19516 - protein, 425 aa, Moorena sp.; identical to SEQ ID NO: 17946

SEQ ID NO: 19517 - protein, 512 aa, unidentified
  REGION 1..512: note = Human gut metagenome
MSTVYVLNKDGKPLMPTTRGGHVRHLLKEQKARVVRTNPFTIQLLYETDNLVQPLYLGIDPGRTNIGVAAVKADGTAVFTAHLETRNKEIPKLMQGRKKARRARRTNGRRCRRQRRAKANGTISKKCVKNDTAQNGSVSKRAKEIGVIKRHLPGCEKDVLCIGIKNKEAKFSNRTRPEGWLTPTANQLLQTHINLVKKIQKFLPISDVVLEINKFAFMRLDNPNVQKWQYQQGPLYQKASLEEAVSEMQEHHCLFCKNTIDHYHHVVPQSENGSNTIGNIVGLCTKHHDLVHKDTSWQEKLAKKKTGLNKRYGALSVLNQIIPALTKELSSLFPKHFFATNGKSTYDYRAAHGVSKDHWLDAYCIAGSVLPNDACDNNINNHVPYELKQFRRHDRRALHKENMGRVYTLNGKSVATNRHKAIKQTTDSLEEFRQRQPNDVCKLKVKEHHPEYRNPKRNFPGCVFLVGKHTHVMQGTSGSHNGKADGYYDTNGNSYSSGKCKFVVKNEGIVFT

SEQ ID NO: 19518 - protein, 448 aa, unidentified
  REGION 1..448: note = Human gut metagenome
MSTGLRAVQAEPAGIRKGDALKVFVLNMRGRPLMPCSPARARHLLKAGKAVVRRRTPFTIQLRIATGETKQSVTLGVDAGAKHVGLSAATEREEVFASEVELRQDITGLLAARLSLRRERRQRKTRYRAPRFLNRVRSKHKGWLAPSVENRIQAHMSRIDAVCRLLPVTKIVIEAASFDVQKIKNPTIEGTDYQQGDQLGFWNVREYVLFRDGHVCQHCHGHSKDKILNVHHLESRQTGGDAPNNLITLCETCHKACHAGKIKLKVKRGQSFRAEAFMGIMRWTLLDRMRKAHSGLPVENTYGYLTKNTRITLGLPKTHCVDAYCIAGNLKAVRRGVCLHQRQVRKHNRQIHKCTVLSKTLKDGTKIGYRKLNQTPHLVKSFRLFDKVRCLGQTGFIFGRRSSGYFDVRRLDGVKLSSGISYRKLTLLEKRSTYLTELRKEDGASSPV

SEQ ID NO: 19519 - protein, 377 aa, Parasutterella excrementihominis
TGRKTEETNLRVLVWNKRGKPLMPCSPAKARLLLKEKKAIVVRRTPFTIQLTIATGESKQPVSLGVDAGYKHVGLSASTEKAELYASEVELRQDITDLLSARRALRQSRRNRKTRYRAPRFDNRIRTKRKGWLAPSVENRINAHLSRIETVIRLLPVTKISVETTSFDMQLLKNSDIAGKEYQESEQLGFWNVREYVLFRDGHVCQHCHGRSKDPVLNVHHLESRRTGGDSPGNLITLCETCHKELHRGEITLKAKRGQSFRAETFMGIMRWEVLDRLKASHPKLEVQNTYGYRTKHARIVNGIAKSHCADAFCIAGNLGAERLGEFLFQKQTRRNNRQIHKLSILKGGIRKRNQVPFEVKGFRLFDKVACKGEEGF

SEQ ID NO: 19520 - protein, 443 aa, unidentified
  REGION 1..443: note = Human gut metagenome
NIGEGSQPVERPRRQNLRVFVLNKRGKPLMPCSPAKARLLLKEKKAIVKRRTPFTIQLTIATGETKQPVGLGVDAGYKHVGLSASTDKAELYASQVELRQDITDLLSARRALRRARRNRKTRYRAPRFDNRIRTKRKSWLAPSVENRINAHLSRIEAVLRLLPVTKITVETASFDTQLLKNPDIAGKEYQEGEQLGFWNVREYVLFRDGHVCQHCHGRSKDPVLNVHHLESRRTGGDSPGNLITLCETCHKALHRSEITLKAKRGQSFRAESFMGIMRWEVLNRLKASHSELEVHNTYGYRTKHARIANGIDKSHCADAFCIAGNLGAQRLGEFFFQKQTRRNNRQIHKLSILKHGLRKRNQAPFEIKGFRLFDKVACKGEESFIFGRRSSGYFDVRKLDGTRISAGISYKKLRLLEKRRTYLTEIRKEEALPPLPEGRGLRA

SEQ ID NO: 19521 - protein, 469 aa, Moorena sp.
VLDKVPPNNHFEANFTLETGDNQLMFVLVVDKNRKPLNPCHPARARKFLKEGKAVVLRRYPFTIMLKNVEEDCDNQQEYRLKLDPGSRTTGISILKDNTIIWAAELNHRGYSIKQSLESRRALRRGRRNRHTRYRKPRFNNRNRADGWLAPSLQHRVDTTLTWVNRLRRFCPITAISMELVNFDTQLIQNPEISGIEYQQGELAGYEVRQYLLTKWGRQCVYCGIEGVSLQVEHIHPKSKGGSNRVSNLTLSCVKCNQRKGNKPIEQFLSRKPDLLKKVLSLGKCPLKDAAAVNSTRWTLYRALSETGLPVETGTGGRTKFNRTRQELPKTHWLDAACVGQSTPDKLQVLIDKPLIITATGHGTRKVCRTDKYGFPVRYVPRSKFVHGFQTGDIVKAIVTKGKKIGTYMGRIAVRTTGSFNIATPNGLVQGISHKYCSRVQGKDGYQYTFSRKSCRTAVYVRGRIPPHT

SEQ ID NO: 19522 - protein, 451 aa, unidentified; identical to SEQ ID NO: 14945
  REGION 1..451: note = Human gut metagenome

SEQ ID NO: 19523 - protein, 449 aa, Allochromatium sp.
MAVFVLDKQKRPLMPCTEKRARLLLERGRAVVVRLAPFTIRLKDRIGGALQPLRLKLDPGSKTTGLALVRESEIVDAETGAVERLEHGLWFGELEHRGQQIREALTLRRHYRRTRRSRKTRYRAPRFLNRTRRDGWLPPSLQHRLDTTVNWVQRLRRLAPITGLSQELVRFDTQALQNPEISGVEYQQGELAGYEVREYLLEKWHRSCAYCGATHVPLEIEHIVPRSSGGSDRVSNLTLACQPCNQRKGSRSIEDFLQRQPARLHQIQAQAQAPLKDAAAVNATRWALLNALKATGLPVETGSGGRTKFNRTRLNLPKTHALDAACVGAVDHVRDWNRPILSIRATGRGAYSRTRTFKNGFPRGYLMRHKRVHGFQTGDWVHAEVPKGKKAGVHVGRVAVRQTGSFNIQAQAGTVQGISYRHCRVLQRADGYGYSFQPKPDTEEARRAA

SEQ ID NO: 19524 - protein, 408 aa, unidentified
  REGION 1..408: note = Human gut metagenome
MVYVQDINGKPMMPTTRHGKVRRLLKDKKAVVVNLCPFTIKLTYVTSDYKQEIVLGVDAGTKHVGLSATTKSKELYSSEVILRNDIVDLLSTRRELRRTRRNRLRHRKHRFNNRIKSRRPGWVAPSVRYKIDAHIRVIDNVCSILPISRIVIEVAQFDTQKINNPNISGKEYQEGDQLGFWNVREYVLARDGHKCQYCKGKSKDAILNVHHIESRKTGGDSPSNLITLCEICHKEYHKGNIDLKIKRGSSLRDAAVMGIMKWRLYEELKSKYDRVSMTFGYVTKYNRINHDIEKSHVSDAFVISKNFNAIRLGYYYKVRLVRRHNRQIHKQKITKGGIKRLNQSPFEVFGFRLFDRVMFENSYYFIFGRRKTGSFNIRDIDGKNQKNVTYKKLKLSRYKRFMIQKEMN

SEQ ID NO: 19525 - protein, 492 aa, unidentified
  REGION 1..492: note = Human gut metagenome
MTPVWEGRTFAYLPQSQKEEPAMSVFVVGLNGCRLMPVSERKARLILNDGKASVYRKVLFTIKLNYKTGSTTQPGYLGIDTGSQHIGVSVVREGGTVLHKEEIGLRDSMTKRKLLEAKASLRRGRRYRKTRYRHPKWRSKTKRVYCEVPDKKRRHWKKQKSTFTSGRPEGWLPPSLQSKTDHHIRWIKKLQGLLPEGYRLSIELGRFDPARMKDPEIHGNLYQKGPQYDYENVRAYVLDRDRYTCQVCRRKGGKLHVHHILYRSQGASDTPQYMATVCSSCHTTENHLPGGILYQWMQEQKKFTRGLREATFMNILRKRLMKTFPDAVFTYGNITKVDREKLKLPKSHGNDATAIALVRTGVTSVKDEEPVLYIQQVRRKKRSLHEETPRKGRKEPNRTAARNSKNTKAVTVTKRRGGKKVSVTACLFDRVELNGKKGWITGFTGKACRIVDTEGNYVAATDKYTQVNISSIRILHHTGNWVTGLKRNVGKR

SEQ ID NO: 19526 - protein, 413 aa, unidentified; identical to SEQ ID NO: 3695
  REGION 1..413: note = Human gut metagenome

SEQ ID NO: 19527 - protein, 390 aa, unidentified
  REGION 1..390: note = Human gut metagenome
LQFYRKEHSIMQYVYVLNKHGEPLMPCSPGKARILLKQQKACVVKRTPFTIKLLYGSAGYKQPITLGVDAGSKHVGLSASTEKRELYSEEFTPRNDVVELLSTRRQNRRSRRNRKTRYRAPRFNNRIHSKHKGWLAPSVEVKIQEHITVIKRICRILPITLVRVETAEFDTQRLKAMLSGKPLPVGTDYQLGEMYDEYNARQYVLRRDNYTCQRCGAHTTKKKAVKLHVHHLESRKVGGNAPSNLITLCVTCHNNLHKGKITLNGQKRGKTLRDAAFMGIMRNTLLTRLRNELNIPVQNTYGYITKLLREQNDIKKSHVNDARCISKHPLAEPCSVCYRTKAIRHHNRQIHKAKILKGGIRKANQAPYTVKGFRLWDKVLYNGQECFISG

SEQ ID NO: 19528 - protein, 247 aa, unidentified
  REGION 1..247: note = Human gut metagenome
PVGTDYQLGEMYDEYNVRQYVLKRDNYTCQCCGAHTTAKKLVKLHVHHLESRKTGGNAPSNLVTLCTTCHKNLHKGKVTLDGKERGKPLRDAAFMGIMRKTLMARLKEELPIPVQGTYGYITKMRREQNDIKKGHTNDARCISKHPLAEPCSVCYRTKAIRHHNRQTHKANFSKKGIRKRSQMPYLVEGYRLWDKVLYKEQECFVSGRRSSGSFTLKKLDGTSVSKGVTFKKLRLLEPATNYLIERM

SEQ ID NO: 19529 - protein, 423 aa, unidentified; identical to SEQ ID NO: 3538
  REGION 1..423: note = Human gut metagenome

SEQ ID NO: 19530 - protein, 326 aa, unidentified; identical to SEQ ID NO: 11710
  REGION 1..326: note = Human oral metagenome

SEQ ID NO: 19531 - protein, 430 aa, unidentified; identical to SEQ ID NO: 4817
  REGION 1..430: note = Human gut metagenome

SEQ ID NO: 19532 - protein, 457 aa, unidentified; identical to SEQ ID NO: 6126
  REGION 1..457: note = Human gut metagenome

SEQ ID NO: 19533 - protein, 479 aa, unidentified
  REGION 1..479: note = Human gut metagenome
MSTCVCVLSNSGERLMPTFRLGKVRRLLKDGKAKIVKHHPFTIQLLYDSKTNTQPIEICEDVGYNYIGISVKSQSHEYVSAQYDTLQDEKACHDSCRKLRRTRRNRLRYRKPRFDNRKRGEGWLAPSLEHKKQLNIRLIERYVSVIPITRATVEVGSFDTMLLQAIQKGESKPEGVDYQKGPRYNLATLREAVFYRDNYTCQVCGRKIADGAILHMHHMFYWKGRHGYQLDELVTACEKCHTPANHQKGGNSLSELITVCEKCHTPANHQKGGKLFGFGEDKEFANLSGAAFMNAVRWQIVNALYATYGKEFVTITYGAMTKEKRIALQLEKTHSNDAYAMGNCHPAHRCVFRHYQKRRRNNRVLEKFYDATYIDARTGNKAKGKELFNGRINRNHKKDSENFHKYRSKKVSKGRRSIRRQRYAIQPYDTVRLEGKTYITSGCHNKGTRLLIPINGKSKSVAISKVQVVCHAGAWIQII

SEQ ID NO: 19534 - protein, 414 aa, unidentified
  REGION 1..414: note = metagenome
MPCSPAKARLLLKEKKAIVVRRTPFTIQLTIATGEAKQPVSLGIDAGYKHVGLSASTGKAELYASEVELRQDITDLLSARRALRQSRRNRKTRYRAPRFDNRIRTKRKGWLAPSVENRINAHLSRIEAVLRLLPVTKITVETASFDLQLLKNPDIAGKEYQEGEQLGFGNIREYVLCRDGHVCQHCYGGSKDPVLNVHHLESRRTGGDSPDNLLTLCETCHKALHRGEITLKTKRGQSFRAETFMGIMRWEVLNRLKASHSELKVHNTYGYLTKHARIENGIAKSHGADAFCIAGNLGAERLGEFFFQKQTRRNNRQIHKLSILKGALRKRNQAPFEVKGFRLFDKVACQGEEGFIFGRRSSGFFDVRKLDGTRISAGISYKKLHLLEKRQTYLIEIRKEEAFPPLPEGRGLRA

SEQ ID NO: 19535 - protein, 442 aa, unidentified; identical to SEQ ID NO: 7482
  REGION 1..442: note = Human gut metagenome

SEQ ID NO: 19536 - protein, 511 aa, unidentified
  REGION 1..511: note = Human gut metagenome
LAVTGLQQKRRTMRYVYVLDMNGEPLMPTCRYSKVRRMLKSGQAKAVDTLPFTIQLLRPTQTRILQPVIAGQDPGRTNIGMAAVRSDGTELYRAHIETRNKEIVSLMNDRRSFRQASRRGERLARKRLAKKLHTTAKHLNGRILPGCKEPLAVKDIINTESRFNNRLRSEGWLTPTATQLLRTHLEAFRKLSGILPVTEVVLEVNRFAFMQLDNPDMEKRDIDFCRGPLYGTGGVKAAVSLQQDGLCLLCRERGIEHYHHIVPRSRRGSNTISNIAGLCKKCHERVHKDRAAAERLQSKKDGLSKKYGGTSVLNQIILSLAEELGIRYPGHAHVTNGWNTKEFRKKHELEKDHDIDAYCIAASILEDAQPIMQTEPYEMKQFRRHSRALINHQTERTYRYDGKIIAKNRKKRMDQKTDSLEDWVADMTKQYGQEAASRMLSKVTVQKSTRHYNTKGRMMPGAVFIYQKKRFVMTGQLTGGAYYRAYGQDKKNFPAKAVQVVRKNKGLVYVA

SEQ ID NO: 19537 - protein, 420 aa, unidentified; identical to SEQ ID NO: 19092
  REGION 1..420: note = Human gut metagenome

SEQ ID NO: 19538 - protein, 420 aa, unidentified; identical to SEQ ID NO: 2681
  REGION 1..420: note = Human gut metagenome

SEQ ID NO: 19539 - protein, 396 aa, unidentified
  REGION 1..396: note = Human gut metagenome
LLKQKKACVVKRTPFTIKLLYGSTGYKQPITLGVDAGSKHIGISAATEKYELYCEEATPRNDVVDLLSARRAFRRSRRNRKIRYRAPRFNNRVHSKHKGWLAPSVEVKIQEHITLIKRVCRILPVTFVRVETAEFDTQRLKAMLEGKPLPVGTDYQLGEMYDEYNVRQYVLKRDNYTCQCCGAHPTKTKAVKLHVHHIETRRTGGNAPNNLITLCTACHKALHAGKVTLDGKKRGRSLKDAAFMGVMRKTLMERLLKELKIPVQGTYGYITKYLREKHSIPKSHTNDARCISKNPLAIPCDTCYYTKAIRHHNRQLHKATILKGGIRKANQAPYTVKGYRLWDKVSYNGSECFITGRRTSGYFALKKLDGTVVSNSASYKKMRLLEVATNYITERR

SEQ ID NO: 19540 - protein, 464 aa, unidentified; identical to SEQ ID NO: 3455
  REGION 1..464: note = Human gut metagenome

SEQ ID NO: 19541 - protein, 424 aa, unidentified; identical to SEQ ID NO: 3232
  REGION 1..424: note = Human gut metagenome

SEQ ID NO: 19542 - protein, 489 aa, unidentified
  REGION 1..489: note = Human gut metagenome
MTMVYVQNKDGKPLMPTTRYCYVRLLLKEKKARVVCTTPFTIQLNYDTPDVTQDLILGIDPGRTNIGVAVVKEDGSCVFSAHLETRNKEVPLLMKKRAAFRRQHRTQDRRRKRQRRAIAAGTTVESNTIERLLPGYEKPVVCHYIRNKEARFNNRSRPVGWLTPTANHLLQTHINLIAKIAKFLPITKVVVELNRFAFMAMDNPNIHRWEYQQGPLYGLGSVEDAVYAQQDGHCLFCKKPIDHYHHVVPRHKGGSETLANRCGLCERHHALVHKDKAWAEKLVTRKGGMNKKYHALSVLNQIIPHLMEYLGSETPYDVYATDGKSTKGFRIAKNVPKEHYTDAYCIACSILDTDIEVSAPTSPFGLKQFRRHDRQTCIRQMVDRKYLLDGKVIATNRHKAIEQKSNSLQELREAYGDAAVSQLTVKPHPPQYKDMTRIMPGAVMDFNGTIGVMQSSIVGRFYKSTKGYKATPRRCVLLAQNAGMVFLPA

SEQ ID NO: 19543 - protein, 425 aa, unidentified; identical to SEQ ID NO: 13021
  REGION 1..425: note = Human gut metagenome

SEQ ID NO: 19544 - protein, 490 aa, unidentified
  REGION 1..490: note = Human oral metagenome
MYVVYVLNRQGKPLMPTKRSGHVRRMLKTGKAKAVSTKPFVIQLQYESTDFVQPLYGGTDPGRTNIGEAVLNSKGEVVYAAHLVTRNKEIPKLMADRATHRRASRRGERLRRKRRAKANGTMTCFPKGRKLHGYKDGVLKLKDIINTESRFNNRKRPVGWLTPTARQCIQTHLNMVRNICKILPVTNWTLEYNRFAFMQLEDSSVRGWDFQNGRLKGYASKEDYIYALQGGVCICCGASIEHYHHIKPRHKGGSNTPENLVGLCSVCHAEIHTGKRNLDKIGKYKKYAGTSIVNIAIPFIWDGIVKMFGDKAHICEGQETAELRRANSIPKEHFADAVCIAGIGSGITPQYDNEQPFELRQFRCHNRSHINAQMERTYMDGKTIVAKNRKPRFEQKGDALSDLQSKITKEHGELAARRAVSKLVAKKSYRRYNASERIKPSAVFMFNNKKYLLRGQLTNGKYYRAFGEGTKNFPSRNCEVVSSGYSLTYA

SEQ ID NO: 19545 - protein, 470 aa, Moorena sp.; identical to SEQ ID NO: 4092

SEQ ID NO: 19546 - protein, 431 aa, unidentified
  REGION 1..431: note = Human gut metagenome
MPNKVYVINKHGRPLMPCSPAKARHLLDEGKAKVKKRTPFTIQLVYGSSGYTQEVILGVDAGSKTIGMSASTTKEELLSAEVKPRNDVVDLLSTRREFRRARRNRKTRYRKPRFDNRVRSKHKGWLAPSVEVKIQEHITSIKRVCRILPVSKVVIETAEFDLQMLKAIADGKPVPQGEDYQQGEMYGHYNVRQYVLWRDGYTCQCCGAHATKKKEVRLHVHHLESRKVGGDAPDNQVTLCESCHEKLHKGLIAEKDFKKRKRKSTRDATFMGIMRKTLMQRLCSELPIPVVKTRGYITKATREKLLVLPKSHTNDALAIAQGKRGFNVGYLPEIAQIDKIYTIRPVRHHNRQLHKATILKGGIRKSNQTEKYVFGYRLFDKVQFNGQDCFIWGRRTTGIFTIKTINGKMIKDGISFKKLKPVEKSTGYLIA

SEQ ID NO: 19547 - protein, 424 aa, unidentified; identical to SEQ ID NO: 13009
  REGION 1..424: note = Human gut metagenome

SEQ ID NO: 19548 - protein, 492 aa, unidentified
  REGION 1..492: note = Human gut metagenome
MTPVWEGRTFAYLPQSQKEEPAMSVFVVGLNGCRLMPVSERKARLLLDDGKASVYRKVPFTIKLNYKTGSTTQPGYLGIDTGSQHIGVSVVREGGTVLHKEEIGLRDSMTKRKLLEAKASLRRGRRCRKTRYRHPKWRPKTKRVYCEVPDKKGRHWQKQKNTFISGRPEEWLPPSLQSKTDHHIRWIKKLQGLLPEWYRLSIELGRFDPARMKDPEIHGNLYQKGPQYDYENVRAYVLDRDRYTCQVCRRKGRKLHVHHILYRSQGASDTPQYMATVCSSCHTTENHLPGGILYQWMQEQKKFTRGLRDATFMNILRKRLMKTFPDAVFTYGNITKVDREKLKLPKSHGNDATAIALVRTGVTSVQDEEPVLYIQQVRRKKRSLHEETPRKGRKEPNRTAARNSKNTKAVTVTKRRDGKKVSVTACLFDRVELNGKKGWITGFTGKACRIVDTEGNYVAATDKYTQVNISSIRILHHTGNWVTGLKWNVGKR

SEQ ID NO: 19549 - protein, 535 aa, unidentified
  REGION 1..535: note = Human gut metagenome
VLRPRYQYPTRWYPSREQGSGNGCLSGEENTDLEQEVSGTLSKGDHSHPGEQDFCVPAITIQGGPAMSVFVVGLNGCRLMPTSERKARLLLKHGKASVYRKVPFTIKLNYKTGSTTQSGYLGIDTGSQHIGVSVVREDGTVLHKEEIGLRDSMSKRKLMQSRASSRRGRRHRKTRYRHPKWRPKAKRVYCEIPDRKGRHWKKKEITFASKRAKGWLPPSLQSKTDHHIRWIKKLQDLLPEGYRLSIELGRFDPARLKDPEIHGELYQKGPQYDYENVRAYVLNRDRYTCQVCGKKGGKLHVHHILYRSHGATDDPQYMATVCSDCHNTENHQQGGILYQWMQKQKKFTRGLRDATFMNILQKRLIEAFPGATFTYENITKADRERLRLPKSHGNDATAIAIVKTGIMTVKDKEPVIYIQQVRRKKRSLHEETPRKGRKEPNRTASRYDKNTKAVTVTKRKNKKISITGCLFDRVELNGKKGWISGFTDKSCYVKDENDQYIRTSPKYKQVSLSKLKILHHCGNWVIGARRSLGKG

SEQ ID NO: 19550 - protein, 370 aa, unidentified
  REGION 1..370: note = Human gut metagenome
GYKHVGLSASTEKAELYASEIELRQDITDLLSARLALRRARRSRKTRYRAPRFDNRVRSKRKGWLAPSVENRIAAHLSRIEAVLRILPVTKITVETASFDMQLLKNPDISGKGYQQGEQLGFWNVREYVLFRDGHVCRHCGGRSKDPVLNVHHLESRRTGGDSPGNLITLCETCHKALHRGEIKLSIKRGASFRAEAFMGIMRWKVLDRLKAAHPELEVRNTYGYLTKHARIEHGIAKSHCADAFCIAGNLKADRLGSFYYQKQTRRHNRQIHKLSILKGGVRKRNQAPYEVKGFRLFDKVACKGETAFIFGRRSTGSFDVRKLDGTRISAGISFKKLRLHERRRTYLTELRKEAALPPLPEGRGLRADF

SEQ ID NO: 19551 - protein, 426 aa, Methanosarcina sp.
MLVFVINQNKKPLMPCKPSKARKLLQAGKAKVVRNTPFTIKLLFRSSGYTQPVTAGMDTGSKVVGCAAIANGKVLYQSEIYLRENVSKKMEQRKMYRRSRRSRKTRYRPARFDNRGNSKKEGRLAPSIRSKLEAHFREKRFVESLLPVTEWKVELASFDIHKITNPEVSGIGYQEGDLKGFYNIKAYVLDRDGYTCQHCRGKSKDSRLHCHHIVFRSQKGTDAPENLITLCETCHKALHNGEFKLSGKKSKTKHATEVGIIKSQIRKSGWNFAETFGYETKYRREQVLKLLKTHYFDAVAICCRDDQKVEVEESVFLKRNVSKGDYQQRTGKRSEKKIHTGKLFNLRKFDLVKTSKGIGFVKGKRSSGFFAISDMFGNKISDSVNVKKICERLRARTSTLIQQSRTGKFTHSSPELKTQGFPAEGL

SEQ ID NO: 19552 - protein, 493 aa, unidentified; identical to SEQ ID NO: 3154
  REGION 1..493: note = Human gut metagenome

SEQ ID NO: 19553 - protein, 456 aa, unidentified; identical to SEQ ID NO: 11534
  REGION 1..456: note = Human gut metagenome

SEQ ID NO: 19554 - protein, 431 aa, unidentified
  REGION 1..431: note = Human gut metagenome
MPNKVYVINKHGRPLMPCSPAKARHLLDEGKAKIKKRTPFTIQLVYGSSGYTQEVILGVDAGSKTIGMSVSTTKEELLSAEVKPRNDVVDLLSTRREFRRARRNRKTRYRKPRFDNRVRSKHKEWLAPSVEVKIQEHITAIRRVCGILPVSKVVVETAEFDLQLLKAIADGKPVPQGEDYQKGEMYGHYNVRQYVLWRDNYTCQCCGAHATKKKEVRLHVHHLESRKVGGDAPDNQVTLCESCHEKLHKGLIAEKDFKKRKRRSTRDATFMGIMRKTLMQRLCSELPIPVIETRGYITKATREKLLVLPKSHTNDALAIAQGKQGFNVGYLPGIVQINKIYTIRPVRHHNRQLHKATILKGGIRKSNQVGKYVFGYCLFDKVQFNGQDCFIWGRRTTGIFTIKTINGKMIKDGISFKKLKPVEKSTSYLIA

SEQ ID NO: 19555 - protein, 427 aa, Anabaena sp.
MSKVFVLDTNFTPLNPIHSAQARQLLRNKKAAIYRQFPFTIILKKSRPESPVSSLKLKIDPGAKFTGMVLVNDLTGEVVFAAELKHRGFAIRDALTSRRQLRRSRRARKTRYRQPRFLNRTRPEGWLAPSLQSRVDNIKTWVERLRKLSPIQAISQELVRFDMQLMANPDIQGKEYQQGTLAGYETREYLLEKWSRQCAYCGAKDVPFQIEHIHPRAKGGSNSITNLTLSCEKCNTKKGTKDIKDFLKKDPSKLEKILKQAKRPLANAAAVNTTRTALLEVLKATGLPVETGSGGLTKFNRSEQNLEKTHWIDAACVGKSTPILNIKGVKPLLITANGHGSRQSCRTDKYGFPSRHVPREKIHFGFQTGDIAKAVVTTGKKIGTYVGKVAIRLTGSFNISTKNGLIQGISHKFCKRIHAKDGYSYAV

SEQ ID NO: 19556 - protein, 458 aa, Moorena sp.; identical to SEQ ID NO: 4474

SEQ ID NO: 19557 - protein, 499 aa, unidentified
  REGION 1..499: note = Human gut metagenome
MRYVYVLDVDGKPLMPTCRFSKVRRMLKSDQAKAVDTLPFTIQLTYRTKTRILQPVTLGQDPGRTNIGVAAVRSDGKELGRFHCITRNKEIPKLMADRMAVRRASRRGERLVRKRLARKLHTTAKHLEGRMLPGCDKPLPVKDIINTESRFNNRLRPEGWLTPTATQLLRTHINLFVRLAKILPVTDVAIELNKFAFMQLDNPEMKKREIDFCHGPLYGTGGLEATVKEQQNGKCLLCGKEPISHYHHIVPRSRRGSNTIANIAGLCPKCHELVHKDADTAERLTEMKTGLTKKYGGTSVLNQIIPKLVETLADLFPGHFHVTNGWNTKEFREKHHLEKDHDVDAYCIACSHLKPEETLVETEPFEILQFRKHNRAIIHHQTERTNKLDGVTVAKNRKKRMEQKTDSLEDWYVDMAKEHGKTQADAMRSRLTVIKSTRYYNTPGRMMPGTVFLYEGKRYVMTGQITNGKYYRAYGQEKRNFPAVKVRILTKNTGLVFVA

SEQ ID NO: 19558 - protein, 449 aa, Allochromatium sp.
MAVFVLDKQKRPLMPCTEKRARLLLERGRAVVVRLAPFTIRLKDRIGGAVQPLRLKLDPGSRTTGLALVRESETIDPDTGAVERVAHVRWLGELTHRGHQIREALTARAAFRRRRRTANLRHRAPRFDNRTRPAGWLAPSLRHQVETTANWVARLRRLAPLSAIGLELVRFDMQAMQNPEISGVEYQQGTLAGYEVREYLLENWHRTCAYCGATNVPLEIEHIVPRSNGGSNRVSNLTLACSPCNRKKGAQPVEVFLKGKPEVLRRIQAQAKAPLKDSAAVNATRWALFGALQATGLPVETGSGGRTKFNRTRLDIPKTHALDAACVGQVDTLSGWQCPTLAIRATGRGRYQRTRPDRFGFPRGYLMRHKRVHGVQTGDRVIARVPTGKKAGVHVGRVAVRARGVFNIQTAAGVVDSLSHRHCRVLQRADGYGYAFNPKTLTEEARRAA

SEQ ID NO: 19559 - protein, 426 aa, Parasutterella sp.; identical to SEQ ID NO: 3045

SEQ ID NO: 19560 - protein, 465 aa, unidentified
  REGION 1..465: note = Human gut metagenome
MSTCVCVLSNNGERLMPTIRLGRVRHLLKDGKAKIIKHHPFTIQLLYDSKTNTQPIEICEDVGYNYIGISVKSQSHEYVSAQYDTLQDEKACHDSCRKLRRTRRNRLRYRKPRFDNRKRGEGWLAPSLKHKKELNVNVVKMYCTVMPITHATVEVGSFDTMLVKAIQEGKVIPEGADYQKGPRYNLATLREAVFYRDNYVCKICGRKATEGAILHMHHMFYWNGRHGNSLNELLTVCEKCHTPANHQKSGKLYGFGEKIKFADLSGAAFMNTVRWQIVNELYVAFGKPFVTITYGAMTKEKRIALQLEKSHNNDAYAMGEFHPNLRCMFEHYEKARRNNRILEKFYDSRYIDIRTGEIATGKELFNGRINRNHKKDSENLHKYRGKRTYAGHRALLRKKVNLNPGDLVSLNGENLIVHSTHTKKNGAVNVEFETPAKSGQKSASLKKLKIVKAANSIHPAWKKIS

SEQ ID NO: 19561 - protein, 424 aa, unidentified; identical to SEQ ID NO: 4955
  REGION 1..424: note = Human gut metagenome

SEQ ID NO: 19562 - protein, 452 aa, Moorena sp.
MQKLSVEFKNTPGNASQVPCSVNEILTREDTLSVSSKVLADNNSNENLHSGMSGQNMRVFVLNMRGNPLIPTTPGKARKLLEQNRAKVVQRTPFTIQLLYATGETKQDITFGVDPGYSYIGYSVVSDTTELIAGEVELRNDITKLLDQRASYRRTRRGRLWHREPRFNNRGRDNGWFAPSIQHKLNSHINFIDRIKSILPITKTVVEIASFDQQKIQNPEISGVEYQQGELLGYEIREYLLEKWKRTCAYCGKTDIPLEIEHIIPKSRGGSNRVSNLTIACHACNQAKDNMTAGEFGHPTIQTKAKKPLKSAAFMNIVKKKLANILDCEVTYGYITKHDRFKLGLTKSHVNDAFVIASGNTQHRCETDTVTLTRRNNRSIQTNRKGFKPSIRRHRYNLQPNDLVEHDGLLYWVKGVFNYGKWVRLVDSAGIIINSNIKKVELLKYGKGLQFT

SEQ ID NO: 19563 - protein, 459 aa, unidentified
  REGION 1..459: note = Human gut metagenome
MNTCVCVLSNSGERLMPTFRLGKVRRLLKDGKAKIVKHHPFTIQLLYDSKTNTQPIEICEDVGYNYIGISVKSESHEYVSAQYDTLQDEKEHHDDCRMHRRTRRNRLRYRKPRFDNRKRGEGWLAPSLKHKKELNVNIVKMYCAVIPITHATVEVGSFDTMLVKAIQEGKAVPEGANYQKGPRYNLATLREAVFYRDNYACKVCGRKATEGAILHMHHMFYWKGRHGNSLGELLTVCEKCHTPANHQKSGKLYGFGEKIKFADLSGAAFMNAVRWQIVNELYTAFGKPFVTITYGAMTKEKRIALQLEKSHNNDAYAMGEFHPNLRCSFEHYEKARRNNRILEKFYDSRYIDIRTGETATGKELFNGRINRNHKKDSENLHKYRGKKTYAGHRALLRKKVSLNPGDLVSLNGENLIVHGTHTKKNGAVYVEFETPAKSGQKLKIVKAADSIHPAWKKVS

SEQ ID NO: 19564 - protein, 458 aa, Lactobacillus sp.; identical to SEQ ID NO: 5505

SEQ ID NO: 19565 - protein, 415 aa, unidentified
  REGION 1..415: note = Human gut metagenome
VLEITNYVFVLDANGKQLAPTKEQKAWFLIRKKRATLVSKYPMVIQLKKEIPDEQIYKDEICCGIDDGGLHVGISLVQKCKTKNKVVFKGTMEQRKDVKHLMEVRKGYRRYHRFYKRYRQARFNNRKSSKRKERIAPSILQKRQATIRVINQLNKWINITNYWLEDVAIDIRALTDGYKAYRWQYQQSNRLDENIRKAVILRDGCKCMECGKSNCKLEVHHIKPRRLNGSNTLGNLISLCKKCHQKTEEQEEVYMNRYFSMLNSSDNKNLNYAQHVMIGKKWLIEQLSKLGTLTLATGGDTANKRIDWNIEKSHSNDAICIAGLQPDTCNVKEWTIKPMRRQSKAKTDNVLGINHRDLVEYTFRNGETHRGYVTALYPGQNAINFQSSTKHCKKVNAKKCKLIWKYSKIYWLANV

SEQ ID NO: 19566 - protein, 424 aa, unidentified; identical to SEQ ID NO: 4955
  REGION 1..424: note = Human gut metagenome

SEQ ID NO: 19567 - protein, 420 aa, unidentified; identical to SEQ ID NO: 9245
  REGION 1..420: note = Human gut metagenome

SEQ ID NO: 19568 - protein, 417 aa, unidentified
  REGION 1..417: note = Human gut metagenome
MPCSPAKARLLLKERKAIVKRRTPFTIQLTIATGEAKQPVALGVDSGYKHIGLSATTEKAELYASEVELRQDITDLLSARLALRRSRRSRKTRYRAPRFDNRVANKREGRLAPSVENRIAAHMSRVEAVMQVLPVTAITVETAAFDTQLLKNPDITGAAYQQGEQLGFWNVREYVLFRDGHVCQHCRGKSKDPILNVHHIESRRTGGDAPNNLITLCETCHKAFHRGEIKLKVRRGKSFKAETFMGIMRRTLFERLKKAHPELNVRNTYGYLTKHKRISYGIAKSHCADAYCIADNLGAKRLEGFFFQKQTRKHNRQIHKLSILKGGLRKKNQAPYEVKGFRLFDKVICKGEEAFIFGRRTSGSFDVRRLDGTRISAGISYKKLRRLESRTTYLTEFRKEAALPPLHKCRGFRAEFL

SEQ ID NO: 19569 - protein, 408 aa, unidentified
  REGION 1..408: note = Human gut metagenome
MVYVQDINGKPMMPTTRHGKVRRLLKSNKEIVVNLCPFTIKLTYVTSDYKQEIVLGVDAGTKHVGLSATTKSKELYSSEVILRNDIVDLLSTRRESRKVRRNRLRYRKPRFDNRVKSKRPGWIAPSVKYKVDAHIRVIGNVCSILPISRIVIEVAQFDTQKINNPNISGKEYQEGDQLGFWNVREYVLARDGHKCQYCKGKSKDSILNVHHIESRKTGGDSPSNLITLCETCHKEYHKGNIDLKIRRGKSLRDAAVMGIMKWRLYEELRSKYGIVSMTFGYVTKYNRINHGIEKSHVSDAFVISKNFNAIRLGYYYKVRLVRRHNRQIHKQKIQKGGIKRLNQSPFEVFGFRLFDRVMFENSYYFIFGRRKTGSFNIRDIDGKNQKNVTYKKFKLSRCKRFMIQKEMN

SEQ ID NO: 19570 - protein, 419 aa, unidentified; identical to SEQ ID NO: 3670
  REGION 1..419: note = Human gut metagenome

SEQ ID NO: 19571 - protein, 420 aa, unidentified
  REGION 1..420: note = Human gut metagenome
MQYVYVLNKHGEPLMPCSPRKARLLLKQKKACVLKRTPFTVKLLYGSAGYKQPVTLGVDAGSKHIGISATTEKHELYREEATPRNDVVDLLSARRAFRRSRRNRKTRYRAPRFNNRVHSKHKGWLAPSVEVKIQEHITLIKHVCRILPVTLVRVETAEFDTQRLKAMLEGKPLPIGTDYQLGEMYDEYNVRQYVLKRDNYTCQCCGAHSTKTKGVKLHVHHIETRRTGGNAPNNLITLCKACHKALHAEKVTLDGKKRGKPLKDAAFMGIMRKTLMERLRKELKIPVQGTYGYITKYLREKNGIPKSHTNDARCISKNPLAIPCDTCYYTKAVRHHNRQLHKATILKGGIRKANQAPYIVKGYRLWDKVAYNGTECFITGRRTSGYFALKKLDGTVVSNSISYKKMRLLEAATNYIIERK

SEQ ID NO: 19572 - protein, 431 aa, unidentified
  REGION 1..431: note = Human gut metagenome
MPNKVYVLNKHGRPLMPCSPATARHLLDDGKAKVKKRTPFTIQLLFGSTGYTQEIILGVDAGSKTIGLSASTETEELFSAEVKPRNDVVDLLSTRRESRRARRNRKTRYRKPRFDNRVRSKHKGWLAPSVEAKIQEHITAIKRACRILPVSKVVVETAEFDPQLIKAVEEGKPIPQGEDYQKGEMYGHYNVRQYVLWRDGYVCQCCGAHATHKKEVRLHVHHLESRKTGGDAPSNLITLCDNCHEKLHKGIITAVDLKKRKRRSSRDATFMGIMRKTLLQRLCAELTIPVAETRGYITKATREKLLVLPKSHTNDALAIAQGPQGFRTGYLPSIRQATRIYTIRPVRHHNRQLHKATILKGGVRKANQAEKYVYGLRLYDKVLYNGIECFVWGRRSSGSFLLRRLGGAKVKDGVSYKHLKLLERSQNYLIA

SEQ ID NO: 19573 - protein, 367 aa, unidentified
  REGION 1..367: note = Human gut metagenome
YKHVGLSASTEKAELYASEIELRQDITDLLSARRALRQSRRNRKTRYRAPRFDNRIRTKRKGWLAPSVENRINSHLSRIEAVLRLLPVTKITVETASFDLQLLKNPNISGKEYQEGEQLGFWNIREYVLCRDGHVCQHCYGRSKDPVLNVHHLESRRTGGNSPGNLITLCETCHKALHRGELTLKAKRGQSFRAEAFMGIMRWEVLNRLKASHPELEVNNTYGYRTKHARISNGIAKSHCADAFCVAGNLGAKRLGEFFFQKQTRRNNRQIHKLSILKHGLRKRNQAPFEIKGFRLFDKVVCKGEEGFIFGRRSSGYFDVRKLDGTRISAGISYKTLHLLEKRQTYLTEIRKEEALPPLPEGRDLRA

SEQ ID NO: 19574 - protein, 520 aa, Nocardiopsis sp.; identical to SEQ ID NO: 13514

SEQ ID NO: 19575 - protein, 419 aa, Paenibacillus sp.; identical to SEQ ID NO: 3664

SEQ ID NO: 19576 - protein, 515 aa, unidentified; identical to SEQ ID NO: 7819
  REGION 1..515: note = Human gut metagenome

SEQ ID NO: 19577 - protein, 447 aa, Moorena sp.
VPAYRFKHITKKEVPYMVYVLDIDGQPLMPTSRHGKVRRLLNSHLAKVVKRCPFTIQLLYQSTKETQPVSLGVDAGSRHIGLSATTEREVVYQEELVPRNDIVKLLSARRALRRSRRNRKTRYRKVRFNNRVHSKHKGWLAPSVEVKIQEHITAIKRICQILPISDIHVETAEFDLQRLKAMEAGRLLPAGTDYQLGEQYDFYNTRQYVLHRDEYTCQCCGTHDNNVKLHVHHIESRQTGGEAPNNLITLCEHCHKSIHVGKMMLPKGKKRGKSYRDAAFMGIMRNTLLERLRKEVNVPVTMTYGYITKYWREKAGLEKSHINDAICISKHPYARPLETYYLTKAVRHHNRQIHKTKFSKGGIRKRNQAPYLVKGFRLFDKVLYQGESYFIFGRRITGYFDIRTLDGTKVNKGSTSYKKLRIQDTAEAYLTEVRAIPHMNEFTCVLA

SEQ ID NO: 19578 - protein, 349 aa, unidentified
  REGION 1..349: note = Human gut metagenome
RYRKPRFDNRKRSEGWLAPSLEHKKQLNIRLIERYVSVIPITRATVEVGSFDTMLLQAIQKGESKPEGVDYQKGPRYNLATLREAVFYRDNYTCQVCGRKIADGAILHMHHMFYWKGRHGNSLDELLTVCEKCHTPANHQKSGKLYGFGEDVKFANLSGAAFMNTVRWQIVNELYAAFGKPFVTFTYGAMTKEKRIALHLEKSHNNDAYAMGDYHPAHRCEFGHYQKRCRNNRVLEKFYDATYIDTRTGNKAKGKELFNGRISRNHKKDSEDLHKYRSKKVSKGRCSIRRQRYAIQPYDTVRLESKTYITSWCHNKGTRLLIPANGKSKSVAISKVQVVCHAGAWIQII

SEQ ID NO: 19579 - protein, 507 aa, unidentified
  REGION 1..507: note = Human gut metagenome
MPEYIYVLGMDGKPQMPTKRRRHVNKLLNTGKARIAEHVPFTIQLLYENNPTVQPVMMAEDPGRTNIGTAVVGLKGQLYLSAVVETRNKEIRKLMDKRRACRRASRNGERKARQRRAKRFGTMLKAGMLMRKLPQYGEDGFITCHVIRNTEARFCNRKRPKDWVTPTVEQLIRTHINLVHKMQKFLPITDVAIEVNRFAFMLLDDPTVAGVDFQKGPLKGYSNVNDAVFDQQDGKCLLCGQPIEHYHHIIPKSKGGSNTLGNIAGLCCNCHDTVHKNEDVQKALKDKKSGLMKKYAALSALNQAIPFIYKRLVEEFGKAHVFTCTGRETALVRKSLGFTKTKQNQLHEVDAYCIALLALGCTDAENPSFEHVYQMKQFRRQNRANINNQRERSYYYEGRLVAKNRKDRIEQKDDSLETWYQKMVQQYGEKEAERRRSVLQVKRSTRHYNTPGRVTPGTVFYCNGERHVLNGQITNGQYFKAVGDAKTNYPAKKCRIVKQNEGLVFLG

SEQ ID NO: 19580 - protein, 437 aa, Moorena sp.; identical to SEQ ID NO: 4003

SEQ ID NO: 19581 - protein, 406 aa, unidentified
  REGION 1..406: note = Human gut metagenome
VTTILKTCFAASNLAKIVVLMDAWDIIVVLNKRGKPLMPCSPAKARLLLKEKKAIVKRRTPFTIQLTIATGESKQPVSLGVDAGYKHVGLSASTEKAELYASEVELRQDITDLLSARRALRQSRRNRKTRYRAPRFDNRIRTKRKGWLAPSVENRINAHLSRIEAVLRLLPVTKITVETASFDMQLLKNPDIAGKEYQEGEQLGFWNVREYVLFRDGHVCQHCHGRSKDPVLNVHHLESRRTGGDSPGNLITLCETCHKALHRGEIKLKAKRGRSFRAETFMGIMRWGVLNRLKASHPKLEVHNTYGYRTKHARIANGIAKSHCADAFCIAGNFGAKRLGEFFFQKQTRRNNRQIHKLSILKGDIRKRNQAPFEVNGFRLFDKVACKGEEGFIFGRRSSGFFDVRK

SEQ ID NO: 19582 - protein, 326 aa, unidentified
  REGION 1..326: note = Human gut metagenome
MVYVQDINGKPMMPTTRHGKVRRLLKDKKAVVVNLCPFTIRLTYVTSDYKQEIVLGVDAGTKHVGLSATTKSKELYSSEVILRSDIVDLLSTRRELRKTRRNRLRYRKPRFDNRVKSKRSGWIAPSVKYKIDAHIRIVDNVCSILPISRIVIEVAQFDTQKIKNPNISGKEYQEGDQLGFWNVREYVLARDGHKCQYCKGKSKDKILNVHHIESRKTGGDSPYNLITLCETCHKEYHKGNIDLKIRRGKSLRDAAVMGIMKWRLYEELKSKYDNISMTFGYVTKYNRIKHGIEKSHVSDAFVISKNFNAIRLGYYYKVRLVRRHNR

SEQ ID NO: 19583 - protein, 512 aa, unidentified
  REGION 1..512: note = Human gut metagenome
MSTVYVLNKDGKPLMPTTRGWHVRYLLKEKKARVVTSKPFTIQLLYETDDVVQPLYLGIDPGRTNIGVAVVKTDGTAVFTAHLETRNKEIPKLMQGRKKARRARRTNGRRCRRQRRAKANGTISKKCVKQTTAQNGSVSKRAKKIGVIKRHLPGCEKKVLCIGIKNKEAKFSNRTRPEGWLTPTANQLLQTHINLVKKIQKFLPISDVVLEVNKFAFMQLDNPNIQKWQYQQGPLYQKASLEEAVSEMQEHHCLFCKKPIAHYHHVVPQSENGSNTIRNIVGLCTKHHDLVHKDTTWQKKLAKKKTGFNKKYGALSVLNQIIPALTKELSFLFPKHFFATNGKSTYDYRAAHGVSKDHWLDAYCIACSVLADDVCDNNISSHVPYELKQFRRHDRRALHKENMSRVYTLNGKSVATNRHKATEQTTDSLEEFRQRKPNDVCKLKVKEHHPEYRNPERNFPGCVFLVGKHTHVMQGTSGSHNGKADGYYDTNGNSYPSGKCKFVAKNKGIVFA

SEQ ID NO: 19584 - protein, 421 aa, unidentified; identical to SEQ ID NO: 4235
  REGION 1..421: note = Human gut metagenome

SEQ ID NO: 19585 - protein, 409 aa, Moorena sp.
MSVYVKNHDGATLMPCTEAKARKLLEAKKAKIVDYRPFTIQLSWQCEGHIQDVTCGIDKGSSVTGLACVGNGKVLLAAEIHHRKDVTDKMQDRRDRRKSRRARRWYRPCRFLNRGSSKRSGRLPPSIKTNAEEVIRVVGSIPLPISSLVIEDVQVDIARLNNPKLKGSQYQDPSRLDENLRMACLMRDGYCCQYCHKRGVRLEAHHIQFVSQGGKDNLCNLLTLCEGCHHRLHQGKIRLNVTGVSSHLDQIAQRSMQGKSHVYARLGTFAPLITVFGYQTCAYRKYRNLPKTHIIDALCIATLGTGEVVAVPEKNVYHIRFRPRQTRKRYHSQSQKGKGRVKYQVNEQLQGFRKGDLVLVKSKYVKLIHSIYSNGYLAFPRVKGEPNQALPRDCRILEQEGTILWEKVG

SEQ ID NO: 19586 - protein, 449 aa, unidentified
  REGION 1..449: note = Human gut metagenome
PTIRLGRVRHLLKDGKAKIIKHHPFTIQLLYDSETNIQPIEICEDVGYNYIGISVKSQSHEYVSAQYDTLQDEKSCHDACRRMRRTRRNRLRYRQKRFDNRKRDKGWLAPSLKHKKELNVNVIKMYCEVVPITHATVEVGSFDTMLVKAIEEGKATPEGADYQKGPRYNLATLREAVFYRDNYTCQVCGREASEGAILHVHHMFYWKGRHGNSLSELITVCEKCHTPANHQKGGKLYGFGEDIKFANLSGAAFMNTVRWQIVNVLNAAFGKPFVTFTYGAMTKEKRIALHLEKSHNNDAYAMGSFHPVNRCAFEHYEKVKRNNRILEKFYDSQYIDIRTGEIATGKELFNGRISRSHKKDSENLHKYRGKRICKGHRALRRKKVALNPGDLVSLNGEILVVHGTHTKKNGSVNVEFKTPSRGGKKSASLKKLKIVKTSNLMHSAWTKVA

SEQ ID NO: 19587 - protein, 470 aa, unidentified
  REGION 1..470: note = Human gut metagenome
MSVFVVGLNGCRLMPVSERKARLLLKGGKASVYRKVPFTIKLNYKTGSTVQPGYLGIDTGSQHIGVSVVRQDGTVLHKEEIGLRDSMSKRKLLESRASLRRGRRYRKTRYRHPKWKPKTKRIYSEKADRKGRHWKKQKNMFTSKRQAGWLPPSLQSKTDHHIQWIRKLLHLLPEGYRLSIELGRFDPARMKDPGIHGELYQKGPQYDYENVRAYVLARDGYTCRVCKKKGGKLHVHHILYRSRGASDDPKYMAAVCSNCHTTENHLPGGILYQWMQEQKKFTRGLRDATFMNILKKRLRRAFPDAVFTYGNITKADREKLGLPKSHGNDATAIALVKTGVTSVRDEEPVIHIQQVRRKKRSLHEETPRKGRKEPNRTASRNDKNTRSVTVSKGSGKKKVSMTACLFDRVELDEKKGWITGFTGTSCYVKDKEDNYICTSPKYKQVSISKLRILHHCGNWVIGAEKPLGKG

SEQ ID NO: 19588 - protein, 456 aa, unidentified
  REGION 1..456: note = Human gut metagenome
MSTCVCVLSNNGERLMPTIRLGKVRHLLKDGKAKIIKHHPFTIQLLYDSKTNTQPIEICEDVGYNYIGISVKSESHEYVSAQYDTLQDEKEHHDDCRKYRRTRRNRLRYRKPRFDNRKRSEGWLAPSLEHKKQLNIRLIERYVSVIPITRATVEVGSFDTMLLQAIQKGESKPEGVDYQKGPRYNLATLREAVFYRDDYTCQVCGRKITDGAILHMHHMFYWKGRHGYQLDELVAVCEKCHTPANHQKGGKLYGFGKDKKFANLSGAAFMNAVRWQIVNALYATYGKEFVTITYGAMTKEKRIILGIEKTHNNDAYAMGDYHPAHRCVFRHYQKRRRNNRVLEKFYDATYIDARTGNKAKGKELFNGRINRNHKKDSENFHKYRSKKVSKGRRSIRRQRYAIQPYDTVRLEGKTYITSGCHNKGTRLLIPVNGKSKSVAISKVQVVCHAGAWIQII

SEQ ID NO: 19589 - protein, 452 aa, unidentified; identical to SEQ ID NO: 3325
  REGION 1..452: note = IscB polypeptide

SEQ ID NO: 19590 - protein, 481 aa, unidentified
  REGION 1..481: note = Human gut metagenome
MWTTVLRDEKPYGRSSALPVRECVSITKKRRHRMVAVLSKTGIRLMPTSSYRARKLLAKKKAVICGYRPFTIRLTERETGDVQPVELAVDTGYFHVGNSLKTAKHELAAVEIRTLMDEKQRYDDRRRYRRMRRSRLRYRAMRFDNRRRPEGWLAPSIQGRMEQNLAFLRRVLSVVPVTRIVMEMGQFDTQVLKAVEEGRPLPEGTDYQQGERYGIATLREAVFTRDNYTCQCCKKTIHDGVILHVHHIVYRSQGGTNRMGNLITVCEKCHTPKNHKPGGKLYKWKPTVKSFKGATFMTAVRWIMYRFVKECFPDVDVRITYGAKTKLQRRALDITKSHVNDAYAMGDFHPKHRARPVILQKKRRNNRILEKFYDAKYIDTRDGSKKTGQQLFNGRTNRNHNTDTENLRLYRGMKLSKGRRAIRTTRYRIQPHDILVYQGQEMEASGCHCKGTRVMTTAKKSLPIGKVCVRRYSGGYYAVAE

SEQ ID NO: 19591 - protein, 402 aa, unidentified
  REGION 1..402: note = Human gut metagenome
LRRQRRAKANDTISKKCVKQATAQNGSVSKRAKEIGVIKRHLPGCEKEVLCIGIKNKEAKFSNRTRPEGWLTPTANQLLQTHINLVKKIRKFLPISDVVLEVNKFAFMRLDNPNVQKWQYQQGPLYQKASLEEAVSEMQERHCLFCKKPIAHYHHVVPQSENGSNTIDNIVGLCTKHHDLVHKDTTWQKKLAKKKTGLNKKYGAQSVLNQIIPALTERLNTLFPKHFFVTTGKSTYDYRAAHGVSKDHWLDAYCIACSVLPNDVCDSGINNRVPYELKQFRRHDRRALHKANMSRVYTLNDKAVATNRHKAIKQTTDSLEEFRQNHPDDVYKLKVKEHHPEYRNPKRNFPGCVFLVGKHTHVMQGTSSSHNGQADGYYDTNGNSYSSGKCKFVAKNEGIVFT

SEQ ID NO: 19592 - protein, 413 aa, unidentified; identical to SEQ ID NO: 8326
  REGION 1..413: note = Human gut metagenome

SEQ ID NO: 19593 - protein, 428 aa, Moorena sp.; identical to SEQ ID NO: 16903

SEQ ID NO: 19594 - protein, 512 aa, unidentified; identical to SEQ ID NO: 6100
  REGION 1..512: note = Human gut metagenome

SEQ ID NO: 19595 - protein, 406 aa, unidentified; identical to SEQ ID NO: 4082
  REGION 1..406: note = Human gut metagenome

SEQ ID NO: 19596 - protein, 410 aa, Ktedonobacter sp.; identical to SEQ ID NO: 14375

SEQ ID NO: 19597 - protein, 420 aa, unidentified; identical to SEQ ID NO: 6163
  REGION 1..420: note = Human gut metagenome

SEQ ID NO: 19598 - protein, 427 aa, Enterococcus sp.; identical to SEQ ID NO: 2410

SEQ ID NO: 19599 - protein, 557 aa, unidentified; identical to SEQ ID NO: 5269
  REGION 1..557: note = Human gut metagenome

SEQ ID NO: 19600 - protein, 427 aa, Parasutterella sp.; identical to SEQ ID NO: 14005
  SITE 159: note = misc_feature - Xaa can be any naturally occurring amino acid

SEQ ID NO: 19601 - protein, 472 aa, unidentified
  REGION 1..472: note = Human gut metagenome
VVGNRLLSIKPLINIGEGVIYSSICTGLSLQTYQKRKEVPCMVYVLDINGQPLMPTTRHGKVRRLLNSHLAKVVKRCPFTIQLLYQSTKEIQPVSLGVDAGSKHIGMAATTEKKVVYQEELSARNDVVKLLSARRTLRRTRRNRKTRYRKPRFNNRVHSKHKGWLAPSVEVKIQEHITTIKRICQILPISEIQVETAEFDLQRLKAMEEGRTPPVGTDYQLGEQYDFYNTRQYVLHRDGYTCQCCGTHDNNIKLHVHHIESRQTGGDAPNKLIILCEHCHKALHEGKLELPKGKKRGKSYRDATFMGVMRKTLLERLKKEIDVPVEGTYGYITKYWRERAGLEKSHIHDAVCISQYPYAKPLDIYYLTKTVRHHNRQIHKSNFSKGGIRKRNQAPYLVKGFRLFDKVLYQGKEYFIFGRRATGYFDIRTLDGTKVNKGSISYKKLRIQDTANAYLKEIKAIPHMNKFTCVPA

SEQ ID NO: 19602 - protein, 406 aa, unidentified; identical to SEQ ID NO: 17085
  REGION 1..406: note = Human gut metagenome

SEQ ID NO: 19603 - protein, 453 aa, Moorena sp.; identical to SEQ ID NO: 7420

SEQ ID NO: 19604 - protein, 419 aa, unidentified; identical to SEQ ID NO: 3628
  REGION 1..419: note = Human gut metagenome

SEQ ID NO: 19605 - protein, 453 aa, unidentified
  REGION 1..453: note = Mouse gut metagenome
VGSLSRHLSGERLTISRIILQRGGHPGMQVYVLNKHGQPLMPCSPAKTRRLLEAGKAKVIKRTPFTIQLLYGSTGYKQTIIHGVDAGSKTIGMSASTKSAELFAGEVTPRNDVVKNLSTRREFRRARRNRKTRYRKPRFNNRVRSKHKGWLAPSVEVKIQEHITAIQKVCSILPISKVVVETAEFDLQLLKAIADGKPVPEGEDYQKGEMLGQYNVRQYVLWRDCYACQCCGAHGNGVKLHVHHKESRKVGGNAPDNLVTLCDKCHKGFHEGTISLTKLVKRGRKSTRDATFMGIMRKTLMERLSAALPIPVVETKGYITKGTRVELLKLPKSHINDALAIVQGKHGFGITEPTAITRADRQHTVKPVRHHNRQLHKAAILKSGIRKSNQAAKYVKGFRLFDKVFYQGQECFIWGRRTSGSFLLRTLDGAKVKDGVGAKYLKLLERSSDYLIA

SEQ ID NO: 19606 - protein, 415 aa, unidentified; identical to SEQ ID NO: 13581
  REGION 1..415: note = Human gut metagenome

SEQ ID NO: 19607 - protein, 238 aa, unidentified; identical to SEQ ID NO: 7175
  REGION 1..238: note = Human gut metagenome

SEQ ID NO: 19608 - protein, 423 aa, Moorena sp.
MRVFVLNKNLQPLDPCRPARARILLSTGKAKVYRRYPFTIILVEEISNPVTHEHQLKIDPGAKTTGLAVVQRQRVVWGAELTHRGFQIRDNLTSRRQLRRSRRNRKTRYRKPRFLNRTRAKGWLAPSLVSRIENILTWVKKIIRFCPITGISQELVQFDTQKLQNPELSGIEYQQGTLHGYEIREYLLEKWNRKCTYCGAKDTRLEVEHIKPKSKGGSNRISNLTLACHSCNQAKYNQDIELFLAKKPDLSKRILSQAKRPLSDAASVNITRWKLYHDLKSITLPVEVGSGGLTKFNRCRQNLPKTHWLDAANVGKVETLIIEVNNPLLITAKGHGTRQLCRTNKYGFPIRYCSRIKFHKGFQTGDIIRAVVPKGKKIGTYVGRVATRKSGSFNISTKSGLVQGISHKYCQFIHRKDGYAYTN

SEQ ID NO: 19609 - protein, 411 aa, unidentified; identical to SEQ ID NO: 6901
  REGION 1..411: note = Human gut metagenome

SEQ ID NO: 19610 - protein, 431 aa, Petrotoga sp.; identical to SEQ ID NO: 11592

SEQ ID NO: 19611 - protein, 398 aa, unidentified
  REGION 1..398: note = Human gut metagenome
LQFYRKEHSIMQYAYVLNKRGEPLMPCSPGKARLLLKQQKACVVKRTPFTIKLLFGSAGYKQPITLGVDAGSKHVGLSASTEKRELYSEEFTPRSDVVELLSTRRQNRRSRRNRKTRYRVPRFDNRVHSKHKGWLAPSVEVKIQEHITVIKHICKILPISLVRVETAEFDTQRLKAMLAGKPLPVGTDYQLGEMYDEYNVRQYVLKRDHYTCQCCGTHNTAKKVVKLHVHHLESRKTGGNAPSNLVTLCTTCHKNLHKGRVTLDGKERGKPLRDAAFMGIMRKTLMVRLKEELPIPVQGTYGYITKMRREQNDIKKSHVNDARCISKHPLAEPCSVCYRTKAIRHHNRQTHKANFSKGGIRKRSQMPYVVEGYRLWDKVLYKGQECFVSGRRASGSFT

SEQ ID NO: 19612 - protein, 430 aa, unidentified; identical to SEQ ID NO: 4817
  REGION 1..430: note = Human gut metagenome

SEQ ID NO: 19613 - protein, 413 aa, unidentified
  REGION 1..413: note = Freshwater metagenome
MVFVLSKDNTPLMPCLPVVARLLLKQGKAKCVTRTPFVIKLVNETTGYVQGVTFGLDTASSTMGGAAVHENGDVLYLSQVEVRNDIAPKMKARSGNRRNRRNRKTRHRKARWLHRGNSMKTERFSPTMRSKFDTHLKEVAFVKSILPISKIILETGTFDPHALKNPEVLQNKSLYQKGVNYGFANTKAYVLYRDGHICQYCKGKTKDKRVEVHHIIYRNNGGSDEESNLTTLCKTDHDALHKGKIALKGGKKRGQLSHATQMNSIRVQLLRALPAAEETFGFITKEHRQLIGLPKEHYFDAAAIASQGNPVNFRTTTVLHKKSISDGDYQQTKGVRSEQRIPTGKIHGFRKFDKVKYSGNEYFIKGRMSTGYAILMNISGNKIDLKPIPKFDRMERISARKSWIISQKIIASS

SEQ ID NO: 19614 - protein, 456 aa, Halomonas sp.; identical to SEQ ID NO: 12193

SEQ ID NO: 19615 - protein, 378 aa, Moorena sp.
LKFAPRDAAPVPGSATSDLKNCGPGTVVRGKYRVLSPSRGSFSLRKEPYLMKVFVLSQEGKPLMPTTPRRARVWLKAKRARLVRQEPFTIRLRFATKAHVQATKVGVDTGSKDVGIAAIANGEVVFQAEVHLRDDITEKLTQRRQFRRNRRARKTRYREARYDNRRRPDGWLPPSLHSKAEATVKAVRFMASFLPVGRVTVEVGRFDTQRMQNPDIAHLEYQQGELQGYFLREYVLAKWQRTCAYCEAREVPLELEHIVPRSRGGSNRASNLTLACHACNRRKGQQTAAEFGFPDVQAKARVPLKDAAHVSSLKSRVVQDLQAVFGESQVSITYGYETTYKRLQVLDLPKSHTNDAVAIACEISEVVKPLKMVIRSAV

SEQ ID NO: 19616 - protein, 406 aa, unidentified; identical to SEQ ID NO: 13750
  REGION 1..406: note = Human gut metagenome

SEQ ID NO: 19617 - protein, 470 aa, unidentified; identical to SEQ ID NO: 2825
  REGION 1..470: note = Human gut metagenome

SEQ ID NO: 19618 - protein, 472 aa, unidentified; identical to SEQ ID NO: 10895
  REGION 1..472: note = Human gut metagenome

SEQ ID NO: 19619 - protein, 465 aa, unidentified
  REGION 1..465: note = Human gut metagenome
MSTCVCVLSNSGERLMPTFRLGKVRHLLKDGKAKIVKHHPFTIQLLYDSKTNTQPIEICEDVGYNYIGISVKSQSHEYVSAQYDTLQDEKACHDSCRKLRRTRRNRLRYRKPRFDNRKRGEGWLAPSLRHKKELNVNVVKMYCAVMPITHATVEVGSFDTMLVKAIQEGKAIPEGADYQKGPRYNLATLREAVFYRDNYTCQVCGRKIADGAILHMHHMFYWKGRHGDSLNELLTVCEKCHTPANHQKSGKLYGFGENVKFADLSGAAFMNTVRWQIVNELYAAFGKDFVTVTYGAMTKEKRIALRLEKSHNNDAYAMGEFHPNHRCTFEHYEKVRRNNRILEKFYDSRYIDIRTGEIATGKELFNGRINRNHKKDSENLHRYRGKRTYAGHRALLRKKVNLNPGDLVSLNGEVLVVHGTHTNKKGAVNVEFKTPGKSGQKSASLKKLKIVKAADSMHSAWEKIS

SEQ ID NO: 19620 - protein, 279 aa, unidentified
  REGION 1..279: note = Human gut metagenome
VVVETAEFDLQLLKAIADGKPVPQGEDYQKGEMYGHYNVRQYVLWRDNYTCQCCGTHPSKKKEVRLHVHHLESRKVGGDAPDNQVTLCESCHEKLHKGLIAEKDFKKRKRRSTRDATFMGIMRKTLMQRLCSELPIPVVKTRDYITKATREKLLVLPKSHTNDALAIAQGKQGFNVGYLPGIVQIDKICTIRPVRHHNRQLHKATILKGGIRKSNQTEKYVFGYCLFDKVQFNGQDCFIWGRRTTGIFTIKTINGKMIKDGISFKKLKPVEKSTGYLIA

SEQ ID NO: 19621 - protein, 458 aa, unidentified; identical to SEQ ID NO: 16953
  REGION 1..458: note = Human gut metagenome

SEQ ID NO: 19622 - protein, 418 aa, unidentified
  REGION 1..418: note = Human gut metagenome
MVYILNKHNEPLMPCSERKARLLLKDGMAIVCRKDIFTIKLINGSYGYKQHITLGVDCSSKHVGVSATTDKQELFSANAELRNDVVKLLSDRRMLRRNRRSRKTRYRKPRFNNRIVKNGWISPSIKQKIQSHFNLVDFLHKLLPISKIVIETASFDIQKINNPSISGSEYQQGEQLDFFNVREYVLFRDNHTCQHCKGKSKDKVLNVHHIESRKTGGDSPNNLITLCETCHKAYHRGEFELNVKRGKSFRDSAFMGIMRWELYDELKLRYDNVSMTFGYITKYKRIKLGLDKEHYNDAYCICGNLAAKMLSAHHFIRFIPRHSRVLHIQKFSKGGVRRSASAPYWLNGGKPSKSGAMFTMFDKVKFNGIVCFISGSSNGYAALRDINWNKIDGCKTVVTVNKLLLISRKYGGFIVEKK

SEQ ID NO: 19623 - protein, 421 aa, unidentified; identical to SEQ ID NO: 2738
  REGION 1..421: note = Human gut metagenome

SEQ ID NO: 19624 - protein, 431 aa, unidentified
  REGION 1..431: note = Human gut metagenome
MPNKVYVINKHGRPLMPCSPAKARHLLDAGKAKVKKRTPFTIQLVYGSSGYTQEVILGVDAGSKTIGMSASTTKEELLSAEVKPRNDVVDLLSTRREFRRARRNRKTRYRKPRFDNRVRSKHKGWLAPSVEVKIQEHITSIKRVCRILPVSKVVIETAEFDLQLLKAIADGKPVPQGEDYQKGEMYGHYNVRQYVLWRDGYTCQCCGAHATKKKEVRLHVHHLESRKVDGDAPDNQVTLCESCHEKLHKGLIAEKDFKKRKRRSTRDATFMGIMRKTLMQRLCSELPIPVVKTRGYITKATREKLLVLPKSHTNDALAIAQGKRGFNVGYLPEIAQIDKIYTIRPVRHHNRQLHKATILKGGIRKSNQTEKYVFGYRLFDKVQFNGQDCFIWGRRTTGIFTIKTINGKMIKDGISFKKLKLVEKSTSYLIA

SEQ ID NO: 19625 - protein, 399 aa, unidentified
  REGION 1..399: note = Human gut metagenome
ARLLLKQQKACVVRRTPFTIKLLHGSAGYKQPITLGVDAGSKHVGLSASTEKRELYSEEFTPRNDVVELLSTRRQNRRSRRNRKTRYRAPRFNNRVHSKHKGWLAPSVEVKIQEHITVIKRICRILPITLVRVETAEFDTQRLKAMLAGKPLPVGTDYQLGEMYDEYNVRQYVLKRDNYTCQCCGAHTTAKKTVKLHVHHLESRKVGGNAPSNLITLCTTCHNNLHKGKITLDGKKRGKTLRDAAFMGIMRNTLLTRLRNELNIPVQNTYGYITKLLREQNDIKKSHVNDARCISKHPLAKPCSVCYRTKAIRHHNRQIHKAKILKGGIRKANQAPYIVKGFRLWDKVLYNEQECFISGRRSSGYFALRKFDGTTITNSISFKKLRLLEPATNYLIERK

SEQ ID NO: 19626 - protein, 350 aa, Microcoleus sp.
MSNYVFLIDQNKTPLNPLHPSHARKFLNSGKAAVFRRYPFTLILKRVVDNPNVYPLTLKIDPGSKFTGIALVTSRGDVIWGMELQHRGQQIKDALEHRRAVRRGRRNRNTRYRQARFLNRKRPDGWLAPSLRHRVLSTETWVKRLQKFAPIGSIVQELVKFDTQAIQNPEISGTEYQQGTLHGYECREYLLFKWNRQCAYCGVKDVPLEIEHIQPKSKGGSDRISNLCLACHKCNQRKGNRDIKDFLKGKPDVLNRLLRQAKAPLKDAASVNSTRWTLFTALKRFGLAVRTGTGGRTKFNRIRFELPKAHWIDAACVGVVETIKLVTTKILKVKATGFGGRQRCQTDKFG

SEQ ID NO: 19627 - protein, 339 aa, Moorena sp.
MGRRSAASKNPFEQGRSGPTAARLTYLRKRDTMVYVLSKEGKPLMPTERHGKMRRLLKEGKARVVKARPFTIQLTYETTKYTQPITLGIDAGNQRVGFSVITEKKELLAGECQLLQVQAERNRERLMYRRQRRNRLRYRKPRFDNRRKPEGWLAPSLQNKLDAHIRLVEKIKSILPITQVIVEVANFDIQAIKNPGIQGVAYQQGEQYNFWNLREYILHRDNHECQNPGCKNRSKNPKLQVHHIGYWKGDYTDKPGNLITLCSKCHRPENHRESKLLWGWQPKVKSFRAETFMSTVRWKLVNTLGCEYTYGYITKSRRTELRLEKSHVSQPPRTEVRGL

SEQ ID NO: 19628 - protein, 413 aa, unidentified
  REGION 1..413: note = Human gut metagenome
LKVFVLNMRGKPLMPCSPAKARHMLKAGKAFVVRRTPFTIKLTIATGETKQDVTLGVDAGARHVGISATTEKEEVFASEVALRQDITGLLADRLAFRRARRNRKTRYRAPRFNNRVRSKHKGWLAPSVENRIQAHISRIEAVCRLLPVTKIVIETASFDIQKIRNPEVEGTGYQQGDQLGFWNVREYVLFRDGHICQHCRGRSKDPILNVHHLESRKTGGDAPNNLITLCETCHKAYHAGKIKLKVKRGQSFRAEAFMGIMRWTLLNRMRKAHPSLPVENTYGYLTKHKRIALGLPKTHCADAFCIAGNLKALRRGDFLFLQQTRKHNRQIHKCSILKGGVRKLNQAPFLVKGFRLFDKVRIGGQIGFVFGRRVRGTFNIRRLDKTVIGTDINCKKLSLLETRKTFLTELRKE

SEQ ID NO: 19629 - protein, 434 aa, unidentified; identical to SEQ ID NO: 6832
  REGION 1..434: note = Human gut metagenome

SEQ ID NO: 19630 - protein, 671 aa, unidentified; identical to SEQ ID NO: 2453
  REGION 1..671: note = Human gut metagenome

SEQ ID NO: 19631 - protein, 453 aa, unidentified
  REGION 1..453: note = Human gut metagenome
LNETTILKTFFAAFNLTKTVVQMDAWDIIVVLNKRGKPLMPCSPAKARLLLKEKKAIVVRRTPFTIQLTIATGESKQPVSLGVDAGYKHVGLSASTEKAELYASEVELRQDVSDLLSARRALRQSRRNRKTRYRAPRFDNRIRTKRKGWLAPSVENRINAHLSRIEAVLRLLPVTKITVETASFDMQLLKNPDIAGKEYQEGEQLGFWNVREYVLFRDGHVCQHCYGRSKDPVLNVHHLESRRTGGDSPGNLITLCETCHKALHRGDITLKAKRGKSFRAEAFMGIMRWEVHNRLRALHPGIEVSNTYGYQTKHARIANGIAKSHCADAFCIAGNLGAERLCEFFFQKQTRRNHRQIHKLSILKGGIRKRNQAPFEVKGFRLFDKVACQGEEGFIFGRRSSGFFDVRKLDGTRISAGISCKKLHLLEKRRTYLTEIRKEEALLALPEGRSLRT

SEQ ID NO: 19632 - protein, 443 aa, unidentified; identical to SEQ ID NO: 5872
  REGION 1..443: note = Human gut metagenome

SEQ ID NO: 19633 - protein, 420 aa, unidentified; identical to SEQ ID NO: 10678
  REGION 1..420: note = Human gut metagenome

SEQ ID NO: 19634 - protein, 442 aa, unidentified; identical to SEQ ID NO: 2903
  REGION 1..442: note = Human gut metagenome

SEQ ID NO: 19635 - protein, 413 aa, unidentified
  REGION 1..413: note = Human gut metagenome
MTSYAFVLDANGKQLAPAKEQKAWFLIRKKRAALVSKYPMVIQLKKEIPENEICQDEIRCGIDDGGLHVGIALVQKCKTKNKVVFKGTIEQRNDVKHLMEVRRSYRHYHRYHKRYRQARFDNRKSSKRKGRIAPSILQKRQATIRVINRLNKWINITNYWLEDVSIDIRALTDGYKPYRWQYQKSNRLDENIRKAAILRDGGKCMECGKSNCRLEVHHIKPRRRNGSNTLDNLITLCESCHQKTEGQEELYMDRYFSLLKSSDHKNLNYAQHVMIGKEWLRKQLSSLGVLYLTNGGDTANKRIDWNIEKSHANDAVCITNLQPDTYDMKEWTVKPMRRQSKAKTDNVLGIKHRDLVEYTLKNGETHRGYVTALYPEQKAINFQSQTKHCKKVNARKCKLLWNYSKIYWFENAS

SEQ ID NO: 19636 - protein, 415 aa, unidentified; identical to SEQ ID NO: 13751
  REGION 1..415: note = Human gut metagenome

SEQ ID NO: 19637 - protein, 408 aa, unidentified; identical to SEQ ID NO: 5694
  REGION 1..408: note = Human gut metagenome

SEQ ID NO: 19638 - protein, 559 aa, Streptomyces sp.; identical to SEQ ID NO: 7416

SEQ ID NO: 19639 - protein, 413 aa, unidentified
  REGION 1..413: note = Human gut metagenome
MTSYSFVLDVNGKPLAPTKEQKAWFLIRKKRAALVSKYPMVIQLMKEIPEKEICQDEIRCGIDDGGLHVGIALVQKCKTKNKVVFKGTMEQRNDVKHLMEVRRGYRRYHRYHKRYRQARFDNRKSSKREGRIAPSILQKRQATIRVIHWLNKWINITNYWLEDVSVDIRVLTDGYQSYRWQYQRSNRLDENIRKAAILRDGGKCMECGKSNCRLEVHHIKPRRRNGSNTLDNLITLCESCHQKTEGQEELYMDRYFSLLKSSNNKNLNYAQHVMIGKRWLRKQLSGLGVLYLTSGGDTANKRIDWNIEKSHANDAVCITDLQPDTCDVKEWTMKPMRRQSKAKTDHVLGIHHRDLVEYTFKNGETHRGYVTALYPEQKAINFQSPTKHCKKVNARKCKLLWKYSKIYWFENAS

SEQ ID NO: 19640 - protein, 456 aa, unidentified
  REGION 1..456: note = Human gut metagenome
VWLYQAVYNLGEGFLPSSEERTAFYWLLIYRKEHGIMQYVYVLNKHGEPLMPCSSGKARLLLKQQKACVVKRTPFTIKLLFGSTGYKQPITLGVDAGSKHVGLSASTEKRELYCEEFTPRNDVVDLLSTRKQNRRSRRNRKTRYRAPRFDNRVHSKRKGWLAPSVEVKIQEHITVIKRICRILPITLVRVETAEFDTQRLKAMLEGKPLPVGTDYQLGEIYDEYNVRQYVLKRDHYTCQCCGAHTTTKKTVKLHVHHLESRKVGGNAPSNLITLCTTCHDALHKGKVSLDGKERGKPLRDAAFMGIMRKTLMARLRDELSIPVQGTYGYITKMRREQNDIKKSHVNDARCISKHPLAEPCSVCYRTKAIRHHNRQTHKANFSKGGTRQRSQMPYVVEGYRLWDKVLYKGQECFVSGRRASGSFTLKKLDGTRISKGVTFKKLRLLEPATNYLIERM

SEQ ID NO: 19641 - protein, 423 aa, Moorena sp.; identical to SEQ ID NO: 4024

SEQ ID NO: 19642 - protein, 424 aa, unidentified; identical to SEQ ID NO: 3351
  REGION 1..424: note = Human gut metagenome

SEQ ID NO: 19643 - protein, 413 aa, unidentified
  REGION 1..413: note = Human gut metagenome
MTSYAFVLDANGKQLAPTKEQKAWFFIRKKRASLVSKYPIVIQLMKEIPEKEICQDEIRCGIDDGGLHVGIALVQKCKTKNKVVFKGTMEQRNDVKHLMEVRRGYRRYHRYHKRYRQARFDNRKSSKREGRIAPSILQKRQATIRVIHWLNKWINITNYWLEDVSVDIRALTDGYQSYRWQYQKSNRLDENIRKAAILRDGGKCMECGKSNCRLEVHHIKPKRRNGSNTLDNLITLCESCHQKTEGQEELYMDRYFSLLKSSDNKNLNYAQHVMIGKMWLRKQLSGLGVLYLTSGGDTANKRIDWNIEKSHTNDAVCITDLQPDTCDIKEWAIKPMRRQSKAKTDHVLGIHHRDLVEYTFKNGETHRGYVTALYPDQKAINFQSQTKHCKKVNARKCKLLWKYSKIYWFENAS

SEQ ID NO: 19644 - protein, 424 aa, unidentified
  REGION 1..424: note = Human gut metagenome
MVYVISQKNKPLMPCSSPIARLLLKLGRAKVKKREPFTIKLTYETTNYIQNLTLGVDTGSGTIGTAVSNDNSDIVYMSEVIVRNDIMDKMTQRRKYRKNRRGRKTRYRKARWLNRANSTKTDRFSPTMQSKLHSHVKEIEYIKSILPITTMVFETGQFDTHLMKNPNLANPKVKHWGYQKGGNYGFENTKAMVLNRDNYTCQCCKGKHKDSKLEVHHIVFRSQGGSDEESNLLTLCHTCHKDLHSGKINPKLSGKVKGNLKYATQMNSIRKQLFRCYPNAIETFGYVTKVNRLHLGVAKEHYYDACTIATQGNIFTVKSNLYKKKCVSDGDFQKTKGIRSEQPIVTDKICGFRKFDKVRYFGNDYFIKGRMSTGYAVLMDIDGNKADFSAMPKGYKTPKMVKLKRIEARTTWMITTVEVTPNIA

SEQ ID NO: 19645 - protein, 429 aa, Moorena sp.
MCNYVFVLDASHKPLNPCRPVTARKLLTAGKAAVYRRYPFTIILKKQVEAEPKPMSLKIDPGSKITGLAIVYGNQVVWSAEIEHRGSKIKSALDSRRAVRRSRRNRKCRYRKPRFNNRKRPEGWLAPSLQHRVATTMTWVLKLMKLTPIGGISQELVRFDTQKLQNPEISGIEYQQGELMGYEVREYLYQKWGRQCVYCGANSVKLEIEHIVPKSKGGTNRVSNLTLACHGCNQAKGNLDARDFLSGKPDVLKRILGKAKQPLLDAAAVNSTRWQLYQSLKETGLSVAVGTGARTKYNRIKLGLPKGHWVDAACVGEVATLKIVTRQPLLIKAMGHGCRQVIQMDKYGFPRKGYKPKHPVKGWKTGDIVNVVAGKNAGLKGVRIKSVRAKGNFDLIGSFNGASKKVLSASQNYIQCVHRHDGYSYSFAE

SEQ ID NO: 19646 - protein, 426 aa, Parasutterella sp.; identical to SEQ ID NO: 3045

SEQ ID NO: 19647 - protein, 320 aa, unidentified
  REGION 1..320: note = Human gut metagenome
MPITHATVEVGSFDTMLVKAIQEGKAIPEGADYQKGPRYNLATLREAVFYRDNYVCKVCGRKATEGAILHMHHMFYWKGRHGDSLDELLTVCEKCHTPANHQKSGKLYGFGENVKFADLSGAAFMNTVRWQIVNELYAAFGKDFVTVTYGAMTKEKRIALRLEKSHNNDAYAMGEFHPNHRCTFEHYEKVRRNNRILEKFYDSRYIDIRTGEIATGKELFNGRINRNHKKDSENLHRYRGKRTYAGHRALLRKKVNLNPGDLVSLNGEVLVVHGTHTNKKGAVNVEFKTPGKSGQKSASLKKLKIVKAADSMHSAWEKIS

SEQ ID NO: 19648 - protein, 440 aa, Bacillus sp.
MNLRGEMLMPCSPRKARILLKEQKATIVRHNPFTIQLLYATGEATQETRLGIALGAKCVGIAITSNEKVFGKAELELRQDVKGNLETKKTYRRGRRNRKTRYRRSKFKHKTKRVYVEGKRTKRGMYHKVSVSFTSKRPNGWLPPSIQSRIQNTFYWIDTLYSLLPTCNIHIEVGKFDVQKMRSPNIQGREYQEGDTFGYHDVRYFVLARDYYTCQVCKKKGGILQTHHIIYKSHGGSNAACNLVTVCTSCHTYENHQEDNIFWKWMIEKKKTKRYKEGPFMNIFRRRVFEKYPEAHITYGSMTTPRRKILELEKTHSNDAIASTGITAIKENPANVLFIKQFRKKKRSLHEATARKGRKEKNTLAKRNEKNTKAVGTWQLNDKVRVFGQVGWISGFSGQCCYVKNIQGDYVTVPGKSYKQVNLSSLELLCHNANWQFAIL

SEQ ID NO: 19649 - protein, 423 aa, Microcoleus sp.
MQNYTFVLDTNKRPLDPVHPAVARKLLSNGEAAVFRRYPFTIILKRGVDTPTQLIEIKLDPGSKTTGIALLKGEKLIFVAELNHRGQAIKASLDSRRAIRRCRRARHTRYRQARFLNRTRPKSWLAPSLKHRVDTTLTWVNKFIRFAPVNSIAMELVRFDFQQLEKPEISGVEYQQGELLGYEIREYLLNKWDRKCTYCNTENIPLQVEHIHPKAKGGSNRISNLCLACEKCNLKKGTQDIKDFLSKKPDLLKQIMVQVKRPLKDATAVNSTRWALFNQLKLTELPVTTGSGGQTKYNRTRLELPKTHYFDAACVAKVDKLVVLTDQPLLIKANGHGTRQMCRTDKFGFPSRYVPRDKFVKGFQTGDLVKAVVTSGKKIGEYVGRVAVRSSGFFNISAKELVQGINHKYCQIIHRKDGYSYQF

SEQ ID NO: 19650 - protein, 449 aa, Moorena sp.; identical to SEQ ID NO: 12479

SEQ ID NO: 19651 - protein, 424 aa, unidentified
  REGION 1..424: note = Human gut metagenome
MRVFVFNMRGRPLMPCSQRKARLLLRENKAKIYKYHPFTIQLTYTTGETKQDCHIGIDTGSKYIGAAVRSEDKVFWKGEIELRQDIRSNLDTKRIYHRSRRNRKTRYRKPRFLNRKRRDEWLPPSLQSRINHTFHWIDTLSSLVPNPILHIEVGKFDVAKMINPEIHGVDYQHGQTYGFFDERYFVFARDNYTCQCCGKSKNKILNTHHIIYRSNGGTNRVDNLITVCTDCHTSQNHRKGGIFYQWQEQHKKVKQYKEPPFMNTLRKRIFVAYPDAEITYGSETTPKRKAMKLDKTHYNDAIVISGINEIKENPEEWLLIKQFRKKKRSLHEATARKGRKKPNRNQTRNSKNTPYYKGFYLNDKVSVFGKSGYITGFTSNAAYIKDENNDYITLPNKTYKQVSINKMKLECHNNNWQYIIKNAV

SEQ ID NO: 19652 - protein, 440 aa, unidentified
  REGION 1..440: note = Human oral metagenome
VLSVPSSKSANQETNLTLWLDHRETHEQEYAFVLDAEGKKLDPTIIQNAWRLVRQKKATLIAKRPMTIQLKKAIDSPNDDEIRMGIDDGAKHVGLALVQKCKTKNKVIFVATMEHRNDVHKKMEQCKNYRRYRRYWKRYRKARFSNRASARRKGRVAPSILQKRQAVVRIFDRLSKYIRIDSIYLEDVAVDVRVLTDEKKLYSWQYQQSNRLDENLRKATILRDKCQCQMCGKKNCRLEAHHITPKRMSGTDTIGNLITLCSDCHSKVTGREMEFAEQFYTKIKRKKNNYNLQDATHSMVGKTWLREKLSLRKPVLLTTGGDTANKRIDWNLEKSHEIDAVCITDLRPESINVKHWKVKPLRHQRKKMKVEELCGFRHRDIVCYTFQNGEYHEGYVTALLLADKTHADSLSFMSATKHCCRINPKKCKKLGHANKFLWLL

SEQ ID NO: 19653 - protein, 424 aa, unidentified; identical to SEQ ID NO: 13009
  REGION 1..424: note = Human gut metagenome

SEQ ID NO: 19654 - protein, 462 aa, unidentified
  REGION 1..462: note = Human gut metagenome
MSVLVIGRNGRALMPTNPRKARLLLKKKTASVVCRHPFTIQLLYKTGCATQEGSIGIDTGSQHIGVGITCGDRVILKDEHALRSSMEKRSLLATRAVMRRGRRYRKVRYRKPKWRHHTKRMYFEKANRRGQHWRKVKTTTQSPRSKGWLPPSLQSKCDHHFRIIDRYLKYLPDPITRNLVIEAGRFDMARMNDPTIHGEMYQRGPMYDAENLRAYIFARDNYQCACCKAKAGTTRKADGTTVKLVTHHILFRSRGATDNPKYIISVCDHCHTTKAHQPGGILYSWMENNKKVARGLRDATFMNILRKRLFARYPQAAFTYGNITAADRKKLRLPKSHANDAVAISLFGKEASTVKNICQTMHYKQIRKSKRSLHEAIPRKGRKNPNTKAVRNKKNTTQVNGFKLWDSVLADGKKLFICSFTGTSAYLIDKNGCYISQPGKTYKQWPLSKLKRLHPNGNWLMA

SEQ ID NO: 19655 - protein, 544 aa, unidentified
  REGION 1..544: note = Human gut metagenome
MKQKKQKVMVYILNKKGKPLMPTTRCGHVRKLLNSKKAVVVNSNPFTIRLKYDTPNGVQDVFAGIDSGRENIGSGASNEDGDCLYLGELKTSNKSIKLKMTERAGFRKERRRHDRQNKQRKARKDHTEIQNGNADICRTTISCKSVQISYPAAEKSVTHKIIRGKEGKFANRHRDEGWITPSARQLVQMHMNDLKSMCKILPISHVTLERVAFDFQKLENENIKVWEYGKGKLYGYDSPEEYIHDVQNGKCLVCGKPHIDYLHHIIPRSKGGSDKVSNIAGLCYDCHYGPMGVHNCQNTQDRLPELKSEANKQYKVSLLNSVMPVLIEEMDKFCKANSIMFSICEGHDTAKVRDMYDLQKDHCIDGFAISLVDRNVKSVDVMPDRIYQKQRYKKKSKNIIQKRNCREYYDDKKLVAVNRHKGTDQKADSLEEYMNTYAETHTTDECKKHFDSLVVKPARRTYTFHKEGRICPLHIGDKVRYEKKNKIKGNTKVDTFICEGIYFSKDENKAKVEHNKTKSKKMKFCRVLESGCTPYVDYRKLALM

SEQ ID NO: 19656 - protein, 386 aa, unidentified
  REGION 1..386: note = Human gut metagenome
LTIATGESKQPVSLGVDAGYKHVGLSASTEKAELYASEVELRQDITDLLSARRALRQSRRNRKTRYRAPRFDNRIRTKRKGWLAPSVENRINAHLSRIETVIRLLPVTKISVETTSFDMQLLKNSDIAGKEYQEGEQLGFWNVREYVLFRDGHVCQHCHGRSKDPVLNVHHLESRRTGGDSPGNLITLCETCHKALHRGEITLKAKRGQSFRAETFMGIMRWEVLDRLKASHPKLEVQNTYGYRTKHARISNGIAKSHCADAFCIAGNLGAERLGEFFFQKQTRRNNRQIHKLSILKGGIRKRNQAPFEVNGFRLFDKVACKGEEGFIFGRRSSGYFDVRKLDGTHISAGISYKKLRLLEKRQTYLTEIRKEEALPPLPEGRGLRA

SEQ ID NO: 19657 - protein, 423 aa, Moorena sp.; identical to SEQ ID NO: 3576

SEQ ID NO: 19658 - protein, 418 aa, unidentified
  REGION 1..418: note = Human oral metagenome
MPTERFGKVRRLLREGKAKVVRREPFTIRLLYEPETDVVQECYCGVDTGSKHIGVAVVGNDKVLYQSQTELRSDIKQKMDRRRAFRRNRRNRKTRYRKCRFLNRQNSIREDRLPPSVNHKVQAHIDEIEFCKKILPVLDENIILEVSQFDTALMKNPSLINEKVKHWGYQQGFNYSYSSRQKAILHRDNYTCQCCGKKNCRLEVHHIKFKSNGGTDDEENLITLCEDCHKGVHAGTVVLNKKPKNSKNLKYATHMSIIRIRLLKKYPNAIETFGFVTAENRNHLQLEKDHYIDACVIASGGLEFKKLDVIYKKRRVSVQDRVLTKGIRGEKKIPTGKVHGFKRYDRVKYLGEICFVKGRRIKDGFVLMDIDNNAIDFRDIGGRQNPSYKSIERLNTRRSILCIYKRIEREVRFIPILS

SEQ ID NO: 19659 - protein, 452 aa, unidentified; identical to SEQ ID NO: 6924
  REGION 1..452: note = Human gut metagenome

SEQ ID NO: 19660 - protein, 414 aa, unidentified
  REGION 1..414: note = Human gut metagenome
MPCSPAKARLLLKEKKAVVVRRTPFTIQLTIATGETKQPVSLGVDAGYEHVGLSASTEKAELYASEVELRQDVSDLLSARRALRQSRRNRKTRYRAPRFDNRIRTKRKGWLAPSVENRINAHLSRIETVLRLLPVTKITVETASFDMQLLKNPDIAEKEYQEGEQLGFWNVREYVLFRDGHVCQYCHGRSKDPVLNVHHLESRRTGGDSPGNLITLCETCHKALHRGEIKLRAKRGQSFRAETFMGIMRWEVLNRLKASHSKLEVNNTYGYLTKHARIKSGITKSHCSDAFCIAGNLGAKRLGEFLFQKQTRRNNRQIHKLSILKGGIRKRNQAPFEIKGFRLFDKVACKGEEGFIFGRRSSGSFDVRRLDGTRISAGISYKKLRLLQKRQTYLTEIRKEEALPPLPEGRDLRA

SEQ ID NO: 19661 - protein, 433 aa, Hydrocoleum sp.; identical to SEQ ID NO: 15673

SEQ ID NO: 19662 - protein, 443 aa, Actinomadura sp.; identical to SEQ ID NO: 16181

SEQ ID NO: 19663 - protein, 440 aa, unidentified
  REGION 1..440: note = Human gut metagenome
MIERKCQVVYIISKNNKPLMPTTRHGKVRRLLRDKKAEIIKREPFTIKLLYETTNEALQPINLGVDAGSKMIGLSATTEKQELFKGEYELRNNISNKLTNKRELRRTRRGRLRYRKPRFNNRVSSKKKGWLAPSVEHKINSHLKIIEDLCKILPISKIIVEVASFDIQKIKNPDIEGKEYQEGEQLGSWNTREYVLFRENHICQHCKGKSKGPILNVHHIIGRKDGGSNSPSNLITLCKTCHHDYHQGKIELKVKGAPSFKDSAFMGIMRWAFYNKLKEIYPSVNLTYGYMTKNKRIKLGLAKTHYNDAYCIADNLEANRLDSYYYYKKARCHNRQIHRANILKGGRLKRNQAPYRVKGFRLFDRVKYQGKSYFIFGRRETGYFDIRDLAGNKINKGSISYKKLKLVEPKKSVLIERRGAKDEEQFLPATKVGGFLTQVL

SEQ ID NO: 19664 - protein, 408 aa, unidentified; identical to SEQ ID NO: 8155
  REGION 1..408: note = gut metagenome

SEQ ID NO: 19665 - protein, 443 aa, unidentified
  REGION 1..443: note = Human gut metagenome
VVKANGTAVFTAHLETRNKEIPKLMQDRKKARRARRTNGRRCRRQRRAKANGTISKKCVKQTTAQNGSVSKRAKDIGVIKRRLPGCEKDVLCIGIKNKETKFTNRTRPEGWLTPTANQLLQTHINLVKKIQKFLPISDVVLEVNKFAFMRLDNPNIQKWQYQQGPLYKKESLESAVSEIQEHHCLFCKKPIDHYHHVVPQHKNGSNTIGNIVGLCAKHHDLVHKDSAWEKKLAQKSTGLNKKYGALGVLNQIIPTLTNELSSLFPKHSFVTNGKSTYDYRAAHGVSKDHWLDAYCIACSVLPSNVCDSNINNHMPYELKQFRRHDRRVLNNENMTRVYTLNNKAVAINRHKAKDQKTVSLEEFRKEHPDDVCKLKVKEHHPTYRNMNRNFPGSVFLVGKQIHVMQGIASSKDGKATKYNDTSATAIAAGKCKFVAKNTGILFV

SEQ ID NO: 19666 - protein, 512 aa, unidentified
  REGION 1..512: note = Human gut metagenome
MSTVYVLNKNGKPLMPTTRCGHIRYLLKEKKARVVASKPFTIQLLYETNDVVQPLYLGIDPGRTNIGVAVVKTDGTAVFTAHLETRNKEIPKLMKKRKDSRRARRTNGRRCRRQRRAKANDTISKKCVKQATAQNGSVSKRAKEIGVIKRHLPGCEKEVLCIGIKNKEAKFSNRTRPEGWLTPTANQLLQTHINLVKKIRKFLPISDVVLEVNKFAFMRLDNPNVQKWQYQQGPLYQKASLEEAVSEMQERHCLFCKKPIAHYHHVVPQSENGSNTIDNIVGLCTKHHDLVHKDTTWQKKLAKKKTGLNKKYGAQSVLNQIIPALTERLNTLFPKHFFVTTGKSTYDYRAAHGVSKDHWLDAYCIACSVLPNDVCDSGINNRVPYELKQFRRHDRRALHKANMSRVYTLNDKAVATNRHKAIKQTTDSLEEFRQNHPDDVYKLKVKEHHPEYRNPKRNFPGCVFLVGKHTHVVQGTSGSHNSKADGYYDTNGNSYSSGKCKFVAKNEGIVFT

SEQ ID NO: 19667 - protein, 457 aa, unidentified
  REGION 1..457: note = Human gut metagenome
PVLQPITIAEDPGRSNIGMAVVSLSGELFSAAVVQTRNKEIVKLMDKRKQHRRASRNGERKARQRLAKKCHTMIKAGFLMRKLPMYGKDKRVKCLVIKNTESRFCNRKREDGWLTPSAEHLVQTHINLIHKMQKFLPITDVAIEINRFAFLSLEDPSISGVDFQNGPLKGYDDLNAAIEDLQDGHCLMCNSPIEHRHHIVPRSMQGSNTIGNIAGLCCKCHEKVHKSTAFEDSLKKKKAGLNKRYAAISTLNQAIPFICKRLEQEFGKEHVHYCSGRDTSMVRRSFGYHKTKEEQLHEVDAWCIAVLSLQQIPEKAPEFDHVHEILQFRRQDRSRIKAQTSRAYYYKGKKIAKNRKKAEGQREDSLQEWRKRQVERYGEEQTRKMISQLKVKKSIRRYNRLDRLMPGAVFYYQGIRYVMRGQHCEGTYLQAVGMGSKDFPAKKCKIVAHNEGLVFVS

SEQ ID NO: 19668 - protein, 462 aa, Moorena sp.
MIHTADKNGNPGHPTKRFDMVRKLRKRGKMRIIGGGASGKPPVAVFLQKEFDYSKTVERKFFIVLDPGYRYIGFVVCEVKDGKLIIYCRGTLRTRIPDIKSLMNSRRAYRRFRRYLSRFKNKRLSVKHRRAMTKFKAPRYIRSREKLNATLKHGTETHLNLYRKLLKLFSLPASQTQLIMEDNVFNTRVMTWGQAFGEDYQESPYTPNEEKCLVCSTEDSLQEHHLIQRKKGGTEVKGNKIYLCESCHDDIHAGRIYLPIKGIQWRELGTMNVIIGMLRKIPWIKFIPASNTICERKRLNLSKSHANDALATAAAIYCGIKIDNSQERYLELAQFRRHNRARTHALRDRLYKLNGKIVARNRQKKADQKENSFADISLIPAEQKGLKVYPGKKIPKPFRENMPTIGGDVWLHLSTGQRFVATSVTSEKYIYSPALKEIVGGSYVHPDQCRRLLRNEGMVVLN

SEQ ID NO: 19669 - protein, 412 aa, Bacillus sp.; identical to SEQ ID NO: 11231

SEQ ID NO: 19670 - protein, 419 aa, unidentified; identical to SEQ ID NO: 4877
  REGION 1..419: note = Human gut metagenome

SEQ ID NO: 19671 - protein, 427 aa, Scytonema sp.
MSKIFVIDSEKRPLLPIHSAQARQLLRNQKAAIFRRFPFTIILKEWRPNSPVSPLRLKIDPGAKHTGIALVNDLNGDVVFAAEVKHRGFAIRDALTSRRQLRRGRRARKTRYRQPRFLNRTRPQGWLAPSLQSRIDNIKTWVEKLRKFAPIKAISQELVRFDMQLMRNPDIQGKEYQQGTLVGYETREFLLEKWNRQCAYCGVKDVPLQIEHIHPIAKGGSNSITNLTLSCSKCNTKKGSKDIKDFLKKDPSRLEKILKQAQRPLADAAAVNTTRFALLTALKETGLPVETGSGGLTKFNRAQQELPKQHWLDAACVGKSTPILNVKNIRPLLITANGHGSRQSCRTDKFGFPNRHVPKKKIHFGFQTGDIVNAVVKTGKKIGNYVGKVAIRSSGSFNISTKNGLVQGISHKFCKRIHAKDGYSYAT

SEQ ID NO: 19672 - protein, 425 aa, Moorena sp.; identical to SEQ ID NO: 4593

SEQ ID NO: 19673 - protein, 415 aa, unidentified; identical to SEQ ID NO: 8202
  REGION 1..415: note = Human gut metagenome

SEQ ID NO: 19674 - protein, 493 aa, unidentified
  REGION 1..493: note = Human gut metagenome
MAAVYVISASGKPLMPTTRCGHIRGLLNAGKARVVEREPFTIQLKYETPDVTQPLYLGIDPGRTNVGSAVVREDGECVFTAQLTTRNKDVPKLMKARKQFRMAHRRLKRRCKRQRRAKAAETLSQKGEFQRLLPGYEEPILCKGIRNKEARFNNRQRPAGWLTPTANHLLLTHLNMVKKLQKLLPITDVVLEVNRFAFMAMENPSIRRWQYQQGPLYGKGSVEDAVYAQQDGHCLFCGKPIAHYNHVVPQHKNGSETLENRVGLCNEHHDLVHKDRAWDAKMKETKAGLNKKYHALSVLNQIIPALTEQLTAMFPQHAFVTTGKDTADFREDYGIAKEHHLDAYCIACSVLAEPTKVAAPTGKPHRLMQFRRHDRQVCHKENIKRVYLSEGKAVATTRHKAIEQKDDSLEEFRKTHTQQEVSALTVKDHQPVYKDMRRFMPGGVFLFNGKVHTLQRSHGRYKGMPFYYIDTDGSKNHAKGCIFLQQNCGLRWV

SEQ ID NO: 19675 - protein, 438 aa, Petrotoga sp.; identical to SEQ ID NO: 8698

SEQ ID NO: 19676 - protein, 557 aa, unidentified
  REGION 1..557: note = Human gut metagenome
MIYNLVSTRERSFMKQKKQKVMVYILNKKGKPLMPTTRCGHVRKLLDSKKAVVVNSNPFTIRLKYDTPNGIQDVFAGIDSGRENIGSGASNEDGDCLYLGELKTSNKSIKLKMTERAGFRKERRRHDRQNKQRKARKDHTEIQNGNADICRTTISCKSVQISYPAAEKSVTHKIIRGKEGKFANRHRDEGWITPSARQLVQMHMNDLKSMCKILPISHVTLERVAFDFQKLENENIKVWEYGKGKLYGYDSPEEYIHDVQNGKCLVCGKPHIDYLHHIIPRSKGGSDKVSNIAGLCYDCHYGPMGVHNCQNTQDRLPELKSEANKQYKVSLLNSVMPVLIEEMDKFCKANSIMFSICEGHDTAKVRDMYDLQKDHCIDGFAISLVDRNVKSVDVMPDRIYQKQRYKKKSKNIIQKRNCREYYDDKKLVAVNRHKGTDQKADSLEEYMNTYAETHTTDECKKHFDSLVVKPARRTYTFHKEWRICPFHIGDKVRYEKKNKIKGNTKVDTFICEGIRFVKDENKAEVKHNKTKSKKMKFCRVLESGCTPYVDYRKLALM

SEQ ID NO: 19677 - protein, 423 aa, unidentified; identical to SEQ ID NO: 3951
  REGION 1..423: note = Human gut metagenome

SEQ ID NO: 19678 - protein, 452 aa, unidentified
  REGION 1..452: note = Human gut metagenome
MSVAVISKTGERLMPTSEYRARKLLKSGKAIKYSYHPFTIQLTERESGDAQSIELCVDTGYIHIGISVKSEKHEYLAEQIDTLTDEKARHDACRMYRRQRRSRKRYRQPRFNNRKRNDRWIAPSLEHKKSIHIQAILRICKVMPVTDITLEMGNFDTQVLKAREEGKPLPQGVDYQHGERYGITTLREAVFARDGYTCQCCGRAIKDGAILHVHHIVYRSQGGTNRMSNLITVCDKCHTPANHKQGGKLYNWKPKIASFKGATYMTTIRWKLYNEVEALFPDIDIDITYGAETKERRRALDIDKSHVNDAFVMGQFHPKHRSKPICYKKKRRNNRCLEKFYDAKYIDSRDGKNRSGQELFNGRISRNHKKDSENLHQYRLQKVTPGRRAIRRQHYPIQPHDIIVYNGNKIEVSGCQHKGTRIVFSKTKKSVQISKIKLFKYAGGYSKSVFNE

SEQ ID NO: 19679 - protein, 449 aa, Allochromatium sp.; identical to SEQ ID NO: 6788

SEQ ID NO: 19680 - protein, 447 aa, unidentified
  REGION 1..447: note = Human gut metagenome
VAVLSKTGIRLMPTSSYRARKLLAKKKAVICGYRPFTIRLTERETGDVQPVELAVDTGYFHVGNSLKTAKHELAAVEIRTLMDEKQRYDDGPRYRRMRRSRLRYRAPRFDNRRRPEGWLAPSIQGRMEQNLAFLRRVLSVVPVTRIVMEMGQFDTQVLKAVEEGRPLPEEADYQQGERYGIATLREAVFTRDNYTCQCCEKTVHDGGILHVHHIVYRSQGGTNRMGNLITVCEKCHTPKNHKPGGKLYKWKPTVKSFKGATFMTAVRWIVYRSVKKSFPDVDVRITYGAKTKLQRRTLDITKSHVNDAYVMGDFHPKHRVRPVILQKKRRNNRILEKFYDAKYIDTRDGSKKTGQQLFNGRTNRNHNTDTKNLRLYRGMKLSKGKRAIRTTRYRIQPHDILVSQGQEMEASGCHCKGTRVMTTAKKSLPIGKVRIKRYSGGYYAVAE

SEQ ID NO: 19681 - protein, 427 aa, unidentified; identical to SEQ ID NO: 14123
  REGION 1..427: note = Human gut metagenome

SEQ ID NO: 19682 - protein, 503 aa, Moorena sp.
MDTIYVLNRDGRPLMPMHSWGRVQRFLKSGRASVVSSLPFTIRLKKQIEDPELDRCILGIDPGRTNIGLCVTDGKGKPLFASVLETRNKEIPDLMRDRKQARQASRRGERKRRQRRAIHFDKSGETAMTEYWRVLPGTKKAVCQKHIRGQESKFMHRRRPKGWRTPTAEQLYRTHLNAVAKIEKLLPIADIVIEMNRFDFAKMENPGIRNWEYQRGRLFGFKNVQEAVIARQNGKCLLCGRPIEHVHHVRPRSQGGSDHIDNLAGLCCACHQKVHTDPAAKARLASEAKKRLKKYGALSVINQIMPALLDELAYRYLLWITTGWETAKTRRGCGLPEKEKDDGTHYIDAWCIAVSIMENRLYVPDSRDLDDVFHLMRQFRRHDRQKVEATKARSYYLDGRLVAKNRRRRTGQADGKDPKPALSEWRQGHEKDVARLTVRKSTRSYNDLKRVLPGAEVLCDEKRYVVKGKHNDRWIALDAADHTLEKAQSRFTLLHHNTGIVFV

SEQ ID NO: 19683 - protein, 426 aa, Methanosarcina sp.
MLVFVINQNKKPLMPCKPSKARKLLQAGKAKVVRNTPFTIKLLFRSSGYTQPVTAGMDTGSKVVGCAAIANGKVLYQSEIYLRENVSKKMEQRKMYRRSRRSRKTRYRPARFDNRGNSKKEGRLAPSIRSKLEAHFREKRFVESLLPVTEWKVELASFDIHKITNPEVSGIGYQEGDLKGFYNIKAYVLDRDGYTCQHCRGKSKDSRLHCHHIVFRSQKGTDAPENLIMLCETCHKALHNGEFKLSGKKSKTKHATEVGIIKSQIRKSGWNFAETFGYETKYRREQVLKLLKTHYFDAVAICCRDDQKVEVEESVFLKRNVSKGDYQQRTGKRSEKKIPTGKLFNLRKFDLVKTSKGIGFVKGKRSSGFFAISDMFGNKISDSVNVKKICERLRARTSTLIQQSRTGKFTHSSPELKTQGFPAEGL

SEQ ID NO: 19684 - protein, 460 aa, Lactobacillus sp.; identical to SEQ ID NO: 12498

SEQ ID NO: 19685 - protein, 425 aa, Aphanothece sp.; identical to SEQ ID NO: 7871

SEQ ID NO: 19686 - protein, 317 aa, unidentified
  REGION 1..317: note = Human gut metagenome
VKKIQKFLPISDVVLEVNKFAFMQLDNPNIQKWQYQQGPLYQKGSLENAVSEMQEHHCLFCEKPIEHYHHVVPKSENGSNTIANIVGLCTEHHNLVHKDATWQKKLAKEKVGLVKKYSALSVLNQIIPALTKEMNSLFPKHFFVTNGKSTYDYRTAHGVSKDHWLDAYCIACSVLPNDVCDSNINSHVPYELKQFRRHDRRVLHKANMSRVYTLNGKTVATNRHKAIKQTTDSLEEFRQSHPGDVCKLKVKEHHPAYRNLNRNYPGSVFLVDGQVHVMQGVSGSHNGKADGYYNTNGNAYPYYKCKFVVKNEGIVFA

SEQ ID NO: 19687 - protein, 335 aa, unidentified; identical to SEQ ID NO: 9848
  REGION 1..335: note = Human gut metagenome

SEQ ID NO: 19688 - protein, 408 aa, unidentified; identical to SEQ ID NO: 14634
  REGION 1..408: note = Human gut metagenome

SEQ ID NO: 19689 - protein, 456 aa, unidentified; identical to SEQ ID NO: 7925
  REGION 1..456: note = Human gut metagenome

SEQ ID NO: 19690 - protein, 512 aa, unidentified; identical to SEQ ID NO: 19583
  REGION 1..512: note = Human gut metagenome

SEQ ID NO: 19691 - protein, 425 aa, unidentified; identical to SEQ ID NO: 8847
  REGION 1..425: note = Human gut metagenome

SEQ ID NO: 19692 - protein, 470 aa, unidentified; identical to SEQ ID NO: 2825
  REGION 1..470: note = Human gut metagenome

SEQ ID NO: 19693 - protein, 424 aa, unidentified; identical to SEQ ID NO: 8578
  REGION 1..424: note = Human gut metagenome

SEQ ID NO: 19694 - protein, 447 aa, unidentified; identical to SEQ ID NO: 3915
  REGION 1..447: note = Human gut metagenome

SEQ ID NO: 19695 - protein, 557 aa, unidentified
  REGION 1..557: note = Human gut metagenome
MIYNLVSTRERSFMKQKKQKVMVYILNKKGKPLMPTTRCGHVRKLLNSKKAVVVNSNPFTIRLKYDTPNGVQDVFAGIDSGRENIGSGVSNEDGDCLYLGELRTSNKSIKMKMTERVGFRRERRKHDRQNKQRKARKDHTEIQNGKDDICRATISCKSVQISYPTAEESVTHKIIRGKEGKFANRHRDGDWITPSARQLVQMHMNDLKSICKILPISHVTLERVAFDFQKLENENIKAWEYGKGKLYGYDSPEEYIHDVQDGKCLVCGKPHIDYLHHIIPRSKGGSDKVSNIAGLCYDCHYGPMGVHNCQNTQDRLPELKSEANKQYKVSLLNSVMPVLIEEMDKFCKANSIMFSICEGHDTAKVRDMYDLQKDHCIDGFAISLVDRNVKSVDVMPDRIYQKQRYKKKSKNIIQKRNCREYYDDKKLVAVNRHKGTDQKADSLEEYMNTYAETHTTDECKKHFDSLVVKPARRTYTFHKEWRICPFHIGDKVRYEKKNKIKGNTKVDTFICEGIRFVKDENKAEVKHNKTKSKKMKFCRVLESGCTPYVDYRKLALM

SEQ ID NO: 19696 - protein, 431 aa, unidentified
  REGION 1..431: note = Human gut metagenome
MPNKVYVINKHGRPLMPCSPAKARHLLDAGKAKVKKRTPFTIQLVYGSSGYTQEVILGVDAGSKTIGMSASTKKEEVFAADVTPRNDVVDLMSTRREFRRARRNRKTRYRKPRFDNRVRSKHKEWLAPSVEVKIQEHITAIRRVCGILPVSKVVVETAEFDLQLLKAIADGKPVPQGEDYQKGEMYGHYNVRQYVLWRDDYTCQCCGAHATKKKEVRLHVHHLESRKVGGDAPDNQVTLCESCHEKLHKGLIAEKDFKKRKRRSTRDATFMGIMRKTLMQRLCSELPIPVVKTRGYITKATREKLLVLPKSHTNDALAIAQGKRGFNVGYLPEIAQIDKIYTIRPVRHHNRQLHKAAILKGGIRKSNQAGKYVFGYRLFDKVQFNGQDCFIWGRRTTGIFTIKTINGKMIKDGISFKKLKPVEKSTSYLIA

SEQ ID NO: 19697 - protein, 435 aa, unidentified; identical to SEQ ID NO: 4695
  REGION 1..435: note = Human gut metagenome

SEQ ID NO: 19698 - protein, 442 aa, unidentified
  REGION 1..442: note = Human gut metagenome
MSTTVFVLDKKHRPLMPCRPARARRLLRAGRARVVKRFPFVIRLVDRTVEQSEVQPVLIKLDPGSRETGAAVVRDDGKKRHHALAFFVIEHRGGAIRDALKARSAFRRRRRSQNLRCRSPRFLNRVKPKGWLPPSLRHRVETTLSFVRRMCRYLPVSGIATELVKFDSQKLQNPEVSGVEYQQGTLFEYEVREYLLEKFGRKCIYCGAEGVPLNIDHVVPRAKGGSNRVSNLVLACMSCNQKKGARSLEDFLKGKPKVLARVRRELKTPLRDAAAVNATRWVLFNELKATGLPVETGSGALTKLNRHAFGVEKEHWLDALCVGRLNGVVTRKGLNVLEIRCMGRGSRQRTRLTKYGFPRGYLMRQKCVHGFATGDMVEANVPKGKKAGLWRGRVAVRVSGSFNIQTPKGVIQGVGWKHCRLISHNDGYGYAWLGHAPHSSPA

SEQ ID NO: 19699 - protein, 447 aa, Scytonema sp.; identical to SEQ ID NO: 2680

SEQ ID NO: 19700 - protein, 422 aa, unidentified
  REGION 1..422: note = Human gut metagenome
MFVYIINKDGKPLMPCRPQKARKLLKAGKAVVVKYEPFTLKLKFGSSGYKQPVTLGLDTGSVHIGASASTKKQELYASETILRSADGKNSIVNLLAKRRELRRSRRNRKTRYRKARFQNRTHRKKKGWLAPSIEQKIVSHLALVERLHRILPIQQIVVEVAQFDIQKIKNPDISGKGYQQGEQSGWKNVREYVLFRDQHTCQCCKGKSGDPVLNVHHIESRKTGGNAPNNLITLCKTCHQRYHQGKITLPKSIHRGMRFKDAAFMGIMRWTFYRRLREQYEDVHLTYGYQTKDTRIAHHLKKTHTTDAYCIAGNMQAKRTDTEYLRKQVRRHNRKIHREVPAKGNIRRRAQAGHLVKGFVRNDTVRAKGELWFIRGLRTKGSFVLKHLDGTKLEITPSKIQFVAHNHAYLVERREVAFLSAL

SEQ ID NO: 19701 - protein, 338 aa, unidentified
  REGION 1..338: note = Fermentation metagenome
VKKILDTRRTYRRGRRTRKTRYRKPRFNNRTRVEGWLPPSIQSRLDNTFRWIDRFVSLVPHPTLTIEVGKFDAQKMMNPDIKGEEYQQGQTLSYHDVRYFVFARDKYTCQVCKKSKDKIFNTHHIIYRSHGGSDRADNLITVCTDCHTHENHQRGKVFWRWMVEGKKLPSYKEGAFMNIFRKRVFGKYPQAKITYGSITTPRRKELGLEKSHKNDAIAISGIEKIDKVVDYSFKIKQFRKKKRSLHEATARKGRKTKNTTSKRNVKNIKQLNGFYLNDRVKIYGKLGYITGFTGTSMAYVKDIVGNYITKPNKSYKQINLKECEFLNHNNNWQYVENF

SEQ ID NO: 19702 - protein, 411 aa, unidentified; identical to SEQ ID NO: 2867
  REGION 1..411: note = Human gut metagenome

SEQ ID NO: 19703 - protein, 426 aa, unidentified
  REGION 1..426: note = Fermentation metagenome
LSKDINSAKGERNLRVYVLNMRGEPLMPTTPRKARILLRDGKAKVVKRTPFTIQLKYATGENKQEITLGVDAGSKTIGLSASTEDEELYSAEVQIRNDIVNLLSTRRENRRTRRNRLRYRPARFDNRKKGNGWIAPSIQNKVNAHLSTVANVYKILPVSKTIVEVAAFDIQKIKNPDVEGTGYQKGEQLGFWNVREYVLFRDGHKCQYCKGRSKDPILNVHHIESRKTGGNSPSNLITLCETCHKAYHTGKIQLKIKRGKSFRDAAFMGIMRWAFYNKLKELYQNVSLTYGYITKNTRIRNGLPKEHRIDALCIAGHPQAKISDTWYAIKKTRRHNRQIHKANILKGGKKRLNQAPYEVFGFRLFDKVLYDGKECFVFGRRSSGYFDLRKLDGTRVHTSASYKKLRLLEKSNGQIIERRMAISPLP

SEQ ID NO: 19704 - protein, 250 aa, unidentified
  REGION 1..250: note = Human gut metagenome
KGEMYGHYNVRQYVLWRDDYTCQCCGAHATKKKEVRLHVHHLESRKVGGNAPGNLVTLCDRCHEKLHKGLITEKDLKKRKHRSTRDATFMGIMRKTLMQRLCSELPIPVAETRGYITKATREKLLVLPKSHTNDALAIAQGKHGFNVGYLPGIEQIDKIYTIRPVRHHNRQLHKATILKGGIRKSNQAEKYVFGYRLFDKAQFNGQDCFIWGRRTSGYFVVKTIDGKVIHNSASFKKLRLVERASNYLIA

SEQ ID NO: 19705 - protein, 426 aa, Scytonema sp.; identical to SEQ ID NO: 2715

SEQ ID NO: 19706 - protein, 428 aa, Enterococcus sp.; identical to SEQ ID NO: 4335

SEQ ID NO: 19707 - protein, 414 aa, unidentified
  REGION 1..414: note = Human gut metagenome
MPCSPAKARLLLKEKKAIVVRRTPFTIQLTIATGETKQPVSLGVDAGYKHVGLSASTEKAELYASEVELRQDITDLLSARRALRQSRRNRKTRYRAPRFDNRIRTKRKGWLAPSVENRIDAHLSRIEAVLRLLPVTKITVETASFDLQLLKNPDISGKEYQEGEQLGFWNIREYVLCRDGHVCQHCYGRSKDPVLNVHHLESRRTGGDSPGNLITLCETCHKALHRGEITLKAKRGQSFRAEAFMGIMRSEVLNRLKASHPELEVNNTYGYRTKHARIANDIAKSHCADAFCIAGNLGAERLGEFFFQKQTRRNNRQIHKLSILKGGIRKCNQAPFEVNGFRLFDKVACKGEEGFIFGRRSSGFFDVRKLDGTRISAGISCKKLHLLEKRRTYLTEIRKEEALPPLPEGRGLRA

SEQ ID NO: 19708 - protein, 499 aa, unidentified
  REGION 1..499: note = Human gut metagenome
MRYVYVLDVDGKPLMPTCRFGKVRRMLKSGQAKAVDTLPFTIQLTYKPRTRILQPVTLGQDPGRTNIGMAAVRFDGKELGRFHCITRNKEIPKLMADRMAARKASRRGERLARKRLARKLHTTAKHLNGRILPGCSEPIAVKDIINTESRFNNRLRPEGWLTPTATQLLRTHINLFRKLSGILPVTDVAVELNKFAFMQLDNPEMKKREIDFCHGPLCGTGGLEAAVKEQQDGKCLLCGKESIGHYHHIVPRSRRGSNTIANIAGLCPKCHELVHKDADTAESLTEMKTGLMKKYGGTSVLNQIIPKLVETLADLFPGHFHVTNGWNTKEFREKHHLEKDHDVDAYCIACSHLKPEETLVETEPFEILQFRKHNRAIIHHQTERTYKLDGVTVAKNRKKRMEQKTDSLEDWYVDMAKEHGKTQADAMRSRLTVIKSTRYYNTPGRMMPGTVFLYEGKRYVMTGQITNGKYYRAYGQEKRNFPAVKVRILTKNTGLVFVA

SEQ ID NO: 19709 - protein, 428 aa, Moorena sp.
MSFVFVVDTHRHPLDPIHPGRARLLLKEGKAAVLKRYPFTIVIKTAPEQPQLHPLRLKLDPGSKATGIALLDDQSGQVLFAAELSHRGAAIKKALDDRRAVRRSRRARQTRYRKPRFDNRKRAKGWLAPSLESRVFNVLTWVGRLRALCPITVISMELVRFDLQQMEHPEIAGVQYQQGTLAGYELREYLLEKWERTCSYCGKKGVPLQVEHIHPRAKGGTDRVSNLCLACEPCNIAKGTLDIAVFLAKKPDLLKKIQARAKAPLKDAAAVNSSRWALFERLKVMGLPIECGSGGRTKFNRTTRGLPKTHWLDAACVGASTPPLLQVGQVKPLLTLATGHGRRQMCLSDRYGFPRTSAKQAKKVKGFQTGDIVRAVVTKGKKRGTYTGRVAVRVTGSFNITTSQGTVQGIGSQYCQMLHQSDGYRYTA

SEQ ID NO: 19710 - protein, 420 aa, unidentified; identical to SEQ ID NO: 8060
  REGION 1..420: note = Human gut metagenome

SEQ ID NO: 19711 - protein, 379 aa, Arthrospira sp.; identical to SEQ ID NO: 2727

SEQ ID NO: 19712 - protein, 406 aa, unidentified; identical to SEQ ID NO: 10802
  REGION 1..406: note = Human gut metagenome

SEQ ID NO: 19713 - protein, 412 aa, unidentified
  REGION 1..412: note = Lachnospiraceae bacterium UBA2727
MVYVLSKTGQPLMPTENHAKVRILLKQGKAKVVHRCPFTIQLLYSSTNYTQKVTLGVDSGIKHIGLSATTKDKVLFESDVELRNDIVDLLSTRRELRRSRRSRKLRYRKPRFNNRRRSDRWLAPSVKQKVDSHITMIAKVHKILPISNIVVEVASFDIQKIKDPTISGTDYQQGEQLGFWNVREYVLFRDGHKCQCCKGKSKDKILNVHHIESRKTGGDAPNNLITLCETCHTGYHKGTVKLPKALHRGMSFKDATFMGIMRWALYGKLKAIYPDVKLTYGYITKNTRIKNGLPKDHYIDARCISGNPNAVSNGDVYYYKKVRCHNRRIHKNTILKCGYRKCNQAPYEVMGFRLFDKVQWKGQKCFIFGRRATGRMDLRLLDGTHINASVGYKTLKLLKMRSSYLVEQRKVG

SEQ ID NO: 19714 - protein, 451 aa, unidentified; identical to SEQ ID NO: 5203
  REGION 1..451: note = Human gut metagenome

SEQ ID NO: 19715 - protein, 512 aa, unidentified
  REGION 1..512: note = Human gut metagenome
MSTVYVLNKDGKPLMPTTRCGHVRHLLKEQKARVVTSKPFTIQLLYETNDVVQPLYLGIDPGRTNIGVAVVRTDGTAVFTAHLETRNREIPKLMKKRKDSRRTRRTNGRRCRRQRRAKANGTISKKCVKQATAQNGSVSKRAKEIGVIKRHLPGCEKEVLCIGIKNKEAKFNNRARPEGWLTPTANQLLQTHVNLVKKIQKLLPISDVVLEVNKFAFMQLDNPNIQKWQYQQGPLYQKASLEEAVSEMQEHHCLFCKKPIGHYHHVVPQHKNGSNTISNIVGLCTKHHDLVHKKTAWQEKLAKKKTGLNKKYGALSVLNQIIPALTKELSSLFPKHFFATNGKSTYDYRAAHAVSKDHWLDAYCIACSVLPNDVCDSDINNRVPYEFKQFRRHDRRALHKENMSRVYTLNGKKVATNRHKAVEQTTDSLEEFRQRQPDDVCKLKVKEHHPEYRNPKRNFPGCVFLVGKRTHVMQGTSGSHNGKADGYYDTNGNSYSSGKCKFVAKNKGIVFT

SEQ ID NO: 19716 - protein, 505 aa, unidentified
  REGION 1..505: note = Human gut metagenome
LYIKMTSCTCTVFPACNYAKASSSQGKHNLLLRQERLIVKEVAYMSTVYVLNKDGKPLMPTTRCGHVRHLLKEQKARVVTSKPFTIQLLYEADDLVQSLYLGIDPGRTNIGVAVVKADGTAVFTAHLETRNKEIPKLMKKRKESRRARRTNGRRCRRQRRAKANGTISKKCVKHDTAQNGSVSKRAKEIGVIKRHLPGCEKDVLCIGIKNKEAKFSNRTRPEGWLTPTANQLLQTHINLVKKIQKFLPISDVVLEINKFAFMRLDNPNVQKWQYQQGPLYQKANLEETVSEMQEHHCLFCKKKIDHYHHVVPQSENGSDTIGNIVGLCTKHHDLIHKDTAWQKKLAKKKTGLNKKYGALSVLNQIIPALTKELSSLFPKHFFVTNGKSTYDYRAAHGVSKDHWLDAYCIACSVLPNDTCDKTINSRVPYELKQFRRHDRRALNNENMSRVYTFNGKMVATNRHKATEQTTDSLEEFRQRQPNDVCNLKVKEHHPTYRNMNRNYPG

SEQ ID NO: 19717 - protein, 477 aa, unidentified
  REGION 1..477: note = gut metagenome
MQKNKTVFVIGMNRRGLMPCTPRKARVLLEEKKAKVARRTPFTIRLLYKTGCATQLITLGVDTGSQHIGIAIVSDDTVLSKSEYELRSTMEKRKLMETRKQYRKGRRYRKTRYRHPKFRFHTKRTYVEKPIKRNGHLTHWKKEKISCMSNRQAGWLPPSVQSKCDHHIRIINRYIEALPPSTRVVIEIGRFDMAHMLNPAIHGEEYQHGPLYEYENKKAYLLNLYDYKCPICGKGFGSKRVDGTPVKARMHHVLYRSKGSSDNVIVLIPVCDHCHTAEAHQEGGMLDKLRKIAEKQRLGICGLRDATMMNIVAKRLKAAFPNAYYTYGNITHADREVMHLEKSHANDAVAIAEHLDIRFFGNYTINDCDYTTLYKQARKKKRSLHEANPRKGRKQPNREAKRNAKNTKRVKNVCLLDKVVYQNSIGVVTGFSGLRCRAVKADGSYLGANAKYKQPILPVGQVAVLHHNNSWLEMRQI

SEQ ID NO: 19718 - protein, 265 aa, unidentified
  REGION 1..265: note = Human gut metagenome
MPNKVYVINKHGRPLMPCSPAKARHLLDEGKAKIKKRTPFTIQLVYGSSGYTQEVILGVDAGSKTIGMSTSTKKEEVFAVDVTPRNDVVDLMSTRREFRRARRNRKTRYRKPRFDNRVRSKHKEWLAPSVEVKIQEHITAIKMVCRILPVSKVVIETAEFDLQLLKAIEEGKPVPQGEDYQQGEMYGHYNVRQYVLWRDDYTCQCCGAHATKKKEVRLHVHHLESRKVGGDAPDNQVTLCESCHEKLHKGLITAKDFKKRKRRST

SEQ ID NO: 19719 - protein, 434 aa, Anoxybacillus sp.; identical to SEQ ID NO: 5674

SEQ ID NO: 19720 - protein, 407 aa, Moorena sp.
MKVYVRNQDGAPLMPCKEAKARKLLRAGKARVVAQVPFTIQLAWQCEGQVQDVTVGIDKGSSVTGIGCVSNGEVLLAAEIHHRRDVSEKLDTRRAHRRSRRLRKWYRPARFANRGSSTRSGRLPPSIKTNVEEVIRVVRQLPLPISQIVVEDVQVDIARLNDPTLAGSRYQDPTRLDENLRIACLMRDRYTCQHCEKRNCRLEAHHIVYQEHGGKDTLTNLLTLCEACHSGVHQGRITLNVTGVSGHLDQVAQRTMQGKAHLYATLRSSVPLTTVFGYETAAFRKSMGLAKSHTTDALCVATLVNGEVVAPECPNTYRITFRPRQTRRQFYDLPRKGQGRVRYQVNEELAGFRKGDIVRVKERWVKQINSIYSNGYVAFKRVPGEPAIARPRDCRLLERGRTVVWMH

SEQ ID NO: 19721 - protein, 458 aa, Lactobacillus sp.; identical to SEQ ID NO: 6016

SEQ ID NO: 19722 - protein, 512 aa, Halomonas sp.; identical to SEQ ID NO: 13002

SEQ ID NO: 19723 - protein, 433 aa, Moorena sp.; identical to SEQ ID NO: 16206

SEQ ID NO: 19724 - protein, 456 aa, unidentified; identical to SEQ ID NO: 3342
  REGION 1..456: note = IscB polypeptide

SEQ ID NO: 19725 - protein, 447 aa, unidentified
  REGION 1..447: note = Human gut metagenome
VPAYRIKHITKKEVPYMVYVLDIDGQPLMPTSRHRKVRKLLNNHLAKVAKRCPFTIQLLYQSTKETQPVSLGVDAGSRHIGLTATTEQKVVYQEELVPRNDVVKLLSARRALRSSRRSRKTRYRKPRFNNRVHSKHKVWLAPSVEVKIQEHITAIKRICQILPISDIHVETAEFDLQRLKAMEEGRPLPVGTDYQLGEQYDFYNTRQYVLHRDEYTCQCCGTHDNNVKLHVHHIESRQTGGDVPNNLITLCEHCHKLLHAGKTIIPKGKKRGKSYRDATFMGIMRKTLLERLKKEIDVPVEGTYGYITKYWRERAGLEKSHIHDAVCISKYPYAKTLDIYYLTKTVRHHNRQIHKSNFSKGGIRKRNQAPYLVKGFRLFDKVLYQGKSYFIFGRRATGFFDIRTLNGAKVNKGSISYKKLRIQDTANAYLKEIKAIPHMNKFTCVLA

SEQ ID NO: 19726 - protein, 406 aa, unidentified
  REGION 1..406: note = Human gut metagenome
MVYVQDIDGKPMMPTTRHGKVRRLLKDSKAVVVNTCPFTIKLMYKTSGYKQEIVLGVDAGTKHVGLSATTKSKELYSSEVILRSDIVELLSTRRESRRTRRNRLRYRKPRFNNRIKSKRTGWVAPSVRHRIDAHIRVIDNICSILPVSRIIVEVAQFDTQKIKNPDISGDEYQEGDQLGFWNVREYILARDGHKCQHCKGKSKDPILNVHHIESRKTGGDSPSNLITLCETCHKEFHKGNIKLKVSRGKSLRDAAVMGIMKWKLYEELKSRCDNVSMTFGYITKHNRIKYGIEKSHTSDAFVISRNFNAKRIERQYLKRLIRRHNRQIHKMKILKGGKKKNNQAPFEIFRFRLFDKVLYNNEILFVYGRRKSGNFNIRDFNGENPKDVSHKKLKLIRGKRHLIILK

SEQ ID NO: 19727 - protein, 465 aa, unidentified; identical to SEQ ID NO: 3603
  REGION 1..465: note = Human gut metagenome

SEQ ID NO: 19728 - protein, 415 aa, unidentified
  REGION 1..415: note = Human gut metagenome
MIYVRSKKGKALMPSERGGRIGYLLRHGKAHVVSRVPFVVQLDYESTTYTQEVSLGIDAGSKHIGVSASSEKKELLAAQVELRNDVVNLLSTRRELRRTRRNRKTRYRKVRFDNRKRKDGWLAPSIELKVESHLKVIRLVHKLLPITKTTIEVAQFDAQKIKNPDIKGEEYQQGEQMGFWNVREYVLARDGHRCIHCKGKSRDPILNVHHLESRKTGGNSPSNLVTLCETCHKAYHRGEFELKIKRGSSLRDAAVMNIMRWAVYERAKEEFGNVNLTYGYITKHTRIENGIAKTHAADAFCIAKNVHAMRLSSFFMCRCVPRHTRALHVANPKKGGIRRSCIASHKIGKSRFQRFDMVRWMGKECFIFGSTNGKPVLRDIKGIKMHENASVNIKTIKFLRRLRNNILMEEKTSES

SEQ ID NO: 19729 - protein, 431 aa, unidentified
  REGION 1..431: note = Human gut metagenome
MPNKVYIINKHGRPLMPCSPAKARHLLDEGKAKVKKRTPFTIQLIYGSSGYTQEVILGVDAGSKTIGMSVSTTKEELLSAEVKPRNDVVDLLSTRREFRRARRNRKTRYRKPRFDNRVRSKHRGWLAPSVEVKIQEHITSIKRVCRILPVSKVVVETAEFDLQLLKAIADGKPVPQGEDYQQGEMYGHYNVRQYVLWRDGYTCKCCGAHTTKKKEVRLHVHHLESRKVGGDAPDNQVTLCESCHEKLHKGLIAEKDFKKRKRKSTRDATFMGIMRKTLMQRLCSELPIPVIETRGYITKATREKLLVLPKSHTNDALAIAQGKQGFNVGYLPGIVQIDKICTIRPVRHHNRQLHKATILKGGIRKSNQTEKYVFGYCLFDKVQFNGQDCFIWGRRTTGIFTIKTINGKMIKDGISFKKLKLVEKSTSYLIA

SEQ ID NO: 19730 - protein, 340 aa, unidentified
  REGION 1..340: note = Marine metagenome
MAVFVLDKKKQPLMPCSEKRARLLLQRGRAVVHKRYPFTIRLKNRVGGEAQPLRLGIDPGSKTTGLALMHEPDSQQRHVLCLFELIHRGFQIKKALQQRAAFRRRRRSANLRYRAPRFNNRIKPKGWLAPSLQHRVDTVMAWVNRLSRLAPVTAISQELVRFDTQKLENPEISGVEYQQGTLLGYEVREYLLEKWGRECAYCGTTDTPLEIEHVVPRSRGGSNRVSNLTLSCHPCNAEKDSQTLTDFFATNKGLKKRLKANGLSADAQLERVQRQLKQPMRDASAVNATRWALFSALKTTDLPVAVSSGGRTKYNRQRLNIPKTHALDAACVGAFGKLYD

SEQ ID NO: 19731 - protein, 413 aa, unidentified; identical to SEQ ID NO: 11242
  REGION 1..413: note = Human gut metagenome

SEQ ID NO: 19732 - protein, 408 aa, unidentified; identical to SEQ ID NO: 4826
  REGION 1..408: note = Human gut metagenome

SEQ ID NO: 19733 - protein, 518 aa, unidentified
  REGION 1..518: note = Human gut metagenome
MANLKLIDELLEKTEYIYVLGIDGKPQMPTNRKVRVRSLFKSGMAKVVDTVPFTMQLLYENKPVLQPITIAEDPGRTNIGAAVLTQFGDLVFSAVVETRNKSIKKLMSDRKAHRQASRHGERKARQRLAKKYKSMIKAGMIMRKLPQYAADKFVTCKVIKNTEARFCNRKRMPDWLTPTVNHLVQTHINLIKKVEKYLPITDVAIEVNRFAFMQMENPDASGVDFQNGPLKGFDDVKAAIREQQHGKCLMCKNDIEHFHHIIPRSKGGSNTIQNQVGLCKKCHAKVHTDAEFQAKLKDKKEGLIKKYGALSALNQAVPFICKELLKIYGAEHVHFCTGKDTSLIRSSLGYDKTKDNQMHEVDAYCICLAAIGADKTKRPDFNNVFKIKQFRRQDRSIINYQRERTYYLDGKKIATNRKPRFEQKGDALSDWYSEQVKLKGKKYADKLTGRITVKKSTRGYNSKDRVMPGTIFYYGGKRLVLSGQTTRGKYYKAYGDPKTNYPAAKCQIYKHNEGLAFV

SEQ ID NO: 19734 - protein, 412 aa, unidentified; identical to SEQ ID NO: 5980
  REGION 1..412: note = Human oral metagenome

SEQ ID NO: 19735 - protein, 457 aa, unidentified; identical to SEQ ID NO: 4299
  REGION 1..457: note = Human gut metagenome

SEQ ID NO: 19736 - protein, 415 aa, Moorena sp.; identical to SEQ ID NO: 3370

SEQ ID NO: 19737 - protein, 458 aa, Acidithiobacillus sp.; identical to SEQ ID NO: 13713

SEQ ID NO: 19738 - protein, 420 aa, unidentified
  REGION 1..420: note = Human gut metagenome
MQYVYVLNKHGEPLMPCSPGKARLLLKQQKACVVKRTPFTIKLLFGSAGYKQPITLGVDAGSKHVGLSASTEKRELYSEEFTPRSDVVELLSTRRQNRRSRRNRKTRYRVPRFDNRVHNKHKGCLAPSVEVKIQEHITVIKHICKILPISLVRVETAEFDTQRLKAMLAGKPLPVGTDYQLGEMYDEYNVRQYVLKRDHYTCQCCGTHNTAKKVVKLHVHHLESRKTGGNAPSNLVTLCTTCHKNLHKGRVTIDGKERGKPLRDAAFMGIMRKTLMVRLKEELPIPVQGTYGYITKMRREQNDIKKSHTNDARCIGKHPLAEPCSVCYRTKAIRHHNRQTHKANFSKKGIRKRSQMPYLVEGFRLWDKVLYKGQECFVSGRRSSGSFALKKLDGTSISKGVTFKKLRLLEPATNYLIERM

SEQ ID NO: 19739 - protein, 472 aa, Moorena sp.
VEQGMAVFVLDRQGRPLMPCSEKRARLLLARGRARVHHLVPFVVRLIDRSVNDADFQPLRLKLDPGSKTTGLALVRDSEVVDAATGEVARDAAVLSLIELVHRGRQISESLTARRNMRRRRRGNLRYRAPRFLNRTQPKGWLAPSLQHRVNTSMAWVERLQRWAPIAAFSCELVRFDMQALQNPEICGLQYQQGTLFGYEVREYLLEKWGRKCCYCDVQGVPLNIEHLLARARGGSNRITNLALACVPCNTQKGAQPIENFVIDKTRLARILAQTKRPLRDAAAVNSTRWALANALKETGLPLELASGGRTKFNRSHLGIPKTHSLDAACVGDVNAVHSWTKPTLVIKCTGRGSYQRTRLTKHGFARGYLMRSKRVQGFATGDFVRAKVPSGKKVGTHQGRVAVRASGSFNIQTHSLVIQGISYRHCTVLQRADGYGYSWIASIEGEAGTGAARRPALSLPGLKAEVSRATE

SEQ ID NO: 19740 - protein, 414 aa, unidentified
  REGION 1..414: note = Human gut metagenome
MPCSPAKARLLLKEKKAIVVRRTPFTIQLTIATGETKQPVSLGVDAGYKHVGLSASTEKAELYASEVELRQDITDLLSARRALRQSRRNRKTRYRAPRFDNRISTKRKGWLAPSVENRINAHLSRIEAVLRLLPVTKITVETASFDTQLLKNPDIAGKEYQEGEQLGFWNIREYVLCRDGHVCQHCYGRSKDPVLNVHHLESRRTGGDSPGNLITLCETCHKALHRGEITLKPKRGQSFRAEAFMGIMRWEVLNRLKASHPELEVNNTYGYRTKHARIANDIAKSHCADAFCIAGNLGAERLGEFFFQKQTRRNNRQIHKLSILKGGIRKRNQAPFEVKGFRLFDKVVCKGEEGFIFGRRSSGFFDVRKLDGTRISAGISCKKLHLLEKRRTYLTEIRKEEALPPLPEGRGLRA

SEQ ID NO: 19741 - protein, 324 aa, Moorena sp.
ISGELKFRKDISEKLAERRRYRRNRRNKLRYRQPRYSNRKRTETLSPSVNQKLQTFLDFVNMVKRILPISSICVEVSGFDTQKMQNAEISGTEYQHGELQGYEVREYLVEKYHRTCAYCGKTNVPLQVEHIVPKSRGGSDRVSNLTLSCQKCNQKKGNMTADEFGYPNVQNKAKQSLKAPAFMNTIRWLLVDLLHSDYTYGYNTKHNRIKLGLEKSHINDAFVIADGTNHERVRPYLGIQTRRNNRALQTNRNGFKPSIRKQRYPLGPKDLVFLKFGSLICTVKAVFNYGKWVRVVDAIGNIINVNIKNVELIKYGKGVQLQFV

SEQ ID NO: 19742 - protein, 465 aa, Nocardiopsis sp.
VRGETTHISPDVGGVTSQPLAGERPRERHPSVFVLDKHHAPLQPCHPARARKLLNKGRAVVARHTPFTIRLKDRTIAESEVDGVEIGVDPGSKHTGIAVFTQQAGERCGRYGIQLDHRGARVRKKMGQRSAYRRRRRTANLRYRAPRFFNRTRPQGWLPPSLKHRVETTTGWVDRLARWAPVKAVHVERVAFDTHALSAGRPLEGAEYQRGTLHGFEVREYLLAKFDRACVYCGATNTPLNLDHVHPRSRSGSDRVSNLVLACVPCNQAKGDRPVEEFVTDKLALARILARSKAPLRDAAAVQSTRWALWRALDQRLPTHVGSGGRTKWNRTRNHLPKSHTLDALAVGKVDTITQTTNRVLIAGCAGRGSYARTRPDKHGFPRLRLPRTKGFFGFTTGDLVRAVVPQGKKTGTHTGRVAVRASGNFNITTTHGTVQGIRHKHVRLLQRADGYGYTWKGEGVSSRP

SEQ ID NO: 19743 - protein, 461 aa, unidentified
  REGION 1..461: note = Wastewater metagenome
MPNPIQVCVLDKQKKPLMPCHPARARELLREGRAVVHRRVPFTIRLKDRVGGDVQPVRLCEDPGSKKTGIAVVRETPAAETSLDANGDDVSGPTRTVLFKIELEHRGAAIHKAMESRKSLRHGRRSRKTRYREQRYNNRASSRRSGRLPPSLKHRVETTMTWTRRLSRLVPVTAISVERVRFDTQLMENPEISGVQYQQGTLRGYETREYVLEKWGRSCAYCDAENVPLQLDHVRPKSRGGPSRPTDFVPACGLCNQRKGAQPVETFLKRDPKRLAKIMAGLKAPMRDAAAVNATRWALDAELRTIGVPVEAASGGRTKWNRHRFDVPKTHANDAVCVGRVGGVAMLDRPTLYVRCTGRGSYCRTRVTASGFPRGYLMRSKSSHGFRTGDIVRAVVPSGKKRGTHTGRVAVRATGNFAVFTSGGRVDGISHRHCRVVQRADGYDYAWTEKKRAEKSEAATL

SEQ ID NO: 19744 - protein, 434 aa, Escherichia sp.; identical to SEQ ID NO: 5780

SEQ ID NO: 19745 - protein, 402 aa, unidentified
  REGION 1..402: note = Human gut metagenome
MVTVQQSTHHLPFGRVFIRRNLFMVYVISQDGKPLMPCSDPIARLLLKQGKAKVKKREPFTIKLTYETTNYTQGLTLGVDTGSGTIGTAVSKDNGDIVYMSEVVVRNDITDKMTQRAKYRRNRRNRKTRYRKARWLNRASSIKKDRFSPTMQSKLHSHVREIEYIQSILPVTEMVFETGQFDMQLMKNPSLANPKVRPWGYQKGANYGFENTKAMVLNRDNYTCQCCKGKHKDSKLEVHHIVFRSQGGSDEESNLLTLCHTCHKDLHSGKINPKLSGKLKGNLKYATQMNSIRKQLFRFYPNAIETFGYVTKANRLHLGVDKEHYYDACTIATQGNAFNVKSNLYKKKCVSDGDFQKTKGIRSEQPIVTDKICGFRKFDKVRYFGNDYFIKGRMSTGYAILM

SEQ ID NO: 19746 - protein, 512 aa, unidentified
  REGION 1..512: note = Human gut metagenome
MSTVYVLNKDGKPLMPTTRCGHVRHLLKEQKARVVTSKPFTIQLLYETDDVVQPLYLGIDPGRTNIGVAVVKADGTAVFTAHLETRNREIPKLMKKRKDSRRTRRTNGRRCRRQRRAKANGTISKKCVKQDTAQNGSVSKRAKKIGVIKRHLPGCEKEVLCIGIKNKEAKFSNRVRPEGWLTPTANQLLQTHINLVKKIQKFLPISDVVLEVNKFAFMQLDNPNIQKWQYQQGPLYQKANLEEAVSEMQEHHCLFCKKPIAHYHHVVPQSENGSDTIGNIVGLCTKHHDLVHKDTEWQKKLAKKKTGLNKKYGALSVLNQIIPALTKELSSLFPKHFFATNGKSTYDYRAAHGVSKDHWLDAYCIACSVLADDVCDNNINSHVPYELKQFRRHDRRALHKENMSRVYTLNGKSVATNRHKATEQTTDSLEEFRQRQPNDVCKLKVKEHHPEYRNPKRNFPGCVFLVGKHTHVMQGTSGSHNGKADGYYDTNGNSYSSGECKFVAKNGGIVFA

SEQ ID NO: 19747 - protein, 411 aa, unidentified; identical to SEQ ID NO: 3277
  REGION 1..411: note = Human gut metagenome

SEQ ID NO: 19748 - protein, 427 aa, Eubacterium sp.; identical to SEQ ID NO: 3021

SEQ ID NO: 19749 - protein, 413 aa, Blautia sp.; identical to SEQ ID NO: 3616

SEQ ID NO: 19750 - protein, 262 aa, unidentified
  REGION 1..262: note = Human gut metagenome
LTIATGEAKQPVSLGIDAGYKHVGLSASTEKAELYASEVELRQDITDLLSARRALRQSRRNRKTRYRAPRFDNRIRTKRKGWLAPSVENRINAHLSRIETVIRLLPVTKISVETTSFDMQLLKNSDIAGKEYQESEQLGFWNVREYVLFRDGHVCQHCHGRSKDPVLNVHHLESRRTGGDSPGNLITLCETCHKELHRGEITLKAKRGQSFRAETFMGIMRWEVLDRLKASHPKLEVQNTYGYWTKHARMLSASPAILAPKG

SEQ ID NO: 19751 - protein, 452 aa, Lactobacillus sp.; identical to SEQ ID NO: 19430

SEQ ID NO: 19752 - protein, 470 aa, unidentified
  REGION 1..470: note = Human gut metagenome
LSIKPLINIGEGVIYSSICTGLSLQTYQKRKEVPYMVYVLDIDGQPLMPTTRHGKVRRLLNNHLAKVVKRCPFTIQLLYQSTKETQPVSLGVDAGSKHIGMAATTEKKVVYQEELSPRNDVVKLLSARRTLRRTRRNRKTRYRKPRFNNRAHSKHKGWLAPSVEVKIQEHITAIKRICQILPISEIHVETAEFDLQRLKAMDEGSPLPVGIDYQLGEQYDFYNTRQYVLHRDGYTCQCCGTHDNNIKLHVHHIESRQTGGDAPNNLIILCEHCHKALHEGKLELPKGKKRGKSYRDATFMGVMRKTLLERLKKEIDVPVEGTYGYITKYWRERAGLEKSHIHDAVCISKYPYAKPLDTYYLTKAVRHHNRQIHKSNFSKGGIRKRNQAPYLVKGFRLFDKVLYQGKSYFIFGRRATGYFDIRTLDGTKINKGSIGYRKLRIQDTAKAYLTETKKEARAIPHMNEFTCVLA

SEQ ID NO: 19753 - protein, 395 aa, Moorena sp.
MQNYVFVIDTNKQPLNPISPKKARRLLNKGKAAVFRMYPFTIILKTAVDNPTISPCQIKIDPGSKVTGFALVQNNQVIWGMELEHRGGLIKKKLESRKTVRRGRRNRHIRYRKPRFLNRKRSEGWLPPSLEHRILTIETWVKRLIKFCPVNEVWVERVKFDTQKMQNPEINGIEYQQGELAGYEVREYLLEKWGRECTYCGKQSVPLQIEHIHPKSFGGSNRVSNLCLACEKCNQRKGNKLIEEFLKKKPNLLHKIKTKAKQPLPDAAAVNATRNKLVKVLKRIKPIVTGTGAQTKYNRTKLGFPKEHWIDAACVGNIETLTLKISQPLLVTCKGQGGRQKAALNKYGYPIRHNPLKPIKGWCSGDIAKNILTGEFGRVNPRSKSNSFNYTVPGK

SEQ ID NO: 19754 - protein, 451 aa, unidentified; identical to SEQ ID NO: 5203
  REGION 1..451: note = Human gut metagenome

SEQ ID NO: 19755 - protein, 478 aa, Pantoea sp.
VAVFVLDIHGKALMPCTEKRARLLLDRGRARVHRLLPMVVRLVDRQADDCEFQPLRLKIDPGSKTTGLALVREVAAVDALTGEVQLGVAVLNLLELVHRGRQISEAMTARRQMRRRRRSNLRYRAPRFLNRGGDRTGWLAPSLQHRVDTTMTWVRRIQRWAPVRAISSELVRFDMQALQNPEIDGIEYQQGTLFGYELREYLLEKWGRQCAYCGARNLPLQIEHIRARAYGGSNRASNLTLACACCNQKKAARSIEDFLAQDQKRLNAILAQAQKPLRDAAAVNTTRWALANALQATGLPVELASGGRTKFNRSALGVPKTHALDAACVGQVHSIENWNSPTLALKAMGRGSYQRTRLDKFGFPRGYLMRSKRVHDFATGDMVRADVPKGLKAGVHTGRVAIRATGRFNIQLHQAGVSAVVQGIHYRHCRIVQRNDGYGYFLNPANHTKRDQVRPKASDASHPALYLPGMNAEVSRAL

SEQ ID NO: 19756 - protein, 476 aa, unidentified
  REGION 1..476: note = Human gut metagenome
LEAVGAEDVSHPGLPGKYKHKGGQLMSVAVISKTGERLMPTSEYRARKLLKSGKAIKHSYHPFTIQLTERKTGNIQPIELCMDTGYIHIGISVKSEKHEYLAEQIDTLTDERGRHDACRMYRRQRRSRKRYRQARFNNRKRDQGWIAPSLEHKKKIHIQAISRINKVMPITDITIEMGNFDTQVLKAKEEGKPLPQGAEYQHGERYGIATLREAVFARDGYKCQCCGRTIKDGAILHVHHIKYRSQGGTNSMSNLATVCDKCHTPKNHKPGGKLYNWKPKLPSFKGATFMTTIRWQLYSEVKALFSDIDIYIAYGAATKERRRELNIDKSHINDAFVMGQFHPRHRIKAVLYKKKRRNNRCLEKFYDAKYIDSRDGKKRSGQELFNGRINRNHKKDSENLHQYRLQKVTAGKRTVRKQHYSVQPHDIIIYESRKRETTGCHCNGARVMLLPDKKSVSIKKIKIYRYAGGYFKSTFN

SEQ ID NO: 19757 - protein, 421 aa, unidentified
  REGION 1..421: note = Human gut metagenome
MVYVLDITGQPLMPTDRHGKVKHLLKDGKAKVVKRCPFTIQLLYTTTTYTQEITLGVDAGSKVIGLSASTPRKELYSSEVTLRNDIVKLLSLRREYRRSRRNRTTRYRAARFNNRVHSKNKGWLAPSIENKINTHIKVVADIHKILPISKIVVETASFDIQKIKNPNISGEEYQQGEQLDFWNVRQYVLFRDNYTCQCCKGKSKDNRLAVHHIESRQTGGNAPNNLITLCITCHEKYHKGKIKLPNTIKRDKIFKDAVFMGIMRWAFYERLKNIYPNIRMTYGYITKNTRIQHNLPKTHYTDALCISGNPLAKPLEVLYIQKAIRTRNRQIHKATISKGGIRKLNQAPKYVFGFQLYDKVLYKGKECFIFGRRSSGSFDIRTLDGTKISPGVSHKKLKLLEKRKTILTERVFKNQEGGKQG

SEQ ID NO: 19758 - protein, 427 aa, unidentified
  REGION 1..427: note = Human oral metagenome
MFVYVISKDGQPLMPTERFGKVRRLLKENKAKVVRSCPFTIKLLYEPETKAVQEVTLGQDTGSKYVGTACISNDKILYQSEVTLRNNIKKKMDSRRGFRRNRRNRKTRHRKPRFLNRANSTKKDRLPPSVRSMVQSHVDEIEFCKKILPISKIILEVSQFDTALVKNSNLINEKVKHWGYRKGFNYSYSSRREAVLHRDNYTCQCCGKKHVRLEVHHIIFRSQGGTDDENNLITLCKECHDAIHNGTLILTKKPRRLNLKYATQMSIIRSQLLKLYPEAIETFGFVTKENRNNLNLQKEHYIDACVIASGGKEFKQLDWTFKKRRVPRQNRQLCKGIRGEKKIPTGKMFGFRRYDKVKYLNEICFVKGRRSRGVFVLMDIDNKTIDFRDRGGRLNVSYKLLERLNTRRSVLCIGQISLNCDKGVKRC

SEQ ID NO: 19759 - protein, 428 aa, unidentified
  REGION 1..428: note = Human gut metagenome
LKVFVLNMRGRPLMPCSPARARHLLKAGKAVVRRRTPFTIQLRIATGETKQSVTLGVDAGAKHVGLSAATEKEEVFASEVELRQDITGLLAARLSLRRDRRHRKTRYRAPRFLNRVRSKHKGWLAPSVENRIQAHMSRIDAVCRLLPVTKIVIETASFDIQKIKDPSVEGTDYQQGDQLGFWNVREYVLFRDGHVCQHCHGHAKDKILNVHHLESRQTGGDAPNNLITLCETCHKACHAGKIKLKVKRGQSFRAEAFMGIMRWTLLDRVRKAHPGLPVENTYGYLTKNTRITLGLPKAHCVDAYCIAGNLKAVRRGVCLHQRQVRKHNRQIHKCTVLSKTLKDGTKIGYRKLNQTPHLVKSFRLFDKVRCLGQTGFIFGRRSSGYFDVRRLDGVKLSSGISYRKLTLLEKRSTYLTELRKEDGASSPV

SEQ ID NO: 19760 - protein, 512 aa, unidentified; identical to SEQ ID NO: 2792
  REGION 1..512: note = Human gut metagenome

SEQ ID NO: 19761 - protein, 407 aa, unidentified
  REGION 1..407: note = Human gut metagenome
MPDKVYVISRLGHPLMPCSPAKARHLLDDKKAKVVKRMPFTIRLLYGSTKYIQPIILGVDAGSKTIGLSASTAKEEVFAAEVMPRNDVVENLSTRREFRRARRNRTTRYRKPRSDNRVRSNHERWLAPSVKVKIQEHITSIKRVRTILPISKVVIETAEFDLQLLKAIQEGKPIPEGEDYQKGEMYGSYNVCQYVLWRDNYTCICCGVRGTPKNPVRLHVHHFESRKYGGNAPDNHGTLCDDCHKKFHLGIITDVKLKTRRRQSTRDAAFMGIMRKTLMWRLRTELFIPVAETKGYITKATREKLLVLPKSHTRDALAIAQGRHGFGIKEYAYVEPANHIYTVRPVRHHNRQLHKASILKGGIRKRNQALSISLVSDSTIRFSIREKRVSCGGGEQAEPFFFEQLTV

SEQ ID NO: 19762 - protein, 465 aa, unidentified
  REGION 1..465: note = Clostridia bacterium
MNTCVCVLSNSGERLMPTFRLGKVRRLLKDGKAKIVKHHPFTIQLLYDSKTNTQPIEICEDVGYNYIGISVKSESHEYVSAQYDTLQDEKEHHDDCRMHRRTRRNRLRYRKPRFDNRKRGEGWLAPSLKHKKELNVNVVKMYCTVMPITHATVEVGSFDTMLVKAIQEGKVIPEGADYQKGPRYNLATLREAVFYRDNYVCKICGRKATEGAILHMHHMFYWKGRHGNSLNELLTVCEKCHTPANHQKSGKLYGFGEKIKFADLSGAAFMNTVRWQIVNELYVAFGKPFVTITYGAMTKEKRIALQLEKSHNNDAYAMGEFHPNLRCMFEHYEKARRNNRILEKFYDSRYIDIRTGEIATGKELFNGRINRNHKKDSENLHKYRGKRTYAGHRALLRKKVNLNPGDLVSLNGENLIVHSTHTKKNGAVNVEFETPAKSGQKSASLKKLKIVKAANSIHPAWKKIS

SEQ ID NO: 19763 - protein, 456 aa, unidentified; identical to SEQ ID NO: 10734
  REGION 1..456: note = Human gut metagenome

SEQ ID NO: 19764 - protein, 411 aa, unidentified; identical to SEQ ID NO: 5658
  REGION 1..411: note = Human gut metagenome

SEQ ID NO: 19765 - protein, 426 aa, unidentified; identical to SEQ ID NO: 6377
  REGION 1..426: note = Human gut metagenome

SEQ ID NO: 19766 - protein, 413 aa, unidentified; identical to SEQ ID NO: 3295
  REGION 1..413: note = Human gut metagenome

SEQ ID NO: 19767 - protein, 417 aa, unidentified
  REGION 1..417: note = Human gut metagenome
MPCSPAKARLLLKERKAIVKRRTPFTIQLTIATGEAKQPVALGVDSGYKHIGLSATTEKAELYASEVELRQDITDLLSARLALRRSRRSRKTRYRAPRFDNRVASKREGRLAPSVENRIAAHMSRVEAVMRVLPVTAITVETAVFDTQLLKNPDITGAAYQQGEQLGFWNVREYVLFRDGHVCQHCRGKSKDPILNVHHIESRRTGGHAPNNLITLCETCHKAFHRGEIKLKVKRGKSFKAKTFMGIMRWTLFERLKKAHPELNVHNTYGYLTKHKRISYGIAKSHCADAYCIADNLSAKRLKGFFFQKQTRKHNRQIHKLSILKGGLRKKNQAPYELKGFRLFDKVICKGEEAFIFGRRTSGSFDVRRLDGTRISAGINYKKLRLLEPRTTYLTEFRKEAALPPLHKCRGFRAEFL

SEQ ID NO: 19768 - protein, 451 aa, unidentified; identical to SEQ ID NO: 2436
  REGION 1..451: note = Human gut metagenome

SEQ ID NO: 19769 - protein, 458 aa, unidentified
  REGION 1..458: note = Human gut metagenome
LMPTSEREARLLLKHGKASVYRKVPFTIKLNYKTGSTTQPGYLGIDTGSQHIGVSVVREDGTVLHKEEIGLRDSMSKRKLMESRSSLRRGRRHRKTRYRHPKWRLKAKRVYYETPDRKGRHWKKQKITFASKRPQGWLPPSLQSKTDHHIQWIKKLQDLLPDGYRLSIELGRFDPARMKDTEIHGDLYQKGPQYDYENVRAYVLDRDRYTCQVCGKKGGKLHIHHILYRSHGATDNPQYMATICSDCHSTENHQPGGILYQWMQEQKKFTRGLRDATFMNILRKRLMKAFPKATFTYGNITKADREKLKIPKSHGNDATAIAIVKTGIMTVKDNEPVIYIQQVRRKKRSLHEETPRKGRKEPNRKASRYNKNTKAVTVTKRKNKKRISITGCLFDRVELNGKKGWISGFTDKSCYIKDENDQYIRISPKYKQVSLSKLKILHHCGNWVIGARRSLGKG

SEQ ID NO: 19770 - protein, 455 aa, unidentified
  REGION 1..455: note = Human gut metagenome
MVFVLDRHHKPLMPCHPARARRLLGKGRARIHKLYPFTIRLVDRELKDSTVQPVVLKLDPGSKETGMALVREDETKTHHALYFVNLKHRGSEIKQSLLQRSSFRRSRRSRNLHYRAPRFLNRTRPQGWLAPSLQHRVDTTLSWVERLRKLAPVATLEMELVKFDTQKMQNPEIDGVAYQQGELAGFEVREYLLEKFGRKCIYCGAEGVPLNIDHIVPKSAGGSNRVSNLVLACVDCNQKKNNLPFEVFLKGDKAKINRIRSQLKTPLKDAASVNTTRWQLFEALKLTGQPLTTATGARTKYNRHQFGVPKEHWLDALCVGETAAVRGWQPLGVLVVKCTGRGAYKRTRLTKDGFPRGYLTRTKRFFGFGTGDMVVATVFASKKKGSYKGRVAVRKSGSFAIQTASRKVDGISYRYCRLLSRADGYGYSWHSSKSLINSTKETALLPRINTQVSAP

SEQ ID NO: 19771 - protein, 442 aa, unidentified; identical to SEQ ID NO: 19369
  REGION 1..442: note = Human gut metagenome

SEQ ID NO: 19772 - protein, 452 aa, unidentified
  REGION 1..452: note = Sediment metagenome
MSMQTLQREFKNVPTDASLVRSSTNLSLNRLETVSEGDTVLSCNNPEVNLRKQVSGLTVIVPVLSLEGSPLMSCTPAKARHLLEKRRAYVVKLNPFIIRLNFKCENKIQEINIGVDAGYKNIGYSAITNTKEILSNEIILDDKTKSRMNERKMYRRNRRYRLRYRKSRFNNRVKPDGWLPPSIKRKFDAHINFINGLKKILPIKKVTVEIGNFDIQKIENPDISGFQYQQGDLYGYYNLKFYLLEREKGKCQLCGKKFTKEDRPHMHHIKQRSEGGTSRAEGIALIHKSCHKNLHDKKLFHKLKPARVYKAETFMSIVGGMFKKFLDCDVTYGYKTCAKRKELGLEKSHVNDAFVIAGGTVQKRCLSGKIEQKRINNRTLQTNRKGFIPSIRRSRHRIQNRDFIWIGDKKYLSGGVACRGSQVYYFDGDVKKLISSKRVEKVYSTDSLVWLN

SEQ ID NO: 19773 - protein, 512 aa, unidentified; identical to SEQ ID NO: 17848
  REGION 1..512: note = Human gut metagenome

SEQ ID NO: 19774 - protein, 465 aa, unidentified; identical to SEQ ID NO: 8068
  REGION 1..465: note = Human metagenome

SEQ ID NO: 19775 - protein, 424 aa, unidentified
  REGION 1..424: note = Human gut metagenome
MRVFVFNMRGRPLMPCPQRKARLLLRENKAMIYKYHPFTIQLTYTTGETKQDCHIGIDTGSKYIGAAVRSEDKVFWKGEIELRQDIRSNLDTKRIYRRSRRNRKTRYRKPRFLNRKRRDEWLPPSLQSRINHTFHWIDTLSSLVPNPILHIEVGKFDVAKMINPEIHGVDYQHGQTYGFFDERYFVFARDNYTCQCCGKSKNKILNTHHIIYRSNGGTNRVDNLITVCTDCHTSQNHRKGGIFYQWQEQHKKVKQYKEPPFMNTLRKRIFVAYPDAEITYGSETTPKRKAMKLDKAHYNDAIVISGINEIKENPEEWLLIKQFRKKKRSLHEATARKGRKKPNRNQTRNSKNTPYYKGFYLNDKVSVFGKSGYITGFTSNAAYIKDENNDYITLPNKTYKQVSINKMKLECHNNNWQYIIKNAV

SEQ ID NO: 19776 - protein, 411 aa, unidentified; identical to SEQ ID NO: 6901
  REGION 1..411: note = Human gut metagenome

SEQ ID NO: 19777 - protein, 422 aa, Sutterella sp.; identical to SEQ ID NO: 3542

SEQ ID NO: 19778 - protein, 535 aa, unidentified; identical to SEQ ID NO: 6116
  REGION 1..535: note = Human gut metagenome

SEQ ID NO: 19779 - protein, 422 aa, unidentified; identical to SEQ ID NO: 7063
  REGION 1..422: note = Human gut metagenome

SEQ ID NO: 19780 - protein, 425 aa, unidentified; identical to SEQ ID NO: 13706
  REGION 1..425: note = IscB polypeptide

SEQ ID NO: 19781 - protein, 420 aa, unidentified
  REGION 1..420: note = Human gut metagenome
MQYVYVLHKHGEPLMPCSPGKARLLLKQQKACVVKRTPFTIKLLYGSVGYKQPITLGVDAGSKHVGLSASTEKRELYSEEFTPRNDVVELLSTRRQNRRSRRNRKTRYRAPRFDNRVHSKHKGWLAPSVEVKIQEHITVIKRICRILPITLVRVETAEFDTQRLKAMLAGKPLPVGTDYQLGEMYDEYNVRQYVLKLDNYTCQCCGAHPTTKKPVKLHVHHLESRKVGGNAPSNLITLCTACHDNLHKGKVTLDGKERGKTLRDAAFMGIMRKTLMARLKERLPIPVQGTYGYITKMRREQNDIKKSHVNDARCISKHPLAEPCSVCYRTKAIRHHNRQTHKVNFSKGGFRKRSQMPYIVKDYRLWDKVLYKGQECFVSSRRASGSFALKKLDGTSISKGVTFKKLWLLEPATNYLIERM

SEQ ID NO: 19782 - protein, 459 aa, unidentified; identical to SEQ ID NO: 16178
  REGION 1..459: note = Human metagenome

SEQ ID NO: 19783 - protein, 435 aa, Fervidicola sp.
LLVFVLNKHGKPLMPCKPSKARKLLKQGKAKVVKKEPFTIQLLYGSSGYKQKCIVGIDAGSKNIGIAVTTEDGRVIYKAQVELRQDIKENIETRRRLRRARRNRKTRYRKPRFLNRRRPEGWLPPSIRARVEAHYNLIKKLAQIIPITEIRVEVTQFDVQAILNPNIHGEEYQKGRMHGFDSVKEYVKIRDGFKCHYAKLRPDIPCSGKLTVDHIIPRSKGGADNPSNLVCCCEAHNTAKGHMNYEQFTGQQPPKIEDFRPVAFMNVLKDYLVPMLQKIASTGYIFGLYTRRTRREWGLGKSHIDDAMAIAGIKPRWQDNVWYYIKQVRKKKRSLHEEIPRKGRKEPNKEAKRNSKNTKEIAINGKKWCLWDKVYISDIDKTGFISGFTNNWVYIQDIYGNYLQLSDKYKQINPKKLQLMYRNNNYICERFISTL

SEQ ID NO: 19784 - protein, 552 aa, Streptomyces sp.
MTTFPAGEQTHQAVLPQQPALEPVRADTPGSRDETAHGHPVTARGTGREHGRGETDGTGTEACRRHAKRAATVAQAAENGSGDAPTHTPEYAGGSGAGRVFVLSGDGHPLMPCHPARTRELLRKGRAVVVRQTPFTIRLKDRTLAESAVDGLQLRIDPGSKGTGLALTDEKKETDTDGRVVTVRRGLFSIELQHRGDQIHHTMGQRAGYRTRRRSANCRYRAPRSNNRGVAQGWLPPSLRHRVDTTFSLANRLCRFAPITEIHLERTAFDTHSMSAGRRLHGTEHAQGPLAGSTTRSYLHARWNSACAYCDAVGVPLNIDHVRPRSQGGSNRITNLVLACVPCNKAKGNSSVESFLAHRPDRLAKILGQLKTPLRDAAAMNSAQERLTEALETLGRPVHAWPGHLTMANRVTTGLGKTHTLDALSVGHLDHEGGAAIVRFPDRVLVAKATGRGSYARTTPDKYGFPRLRRSRTKQHFGYVTGDLVRAVIPSGKWAGTWAGRISVRARGQHSLTTPRGRVNVSHWNLQLLQRGDGYGYSTRPEAPLQASPKNS

SEQ ID NO: 19785 - protein, 434 aa, unidentified; identical to SEQ ID NO: 5659
  REGION 1..434: note = Fermentation metagenome

SEQ ID NO: 19786 - protein, 427 aa, Nostoc sp.; identical to SEQ ID NO: 2670

SEQ ID NO: 19787 - protein, 480 aa, unidentified; identical to SEQ ID NO: 2726
  REGION 1..480: note = Human gut metagenome

SEQ ID NO: 19788 - protein, 404 aa, unidentified
  REGION 1..404: note = Human gut metagenome
VGYNYIGISVKSESHEYVSAQYDTLQDEKEHHDDCRKYRRTRRNRLRYRKPRFDNRKRSEGWLAPSLEHKKQLNIRLIERYVSVIPITRATVEVGSFDTMLLQAIQKGESKPEGVDYQKGPRYNLATLREAVFYRDNYTCQVCGRKIADGAILHMHHMFYWKGRHGYQLDELVTACEKCHTPANHQKGGKLFGFGEDKEFANLSGAAFMNTVRWQIVNELYAAFGKNFVTVTYGAMTKEKRIALHLEKSHNNDAYAMGNCHPAHRCEFGHYEKVKRNNRILEKFYDSQYIDTRTGELTNGKSLFNGRISRSHKKDSENLHKYRGKRICKGHRALRRKKLALNPGDLVSLNGEILVVHGTHTKKNGSVNVEFKTPSRGGKKSASLKKLKIVKTSNLMHSAWTKVA

SEQ ID NO: 19789 - protein, 412 aa, unidentified; identical to SEQ ID NO: 3155
  REGION 1..412: note = Human gut metagenome

SEQ ID NO: 19790 - protein, 462 aa, Moorena sp.; identical to SEQ ID NO: 4520

SEQ ID NO: 19791 - protein, 570 aa, Streptomyces sp.; identical to SEQ ID NO: 3191

SEQ ID NO: 19792 - protein, 456 aa, unidentified; identical to SEQ ID NO: 11534
  REGION 1..456: note = Human metagenome

SEQ ID NO: 19793 - protein, 451 aa, unidentified; identical to SEQ ID NO: 3061
  REGION 1..451: note = Human gut metagenome

SEQ ID NO: 19794 - protein, 408 aa, unidentified; identical to SEQ ID NO: 3192
  REGION 1..408: note = Human gut metagenome

SEQ ID NO: 19795 - protein, 480 aa, unidentified
  REGION 1..480: note = metagenome
VFPLWEINFIWRIILKMQRVFVLDKNKKPLMPCTSARARFLLSKKEAAIFKHYPFTIILKKKTNNIKQNIAYKADQGSKITGIALVAEFKKSKTVIFAANLEHKGYQVSEKLESRAASRRSRRSRKTRYRKPKWTNTMSKKQLAHINQKQKGWLAPSIWSRINNITNLCFKLNKLSPISTIALENVRFDTQLMENPDIQGKEYQQGTLFEKEVKEYLLYQFNHKCGYCNGLSKDPLLEKEHIVPRSKKGSNRLSNLAIACRTCNEDKNNLLPQDWLLKLKKSKSKINKERFKRFEKISKGLKPSLRDAALMNIIRYKLVEELSQFSLPIELGSGGLTKFNRTNQNYPKDHWIDASCIGKSGEKIIIPSRLTPLNIKAIGRGSRQMCRVDKYGFPRTKPKKKGDCFGFKTGDLVRAIVTKGKKEGIYIGRLAVRESGNFNISTKNGVVQGISYRYCRLLQRNDGYNYSNHINKITTGGKQG

SEQ ID NO: 19796 - protein, 406 aa, Geobacillus sp.; identical to SEQ ID NO: 3747

SEQ ID NO: 19797 - protein, 502 aa, unidentified; identical to SEQ ID NO: 6341
  REGION 1..502: note = Human gut metagenome

SEQ ID NO: 19798 - protein, 438 aa, Lactobacillus sp.; identical to SEQ ID NO: 4646

SEQ ID NO: 19799 - protein, 460 aa, unidentified
  REGION 1..460: note = Human gut metagenome
MPLLPVSERKARLLLDDGKASVYRKVPFTIKLNYKTGSTTQPGNLGIDTGSQHIGVSVVREGGTVLHKEEIGLRDSMTKRKLLEAKASLRRGRRYRKTRYRHPKWRSKTKRVYCEVPDKKRRHWKKQKSTFTSGRPEGWLPPSLQSKTDHHIRWIKKLQNLLPEGYRLSIELGRFDPARMKDPEIHGNLYQKGPQYDYENVRAYVLDRDRYTCQVCRRKGGKLHVHHILYRSQGASDTPQYMATVCSSCHTTENHLPGGILYQWMQEQKKFTRGLREATFMNILRKRLMKTFPDAVFTYGNITKVDREKLKLPKNHGNDATAIALVRTGVTSVKDEEPVLYIQQVRRKKRSLHEETPRKGRKEPNRTAARNSKNTKAVTVTKRRGGKKVSVTACLFDRVELNGKKGWITGFTGKACRIVDTEGNYVAATDKYTQVNISSIRILHHTGNWVTGLKRNVGKR

SEQ ID NO: 19800 - protein, 466 aa, unidentified
  REGION 1..466: note = Human gut metagenome
MSTCACVLSKNGERLMPTIRLGKVRHLLKDGKAKIIKHHPFTIQLLYDSETNIQPIEICEDVGYNYIGISVKSESHEYVSVQYDTLQDEKDCHDSCRKMRRIRRDRLRYRKPRFDNRKRNKDWLAPSLEHKKELNVNVIKMYCEVVPITHVTVEVGSFDTMLVKAIQEGKAIPEGADYQKGPRYNLATLREAVFYRDNYTCKVCGRKAKNDSAILHVHHMFYWKGRHGNSLNELLTVCEKCHTPANHQKGSKLYGFGENIKFANLSGAAFMNTVRWQVVNELYAAFGKLFVTFTYGAMTKEKRIALHLEKCHNNDAYAMGNFHPVDRCAFEHYKKVKRNNRILEKFHDSQYIDTRTGELTNGKSLFNGRISRSHKKDSENLHKYRGKRICKGHRALRRKKVALNPGDLVSLNGEILVVHSTHAGKNGYVGVEFKTPSKSGKKSASLKKLKIVKTSNSMHSAWTKVS

SEQ ID NO: 19801 - protein, 295 aa, unidentified
  REGION 1..295: note = Human gut metagenome
MHYSPSGERTACFGIAVIPKKGESAMQYVYVVGSNGKPLMPCSPTKARKLLKSKSAAVLQRTPFTIKLLHHAGGYKQPITLGVDAGSKHVGLSACTDTEELYKEELTPRNDVVKLLSARRECRRGRRHRKTRYRAPRFNNRVHSKHKGWLAPSVEVKIQEHITAIHRICRRLPITKIVVETAEFDTQRLKAMLEGKPLPVGIDYKRGEMYDEYNVRQYVLKRDNYTCQHCGARGSAEKGIKLHVHHLETRQTGGNAPNNLITLCKDCHTAWMAFRLSRRVESSAIRKRIRLKRPV

SEQ ID NO: 19802 - protein, 438 aa, Moorena sp.
MRVFVLNKNRQPLDPCKPARARILLRTGKAKVLRRYPLTIILTEEVSEPITHNHQLKIDPGAKITGLAIVQSNRIIWGAELTHRGFQIRDSLTKRRTLRRSRRNRKTRYRQPRFLNRKRSSGWLPPSLMSRIQNILTWVKKLTQLCPITGISQELVRFDTQKLENPEISGVEYQQGTLFGYEIREYLLEKWHRKCAYCGATDTQLEIEHIVPKSKGGSNRVSNLAISCHSCNQAKSNQEIEQFLSRKPNVLQRILSQAKKPLADAAAVNATRWKLYNELKLTELPVEVVSGGLTKFNRCSQNLPKTHWLDAACVGISTPERLIIKEVKKPLIVIATGHGSRQMCRTDKYGFPVRYVPRFKFIKGYQTGDIVKAIVTKGKKQGVYVGRVAVRTTGSFNIKTKNGLVQGISHKYCQHIHKKDGYAYVYGSKTSPFKAQYF

SEQ ID NO: 19803 - protein, 427 aa, Lachnospira sp.; identical to SEQ ID NO: 12418

SEQ ID NO: 19804 - protein, 478 aa, Pantoea sp.
VAVFVLDIHGKALMPCTEKRARLLLDRGRARVHRLLPMVVRLVDRQAGDCEFQPLRLKIDPGSKTTGLALVREVAAVDALTGEVQLGVAVLNLLELVHRGRQISEAMTARRQMRRRRRSNLRYRAPRFLNRGGDKTGRLAPSLQHRVDTTMTWVRRIQRWAPVRAISSELVRFDMQALQNPEIDGIEYQQGTLFGYELREYLLEKWGRQCAYCGARNLPLQIEHIRAKAHGGSNRASNLTLACACCNQKKAARSIEDFLSQDHKRLNAILAQAQKPLRDAAAVNATRWALANALQATGLPVELASGGRTKFNRSALGVPKTHALDAACVGQVHSIENWNSPTLALKAMGRGSYQRTRLDKFGFPRGYLMRSKRVHDFATGDMVRADVPKGLKAGVHTGRVAIRATGRFNIQLHQAGVSAVVQGIHYRHCRIVQRNDGYGYFLNPANHTKRDQVRPKASDASHPALYLPGMNAEVSRAL

SEQ ID NO: 19805 - protein, 512 aa, unidentified
  REGION 1..512: note = Human gut metagenome
MSTVYVLNKDGKPLMPTTRGGHVRHLLKEQKARVVRTKPFTIQLLYETDDVVQPLYLGIDPGRTNIGVAVVKADSTAVFTAHLETRNEEIPKLMQGRKKARRARRTNGRRCRRQRRAKANGTISKKCVKQTTAQNGSASKRAKEIGVIKRHLPGCEKELLCIGIKNKETKFSNRTRPEGWLTPTANQLLQTHINLVKKIQKFLPISDVVLEINKFAFMQLDNPNIQKWQYQQGPLYQKASLEEAVSEMQEHHCLFCKKPIAHYHHVVPQSENGSNTIGNIVGLCTKHHDLVHKDATWQKKLAKKKTGLNKKYGALSVLNQIIPALTKELSSLFPKRFFATNGKSTYDYRAAHGVSKDHWLDAYCIACSVLPNDTCDRTINSRVPYELKQFRRHDRRALHKENMSRVYTLNGKSVATNRHKATEQTTDSLEEFRQRQPNDVCKLKVKEHHPTYRNMNRNYPGSVFLIGKQVHVMQGIAGSKDGEATTYKDTNANSIAAGKCKFVAKNSGILFV

SEQ ID NO: 19806 - protein, 521 aa, Streptomyces sp.; identical to SEQ ID NO: 18896

SEQ ID NO: 19807 - protein, 423 aa, Anoxybacillus sp.
VLDTNKRPLAPCHEAVARKLLKQGKAAIYRRFPFTIILKKSVDESEIKATYRLKIDYGSRHTGLAILRGQEVVWLGQLDHRTDIKERIDKRRAFRRARRNRKTRYRKPRFLNRKRKEGWLPSSLESRVQNIQTWVNRLKKLCPIGYISYENAKFDTQLMRNPEINGVEYQQGTLQGYEVREYLLEKFGRKCCYCGKENVPLEVEHIIPKSRGGTDRVDNLCLACHDCNQRKGSKTAEEFGYPHIQKQVKESLKDASAINSTRWKAYEVLKQTGLDVECGTGARTKMNRIRLDLPKTHYFDACCVGESTTNHLYFKTKEVLFIKAKGRGSRSRTNLDRYGFPRGYLARQKFFFVFQTGDMVKAVVPRGKYQGVWFGEVACRKTGSFDIKGKDGKRIAQGINYRYVQVIQRFDGYTYRREGMNIA

SEQ ID NO: 19808 - protein, 442 aa, unidentified; identical to SEQ ID NO: 2903
  REGION 1..442: note = Human gut metagenome

SEQ ID NO: 19809 - protein, 371 aa, unidentified
  REGION 1..371: note = Human gut metagenome
VDAGYKHVGLSASTEKAELYASEVELRQDVSDLLSARRALRQSRRSRNTRYRAPRFDNRIRTKRKGWLAPTVENRINVHLSRIETVLRLLPVTKITVETASFDTQLLKNPDIAGKEYQEGEQLGFWNVREYVLFRDGHVCQHCHGRSKDPVLNVHHLESRRIGGDSPGNLITLCETCHKALHRGEIKLKAKRGRSFRAETFMGIMRWGVLNRLKASHPKLEVHNTYGYRTKHARIANGIAKSHCADAFCIAGNFGAKRLGEFFFQKQTRRNNRQIHKLSILKGGIRKRNQAPFEVKGFRLFDKVACQGEEGFIFGRRSSGFFDVRKLDGTRISAGISCKKLHLLEKRRTYLTEIRKEEALPPPPEGRGLRA

SEQ ID NO: 19810 - protein, 512 aa, unidentified; identical to SEQ ID NO: 5824
  REGION 1..512: note = Human gut metagenome

SEQ ID NO: 19811 - protein, 396 aa, unidentified
  REGION 1..396: note = Human gut metagenome
VVRRTPFTIQLTIATGESKQPVSLGVDAGYKHVGLSASTDKAELYASQVELRQDITDLLSARRALRRARRNRKTRYRAPRFNNRIRTKRKGWLAPSVENRINAHLSRIEAVLRLLPVTKITVETASFDMLLLKNPDIAGKEYQEGEQLGFWNVREYVLFRDGHVCQHCYGRSKDPVLNVHHLESRRTGGDSPGNLITLCETCHEALHRGEIALKTKRGHSFRAEAFMGMMRWEVLNRLKASHSELEVNNTYGYRTKHARIVNGIDKSHCADAFCIAGNLGAERLCEFFFQKQTRRNNRQIHKLSILKGGIRKRNQAPFEIKGFRLFDKVACKGEESFIFGRRSSGYFDVRKLDGTRISAGISYKKLRLLEKRRTYLTEIRKEEALPPLPEGRGLRA

SEQ ID NO: 19812 - protein, 432 aa, unidentified
  REGION 1..432: note = Human oral metagenome
MLVYVLKQNGQPFMPTERFGKVRRLLKEGKAKVVRREPFTIKLLYEPETDVVQEPYCGVDTGSKHVGVAVVGNDKVLYQSQTELRSDIKRKMDARRVSRHNRRNRKTRYRKSRFLNRRNSIKKYRLSPSVKHKVQAHIDEIEFCKKILPISDENLILEVSQFDTALMKNPGLMNEKVKHWGYQQGFNYGYSSRREAILHRDNYTCQCCGKRNCRLEVHHIKFKSNGGTDDEENLITLCEDCHKGIHVGTVTLNKKPKKSKCLKHATHMSIIRSQLLKVYPDAIETFGFVTCENRHHLKLEKDHYIDACVIASGGLEFKELDVIFYKRRVSKGDYQVARGSRGEQKIPTGKICGFRRFDKVEYLGKEYFIKGRMSSGFAGLMNIFGDEVDFGYMPRGYKTPKLSSCKKISARRSCLCIERRLHHVCYLKRGGN

SEQ ID NO: 19813 - protein, 406 aa, unidentified
  REGION 1..406: note = Human gut metagenome
MVYVQDINGKPMMPTTRHGKVRRLLKDKKAVVVNLCPFTIKLMYVISDYKQEIVLGVDAGTKHVGLSATTKSKELYSSEVILRNDIVDLLSTRRELRRARRNRLRYRKLRFNNRIKSKRPGWTAPSVKYKIDAHIRVIDNVFSILPVSRIVIEVAQFDTQKIKNPNISGKEYQEGDQLGFWNTREYVLARDGHKCQYCKGKSKDKILNVHHLESRKTGGDSPSNLITLCETCHKEYHKGNIDLKIKRGSSLRDAAVMGIMKWKLYEELRSRYDRVSMTFGYITKHNRIKYGIEKSHTSDAFVISKNINAKRIGCQYLKRLIRRHNRQIHKMKILKGGKKKNNQAPFEVFGFRLFDKVLYNNKICFVYGRRKSGSFNIRDFNGENSKDVSHKKFKLIRGKRHPIILK

SEQ ID NO: 19814 - protein, 388 aa, unidentified
  REGION 1..388: note = Human gut metagenome
LAKVITNCPFTIQLLYNSTNYTQPVSLGLDAGSKHIGVSATTETKVLYEADVTLRNDIVALLSARREARRTRRNRKTRYRKPRFNNRTRKDGWLAPSVQQKVDTHLTVVRKVLKILPISSITVETASFDIQKIKNPDIKDTDYQQGEQLGFWNVREYVLFRDGHECQCCHGRSKDPVLNIHHIESRKTGGNAPNNLITLCETCHKGYHKGTVTLPKTIHRSMQFKDAIFMGIMRWAFYNRLKELYAAEDIPVAFTYGYITKNTRIEHGLSKEHFVDARCISGHPDAIPPKEVFYQKKVRCHNRQIHKFKILKGGIRKRNQAAYEVKGFRLYDTVLWKGQKCFIFGRRLTGRMDLRLIDGTHINASVGYKNLKLLKKRSNYLIEQREVG

SEQ ID NO: 19815 - protein, 494 aa, unidentified; identical to SEQ ID NO: 5675
  REGION 1..494: note = Human gut metagenome

SEQ ID NO: 19816 - protein, 406 aa, unidentified
  REGION 1..406: note = Human gut metagenome
RLLLKEKKAIVVRRTPFTIQLTIATGESKQPVSLGVDAGYKHVGLSASTEKAELYASEVELRKDITDLLSARRALRQSRRNRKTRYRAPRFDNRIRTKRKGWLAPSVENRINAHLSRIEAVLRLLPITKITVETASFDMQRLKNPDISGKEYQEGEQLGFWNVREYVLFRDGHVCRHCHGRSKDPVLNVHHLESRRTGSDSPDNLITLCETCHKALHRGEITLKAKRGQSFRAQAFMGIMRREVLNRLKASYPELKVHETYGYLTKHARIANGIVKSHGADAFGIAGNLGAERLGEFFFQKQTRRNNRQIHKLSILKGGIRKRNQAPFEAKGFRLFDKVACQGEEGFIFGRRSSGSFDVRKLDGTRISAGISCKKLRLLEKRRTYLTEIRKEEALPPLPEGRGLRA

SEQ ID NO: 19817 - protein, 433 aa, unidentified
  REGION 1..433: note = Anaerobic digester metagenome
MVYVISKSGKPLMPTNRHGKVRILLKEKKAKVVQNKPFTIQLLYNSKEYTQPVSLGIDSGYTYIGYSAITEDTELISGEVELLSGQSERLKEKAMYRRQRRQRLRYRKPRFDNRKRAEGWLAPSIQHKLDSHIRFIEKLKKILPITNITIEVGSFDTHKLKNPSVSGEDYQNGEQEGFFNLREYIFHRDSHICQVCGSKDMALQIHHIGYWKNDRSNRPQNLMAICVSCHVPANHLEGAKLWGLKPSNKGFKEATFMSMVRWRLVNLLNCNHSYGYATKSKRIALGLDKSHSNDAFVIAGGENQVRSEKTNFKQVRRNNRSLEKFYDAKYIDIRTGKKVSGQDLFSGRRCRNKSLNTENLHKFRGKKLSKGRRSIRQNRYFFQPNDLIKLDNIVYTVRGTHNKGSRVILKETGKSIKVELLTLYKFMSGLVAV

SEQ ID NO: 19818 - protein, 431 aa, Petrotoga sp.; identical to SEQ ID NO: 11592

SEQ ID NO: 19819 - protein, 415 aa, Bacillus sp.; identical to SEQ ID NO: 5740

SEQ ID NO: 19820 - protein, 442 aa, unidentified; identical to SEQ ID NO: 2903
  REGION 1..442: note = Human gut metagenome

SEQ ID NO: 19821 - protein, 407 aa, unidentified
  REGION 1..407: note = Human gut metagenome
QPLMPTDRHRKVRLMLQSGQAKVIKRCPFTIQLTYNTGHQAQEISLGIDAGSKHIGVSATTKTRVLYEADVELRNDIVDLLSSRRELRRGRRNRKTRYRPARFDNRRREDGWLAPSIRQKIGTHLTVVENICKILPISRITVETASFDIQKIKNPDIQGAEYQQGDQLGFWNNREYVLFRDNHTCQCCKGKSKDKILNVHHIESRKTGGNAPNNLITLCEICHTGYHKGAIQLPKTVKRGMRFKDAAFMGIMRWAFYEALKQQYEPVGTPVHNTYGYITKHTRIEHNLPKEHYVDARCISGNPDAFPNGEYYYQKKVRCHNRQMHKLTILKGGIRKQNQATYLVKGYRLFDKVSYQRKEYFVFGRRKSGFFDIRTLSGKQVNKGSLSCKKLKFIATRMYYLIERRAV

SEQ ID NO: 19822 - protein, 465 aa, Marinobacter sp.; identical to SEQ ID NO: 11094

SEQ ID NO: 19823 - protein, 420 aa, unidentified; identical to SEQ ID NO: 6017
  REGION 1..420: note = Human gut metagenome

SEQ ID NO: 19824 - protein, 422 aa, unidentified
  REGION 1..422: note = Human gut metagenome
LNKRGKPLMPCSPAKARLLLKEKKAIVVRRTPFTIQLTIATGESKQPVSLGVDAGYKHVGLSASTEKAELYASEVELRKDITDLLSARRALRQSRRNRKTRYRAPRFDNRIRTKRKGWLAPSVENRINAHLSRIEAVLRLLPITKITVETASFDMQRLKNPDISGKEYQEGEQLGFWNVREYVLFRDGHVCRHCHGRSKDPVLNVHHLESRRPGSDSPDNLITLCETCHKALHRGEITLKAKRGQSFRAQAFMGIMRREVLNRLKASYPELKVHETYGYLTKNARIANGIVKSHGADAFGIAGNLGAERLGEFFFQKQTRRNNRQIHKLSILKGGIRKRNQAPFEAKGFRLFDKVACKGEESFIFGRRSSGSFDVRKLDGTRISAGISCKKLRLLEKRRTYLTEIRKEEALPPLPEGRGLRA

SEQ ID NO: 19825 - protein, 465 aa, unidentified
  REGION 1..465: note = Human gut metagenome
MSTCVCVLSNNGERLMPTIRLGRVRHLLKDGKAKIIKHHPFTIQLLYDSKTNTQPIEICEDVGYNYIGISVKSQSHEYVSAQYDTLQDEKACHDSCRKLRRTRRNRLRYRKPRFDNRKRGEGWLAPSLKHKKELNVNVVKMYCTVMPITHATVEVGSFDTMLVKAIQEGKVIPEGADYQKGPRYNLATLREAVFYRDNYVCKICGRKATEGAILHMHHMFYWKGRHGNSLNELLTVCEKCHTPANHQKSGKLYGFGEKIKFADLSGAAFMNTVRWQIVNELYVAFGKPFVTITYGAMTKEKRIALQLEKSHNNDAYAMGEFHPNLRCMFEHYEKARRNNRILEKFYDSRYIDIRTGEIATGKELFNGRINRNHKKDSENLHKYRGKRTYAGHRALLRKKVNLNPGDLVSLNGENLIVHSTHTKKNGAVNVEFETPAKSGQKSASLKKLKIVNTTDSMHSAWEKIS

SEQ ID NO: 19826 - protein, 518 aa, unidentified
  REGION 1..518: note = Human gut metagenome
LSNLKLIDALLEKTEYIYVLGIDGKPQMPTNRKVRIRSLFKSGRAKIVDTVPFTIRLLYENDAVLQSITIAEDPGRTNIGTAVLTQLGDLVFSTVVETRNKSIKKLMTDRKAHRQASRRGERKARQRLAKKHGSMIKAGMMMRKLPQYAADKFVTCKIIKNTEARFCNRKRMPDWLTPTVNHLVQTHINLIKKIEKYLPITDVAIEVNRFAFMQMENPNINGLDFQNGPLKGFDDVKAAIREQQHGKCLMCKNDIEHFHHIVPRSKGGSDTIQNQAGLCKKCHAKVHTDSEFLAKFKDKKEGLIKKYGALSALNQAVPFICKELIKIYGVEHVHFCTGKDTSLIRSSLGYEKTKENQMHEVDAYCIGLAAIGADKVKRPSFNNVFKIKQFRRQDRQRVHYQKERTYYLDGKKIATNRKPRFEQKGNALSDWYKEQIEAYGQHEAGKMRSRLTVKKSKRSYNTAKRLMPGCIFYYDGQRHVMTGQSSYGRYLRAYNCGTKDFHASKCQIIRFNTGLVFV

SEQ ID NO: 19827 - protein, 426 aa, Parasutterella sp.; identical to SEQ ID NO: 3045

SEQ ID NO: 19828 - protein, 378 aa, Moorena sp.; identical to SEQ ID NO: 2642

SEQ ID NO: 19829 - protein, 441 aa, unidentified
  REGION 1..441: note = Human gut metagenome
AGFRKERRRRDRQNKQRKARKDHTEIQNGNADICRTTISCKSVQISYPAAEKSVTHKIIRGKEGKFANRHRDEGWITPSARQLVQMHMNDLKSMCKILPISHVTLERVAFDFQKLENENIKAWEYGKGKLYGYDSPEEYIHDVQGGKCLICGKPHIDYLHHIIPRSKGGSNKVSNLAGLCYDCHYGPMGVHNCQDTQDRLPELKNEANKQYKVSLLNSVMPVLIEEMDKFCKANSIIFSICEGHDTAKVRDIYDLQKDHCVDGFAISLVGRNVKSVDVMPDRIHQKQRYKKKSKNIIKKRNCREYYDGKKLVAVNRHKGTDQKADSLEEYMNTYAETHTADECKKHFESLTVKPARRTYTFHKEGRICPFHIGDKVRYEKKNKIKGNTKVETFICEGIRFPKDENKAKVEHNKTKSKKMKFCRVLEPGCTPYIDYRKLVLI

SEQ ID NO: 19830 - protein, 466 aa, unidentified; identical to SEQ ID NO: 13091
  REGION 1..466: note = Human gut metagenome

SEQ ID NO: 19831 - protein, 473 aa, unidentified
  REGION 1..473: note = Human gut metagenome
MVAVVTSTGKPLMPTSTYRARKLLKGGRAVIYKYRPYFTIMLVDRAEGEVQDIEYKSDTGSKHAGISACTEKQELLSEQRDLLENEPEHHNDRKKNRRGRRNRKRYRKPKFDNRKKKPQEGHEKWLAPTNLHKLEIQVNLFKDFCQVVPVTSAYFEMGKFDTQVLKAVLEGRPIPQGEDYQRGEQYGTDTLRAAVFLRDDYTCRICGRTIKDGAILHVHHVGYWMQDRTNRPANLATVCEQCHTPANHGRNGILYGRKPEHGTLKDASYMTSVRWIMLKELKDAAPEVDIHVTYGVTTKRKRQGLHLPKSHVNDAFSMGRFPPKKRADTAYWKKTIRHDRSLQKFYDAVYLDTRDGREKKGSELSNGRISRNHKKDSENLHKYRGHKVSKGHVSIRRDGNKLKPGSVVLYNGERLTVHGTHTSYRKNKKGEEVKSVNVQFTRPASDGKKSASLKKCKIVTRNYNTGWKQYRPA

SEQ ID NO: 19832 - protein, 411 aa, unidentified
  REGION 1..411: note = Human gut metagenome
MVYIQDIDGKPMMPTTRHGKVRRLLKDNKAVVVNTCPFTIKLTYKTSDYKQEIVLGVDSGTKHVGLSATTKSKELYASEVILRSDVVDLLSTRRGLRRTRRSRLRYRKQRFNNRVKSKKDGWIAPSVRHKIDSHIRIISFVYSILPVSKLIVEVAQFDTQKIKNPEISGKEYQEGEQLGFWNVREYVLARDGHKCQHCKGKSKDPILNIHHIESRKIGGDSPSNLITLCETCHKEFHKGNIKLKVSRGKSLRDAAVMGIMKWKLYEELKSRYDNVSMTFGYITKYNRINHGIEKSHVSDAFVISRNFNSCRLGYYYKRKLVRRHNRQIHKMKILKGGIRKRNQAPFKVFGFKLFDKVMFQGEEHFIYARRLSGQFNIRDINGENKKDVSCKKLKYVSHGLVSVKTNLFLSQ

SEQ ID NO: 19833 - protein, 462 aa, unidentified
  REGION 1..462: note = Human gut metagenome
LVQPLYLGIDPGRTNIGVAVVKTDGTAVFTAHLETRNKEIPKLMQERKKARRARRTNGRRCRRQRRAKANGTISKKCVKQDTAQNGSVSKRAKKIGVIKRHLPGCEKEVLCIGIKNKEAKFSNRTRPEGWLTPTANQLLQTHINLVKKIQKFLPISDVVLEINKFAFMRLDNPNIQKWQYQQGPLYQKASLEEAVSEMQEHHCLFCKKPIAHYHHVVPQSENGSNTIGNIVGLCTKHHDLVHKDTAWQKKLAKKKTGLNKKYGALSVLNQIIPALTKELSSLFPKHFFATNGKSTYDYRAAHGVSKDHWLDAYCIACSVLPNDVCDSNINSRVPYELKQFRRHDRRALHKANMNRVYTLDGKKVATNRHKAIKQTTDSLEEFPQRQPDDVCKLKVKEHHPEYRNPERNFPGCVFLVGKHTHVMQGTSGSHNGQADGYYDTNGNSYSSGKCKFVAKNKGIVFA

SEQ ID NO: 19834 - protein, 431 aa, unidentified; identical to SEQ ID NO: 4463
  REGION 1..431: note = metagenome

SEQ ID NO: 19835 - protein, 470 aa, unidentified
  REGION 1..470: note = Human gut metagenome
MSVFVVGLNGCRLMPTSERKARLLLKQGKAFVEQKVPFTIRLNYKTGSTTQLGYLGIDTGSQHIGVSVVREDGTVLHKEEIGLRDSMSKRKLLEAKASLRRGRRYRKTRYRHPKWRPKTKRVYCEVPDRKGRHWQKKKITFTSKRPKGWLPPSLQSKTDHHIRWIKKLQDLLPEGYRLSIELGRFDPARMKNPEIHGDLYQKGPQYDYENVRAYVLDRDRYTCQICKKKGGKLHVHHILYRSHGATDDPQYMVTVCSDCHSAQNHLPGGILYQWMQEQKRFSRGLRDATFMNILRKRLIRAFPEAVFTYGNVTKVDREKLKLPKSHGNDATAIALVKTGITAVKDKESVICIQQVRRKKRSLHEEIPRKGRKEPNRTAARNNKNTKAVTVTKRQNKKKVSMTGCLFDRVELNGKKGWISGFTGKSCYVKDADDQYLSTSPKYKQVSLSKLRILHHCGNWIIGAKKTLGKG

SEQ ID NO: 19836 - protein, 532 aa, unidentified
  REGION 1..532: note = Human gut metagenome
MSTVYVLNKDGKPLMPTTRGGHVRHLLKEQKARVVQSNPFTIQLLYKTNDAVQPLYLGIDPGRTNIGVAVVKADGTAVFTAHLKSRNKEIPKLMQDRKRARRARRTNGRRHRRQRRAKANGTISKKCVKQTTTQNGSVSKRAKEIGIIKRHLPGCEKDVLCIGIKNKEAKFSNRTRPEGWLTPTANQLLQTHVNLVKKVQKLLPISDVVLEVNKFAFMRLDNPDIQKWQYQQGPLYKKESLESAVSEMQEHHCLFCKKPIDHYHHVVPKSENGSNTIANIVGLCAEHHNLVHKDVAWQEKLAEEKTGLNKKYGALSVLNQIIPALTNKLSVLFPKHFFVTAGKSTHDYRAAHGVSKAHWLDAYCIACSVLPSNVCDSNINNHVPYELKQFRRHDRRVLHKANMSRVYTLNGKAVATNRHKAIKQTTDSLEEFRQNYPDDVYKLKVKEHHPAYRNLNRNYPGSVFLVGKQAHVMQGIASSKDGKTTKYNDTNATTITAGKCKFVAKNSGILFVQCKFRKALSDGTTKKLQYPV

SEQ ID NO: 19837 - protein, 426 aa, Anoxybacillus sp.
MVFVLDTNKRPLAPCHEAVARKLLKQGKAAIYGRFPFTIILKKSVDESEIKATYRLKIDYGSRHTGLAILRGQEVVWLGQLDHRTDIKERIDKRRAFRRARRNRKTRYRKPRFLNRKRKEGWLPSSLESRVQNIQTWVNRLKKLCPIGYISYENAKFDTQLMRNPEINGVEYQQGTLQGYEVREYLLEKFGRKCCYCGKENVPLEVEHIIPKSRGGTDRVDNLCLACHDCNQRKGSKTAEEFGYPHIQKQVKESLKDASAINSTRWKAYEVLKQTGLDVECGTGARTKMNRIRLDLPKTHYFDACCVGESTTNHLYFKTKEVLFIKAKGRGSRSRTNLDRYGFPRGYLARQKFFFGFQTGDMVKAVVPRGKYQGVWFGEVACRKTGSFDIKGKDGKRIAQGINYRYVQVIQRFDGYAYGKGVAELA

SEQ ID NO: 19838 - protein, 423 aa, unidentified; identical to SEQ ID NO: 3951
  REGION 1..423: note = Human gut metagenome

SEQ ID NO: 19839 - protein, 414 aa, unidentified
  REGION 1..414: note = Human gut metagenome
MPCSPAKARLLLKEKKAIVVRRTPFTIQLTIATGESKQPVSLGVDAGYKHVGLSASIEKAELYASEVELRKDITDLLSARRALRRARRNRKTRYRAPRFNNRIRTKRKGWLAPSVENRINAHLSRIEAVLRLLPVTKITVETASFDMLLLKNPDIAGKEYQEGEQLGFWNVREYVLFRDGHVCQHCYGRSKDPVLNVHHLESRRTGGDSPGNLITLCETCHEALHRGEIALKTKRGHSFRAEAFMGMMRWEVLNRLKASHSELEVNNTYGYRTKHARIVNGIDKSHCADAICIAGNLGAERLCEFFFQKQTRRNNRQIHKLSILKGGIRKRNQAPFEIKGFRLFDKVACKGEESFIFGRRSSGYFDVRKLDGTRISAGISYKKLRLLEKRRTYLTEIRKEEALPPLPEGRGLRA

SEQ ID NO: 19840 - protein, 386 aa, unidentified
  REGION 1..386: note = metagenome
MTMVYVQNKDGKPLMPTTRYCYVRLLLKEKKARVVCTTPFTIRLNYDTPNITQDLILGIDPGRTNIGVAVVKEDGSCVFSAHLETRNKEVPLLMKKRAAFRRQHRTQDRRRKRQRRAIAAGTTVESNTIERLLPGYEKPIVCHHIRNKEARFNNRSRPAGWLTPTANHLLQAHINLIAKAAKFLPITKVVVELNRFAFMAMDNPNIRRWEYQQGPLYGLGSVKDAVYAQQDGHCLFCKKPIDHYHHVVPRHKGGSETLANRCGLCEKHHALVHKDKAWAEKLVTRKGGMNKKYHALSVLNQIIPHLMEYLGSETPYDVYATDGKSTKGFRIAKNVPKEHYTDAYCIACSILDADTKVSAPAEPFKLKQFRRHDRQSCIRQMVDRKY

SEQ ID NO: 19841 - protein, 452 aa, unidentified; identical to SEQ ID NO: 4732
  REGION 1..452: note = Sediment metagenome

SEQ ID NO: 19842 - protein, 504 aa, unidentified
  REGION 1..504: note = Human gut metagenome
MVWEAIQTRRIKPHDIGEGTLRRHAAGTVSFPALCKNRKETLMSVLVIGSNGRALMPTNPRKACLLLKKKTASVVCRHPFTIQLLYKTGCATQEGCIGIDTGSQHIGVGVTCGDRVILKEEHELRSSMEKRSLLVARAAMRRARRYRKVRYRKPKWRHHTKRMYFEKPNRRGQHWRKVKTTTQSPRPKGWLPPSLQSKCDHHFRIIDRYLKYLPDSITRNLVIEVGRFDMARMNDPMIHGEMYQRGPMYDAENLKAYIFARDGYQCACCKAKAGTTRKTDGTTVKLVAHHILFRSRGATDNPKYMVSVCDHCHTTKAHQPGGILYSWMENNKKVTRGLRDAAFMNILRQRLFARYPQAAFTYGNITAADRKQLRLPKSHANDAVAISLFGKEVSAVRDTCQTVHYKQVRKSKRSLHEAIPRKGRKNPNTKAVRNKKNTTQVNGFKLWDSVLADGKKLFICSFTGTSAYLVDKNGCYVSQPGKTYKQWPLSKLKRLHPNGNWLVT

SEQ ID NO: 19843 - protein, 404 aa, unidentified
  REGION 1..404: note = Clostridiaceae bacterium UBA4052
MPTNRHGKVKHLLKDGKAKVVRRTPFTIQLLYDSPEYTQPITLGVDAGSKVVGLSATTEKKELFVSEVTLRDDIPELLSTRRQNRRTRRNHLRYRMARFLNRTASKKEGWLAPSVKHKVDSHLKVIENVHRILPVSRIVIETASFDIQKIRNPEISGREYQQGEQLGFWNTREYVLWRDNHECQHCHGKSKDRVLNVHHKESRKTGGDSPGNLVTLCETCHKSHHAGRIKLNLTPNKSYRDASFMGIMRWYVYNSLKELYPEVSMTFGYITKNNRINNNIEKAHSADAYCISGNMNAKRIDEIYNQAFKRKHNRQIHKGNFLKGGKKKLNQSAYEVKGFRLFDHVRYRDKECFIFGRRTSGYFDLRKLDGSVVHRSASFKELTLLKRQNTILIERKECKGVLLS

SEQ ID NO: 19844 - protein, 238 aa, unidentified; identical to SEQ ID NO: 18050
  REGION 1..238: note = Human gut metagenome

SEQ ID NO: 19845 - protein, 410 aa, unidentified; identical to SEQ ID NO: 17269
  REGION 1..410: note = Human gut metagenome

SEQ ID NO: 19846 - protein, 515 aa, unidentified; identical to SEQ ID NO: 4456
  REGION 1..515: note = Human gut metagenome

SEQ ID NO: 19847 - protein, 473 aa, unidentified
  REGION 1..473: note = Carnoules arsenic-contaminated mine drainage metagenome, Contig500, whole genome shotgun sequence
MAVLVLDRRKKPLMPCTEKRARLLLARGRARVHRLVPFTIRLVDRTVEGSVLQPLRVKLGPGSRTTGIALVRESEAVEADTGEVRKAAHALVLIELTHRGHAIRDALTARRAFRRRRRGANLRHRAPRFDNRTRPDGWLAPSLQHRVDTTMTWVRRLQRWAPVTAISQELVRFDTQALQNPEISGVEYQQGTLAGYEVREYLLEKWHRTCAYCQVTNVPLQVEHIVPKARGGSNRISNLALACEDCNQEKGTREVREFLAHDPKRLARVLAQAKAPLRDAAAINATRLALFTALKATGLPVETGTGGRTKWNRTRMQIPKTHALDATCVGVVDAVTGWCVPTLAVKATGRGSYQRTRLNKFGFPRGFLTRKKHHFGFQTGDLVRATVPTGAKAGTYAGRVAVRASGSFNIQTAHGVVQGIGHRHCRRMQRGDGYGYHHQPTVAQPSKGEREQGRASHAALSIPGVNAEVSRAN

SEQ ID NO: 19848 - protein, 447 aa, unidentified; identical to SEQ ID NO: 12853
  REGION 1..447: note = Human gut metagenome

SEQ ID NO: 19849 - protein, 414 aa, unidentified
  REGION 1..414: note = Human gut metagenome
MPCSPAKARLLLKEKKAIVVRRTPFTIQLTIATGETKQPVSLGVDAGYNHVGLSASTEKAELYASEIELRQDITDLLSARRALRQSRRNRKTRYRAPRFDNRIRTKRKGWLAPSVENRINSHLSRIEAVLRLLPVTKITVETASFDLQLLKNPNISGKEYQEGEQLGFWNIREYVLFRDGHVCQHCHGRSKDPVLNVHHLESRRTGGDSPGNLITLCETCHKELHRGEITLKAKRGQSFRAETFMGIMRWEVLDRLKASHPKLEVQNTYGYRTKHARIVNGIAKWHCADAFCIAGNLGAERLGEFLFQKQTRRNNRQIHKLSILKGGIRKRNQVPFEVKGFRLFDKVACKGEEGFIFGRRSSGFFDVRKLDGTRISAGISYKKLHLLEKRQTYITEIRKEKALPPLPEGRGLRA

SEQ ID NO: 19850 - protein, 442 aa, unidentified; identical to SEQ ID NO: 13114
  REGION 1..442: note = Candidatus Anoxychlamydiales bacterium

SEQ ID NO: 19851 - protein, 381 aa, unidentified
  REGION 1..381: note = Human gut metagenome
MENKIEYCFVVDKNNRPLAPTKVNKGWYLIRKGRAKLRSKYPMVIQLEKEVESDEGDKSYMVCGIDDGSVHVGLAIVQKCLTKNKVVFKGIIEQRQDVKHLMDVRRGCRRYRRYHKRYRQARFNNRSSSKRICRLAPSIKQKKDAILRVLYQLNKWIDIQGYYLEDVCIDVRAMTDGYKPYRWQYQKSNRLDENLRKATILRDGCKCQECGKSNCRLEAHHIRARRYGGADTIGNLITLCKKCHDKTKSREKDFEERYFNMIKSKPKRFDYAMHVMRGKSYLRKKISELGILHLTNGGETANKRIEWNIVKTHSNDAICIADGIPDTCDIKEWIIKPMRRKSKAKTDNVLGIKHRDLVSYTYKNGETYTGYVTALYPEQLL

SEQ ID NO: 19852 - protein, 378 aa, Lyngbya sp.; identical to SEQ ID NO: 2642

SEQ ID NO: 19853 - protein, 431 aa, unidentified; identical to SEQ ID NO: 4463
  REGION 1..431: note = Human gut metagenome

SEQ ID NO: 19854 - protein, 424 aa, Anabaena sp.; identical to SEQ ID NO: 10239

SEQ ID NO: 19855 - protein, 422 aa, unidentified
  REGION 1..422: note = Human gut metagenome
LNKRGKPLMPCSPAKARLLLKEKKAIVVRRTPFTIQLTIATGEAKQPVSLGVDAGYKHVGLSASTEKAELYASEVELRKDITDLLSARRALRQSRRNRKTRYRAPRFDNRIRTKRKGWLAPSVENRINAHLSRIEAVLRLLPVTKITVETASFDMLLLKNPDIAGKEYQKGEQLGFWNVREYVLFRDGHVCQHCHGRSKDPVLNVHHLESRRTGGNSPGNLITLCETCHKALHRGEITLKAKRGQSFRAEAFMGIMRREVLNRLKASHPELEVNNTYGYRTKHARIANDIAKSHCADAFCIAGNLGAERLGEFFFQKQTRRNNRQIHKLSILKGGIRKRNQAPFEVNGFRLFDKVACQGEEGFIFGRRSSGSFDVRKLDGTRISAGISCKKLHLLEKRRTYLTEIRKEEALLALPEGRSLRT

SEQ ID NO: 19856 - protein, 422 aa, unidentified; identical to SEQ ID NO: 9550
  REGION 1..422: note = Human gut metagenome

SEQ ID NO: 19857 - protein, 475 aa, unidentified
  REGION 1..475: note = Human gut metagenome
MVAVVTSTGKPLMPTSAYRARKLLKKGRAVIFKYRPYFTIQLVDRADGEVQEVEYKSDTGSVHVGISVCTEKKELLSEQRDLLENEPEHHNDRKKNRRTRRNRKRYRKPRFDNRKKKPQEGHEKWLPPTLLHKMEVQVRLFREFCRVVPVTSACFEMGKFDTQALKAVSKGEPVPEGEGYQKGERYGTDTLRAAVFLRDGHTCRFCGRSVKDGAILHVHHVGYWKGDRTNRPANLASACEQCHTPANHGKNGILYGKEPEFKTLKDASYMTSVRWIMLDEIKKAAPGVQVSVTYGVTTKRKRQELHLPKNHVNDAFSMASFHPKKRSDTEYWKKIPRHDRVLQKFYDAIYLDTRDGSEKKGSELSNGRISRNHKKDSENLHQYRGHKVSKGHNSIRRGASSLKPGSIVMYKGEKMTVHGTHTRYVKGKDGKTAKKVNVQFTCPASDGKKSASLEKCTPVSRVYNTGWKRYWPDKK

SEQ ID NO: 19858 - protein, 480 aa, unidentified; identical to SEQ ID NO: 2726
  REGION 1..480: note = Human gut metagenome

SEQ ID NO: 19859 - protein, 447 aa, unidentified
  REGION 1..447: note = Human gut metagenome
VPAYRFKHITKKEVPYMVYVLDIDGLPLMPTSRHGKVRRLLNSHLAKVVKRCPFTIQLLYQSTKETQPVSLGVDAGSRHIGLSATTEREVVYQEELVPRNDIVKLLSARRALRRSRRNRKTRYRRVRFNNRVHSKHKGWLAPSVEVKIQEHITATKRICQILPIFDIHVETAEFDLQRLKAMEEGRLLPAGTDYQLGEQYDFYNTRQYVLHRDEYTCQCCGTHDNNVKLHVHHVESRQTGGEAPNNLITLCEHCHKSIHAGKMMLPKGKKRGKSYRDAAFMGIMRNTLLERLRKEVNVPVTMTYGYITKYWREKAGLEKSHINDAICISKHPYARPLETYYLTKAVRHHNRQIHKTKFSKGGIRKRNQAPYLVKGFRLFDKVLYQGESYFIFGRRITGYFDIRTLDGTKVNKGSTSYKKLRIQDTAEAYLTEVRAIPHMNEFTCVLA

SEQ ID NO: 19860 - protein, 411 aa, Clostridium sp.
MVEYSFVVDLSGNRLSPCNKNKAYYLIRKNKAKMLNKFPMVIQLQKIINDDDNDDVKNYLGIDDGSKNVGLGIIQQCNTKIKTIFKGTIELRQDVSTKMTVRKGYRKYHRYHKRYREKRFDNRRASKRKNRLAPSILQKKQSILRVVSKLLKWTKIDAVYLEDVLIDIRAMIEGKELYKWQYQKSNRLDNNIRLAVFMRDNFECVDCSSKIKLQMHHAKPKNSGGADSIYNGVTLCEKCHIKTFGKELQMMDKYLTKIKGKNLCLRHPMHVMQGKKYLQGELGKIAPLSLTTGADTANHRIDWNIEKSHSNDALVICGTKIKSTDINIKDWHIKPLRKKSKGDVETIVDGFKLRDYVKYTKRNGVCYIGYITALYPDRKQFNMTTKDNIILKRYGLKSLNLISRPNSIRFS

SEQ ID NO: 19861 - protein, 427 aa, Beggiatoa sp.
MQRVFVLDHNKQPLMPCHPARARKLLKKGKAAVYRRYPFTIIMTHRLCGDLQPIEIKFDLGSRTTGIALVGHFDRGSEVIWAGNLNHRGYQIKKDLNSRRAIRRTRRNRKTRYRPARFLNRRRPTGWLPPSLRSRVLNVNNWMLKLSQLAPLTQIAVETVRFDTQKIQKPEISGVEYQQGELAGYELREYLLEKWGRECVYCGAKNVPLEIEHIQARSKGGSDRVSNLTLACTPCNIDKGNKDIKEFLKRKPKRLKKIQTIATASLKDAAAINATRYATGNALKGFGLPIAFSSGGRTKFNRTSCGYPKDHWIDAACVGESGSDVFIPKMITPLIITAKGRGSRQKCRMNQYGFPRTRPKKHKRVKGFQTGDIVKAVVTKGKNIGTYIGRVVVRARGSFDIGIGKKKVSGISYKYCQLIQRVDGYEY

SEQ ID NO: 19862 - protein, 415 aa, Bacillus sp.; identical to SEQ ID NO: 2431

SEQ ID NO: 19863 - protein, 431 aa, unidentified
  REGION 1..431: note = Human gut metagenome
QFDDSIPRRNYPHESAKGLKVFVLNMRGKPLMPCSPAKARHMLKAGKAVVVRRTPFTIKLTIATGETKQDVTLGVDAGARHVGISATTEKEEVFASEVALRQDITGLLADRLAFRRARRNRKTRYRAPRFNNRVRSKHKGWLAPSVENRIQAHISRIEAVCRLLPVTKIVIETASFDIQKIRNPEVEGTGYQQGDQLGFWNVREYVLFRDGHVCQHCHGRSRDKILNVHHLESRKTGGDAPNNLITLCETCHKAYHAGKIKLKVKRGHSFRAEAFMGIMRWTLLNRMRKAHHSLPVENTYGYLTKHKRIALGLPKTHCADAFCIAGNLKALRRGDFLFQQQTRKHNRQIHKCSILKGGVRTLNQAPFLVKGFRLFDKVRIGGQIGFVFGRRVRGTFNIRRLDKTVIGTDINCKKLSLLETRKTFLTELRKE

SEQ ID NO: 19864 - protein, 512 aa, unidentified
  REGION 1..512: note = Human gut metagenome
MSTVYVLNKDGKPLMPTTRGGHVRHLLKEQKARVVRAKPFTIQLLYETNDVVQPLYLGIDPGRTNIGVAVVKANGTAVFTAHLETRNKEVPKLMQDRKKARRARRTNGRRCRRQRRAKANGTISKKCVKQDTAQSKNPSKRAKEIGIIKRRLPGYKKDVLCIGIKNKEAKYTNRTRPEGWLTPTANQLLQTHINLVRKMQKFLPISDVVLEVNKFAFMRLDNPDIQKWQYQQGPLYQKGSLENAVSEMQEHHCLFCDKPIDHYHHVVPQSENGSNTIANIVGLCAEHHNLVHKDAAWQKKLAEEKVGLNKKYGALSVLNQIIPALTNKLSVLFPKHFFVTAGKSTHDYRAAHGVSKDHWLDAYCIACSVLPSNVCDSNINNHMPYELKQFRRHDRRVLNNENMNRVYTLDNKTVAINRHKATEQEAASLEEFRKEHPNDVCKLKVKEHHPTYRNMNRNYPGSIFLVGKHVHIMQGIAGSKDGKATTYKDSNANSITASKCKFVAKNSGILFV

SEQ ID NO: 19865 - protein, 481 aa, unidentified
  REGION 1..481: note = Human gut metagenome
GIDSGRENIGSGASNEDGDCLYLGELKTSNKSIKIKMTERTGFRRERRRHDRQSKQRKEKKDHTEIQNGNDDICRTTISCKSVQISYPVAEESVTHKIIRGKEGKFANRHRDEGWITPSARQLVQMHMNDLKSMCKILPINHVTLERVAFDFQKLENENIKTWEYGKGKLYGYDSPEEYIHDVQDGKCLVCGKPHIDYLHHIIPRSKGGSDKVSNLAGLCYDCHYGPMGVHNCRETQDRLPELKNEANKQYKVSLLNSVMPVLIEEMDKFCKANSIIFSICEGHDTAKVRDMYDLQKDHCLDGFAISLVGRNVKSVDVMPDRIYQKQRYKKKSKNIIQKRNCREYYDGKKLVAVNRHKGTDQKADSLEEYMNTYAETHTADECKKHFDSLTVKPARRTYTFHKKGCICPFHIGDKVRYEKKNKIKGNTKVETFICESIHFYKDENKAKVEHNKTKSKRMKFCRVLEAGCTPYIDYRKLALM

SEQ ID NO: 19866 - protein, 464 aa, unidentified
  REGION 1..464: note = Human gut metagenome
MVIALDKNKRPVGFLTEKRCRKLFEQKRAVRYRMFPMVVILKDIDVRTFTQPLPEYRLKIDPGAKHDGFAIIDPVRDAIVYTLQVEHRAGQVKQNLDARRQARRNRRSRETVYRKNKFAQGGTFTQTGNEGKLPPSIQSILANTETWVKRLSRWVNLTSVSLEAVRFDTQLLDDPAIEGKEYQQGTLQGTEIREYLLDRYQHTCQYCGGVSGDPVLEWEHIRPRSRGGSDSIKNATLACHRCNQDKGSMTPEEWAGQLKTQKTKLSRARLQGIEKVLAGKRNGGSSRYCAWVNITRKELERFLFACFGEVECTSGGRTKYNRTRLRLPKDHQYDAACIGKVPEQGYTDLTHGYYTLAKAVGHGSHFRGKINSCGIIIQKLPPREKNVFGFMNGDIVAADIPKREKRPYKYEGHHVGRVMTRARGEFDIRTTDGRLIGANHRYITKIQNADGYQYAQCRTPGVSG

SEQ ID NO: 19867 - protein, 415 aa, unidentified; identical to SEQ ID NO: 15716
  REGION 1..415: note = Fermentation metagenome

SEQ ID NO: 19868 - protein, 417 aa, unidentified
  REGION 1..417: note = Human gut metagenome
MPCSPAKARLLLKEKKAIVKRRTPFTIQLTIATGEAKQPVTLGVDSGYKHIGLSATTEKAELYASEVELRQDITDLLSARLALRRSRRSRKTRYRAPRFDNRVASKREGWLAPSVENRIAAHMSRVEAVMQVLPVTAITVETAAFDTQLLKNPNIAGEAYQQGEQLGFWNVREYVLFRDGHVCQHCRGKSKDPILNVHHIESRRTGGDAPNNLITLCETCHKAFHRGEIELKVRRGKSFKAETFMGIMRWTLFERLKKAHPELRVRNTYGYLTKHKRISHGIAKSHCADAYCIADNLGAKRLEGFFFQKQTRKHNRQIHKLSILKGGLRKKNQAPYEVKGFRLFDKVICKGEEAFIFGRRTSGSFDVRRLDGTRISAGINYKKLRLLEPRTTYLTEFRKEAALPPLHECSGSRAEFR

SEQ ID NO: 19869 - protein, 456 aa, unidentified; identical to SEQ ID NO: 10331
  REGION 1..456: note = Human gut metagenome

SEQ ID NO: 19870 - protein, 544 aa, unidentified; identical to SEQ ID NO: 9634
  REGION 1..544: note = Human gut metagenome

SEQ ID NO: 19871 - protein, 515 aa, unidentified; identical to SEQ ID NO: 9146
  REGION 1..515: note = Human gut metagenome

SEQ ID NO: 19872 - protein, 422 aa, Moorena sp.
MPCKPSKARKLLKQGKAKVVKKEPFTIQLLHGSSGYKQKCIAGIDTGSKNMGVAVATEDGRVIYKAQVYLRQDIKENIEARRRLRRTRRNRKTRYRKARFLNRKRKEGWLPPSIKARIEAHYNIARKLAKIIPISEIRVEVGQFDTQALQNPEIRGIEYQQGEMQGFDSVKEYVKIRDNYQCRYAKLRPDIPCSDKLTVDHIIPRSKGGTDNPSNLVCCCEAHNIAKGSMSYKEFTGKISPKIEDFRSTVFMNVSRYYLVPMLQKIAPTKYTFGLYTRRKRKEWAIEKSHINDAIVIAGIKPRWQDDAWYYIRQVRKKKRSLHEEIPRKGRKQPNREAKRNNKNEKEIIVRGKKWCLRDKVYIHELSEAGFISGFTGKWVYVQDIHGNYLQLSDKYKQINPEKLELMYRNNNYICERFISTL

SEQ ID NO: 19873 - protein, 431 aa, unidentified; identical to SEQ ID NO: 6230
  REGION 1..431: note = Human gut metagenome

SEQ ID NO: 19874 - protein, 480 aa, unidentified
  REGION 1..480: note = Human gut metagenome
MKGENMVIALDKNKHPLGFMGERRCRILLEKKRAVLYRYFPTIVILKDVDARKLSGLSSYRIKIDPGAKYTGIAIVRDDTNEFMYAMQIEHRGEQIKKNLDTRRSARRNRRSRETGYRRPKWGNQCTAKKQRQSYDSQRGENWLPPSVKSTADNIISWVRRLSRWINITNCSFESVRFDTQLMENPEIEGVEYHQGTLYGYEVKEYLLEKYGHTCQYCGGKSSDPILEWEHMIPRSRGGSDRLKNATLACHNCNQDKGNHTLEEWQTILQDRIPKERGKQKELDQIRQKFVQQVMEGKTPLKGLRYAAWVNSSRRYSQRHLYLRFPELECSSGGRTKYNRNALGYPKEHHYDALCVGKIPEDRFVDRTHGYYLYAKATGRGTRLRGQINQCGVITHKWRDRSKTAFGFQTGDLVVANVPKDTKYKYKGRFVGRVMIRKSGSFDIRTLSGELVTVNAKFCRLLQNNSGYQMMIKRAIPLGN

SEQ ID NO: 19875 - protein, 434 aa, unidentified
  REGION 1..434: note = gut metagenome
MSFLATWARRKILLQRKVAEMLTTKKYAFVLDAEGKRLDPTIEQNAWRLVRQHKARLVSKFPMVIQLNKVVDNPNNDEIRCGIDDGANHVGLALVQKCQTKNKILFKGTIEQRKDVKHLLTIRRGYRRYHRYHKQHRPARFLNRASSRRSGRLMPSIIQRKQATLRVIDRLRQWIRIDGYWLEDVKIDIRALTDGYRPYRWQYQKSNRLDNNLRLATIYRDGHKCMECGKTKTRFEVHHITPRETGGANTISNLITLCPACHARTFGRELQFVNRYYAMIGSAVHVEGLDDAQRVMQGKHWFREQLQQRGTLSLTTGADTANKREDWNIVKTHANDAVCITDLEPDSIDIENWTIKPMRRKNKAGVDEVCGFRHRDYVTYTYRNGEVHTGYVTAMYPDKGQLNLQSPTKHCKRVNALKTRLLWRFNKIYWFKCA

SEQ ID NO: 19876 - protein, 344 aa, unidentified
  REGION 1..344: note = Fermentation metagenome
MSDVEIRNDIADKMSQRVKYRRNRRNRKTRYRKARWLNRKNSIKKDRFSPTMRSKLDSHMKEIEFIKSILPISRLVMETATFDPHLLKNSSLHNPIYKKWGYQQGGNYGFENTKAKVLNRDNYICQHCKGRRKDSKLEVHHIIYRSNGGSDEEDNLITLCHTCHKCVHSKSIKLKLLGKRKGQLKHATQMNSIRLQLLKLCSDAIETFGYITKANRLLLRVDKKHHLDACIIASGGNKFTIRQNILYRKKCIPNGDFQQTKGVRSQQAIPTGKIQGFRKFDKVRYLGKEYFIKGRMSSGYAILMDIEGNKVDFSSMPKGWKTPKLSNCKRISARKTWMVDSLVV

SEQ ID NO: 19877 - protein, 419 aa, Geobacillus sp.; identical to SEQ ID NO: 2623

SEQ ID NO: 19878 - protein, 420 aa, unidentified; identical to SEQ ID NO: 3546
  REGION 1..420: note = Human gut metagenome

SEQ ID NO: 19879 - protein, 545 aa, unidentified
  REGION 1..545: note = Human gut metagenome
VQFAWWLCHPKPSDNIEDVNHETALMLLQIKAGTETFGTAPCGSGPKAEGVSPERKAMNTVAVVTNTNKPLMPTSPYRARKLLSSGKAKIVKHRPFTILLVNRSDGNVQEIEYKSDTGYLHVGISVCSEKREFVREQRDLLPDEREKHNDRRKYRRTRRNRKRYRKARFDNRIGKIRKKEKNEHVWLPPSLEHKVDAQVQLFLRLYQVMPVKRAVFEMGQFDPALMKALEKGESAPQGIDYQIGERYQIATRRAAVFTRDRYACVFCGRGIKDHAILHVHHIGFWKQDRSNRLDNLATCCEQCHTSENHRPGGILYGVEPKLESLASATYMNAVRFELLRRLKEAAPDVEFHISYGAKTSVIRKQRSISKSHTNDAYCLGQYFPKLRAEEIGFQKIRRNDRILQKFYDAEYLDSRDGTTKKGKELTNGRISRNHMKDHKNLHQYRGKKLSKGRVTIRRGRSSLKPGSLVRFDGEVLTVHGTHRSRRKNKAGHIKVSVNVEFERPSKTGRKSAALSKCQIISQSYNTGWKKIQLRKEEQGKIAAVG

SEQ ID NO: 19880 - protein, 192 aa, unidentified
  REGION 1..192: note = Human gut metagenome
MVYVQDIDGKPMMPTTRHGKVRRLLKDNKAVVVNTCPFTIKLTYKTSDYKQEIVLGVDSGTKHVGLSATTKSKELYASEVILRSDVVDLLSTRRGLRRTRRSRLRYRKQRFNNRVKSKKDGWIAPSVRHKIDSHIRIISFVYSILPVSKLIVEVAQFDTQKIKNPEISGKEYQEGEQLGFWNVREYLGKGWA

SEQ ID NO: 19881 - protein, 470 aa, unidentified; identical to SEQ ID NO: 2925
  REGION 1..470: note = Human gut metagenome

SEQ ID NO: 19882 - protein, 418 aa, unidentified
  REGION 1..418: note = Human metagenome
MVYVINKEGQALMPTERFGKVRRLLKNGLAHVICRIPFTIRLNYETTHFVQPISLGVDAGSKHIGISATTSEKELYAADVELRNDIVDKLSTRREQRRTRRNRLRYRKARFNNRVSSKHKGWLAPSVENKIQTHLTVVEKIHKFLPITKIIVETASFDIQKIKNLSISSEEYQQGEQLGFFNVREYVLFRDNHTCQHCKGKSKDHILNVHHIESRKTGGNSPSNLITLCESCHKAYHNGKIDIKIKRGASFRDATFMGIARWTTYERVKNIYPNVSMTFGYITKNTRITNGLPKEHYVDARCISGNPKSKPLGYYFYQKKVRCQNRQIHKANFLKGGRKKLNQSPFLVKGYRLFDLVEYQKKLYYIFGRRDSGFFDIRRLDGTKVNKGSISCKRIRLVDIRRNIITERRNSCSIPPTN

SEQ ID NO: 19883 - protein, 447 aa, unidentified
  REGION 1..447: note = Human gut metagenome
VPAYRFKHITKKEVPYMVYVLDIDGQPLMPTSRHGKVRRLLNSHLAKVVKRCPFTIQLLYQSTKETQPVSLGVDAGSRHIGLSATTEREVVYQKELVPRNDIVKLLSARRALRRSRRNRKTRYRRVRFNNRVHSKHKGWLAPSVEVKIQEHITATKRICQILPIFDIHVETAEFDLQRLKAMEEGRLLPAGTDYQLGEQYDFYNTRQYVLHRDEYTCQCCGTHDNNVKLHVHHVESRQTGGEAPNNLITLCEHCHKSIHAGKMMLPKGKKRGKSYRDAAFMGIMRNTLLERLRKEVNVPVTMTYGYITKYWREKAGLEKSHINDAICISKHPYARPLETYYLTKAVRHHNRQIHKTKFSKGGIRKRNQAPYLVKGFRLFDKVLYQGESYFIFGRRITGYFDIRTLDGTKVNKGSTSYKKLRIQDTAEAYLTEVRAIPHMNEFTCVLA

SEQ ID NO: 19884 - protein, 481 aa, unidentified
  REGION 1..481: note = Human gut metagenome
VWHALQTKITLAKVSTQAVGNLCNYGSQIPSRVLFSAIHLAIRKGGIIMYVYVINKHGQPIMPCKPRKARVLLQKGKATVVKQVPFTIRLLYGSSGYKQPVSLGMDAGSKHIGIAATTEKKVLYAEELKPRNDVIKLLSTKRQNRRARRNRKTRYREARFDNRVSSKQKGWIAPSVEVKIQEHISAILRIQKILPLTEIYVETAEFDTQRLKAVAEGKPLPTGTDYQLGEQYDSYNTRQYVLFRDGYKCQCCGKHGDDVKLHVHHKESRQTGGDAPNNLITLCEYCHKAIHTGTTQLPNDKAKRGKSYKDAAFMGIMRKAMVSQLRKLVDIPVTETYGYITKYHRELYHVEKSHINDAIMISKNYEAVAADTYYVSKAVRHHNRQLHKNTILKGGIRKRNQAPHVVKNFRLFDLVKYKNSYYYVFGRRSNGFMDIRTLDGKKVNKGSISNKRLKFVSASKGLLAERKKAIPLADKSASFLA

SEQ ID NO: 19885 - protein, 421 aa, unidentified; identical to SEQ ID NO: 5074
  REGION 1..421: note = Human gut metagenome

SEQ ID NO: 19886 - protein, 445 aa, unidentified
  REGION 1..445: note = IscB polypeptide
MQKLEKRDTYTPTDAPQVRSNCDSVIKHGHSDQVLQNLKTFSNNSDVDQLSGRREQDLRVPVLNMHGEPLMPTTPAKARHLLEQNKAKVVTRKPFTIQLKYATGETKQPIILGIDSGYKKVGISAVTDKKELFSAEITLRTDIPKKLQNRAMYRRTRRSRLWYRQPRFLNRSKPKGWLAPSIQHKLDSHIRIVDKIKELLPITKVIVEVASFDIQKIKNPEIKNEEYQQGEQLNFYNIREYVLHRDNHTCQHCHGKKKDKILQVHHINGKSEGATNKPSELLTVCKTCHDEHHKGIDIIPKKKIRNFKPETFMSIVRWKIVNLLGCEHTYGYITKCNRIKQKLLKSHSNDAFVIAGGTTQKRSKSYIVKQIRRNSRRLQINRKGYRPSIRRKRYKLQPNDVVKYNRKEHRVKSVHCKGSRVILDIKKSIAMNKTELIYYGKGIFN

SEQ ID NO: 19887 - protein, 465 aa, unidentified; identical to SEQ ID NO: 3070
  REGION 1..465: note = Human gut metagenome

SEQ ID NO: 19888 - protein, 465 aa, unidentified
  REGION 1..465: note = Human gut metagenome
MSTCVCVLSNNGERLMPTIRLGKVRHLLKDGKAKIIKHHPFTIQLLYDSETNIQPIEICEDVGYNYIGISVKSQSHEYVSAQYDTLQDEKSCHDACRRMRRTRRNRLRYRQKRFDNRKRDKGWLAPSLKHKKELNVNVIKMYCEVVPITHATVEVGSFDTMLVKAIEEGKATPEGADYQKGPRYNLATLREAVFYRDNYTCQVCGREASEGAILHVHHMFYWKGRHDNSLSELITVCEKCHTPANHQKGGKLYGFGEDIKFANLSGAAFMNTVRWQIVNELYAAFGKPFVTFTYGAMTKEKRIALHLEKSHNNDAYAMGEFHPNCRCTFEHYEKVRRNNRTLEKFYDSRYIDIRTGEIATGKELFNGRINRSHKKDSENLHKYRGKRIRKGYRALRRKKVALNPGDLVSLNGEILTVHGTHTKKNGSVNVEFKTPSKSGKKSTSLKKLKIIKTISPMRSAWDKVS

SEQ ID NO: 19889 - protein, 458 aa, Moorena sp.; identical to SEQ ID NO: 4474

SEQ ID NO: 19890 - protein, 469 aa, unidentified; identical to SEQ ID NO: 7056
  REGION 1..469: note = Firmicutes bacterium

SEQ ID NO: 19891 - protein, 420 aa, unidentified
  REGION 1..420: note = Human oral metagenome
VVYVISKTGQPIMPTENHAKVRMLLKLGKAKVVKRTPFTIQLTGTSKTFTQEVTLGVDAGSKHVGLSASTAKKELFSADLRPRNDVVDLMSSRRELRRSRRNRTTRYRQARFNNRVHSKHKGWLAPSVEVKIWNHIQGIRLVTKLLPVKTICVETAEFDLQRLKALEAGEPVPVGTDYQLGGMYGQYNVRQYVLHRDGYSCQCCGAHGTNKRSVKLHIHHLESRKTGGNAPDNLITLCEDCHTGYHAGTVALLTTKRRRKSTRDATFMGIMRKTLLERLRNMFPDASICSTYGYITKYWREKKNIVKTHTSDAFVIAKNLDVERLDRSLLIVPKRQHNRQIHKCKINKGGMRKLNQTPKFVFGYQLFDRVMCMGQEGFVFGRRSSGGFDIRKLSGEKIKPNISYKKLKRLESRKALLISY

SEQ ID NO: 19892 - protein, 424 aa, Moorena sp.
MRVFVLDKNRKPLDPCKPARARILLKQGKARVIKRYPFTIIIQEKEVKNCVTHKHQLKIDPGAKTTGLAIVQDNQVIWGAELTHRGFQIKDALTSRRQLRRSRRNRKTRYRKPRFLNRKRPEGWLAPSLMSRVHNILTWTKKLIKLCPITGISQELVRFDTQKMENPEISSVEYQQGTLYGYELREYLLEKWNRKCAYCGAANTRLEIEHIKPLAKGGSNRVSNLAIACYKCNQAKGAQEIEQFLSGKPSILKRVFAQRKKPLANAAAVNSTRWKLYEELKSTGLPIETGSGGLTKYNRCRQNLPKTHWLDAANVGQVDNLHIEDFKPLLITAKGHGTRQMCRTDKFGFPSRYVTRLKFVKGFQTGDIVKAIVTKGKKIGTYTGRVATRQTGSFNISTKNGLVQGISHKYCSTVHRKDGYSYSF

SEQ ID NO: 19893 - protein, 437 aa, Bacillus sp.; identical to SEQ ID NO: 3400

SEQ ID NO: 19894 - protein, 411 aa, unidentified; identical to SEQ ID NO: 3917
  REGION 1..411: note = Human gut metagenome

SEQ ID NO: 19895 - protein, 431 aa, unidentified; identical to SEQ ID NO: 6230
  REGION 1..431: note = Human gut metagenome

SEQ ID NO: 19896 - protein, 424 aa, Moorena sp.
MRVFVLDKNLKTLDPCRPARARLLLKQGRAKVFRRYPFTIILSDLEVENCTTHHHQLKIDPGAKTTGLAIRQNNTVIWGAEITHRGFQIRDALTSRRQLRRSRRNRKTRYRKPRFLNRKRPERWLAPSLMSRVHNILTWVKKLIRFCPIAGISQELVRFDTQKTENPEISGTEYQQGTLYGYEIREYLLEKWNRKCAYCGTTDTKLEIEHIKPKSLGGSDRVSNLAIACHDCNQAKGNQEIQQFLSGKPDVLRRILSQAKRPLADAAAVNATRWKLYKELKSIGNPLETGSGGRTKYNRCRFNLPKTHWLDAACVGNVQSIYVENYQPLLIEAKGHGTRQICRTDKFGFPKRYCSRTKIHKGFQTGDIVKAVVTKGKKIGTYVGRVATRKTGSFNISTANGLIQGISHKYCQPIHKKDGYAYTI

SEQ ID NO: 19897 - protein, 452 aa, Lactobacillus sp.; identical to SEQ ID NO: 3322

SEQ ID NO: 19898 - protein, 428 aa, Moorena sp.
MQNYVFVIDTNKQPLNPIPPKKARRLLDKGKAAVFRMYPFTIILKTAINNPVVTNCQLKIDPGSKVTGFALVQNNQVIWGMELEHRGGLIKKKLESRSAVRRGRRNRHTRYRKPRFLNRKRPEGWLPPSLEHRILTIETWIKRLIKFCPVNEIWVERVKFDTQKMQVPEINGVEYQQGELAGYEVREYLLEKWGRECTYCGKQSVPLQIEHIHPKSKGGSDSAKPTLRERVSNLCLACEKCNQRKGNKPIEEFLKKKPSLLQKIKTKAKQPLKDAAAVNATRNKLVKVLWNIKPLITGTGAQTKYNRIKLGFPKEHWVDAACVGDIEILELRTNQPLLVTCKGQGGRQKAALNKYGYPIRHNPLKPIKGWCSGDIAKNILTGEFGRVNPRSKSNSFNYTVRGNKAISLHVKNLTRVHKKDGYTYGFCR

SEQ ID NO: 19899 - protein, 426 aa, Anoxybacillus sp.
MVFVLDTNKRPLAPCHEAVARKLLKQGKAAIYRRFPFTIILKKSVDESEIKATYRLKIDYGSRHTGLAILRGQEVVWLGQLDHRTDIKERIDKRRAFRRARRNRKTRYRKPRFLNRKRKEGWLPPSLESRMQNIKTWVERLRKICPIEHISYENAKFDTQLMRNPEINGVEYQQGTLQGYEVREYLLEKFGRKCCYCGKEGVPLEVEHIIPKSRGGTDRIDNLCLACRDCNQRKGSQTAEEFGYPHIQEMVKKTLKDASVVNATRWKAYEVLKQTGLDVECGTGARTKMNRIRLDLPKTHYFDACCVGESTPNHLYFKTKEVLFIKAKGRGSRSRTNLDRYGFPRGYLARQKFFFGFQTGDMVKAVVPRGKYQGVWFGEVACRKTGSFDIKGKDGKRIAQGINYRYVQVIQRFDGYAYGKGVAELA

SEQ ID NO: 19900 - protein, 422 aa, Deinococcus sp.
MSNRVFVLNPDKSPLMPCTAKRARKMLEAGRAAVFRRYPFTIILKSESPRQSQPLALKLDPGSKTTGMALVMEGKTGRKCIWGAELAHRGLAIKLKLQARRALRASRRSRKLRHRPARFQNRTKPAGWLPPSLMHRVLTVVSWARRLERWTPLDSFSMELVSFDMQKMLNPDIQRDEYQKGTLFGAEIRAYLRQKWDDKCAYCGKKGEEVEHLIPRSQGGTNRVSNLVWSCRSCNEQKGSLTLEEFLAKKPAALRKIQEQQSASLHDAAAVNATKYRLLEELKAFGYPVETGSGAQTSFNRTQQGYDKAHWIDAACVGDSGASVAIRPLKPLKITCMGRGNRQMCGTDKYGFPVRHRTRQKVFFGFQTGDIVRAVVPSGKYAGRHTGRIAVRAKPNFKLGTFDVHVKYLIALQRADGYGYNF

SEQ ID NO: 19901 - protein, 437 aa, Streptomyces sp.; identical to SEQ ID NO: 3250

SEQ ID NO: 19902 - protein, 480 aa, unidentified
  REGION 1..480: note = Human gut metagenome
LYTKPLDNIGEGSLPPSGEINLKGMTFMVYVKSIDGKALMPTSNAKARKLLKQKKAKVVSLRPFVVKLTYKTKTEYTQKLNLGVDSGYSNIGFSVIDAKQEYIAGEVKLLEGMKKRLLEKASYRRIRRSRLRYRKARWNNRVKSKKKGWLAPSLKHKLDTHIKFIDYLKNILPIGKITIEVANFDIQKMKDDLISGIDYQNGDMFGFWNMREFVLHRDGHKCQNPNCKHKDKKEQILKVHHIRYRSEGGSDRPENLITLCSKCHTPVNHKKGKFLYDWCVNGKKVRGFKDATFMSMIRWYLVNELKSKHNNVSITYGYITKNHRIQNGIEKSHLNDAFAIAKGTNQARTKDRFLVIQDRLKNRSLEKFYDSKIIDIRTEKKVSGGDLNCGRSTRNKNLNTENLRKYRGVKISKGQRRIRKQKYFYQPNDLVKYDGKVYTVKGTQNEGKYIALKEIKKVPKVELLIPYVFKKGLNWSYGLC

SEQ ID NO: 19903 - protein, 426 aa, Moorena sp.
MQNYVFVIDTNKQPLNPIPPKKARRLLDKGKAAVFRMYPFTIILKTAVDNPVISPCQIKIDPGSKVTGFALAQNNQVIWGMELEHRGGLIKKKLESRSAVRRGRRNRHTRYRKPRFLNRRPPEGWLPPSLEHRVLTIETWVKRLIKFCPVNEIWVERVKFDTQKMQNPEITGTEYQQGELAGYELREYLLEKWGRECTYCGKQSVPLQIEHIHPKSKGGSDSAKPTLRERVSNLCLACEKCNQRKGNKPIEEFLKKKPSLLQKIKAKAKQPLKDAAAVNATRNKLVKVLRRIKLVVTGTGAQTKYNRNKLGFSKEHWIDAACVGDIETLILKTSQPLLVTCKGQGGRQKAALNKYGYPIRHNPLRPIKGWVTGDIAKHQKLGIGKVTPRSKGSFGFTPLGMKGYKSCKPQDISAIHRKDGYTYSFC

SEQ ID NO: 19904 - protein, 457 aa, unidentified
  REGION 1..457: note = Human gut metagenome
MDAVAVISASGKPLMPTNPVRARKLIKKGKAVIYKYRPLFTIRLTERTDGDIQTIEYCCDTGYQHIGLSIKSRKHEYVNEQRDLLPNETERHNDSRKYRKARRRRKLRHRACRRDNRHDNQICKDGYAPSIRNKRDQHISLYRSYTEILPVERAVFEMGQFDTQVLKAIEKGEPLPQGKDYQHGERYGYATLREAVFARDDYTCICCGKNSFKDKRILCVHHLGFRIGDRTNRLANLATVCTKCHTPKNHQPKGKLYNLKPELKDFKGATFMTMVRWDMLDKLKVVSKDIQVDVTYGAATKEARRDLKIKKSHANDAYCMGSFHPSHRTDLKRYEKCRRNNRVLSKFYDATYIDIRDGKKKKANALGCNRTKRRESRRSEKNERIYRGKKVSKGRIVLRTKRAVIRPGDIVYVGKKKYIVASSKNLGAQLKLADGSLLTTSKVTKIIHCGGWKTVTM

SEQ ID NO: 19905 - protein, 451 aa, unidentified
  REGION 1..451: note = Human gut metagenome
MPVAVISKTGERLMPTSEYRARKLLKSGKAIKYSYRPFTIQLTERETGDIQPIELCMDTGYIHIGISVKSEKHEYLAEQIDTLTDERSRHDACRMYRRQRRNRKRYRQPRFNNRKKDKGWIAPSLEHKKNIHIQAISRINNVMPLTDITMEMGNFDTQVLKAKEEGNPLPQGADYQHGERYGIATLREAVFTRDDYKCQCCGRTIKDGAILHVHHIKYRSQGGTNSMSNLATVCDKCHTPKNHKPEGKLYNWKPKLPSFKGATFMTTIRWQLYNEVKTLFPDIDIHITYGAATKERRRELDIDKSHVNDAFVMGQFHPKHRIKAVLYKKKRRNNRCLEKFYDAKYIDSRDGKKRSGQELFNGRINRNHKKDSENLHQYRLQKVTAGKRTVRKQHYGIQPHDIIVYENRKRETTGCHCSGTRVMLLPDKKSVSIKKIKIYKYAGGYFKSAFN

SEQ ID NO: 19906 - protein, 476 aa, Blautia sp.
LEAAGTEGVSHPGLPGKYKYKRGQLMSVAVINKTGERLMPTSEHRARKLLKSGKAIKHSYHPFTIQLTERESGDAQPIELCMDTGYIHIGTSVKSEKHEYLAEQIDTLTDEKARHDACRMYRRQRRSRKRYRQPRFNNRKRNDRWIAPSLEHKKSIHIQAILRICKAMPVTDITLEMGNFDTQVLKAREEGKPLPHGADYQHGERYGIATLREAVFTRDDYKCQCCGRTIKDGAILHVHHIKYRSQGGTNRMSNLITVCDKCHTPANHKQGGKLYNWKPKIASFKGATYMTTIRWKLYNEARALFPDIDIHITYGAETKERRRALDIDKSHVNDAFVIGQFHPKHRSKPICYKKKRRNNRCLEKFYDAKYIDSRDGKKRSGQELFNGRISRNHKKDSENLHQYRLQKVTPGRRAIRRQHYPIQPHDIIVYNGNKIEVSGCQHKGTRVVFSKTKKSVQISKIKLFKYAGGYSKSVFN

SEQ ID NO: 19907 - protein, 424 aa, Enterococcus sp.; identical to SEQ ID NO: 4949

SEQ ID NO: 19908 - protein, 423 aa, Moorena sp.; identical to SEQ ID NO: 9894

SEQ ID NO: 19909 - protein, 420 aa, unidentified; identical to SEQ ID NO: 5662
  REGION 1..420: note = Human gut metagenome

SEQ ID NO: 19910 - protein, 451 aa, unidentified; identical to SEQ ID NO: 5203
  REGION 1..451: note = Human gut metagenome

SEQ ID NO: 19911 - protein, 398 aa, Anoxybacillus sp.; identical to SEQ ID NO: 9240

SEQ ID NO: 19912 - protein, 533 aa, Streptosporangium sp.
MTTFPMSEKTHQAVLPQRLALESVGADNPGGGDETAHRLPAMPGTGLEHGRGEIEQIGTRSARRHPKGASASEGANREVHPAVFVLDKHGQPLDPCHPARARRLLAAGRAVVARHTPFVIRLKDRTAADSTVQGVQVSIDPGSKHTGIAVFTEHDGDRNGRYALQLDHRGGQIHDKLTARSQYRRRRRSKNLRYRAPRFNNRTKPTGWLAPSLQHRVDTTMSWVTRLIRWAPVTAVHVEKVAFDTHALSAGRPLEGAEYQQGTLAGYEVREYLLAKWGRTCAYCGAQNVPLNLDHIHPRFRGGSDRISNLTLACIPCNQTKNATPIQEFLKAAPALLVTILRQAKAPLRDAAAGNATRWALWRALEATGLAVATASGGRTKWNRSRTGAPKSHTLDALHVGDLDTVTSWPGAVLVVKATGRGSYVRTRTDKHGFPRLRLPRTKQVEGFTTGDLVRATVPSGKKAGVHIGRVAVRSTGRFNIATRYSTVQGIGHRHVRLLQRADGYGYITRSETRDRSVFPPGPEGPGFHAGGN

SEQ ID NO: 19913 - protein, 408 aa, unidentified; identical to SEQ ID NO: 5302
  REGION 1..408: note = Human gut metagenome

SEQ ID NO: 19914 - protein, 442 aa, unidentified
  REGION 1..442: note = Human gut metagenome
MVTVQQSTHHLPFGRVFIRRNLFMVYVISQDSKPLMPCSNPIARLLLKQGKAKVKKREPFTIKLTYETTNHTQGLTLGVDTGSGTIGAAVSKDNGDIVYMSEVVVRNDITDKMTQRAKYRRNRRNRKTRYRKARWLNRASSIKKDRFSPTMQSKLHSHVKEIEYIQSILPVTEMVFETGQFDMQLMKNPSLANPKVRPWGYQKGANYGFENTKAMVLNRDNYTCQCCKGKHKDSKLEVHHIVFRSQGGSDEESNLLTLCHTCHKDLHSGKINPKLSGKVKGNLKYATQMNSIRKQLFRFYPNAIETFGYVTKANRLHLGVDKEHYYDACTIATQGNAFNVKSNLYKKKCVSDGDFQKTKGIRSEQPIVTDKICSFRKFDKVRYFGKDYFIKGRMSTGYAILMDIDGNKIDFSTMPRGYKTPKLSNCKRITARSTVMTQVKVV

SEQ ID NO: 19915 - protein, 472 aa, unidentified; identical to SEQ ID NO: 4119
  REGION 1..472: note = Human gut metagenome

SEQ ID NO: 19916 - protein, 508 aa, unidentified
  REGION 1..508: note = Human gut metagenome
MTALEEKLSKTEYIYVLGFDGKPQMPTRRKRHVLKLLKTGRARIAEDIPFTIRLTYRNSPVLQPVTLAEDPGRTNIGAAVLSPLGGLLFAAVIETRNKEIKKLMADRQKSRQASRRGERKARQRLAKRYGSMVKSGMVMRKLPMYAADKFVTCKFIRNTQARFCNRKRCPDWITPTVQHLVQTHLNIIRKISRYLPVTDIAFEVNRFAFMHMENPKAMGVDFQNGPLKGYDDVKEAICTQQHGKCLMCKKPISHFHHIVPRSRGGSDTIQNLAGLCPECHTKVHTDTTFRKDFDRKKSGQLKKYGALSALNQAVPFICKKLLEEYGEEHVHFCGGLDTSLIRTALGFEKTKKDQMHEVDAYCVGLAALEVNEVETPAFDHTFQIRQFRRQDRSIIHHQTGRSYYQGKEKVAQNRKPGFEQKTTALSQWYEEQVRIHGEKEAEKLRSQLRVEKSCRHYNDMDRFLPGAVFLYEGKRYVLSGRITNGKYLRACGQGMKKFPCCRVYVHPA

SEQ ID NO: 19917 - protein, 410 aa, unidentified
  REGION 1..410: note = Human gut metagenome
IEICEDVGYNYIGISVKSQSHEYVSAQYDTLQDEKSCHDACRRMRRTRRNRLRYRQKRFDNRKRDKGWLAPSLKHKKELNVNVIKMYCEVVPITHATVEVGSFDTMLVKAIEEGKATPEGADYQKGPRYNLATLREAVFYRDNYTCQVCGREASEGAILHMHHMFYWKGRHGNSLNELLTVCEKCHTPANHQKGGKLYGFGEDIKFANLSGAAFMNTVRWQIVNELYAAFGKPFVTFTYGAMTKEKRIALHLEKSHNNDAYAMGEFHPNCRCTFEHYEKVRRNNRILEKFYDSRYIDIRTGEIATGKELFNGRINRSHKKDSENLHKYRGKRIRKGYRALRRKKVALNPGDLVSLNGEILTVHGTHTKKNGSVNVEFKTPSKSGKKSTSLKKLKIIKTISPMRSAWDKVS

SEQ ID NO: 19918 - protein, 502 aa, unidentified; identical to SEQ ID NO: 2616
  REGION 1..502: note = Human gut metagenome

SEQ ID NO: 19919 - protein, 334 aa, unidentified
  REGION 1..334: note = Human gut metagenome
VGRDSVAYSKPPINIDEGIILRLVWPAYRSNTPIERNLYHGICSSKRWTTIDAKRNRYGKVYRMLRSGMAVVVKKCPFTIQLQYESERNVQPVALGIDAGSKHVGVSATTKAKVLYESDVELRGDIVKLLATRRQLRRSRRSRKTRYRPARFDNRKRKNGWLAPSIRQKIESHLTVVANVCKILPVSRIIVETASFDIQKIKNPDIQGTEYQQGEQMDFWNVREYVFFRDGHTCQCCKGRSKDKILNVHHIESRKTGGNAPNNLITLCETCHKGYHNGIVTLPKNIKRGMKFKDAAFMGIMRWTFYNTLKEQYEPDIPVSMTYGYLTKQYKDLP

SEQ ID NO: 19920 - protein, 447 aa, unidentified
  REGION 1..447: note = Human gut metagenome
MVTVQQSTHHLLFSRVFIRMNLFMVYVISQDGKPLMPCSNPIARLLLKQGKAKVKKREPFTIKLTYETTNYVQDLTLGVDTGSGTIGTAVGKDNGDIVYMSEVTVRNDITGKMTQRAKYRRNRRNRKTRYRKSRWLNRANSIKKDRFSPTMQSKFHSHVKEIEYIKSILPITEMVFETGQFDTHLMKNPSLSNPKVKHWGYQKGTNYGFENTKVFVLNRDNYTCQCCKGKHKDSKLEVHHIVFRSQGGSDEESNLITLCHTCHKDLHSGKINPKLSGKVKGNLKYATQMNSIRKQLFRLYPNAIETFGYVTKANRLHLGVDKEHYYDACTIATQGNAFNVKSNLYKKKCVSDGDFQKTKGIRSEQPVVTDKICGFRKFDKVRYFGNDYFIKGRMSTGYAILMDIDGNKIDFSAMPKGYKTPKMVNLKRLEARSTWMITTVEVTPNIA

SEQ ID NO: 19921 - protein, 441 aa, Moorena sp.
MKVCVLHQDGQPLMPTTPRKARRLLEAGQARIVARTPFTIQLLYPSRCSTQPITLGVDAGYATVGFSAVTDKEELVGGELKLLVGMSARLAERAMYRGGRRCRTRHRKPRFDNRRRAEGWLVPSIQHKLDSHLRLIDRLCAVLPVTRIVIEVASFDIQRLKNPDIEGEMYQQGELAGFWNLREYTRSVHRDGHTCQNRQCPNRAKEKVLQVHHLGYWRGDGSDRPANLITLCTRCHTSENHQPGGFLWGWQPNLKSFRPETFMSMVRWRLVEAVGAEATYGYLTKSRRIELGLPKSHTHDAFVIAGGRTQGRATPLLLEQVRRNRRALQIWYDAKYIDIRTGEVVKAQVLNNGRRTRNRNLGGENLRRYRGPKVAKGRVSIRRRRYPYQPGDLVRYEGQVYRVQSMGGYGRNLKLAGRPKEVKAPLVSPVRWRKGICQQVP

SEQ ID NO: 19922 - protein, 496 aa, Streptomyces sp.; identical to SEQ ID NO: 4777

SEQ ID NO: 19923 - protein, 414 aa, unidentified
  REGION 1..414: note = Human gut metagenome
MPCSPAKARLLLKEKKAIVVRRTPFTIQLTIATGETKQPVSLGVDAGYKHVGLSASTEKAELYASEVELRQDITDLLSARRALRQSRRNRKTRYRAPRFDNRIRTKRKGWLAPSVENRIDAHLSRIEAVLRLLPVTKITVETASFDLQLLKNPDISGKEYQEGEQLGFWNIREYVLCRDGHVCQHCYGRSKDPVLNVHHLESRRTGGDSPGNLITLCETCHKALHRGEITLKAKRGQSFRAEAFMGIMRWEVHNRLRALHPGIEVSNTYGYRTKHARIANGIAKSHCADAFCIAGNLGAERLCEFFFQKQTRRNNRQIHKLSILKGGIRKRNQAPFEVKGFRLFDKVACQGEEGFIFGRRSSGFFDVRKLDGTRISAGISCKKLHLLEKRRTYLTEIRKEEALPPLPEGRGLRA

SEQ ID NO: 19924 - protein, 451 aa, unidentified
  REGION 1..451: note = Human gut metagenome
VLSAWNPFQHWRRITTGRKTEETNLRVLVWNKRGKPLMPCSPAKARLLLREKKAIVVRRTPFTIQLTIATGETKQPVSLGVDAGYKHVGLSASTEKAELYASEIELRQDITDLLSARRELRRARRNRKTRYRAPRFDNRIRTKRKGWLAPSVENRINAHLSRIEAVLRLLPVTKITVETASFDMQLLKNPDIAGKEYQEGEQLGFWNVREYVLFRDGHVCQHCHGRSKDPVLNVHHLESRRTGGDSPGNLITLCETCHKALHRGEITLKAKRGQSFRAEAFMGIMRWEVLNRLKASHPELEVNNTYGYRTKHARISNGIAKSHCADAFCIAGNLGAKRLGEFFFQKQTRRNNRQIHKLSILKHGLRKRNQTPFEIKGFRLFDKVACKGEEGFIFGRRSSGYFDVRKLDGTRISAGISYKKLHLLEKRQTYITEIRKEKALPPLPEGGGLRA

SEQ ID NO: 19925 - protein, 544 aa, Streptomyces sp.; identical to SEQ ID NO: 10849

SEQ ID NO: 19926 - protein, 422 aa, unidentified; identical to SEQ ID NO: 13732
  REGION 1..422: note = Human gut metagenome

SEQ ID NO: 19927 - protein, 415 aa, unidentified; identical to SEQ ID NO: 3582
  REGION 1..415: note = Human gut metagenome

SEQ ID NO: 19928 - protein, 469 aa, Nitrospira sp.; identical to SEQ ID NO: 15405

SEQ ID NO: 19929 - protein, 492 aa, Selenomonas sp.; identical to SEQ ID NO: 11943

SEQ ID NO: 19930 - protein, 426 aa, unidentified
  REGION 1..426: note = Human gut metagenome
MVYVQNHLGQPLMPTQDHRKVRLLLKAGAAVVVRRTPFTIRLTTRTKTYVQPVILGVDTGSKTVGMSAATHEEEVFAAELTPRNDVVKNLADRRKFRSSRRGRTTRYRQPRFNNRVHSKHKGWLAPSVEVKIQEHITSIKRACELLPIGKVVVETAEFDLQLLKSIADGMPVPQGEDYQKGEMYGFYNVRQYVFFRDGYTCQCCGAHGKGIKFHTHHLESRKTGGNAPDDLVTVCDKCHKAFHAGLITDAKLKKRRRKSTRDAAFMGIMRKTLLQRLRAELPIPVVETRGYITKATRERLLKLPKSHTNDALAIAMGRHGFGIKEVTYMPQSDRIYQIKPVRHHNRQLHKALPKKGGRRQRSQGPKYVQGFRRFDKVLYRGQECFIWGLRTRGYFQLKLLNGTKVHESAKASELILLEHRSGYLIA

SEQ ID NO: 19931 - protein, 426 aa, unidentified
  REGION 1..426: note = Human gut metagenome
LRVFVLNKRGKPLMPCSPAKARLLLKEKKAIVKRRTPFTIQLTIATGETKQPVGLGVDAGYKHVGLSASTDKAELYASQVELRQDITDLLSARRALRRARRNRKTRYRAPRFNNRIRTKRKGWLAPSVENRINAHLSRIEAVLRLLPVTKITVETASFDMLLLKNPDIAGKEYQEGEQLGFWNVREYVLFRDGHVCQHCYGRSKDPVLNVHHLESRRTGGDSPGNLITLCETCHEALHRGEIALKTKRGHSFRAEAFMGMMRWEVLNRLKASHSELEVNNTYGYRTKHARIVNGIDKSHCADAFCIAGNLGAERLCEFFFQKQTRRNNRQIHKLSILKGGIRKRNQAPFEIKGFRLFDKVACKGEESFIFGRRSSGYFDVRKLDGTRISAGISYKKLRLLEKRRTYLTEIRKEEALPPLPEGRGLR

SEQ ID NO: 19932 - protein, 442 aa, unidentified
  REGION 1..442: note = Human gut metagenome
MVYVLNKDGQPLMPTSRHGKVRRLLKTNKAKVVKRCPFTIQLLYDTANHTQNITLGVDAGSKHIGLSATTEDKVLFEADVELRNDISRLLEARYTFRRSRRNRKTRYRKKRFDNRVSSKHKGWLAPSIEHKIQSHFAMVEKVHRILPVTKIVVETASFDTQLLKAQLEGKPIPHGTDYQNGELAGWNIREYIFHRDNYTCQWCKGKSKDPVLVTHHHAYWKGDHTSKPSSLITLCNTCNDSKYHKKEANRLWGWEPKVTNSYKHAVFMGVMRWTFYNRLKEIYPNVSMTYGYITKNTRIENNLPKTHYVDARCISGHPEAKSSGEYFYYKKVRCHNRQLHKANTLKGGIRKRNQAEYTVKGFRLFDRVEYKNNEYFVFGRRTSGFFDIRTLDGQKVNKGSISFKKLKLKETSKTYLIERRMADTGVSLATLTTEVTSLRQTD

SEQ ID NO: 19933 - protein, 445 aa, Myxosarcina sp.
MSNYIFVIDTNFQPLNPIHPARARKLLKAGKAAIYRKYPFTLVLKKAVEPKEIKQCQLKLDPGSKTTGIVLLQKNKLIWAAELTHRGQRIKNALESRRSFRRGRRNRKTRYRQPRFLNRKRSDGWIAPSLKHRVLTTMTWVKRLIKRCPIKFIAVELVRFDTQKLQQPEIEGAQYQQGTLYQYEVKEYLLEKWSRTCAYCDAKNVPLEVEHIVPKSRGGSNRVSNLTLACVPCNQAKSNRDIKDFLADKPDLLSKILKQVLAPLKVRNAPPGKLLSSTQENLADAAAVNSTRWKLFEALKTTNLPVTTGTGGQTKFNRTQQNLPKTHWLDAANVGETPQLKILTSQPLLITAKGHGIRQRAITDKYGFSKRHRGRFKLSHGFKTGDIVKANIPKGKYAGHYNGLRIAIRTKPTFALSPQNGGKQFDAHCKYLINIHKADGYSYSY

SEQ ID NO: 19934 - protein, 444 aa, unidentified
  REGION 1..444: note = Microcoleaceae bacterium UBA10368
MSKTPNQVFVLDNSKKPLTPCLPVIARKLLNAGKAKVFRLYPFTIILKKTVDEQPEPIEIRIDPGSKTTGLALVSLTQVIWGAELTHRGHAIKSRLETRSAIRRSRRHRKTRYRQPRFLNRTRPKGWLPPCLEHRVLTTITWVNRLCKLAPIKSIAFELVNFDTQKMQNPEVSGVEYQQGELQGYEVREYLLEKWNRKCAYCGAEKLPLQVEHINPRASCGSNRVSNLCLACKKCNTKKGTQDIKDFLKGKPEILKRIMSQAKAPLKDAAAVNGTKSALLQALKATKLEPIYVGRGSLTKFNRTKLGLPKAHWIDAACCGDVTQGLTLAINQPLLIKAMGWGSRQVVQTDKYGLTRKGYQPKQKVKGWNTGDMISVIGGKHEGVKCKGIKTTRFKGNFDIRVNDTTVISVSRNQIKPVYRNDGYNYSFVGNCREMSEKRVRAIG

SEQ ID NO: 19935 - protein, 395 aa, unidentified
  REGION 1..395: note = Human gut metagenome
MDTGYLHIGTSVKSEKHEYLGVQIDTLTDEKQKHDACRMYRRQRRSRKRYRQSRFNNRKRSDGWIAPSLEHKKDIHIQTISRICNAMPITNITLEMGNFDTQVLKALEENRPLPQGTDYQHGERYGIATLREAVFARDKYTCQCCRKTIADGAILHVHHIIYRSRGGTNRMSNLATVCDRCHTPANHKPGGRLYNWKPKIASFKGATFMTAVRWKMYNEVKSKFSDINIHITYGAETKEQRRAFDITKSHVNDALVMGQFHPKHRSRPVCYKKKRRNNRCLEKFYDAKYIDSRDGKKRSGQELFNGRINRNHKKDSENLHQYRQQKVSAGRRTIRKQHYSIQPHDIIVFNRQQFETSGCHCNGARAILLPQKKSVAIKKLSIHKYAGGYFKSDFT

SEQ ID NO: 19936 - protein, 415 aa, unidentified; identical to SEQ ID NO: 7357
  REGION 1..415: note = Human gut metagenome

SEQ ID NO: 19937 - protein, 417 aa, unidentified
  REGION 1..417: note = Human gut metagenome
MPCSPAKARLLLKEKKAIVKRRTPFTIQLTIATGEAKQPVALGVDSGYKHIGLSATTEKAELYASEVELRQDITDLLSARLALRRSRRSRKTRYRAPRFDNRVASKRKGWLAPSVENRIAAHMSRVEAVMRVLPVTAITVETAAFDTQLLKNPDIAGEAYQQGEQLGFWNVREYVLFRDGHVCQHCRGKYKDPILNVHHIESRRTGGDAPNNLITLCETCHKAFHRGEIKLKVKRGKSFKAETFMGIMRWTLFERLKKAHPELRVRNTYGYLTKHKRISHGIAKSHCADAYCIADNLGAKRLEGFFFQKQTRKHNRQIHKLSILKGGLRKKNQAPYEVKGFRLFDKVICKGEEAFIFGRRTSGSFDVRRLDGTRISAGINYKKLRLLEPRTTYLTEFRKEAALPHLHECSGSRAEFR

SEQ ID NO: 19938 - protein, 431 aa, unidentified
  REGION 1..431: note = Human gut metagenome
MDAWDIIVILNKRGKPLMPCSPAKARLLLKEKKAIVKRRTPFTIQLTIATGESKQPVTLGVDAGYKHVGLSASTEKAELYASEVELRQDVSDLLSARRALRQSRRSRNTRYRAPRFDNRIRTKRKGWLAPTVENRINVHLSRIETVLRLLPVTKITVETASFDTQLLKNPDIAGKEYQEGEQLGFWNVREYVLFRDGHVCQHCHGRSKDPVLNVHHLESRRTGGDSPGNLITLCETCHKALHRGEIKLKAKRGRSFRAETFMGIMRWGVLNRLKASHPKLEVHNTYGYRTKHARIANGIAKSHCADAFCIAGNFGAKRLGEFFFQKQTRRNNRQIHKLSILKGGIRKRNQAPFEVNGFRLFDKVACKGEEGFIFGRRSSGYFDVRKLDGTCISAGISYKKLHLLEKRRTYLTEIRKEEALPPPPEGRGLRA

SEQ ID NO: 19939 - protein, 465 aa, unidentified
  REGION 1..465: note = Human gut metagenome
MSTCACVLSKNGERLMPTIRLGKVRHLLKDGKAKIIKHHPFTIQLLYDSETNIQPIEICEDVGYNYIGISVKSQSHEYVSAQYDTLQDEKSCHDACRRMRRTRRNRLRYRQKRFDNRKRDKGWLAPSLKHKKELNVNVIKMYCEVVPITHATVEVGSFDTMLVKAIEEGKATPEGADYQKGPRYNLATLREAVFYRDNYTCQVCGREASEGAILHVHHMFYWKGRHDNSLSELITVCEKCHTPANHQKGGKLYGFGEDIKFANLSGAAFMNTVRWQIVNELYAAFGKPFVTFTYGAMTKEKRIALHLEKSHNNDAYAMGEFHPNCRCTFEHYEKVRRNNRILEKFYDSRYIDIRTGEIATGKELFNGRINRNHKKDSENLHRYRGKRTYAGHRALLRKKVNLNPGDLVSLNGEVLVVHSTHTNKKGAVNVEFKTPGKSGQKSASLKKLKIVKAADSMHSAWEKIS

SEQ ID NO: 19940 - protein, 414 aa, unidentified; identical to SEQ ID NO: 3491
  REGION 1..414: note = Human gut metagenome

SEQ ID NO: 19941 - protein, 570 aa, Streptomyces sp.; identical to SEQ ID NO: 11497

SEQ ID NO: 19942 - protein, 466 aa, unidentified
  REGION 1..466: note = IscB polypeptide
MQKLSVELNNAPMDTSLVHCSTNPVLNREETLSVQDTVLADNNSEENLRLPVGGHKATTLVYVLNKNGNPLMPCSPTKARHLLGKNKAKVVRCSPFTIQLLWDCEENVQTITLGIDPGYNCMGFSAISSKKELISGEVQLRKDVSKKLTKRRMYRRNKRSKLWYREPRFNNRKKIEGWFAPSIQYKLDSQIRLIDKIKKLLPISEMIIEVTSFDTQKMQNPEISGIEYQQGELQGYEVKEYLLEKWGRKCVYCNKTNIPLEVEHIIPKSREGTNRVSNLTLSCSKCNLKKGNKTAKEFGHPEIQKKADETLKAAAFMNIVRWKLIDMLNCNWTYGYITKYNRIKFGLEKSHINDAFIIAGGNGQQRTLEYRINQIRRNNRCLQLNRKGFAPSIRRRRYNFQPHDLVRYINRIYEVKGMFNKGKYIRLKAEYRDINTKIENIRLYQYKKGWQFISALTDGVFLPIFK

SEQ ID NO: 19943 - protein, 517 aa, unidentified
  REGION 1..517: note = mine drainage metagenome
  SITE 360: note = misc_feature - Xaa can be any naturally occurring amino acid
MLPQSRALEAADADNREGQDETVGGKGAIPKPVANISEGRRFERSALRPQGQNNVRFDGGFVQVFVLDKKKKPLMPCHPARARELLREGRAVVHRIAPFTIRLKDRIGGETQPIRVKLDPGSKTTGLAAAREEETDGEKTAHVLFQAEIHHRGSAIKKKLDQRRAFRRRRRSQLRYRTPRFDNRTRPDGWLPPSLRHRVDTTLAWVERLRRLVPVSELSQELVRFDMQKIENPEISGIEYQQGTLAGYEVREYLLEKWGRTCAYCGSENVSLEIDHIHPRSLGGSDRVSNLTLACRSCNLKKGNRPVGEFLAKTPERLSTILARAKAPLKDAAAVNTTRWALFQALKATGLPVEVASGGXTKYNRTRLGIPKGHSLDAACVGKVDRIEGWNRPCLSIKATGRGSYQRTRLDAFGFPRGSLTRTKAHFGFQTGDRVLAIVTKGKKTGTYAGRVAVRSSGSFNIQTGSRVVQGISYKDCRLLQRADGYGYSIHPITEKGEAGEALPLPGMNAGVSRARG

SEQ ID NO: 19944 - protein, 544 aa, unidentified
  REGION 1..544: note = Human gut metagenome
MKQKKQKVMVYILNKKGKPLMPTIRCGHVRKLLDSKKAVVVNSNPFTIRLKYDTPNGIQDVFAGIDSGRENIGSGASNEDGDCLYLGELKTSNKSIKLKMTERAGFRKERRRHDRQNKQRKARKDHTEIQNGNDDICRTTISCKSVQISYPVAEESVTHKIIRGKEGKFANRHRDEGWITPSARQLVQMHMNDLKSMCKILPINHVTLERVAFDFQKLENENIKTWEYGKGKLYGYDSPEEYIHDVQNGKCLVCGKPHIDYLHHIIPRSKGGSDKVSNIAGLCYDCHYGPMGVHNCQNTQDRLPELKSEANKQYKVSLLNSVMPVLIEEMDKFCKANSIMFSICEGHDTAKVRDMYDLQKDHCIDGFAISLVDRNVKSVDVMPDRIYQKQRYKKKSKNIIQKRNCREYYDDKKLVAVNRHKGTDQKADSLEEYMNTYAETHTTDECKKHFDSLVVKPARRTYTFHKEWRICPFHIGDKVRYEKKNKIKGNTKVETFICESIHFYKDENKAKVEHNKTKSKRMKFCRVLESGCTPYVDYRKLALM

SEQ ID NO: 19945 - protein, 442 aa, unidentified; identical to SEQ ID NO: 2903
  REGION 1..442: note = Human gut metagenome

SEQ ID NO: 19946 - protein, 415 aa, unidentified; identical to SEQ ID NO: 3582
  REGION 1..415: note = Human gut metagenome

SEQ ID NO: 19947 - protein, 413 aa, unidentified; identical to SEQ ID NO: 5965
  REGION 1..413: note = Human gut metagenome

SEQ ID NO: 19948 - protein, 420 aa, unidentified
  REGION 1..420: note = Human gut metagenome
MQYVYVLNKHGEPLMPCSPGKARLLLKQQKAHVIKRTPFTIKLLYGSTGYKQPITLGVDAGSKHVGLSASTEKRELYREEFTPRNDVVDLLSTRKQYRRSKRYRKTRYRAPRFDNRIHNKHKGWLAPSVEVKIQEHITVIKRICRILPVALVRVETAEFDTQRLKAMLEGKPLPVGTDYQLGEMYDEYNVRQYVLKRDNYTCQCCGAHTTAKKAVKLHVHHLESRKMGGNAPGNLITLCITCHDALHKGKVSLDNKKRGKPMRDAAFMGIMRKTLMSRLREELPITVQGTYGYITKMRREQNNIKKSHVNDARCISKHPLAEPCSVCYRTKAIRHHNRQTHKANFSKGGIRKRSQMPYVVEGYRLWDKVLYKGQECFVSGRRTSGSFTLKKLDGTRISKGVTFKKLRLLEPATNYLIERM

SEQ ID NO: 19949 - protein, 424 aa, unidentified; identical to SEQ ID NO: 3232
  REGION 1..424: note = Human gut metagenome

SEQ ID NO: 19950 - protein, 447 aa, unidentified; identical to SEQ ID NO: 5316
  REGION 1..447: note = Human gut metagenome

SEQ ID NO: 19951 - protein, 451 aa, unidentified
  REGION 1..451: note = Human gut metagenome
MKVFVKNMRGQALMPCSPRKARILLRQKKAKVVDYRPFTIQLCYPTGEAKQEVIIGIDQGARHIGIAVFSQGKILAKGEVELRQDVHSLLQTRAEYRRGRRYRKTRYRKARFLNRIRPEGWLPPSIQEKLNANFAWIDKFCSLVPDSKLRIEVGKFDTAKMINPDIKGVDYQHGQTYGYYDVRYFVFARDNYTCQVCHKKNKILHTHHIIYKSKGGSDRADNLITVCTECHTHENHQEDGILYQWMLKHKKTRQYKEPSFMNILRIRTYKKYSEADITYGSVTTERRKALRLEKTHYNDAIAITGIDKVEENIDECFWIKQLRKRKRSLHEATPRKGRKEKNTEAKRNSKNTKQVNGWYLNDEVICYGRRGWITGFNSATSSSPAAFVVDKDGNYITVPEKKYKQVSLKLLKLVRHNNNWQYVVTKEEKSAASSEIPHPPIEVSESFLAAC

SEQ ID NO: 19952 - protein, 469 aa, Microcoleus sp.; identical to SEQ ID NO: 19521

SEQ ID NO: 19953 - protein, 418 aa, unidentified; identical to SEQ ID NO: 6419
  REGION 1..418: note = Human gut metagenome

SEQ ID NO: 19954 - protein, 411 aa, unidentified; identical to SEQ ID NO: 8372
  REGION 1..411: note = Human gut metagenome

SEQ ID NO: 19955 - protein, 414 aa, Scytonema sp.; identical to SEQ ID NO: 7784

SEQ ID NO: 19956 - protein, 424 aa, Moorena sp.; identical to SEQ ID NO: 7692

SEQ ID NO: 19957 - protein, 414 aa, unidentified
  REGION 1..414: note = Human gut metagenome
MPCSPAKARLLLKEKKAIVVRRTPFTIQLTIATGEAKQPVSLGVDAGYKHVGLSASTEKAELYASEVELRQDVSDLLSARRALRQSRRSRNTRYRAPRFDNRIRTKRKGWLAPTVENRINVHLSRIETVLRLLPVTKITVETASFDTQLLKNPDIAGKEYQEGEQLGFWNVREYVLFRDGHVCQHCHGRSKDPVLNVHHLESRRTGGDSPGNLITLCETCHKALHRGEIKLKAKRGRSFRAETFMGIMRWGVLNRLKASHPKLEVHNTYGYRTKHARIANGIAKSHCADAFCIAGNFGAKRLGEFFFQKQTRRNNRQIHKLSILKGGIRKRNQAPFEVKGFRLFDKVACQGEEGFIFGRRSTGYFDVRKLDGTCISAGISYKKLHLLEKRRTYLTEIRKEEALPPPPEGRDLRA

SEQ ID NO: 19958 - protein, 406 aa, unidentified
  REGION 1..406: note = Human gut metagenome
MRGKPLMPCSPAKARHMLKAGKAVVVRRTPFTIKLTIATGETKQDVTLGVDAGARHVGISATTEKEEVFASEVKFRQDITGLLADRLAFRRARRNRKTRYRAPRFNNRVRSKHKGWLAPSVENRIQAHISRIEAVCRLLPVTKIVIETASFDIQKIRNPEVEGTGYQQGDQLGFWNVREYVLFRDGHICQHCRGRSKDPILNVHHLESRKTGGDAPNNLITLCETCHKAYHAGKIKLKVKRGQSFRAEAFMGIMRWTLLDRVRKTHPKLPVENTYGYLTKHKRIALGLPKTHCADAFCIAGNLKALRRGDFLFQQQTRKHNRQIHKCSILKGGVRKLNQAPFLVKGFRLFDKVRIGGQIGFVFGRRVRGTFNIRRLDKTVIGTDINCKKLSLLETRKTFLTELRKE

SEQ ID NO: 19959 - protein, 425 aa, Nodularia sp.; identical to SEQ ID NO: 3165

SEQ ID NO: 19960 - protein, 512 aa, unidentified; identical to SEQ ID NO: 7699
  REGION 1..512: note = Human gut metagenome

SEQ ID NO: 19961 - protein, 468 aa, Moorena sp.; identical to SEQ ID NO: 16431

SEQ ID NO: 19962 - protein, 415 aa, Bacillus sp.; identical to SEQ ID NO: 2431

SEQ ID NO: 19963 - protein, 423 aa, Moorena sp.
MRVFVLNKNRQPLDPCKPARARILLSTGKAKVYRRYPFTIILTEEINEPITHEHQLKIDPGAKTSGLAIVQVKRVIWGAELTHRGFQIREALSSRRQLRRSRRNRKTRYRKPRFLNRTRPKGWLAPSLTSRVQNILTWVKKLIRFCPITGISQELVRFDSQKLQNPEISGIEYQQGTLYGYELREYLLEKWNRKCAYCGATGTQLEIEQIKPKSKGGSNRVSNLTIACHPCNQAKSNQDIELFLSKKPSILKRILSQSKRPLADAASVNSTRWKLYYELKSIGLPVEVGSGGLTKFNRCRQNLPKTHWLDAANVGKVETLIIEVTLPLAITAKGHGTRQLCRTNKYGLPIRHCSRIKFHKGFQTGDLVRAVVTKGKKIGTYVGRVATRKSGSFNISTKSGLVQGISHKYCQFIHTKDGYAYTN

SEQ ID NO: 19964 - protein, 442 aa, unidentified; identical to SEQ ID NO: 4522
  REGION 1..442: note = Human gut metagenome

SEQ ID NO: 19965 - protein, 420 aa, unidentified
  REGION 1..420: note = Human gut metagenome
MQYVYVLNKHGEPLMPCSPCKARLLLKQKKACVVKRTPFTIKLLYGSTGYKQPITLGVDAGSKHIGISATTEKYELYREEATPRNDVVDLLSARRAFRRSRRNRKTCYRAPRFNNRVHSKHKGWLAPSVEVKIQEHITLIKRVCRILPVTLVRVETAEFDTQRLKAMLEGKPLPVGTDYQLGEMYDEYNVRQYVLKRDNYTCQCCGAHPAKIKAVKLHVHHIETRRTGGNAPNNLITLCTACHKALHAGKVTLDGRKRGKPLKDAAFMGIMRKTLMERLCKELKISIQGTYGYITKYLREKHDIPKSHTNDARCISRHPLAVPCDACYYTKAVRHHNRQLHKATILKGGIRKANQAPYMVKGYRLWDKVSYNGTECFITGRRTSGYFALKKLDGTVVSNSASYKKLRLLEVATNYITERR

SEQ ID NO: 19966 - protein, 417 aa, unidentified; identical to SEQ ID NO: 14385
  REGION 1..417: note = Human gut metagenome

SEQ ID NO: 19967 - protein, 422 aa, unidentified
  REGION 1..422: note = Human oral metagenome
MLVYVISKDGQPLMPISRCGKVRRLLKSKRAKVIKRCPFTIKLLFEPENDFVGECYCGVDTGSKHVGIAVVSNDRVLYQSQIELRDDIKRKMEQRRMFRRNRRSRKTRYRKTRFLNRANSTKPNKLPPSVKHKVQAHIDEIEFCNKILPVSNLILEVSQFDAALMKNPSLMNEKVKHWGYQQGFNYGYSSRRSAILHRDNYTCQCCGKKNCRLEVHHIKFRSNGGTDDEENLITLCKECHNGIHAGIAVLNKKPKKSKSLKHATHMSIIRSRLLKKYPDAIETFGFVTSENRNHLNLPKDHYIDACVIASGGLHFELSDVLYQKRRVSKQDRQLCQGMHGERKIPTWKILGFKKFDLVEYMGELCFVKGRRSSGSFVLMDINRRLIDFRDRGGKQNPSYKSLKRVSARRSILCISKKNREIR

SEQ ID NO: 19968 - protein, 427 aa, unidentified
  REGION 1..427: note = Human oral metagenome
MLVYVLKQNGQPFMPTERFGKVRRLLKEGKAKVVRREPFTIRLLYEPETDVVQECYCGVDTGSKHIGVACIGNDKILYQSQVELRNDIKKKMDSRRMYRRTRRSRKTRYRKARFLNRRNSIRKDRLPPSVKHKVQAHIDEIEFCKKILPVSNENLILEVSQFDTALMKNPSLMIEKIKHWGYQKGFNYGHSSRRKAVLHRDNYTCQCCGKKNCQLQTHHIIFRSRGGSDDENNMITLCKECHKGVHDGTIVLDKKPKKGKNLKHATHINIIGSGLLKKYPQAIETFGFVTSENRNHLHLEKDHYIDACVIASGGLKFRELNVIFYKQRVSKGDYQLCKGVRGEIKIPNGKIFGFRKFDKVKYLEKEYFVKGRMSRGGYVILMNIFSEKVDFSSMPKGLKTPKLSNCSRISARRSCLCIRKKITLNIV

SEQ ID NO: 19969 - protein, 436 aa, unidentified; identical to SEQ ID NO: 12564
  REGION 1..436: note = metagenome

SEQ ID NO: 19970 - protein, 462 aa, unidentified
  REGION 1..462: note = Human gut metagenome
MSVLVIGRNGRALMPTNPRKARLLLKKKTASVVCRHPFTIQLLYKTGCATQEGCIGIDTGSQHIGVGITCGDRVILKDEHALRSSMEKRSLLATRAVMRRGRRYRKVRYRKPKWRHHTKRMYFEKANRRGQHWRKVKTTTQSPRLKGWLPPSLQSKCDHHFRIIDRYLKYLPDPITRNLVIEAGRFDMARMNDPTIHGEMYQRGPMYDAENLRAYIFARDNYQCACCKAKAGTTRKADGTTVKLVAHHILFRSRGATDNPKYIISVCDHCHTTKAHQPGGILYSWMENNKKVARGSRDATFMNILRKRLFARYPQAAFTYGNITAADRKQLRLPKSHANDAVAISLFGKEASTVKNICQTMHYKQIRKSKRSLHEAIPRKGRKNPNTKAVRNKKNTTQVNGFKLWDSVLADGKKLFICSFTGTSAYLIDKNGCYISQPGKTYKQWPLSKLKRLHPNGNWLMA

SEQ ID NO: 19971 - protein, 340 aa, Anoxybacillus sp.
MVFVLDTNKRPLAPCHEAVARKLLKQGKAAIYRRFPFTIILKKSVDESEIKATYRLKIDYGSRHTGLAILRGQEVVWLGQLDHRTDIKERIDKRRAFRRARRNRKTRYRKPRFLNRRRKDGWLPPSLESRVQNIQTWVNRLKKLCPIGYISYENAKFDTQLMRNPEINGVEYQQGTLQGYEVREYLLEKFGRKCCYCGKENVPLEVEHIIPKSRGGTDRVDNLCLACHDCNQRKGSKTAEEFGYPHIQKQVKESLKDTSAINSTRWKAYEVLKQTGLDVECGTGARTKMNRIRLDLPKTHYFDACCVGESTTNHLYFKTKEVLFIKAKGRGSRSRTNLDR

SEQ ID NO: 19972 - protein, 431 aa, unidentified
  REGION 1..431: note = Human gut metagenome
MPNKVYVINKHGRPLMPCSPAKARHLLDAGKAKVKKRTPFTIQLVYGSSGYTQEVILGVDAGSKTIGMSASTTKEELLSAEVKPRNDVVDLLSTRREFRRARRNRKTRYRKPRFDNRVRSKHKGWLAPSVEVKIQEHITAIRRVCGILPVSKVVIETAEFDLQLLKAIADGKPVPQGEDYQQGEMYGHYNVRQYVLWRDGYTCQCCGAHATKKKEVRLHVHHLESRKVGGDAPDNQVTLCESCHEKLHKGLIAEKDFKKRKRKSTRDATFMGIMRKTLMQRLCSELPIPVIETRGYITKATREKLLVLPKSHTNDALAIAQGKQGFNVGYLPGIVQINKIYTIRPVRHHNRQLHKATILKGGIRKSNQTEKYVFGYCLFDKVQFNGQDCFIWGRRTTGIFTIKTINGKMIKDGISFKKLKLAEKSTSYLIA

SEQ ID NO: 19973 - protein, 415 aa, Bacillus sp.; identical to SEQ ID NO: 6255

SEQ ID NO: 19974 - protein, 489 aa, unidentified; identical to SEQ ID NO: 15226
  REGION 1..489: note = uncultured beta proteobacterium

SEQ ID NO: 19975 - protein, 493 aa, unidentified; identical to SEQ ID NO: 2644
  REGION 1..493: note = Human gut metagenome

SEQ ID NO: 19976 - protein, 442 aa, unidentified; identical to SEQ ID NO: 2903
  REGION 1..442: note = Human gut metagenome

SEQ ID NO: 19977 - protein, 408 aa, unidentified; identical to SEQ ID NO: 5302
  REGION 1..408: note = Human gut metagenome

SEQ ID NO: 19978 - protein, 414 aa, unidentified
  REGION 1..414: note = Human gut metagenome
MPCSPAKARLLLKEKKAIVKRRTPFTIQLTIATGESKQPVTLGVDAGYKHVGLSASTEKAELYASEVELRQDGSDLLSARRALRQSRRNRKTRHRAPRFNNRLRTKRKGWLAPSVENRINAHLSRIEAVLRLLPVTKISVETASFDMQLLKNPDIAGKEYPEGEQLGFWNVREYVLFRDRHVCQHCYGRSKDPVLNVHHLESRRTGGDSPGNLITLCETCHKALHRGDITLKAKRGKSFRAEAFMGIMRWEVHNRLRALHPGIEVSNTYGYRTKHARIVNGIAKSHCADAFCIAGNLGAERLCEFFFQKQTRRNHRQIHKLSILKGGIRKRNQAPFEVKGFRLFDKVACQREESFIFGRRSSGFFDVRKLDGTRISAGISCKKLHLLEKRRTYLTEIRKEEALPPLPEGRGLRA

SEQ ID NO: 19979 - protein, 537 aa, Moorena sp.
MRWLAASKIRTRIFGKEAQQMPSIPVISKDGHPLMPCHHIPVISKDGHPLMPCHHYGRVKRWLKQGKAVIRSRWPFVVQLCYDVEMEPSEGSILGLDPGRTNIGLCAIDRQGRVLFSADCLTRNKDVPKLMGNRAAHRHASRSGERKARQRIEARLHPESKVTETWRKLPGCRKFVRCKVIRNTEARFSNRKRPAGWLTPTANQLLETHLNLARKLQRFLPIQSFAVEINRFDFARMENPGIRNWEYQRGRLAGYSTRNEAVDARQEGRCLLCGRPQIDEHHHAVWKSEDGSESIDNIAGLCAKCHEKVHDSVEMQAKLRAKLKGQTKKYGALSVLNQIMPKLLKKLSTILPTYVTTGYETAQTRREYGLPKSSGSSGHYVDAWCIAATQADAVKGMPELDEPTTHVRQFRRHDRAIIKAQTERAYLLDGKVVAKNRHLRTGQVDPKKPADKQVYSLAEYRRQFPENIGRLEVRASSRRKNNRSRILPGAVFEYEGKQYVLRANQSNGTKFWGIGCQSYAPAKKCRIVLHNTGLVFG

SEQ ID NO: 19980 - protein, 427 aa, Moorena sp.; identical to SEQ ID NO: 18169

SEQ ID NO: 19981 - protein, 515 aa, unidentified; identical to SEQ ID NO: 5111
  REGION 1..515: note = Human gut metagenome

SEQ ID NO: 19982 - protein, 512 aa, unidentified; identical to SEQ ID NO: 5549
  REGION 1..512: note = Human gut metagenome

SEQ ID NO: 19983 - protein, 431 aa, unidentified
  REGION 1..431: note = Human gut metagenome
MPNKVYIINKHGRPLMPCSPAKARHLLDEGKAKVKKRTPFTIQLVYGSSGYTQEVILGVDAGSKTIGMSASTTKEELLSAEVKPRNDVVDLLSTRREFRRARRNRKTRYRKPRFDNRVRSKHKGWLAPSVEVKIQEHITAIRRVCGILPVSKVVVETAEFDLQLLKAIADGKPVPQGEDYQQGEMYGHYNVRQYVLWRDGYTCQCCGAHATKKKEVRLHVHHLESRKVGGDAPDNQVTLCESCHEKLHKGLIAEKDFKKRKRRSTRDATFMGIMRKTLMQRLCSELPIPVIETRGYITKATREKLLVLPKSHTNDALAIAQGKQGFNVGYLPGIVQINKIYTIRPVRHHNRQLHKATILKGGIRKSNQTEKYVFGYCLFDKVQFNGQDCFIWGRRTTGIFTIKTINGKMIKDGISFKKLKLVEKSTSYLIA

SEQ ID NO: 19984 - protein, 406 aa, unidentified; identical to SEQ ID NO: 8042
  REGION 1..406: note = Human gut metagenome

SEQ ID NO: 19985 - protein, 461 aa, Moorena sp.
MKPDSLRGHSEGIRTTRRLPEFFPKGYSSMNVVYVLSPDRVPLMPCQPVIARLLLKQGKARVKHRTPFTIQLLAQPEQIYTQPLTHGVDTGSSLIGSAVSNVRGSVLYLSEVHVRNDISEMMKERAKKRRNRRNRKTRYRPARWLNRKNSIKQGRFSPTMRSKITAHLREISFVQSLLPITSIVLETGTFDPHALKNPDVLQHKWLYQKGINYSFANTKAYVLTRDGHCCQQCKGKSKDKRLEVHHLVFRSQNGSDEEANLLTLCKTCHDGLHAGAITLHRTGKKRGTLRHATQMNSIRVQLLRQIEAEETWGFVTKEHRILAGLPKEHIFDATMIATRGVKPTFCTTSMLLKRCVSDGDYQQTKGVRSEQRITTDKIRGFRKFDKVRYLGQEYFIKGRMSTGYAILMDLSGNKVDMKPIPKFDKMKRVSARSSWIMIQKIMPNFSYSPISSLSASTRKPF

SEQ ID NO: 19986 - protein, 415 aa, Scytonema sp.; identical to SEQ ID NO: 11291

SEQ ID NO: 19987 - protein, 414 aa, unidentified
  REGION 1..414: note = Human gut metagenome
MPCSPAKARLLLKEKKAIVVRRTPFTIQLTIATGETKQPVSLGVDAGYKHVGLSASTEKAELYASEVELRQDITDLLSARRALRQSRRNRKTRYRAPRFDNRIRTKRKGWLAPSVENRIDAHLSRIEAVLRLLPVTKITVETASFDLQLLKNPDISGKEYQEGEQLGFWNIREYVLCRDGHVCQHCYGRSKDPVLNVHHLESRRTGGDSPGNLITLCETCHKALHRGEITLKAKRGQSFRTEAFMGIMRWEVLNRLKASHPELEVNNTYGYRTKHARIANDIAKSHCADAFCIAGNLGAERLGEFFFQKQTRRNNRQIHKLSILKGGIRKRNQAPFEVNGFRLFDKVACQGEEGFIFGRRSSGFFDVRKLDGTRISAGISYKKLHLLEKRRTYLTEIRKEEVLPPLPEGRGLRA

SEQ ID NO: 19988 - protein, 396 aa, unidentified
  REGION 1..396: note = IscB polypeptide
MSVFVVDRLYRPLLPTNEARARILLNKGKAVVHTVEPFTIQLKRAIDNPVGEFKVGIDDGAKEVGISVAHENKVVFAGNIKLRQDVHRKMVQRLNFRRARRGRKVRHRKPRFLNRGQKGWISPTIRQKKDSILRVIDDLMKRINITKCVVEQGQFDVSSMSAGYKLTGKEYQLSEYEGNNWRQKVLWRDGYTCQRSGCKSKSRLQAHHIIPRNKVGTNVVKNGLTLCENCHDALHAGEWELKNKQIKQFRYPAHVQQGKWYLFNRLKERFSDVKIYYGWMTAKARRRLNLEKDHHTDASTMIGANDYKCTPYSIKPRRTKIWENNPTRTCFEKNGFRHYDIIKAYHRSKGTVIGSISGLCERYMAIRFENRNNFPVAYKNSKLIFRPNRLVYCQLV

SEQ ID NO: 19989 - protein, 497 aa, Moorena sp.; identical to SEQ ID NO: 11866

SEQ ID NO: 19990 - protein, 431 aa, unidentified
  REGION 1..431: note = Human gut metagenome
MPNKVYVINKHGRPLMPCSPAKARHLLDEGKAKIKKRTPFTIQLVYGSSGYTQEVILGVDAGSKTIGMSASTKKEEVFAADVTPRNDVVDLMSTRREFRRARRNRKTRYRKPRFDNRVRSKHKEWLAPSVEVKIQEHITAIRRVCGILPVSKVVVETAEFDLQLLKAIADGKPVPQGEDYQKGEMYGHYNVRQYVLWRDNYTCQCCGAHATKKKEVRLHVHHLESRKVGGDAPDNQVTLCESCHEKLHKGLIAEKDFKKRKRRSTRDATFMGIMRKTLMQRLCSELPIPVVKTRGYITKATREKLLVLPKSHTNDALAIAQGKRGFNVGYLPEIAQIDKIYTIRPVRHHNRQLHKATILKGGIRKSNQTEKYVFGYRLFDKVQFNGQDCFIWGRRTTGIFTIKTINGKMIKDGISFKKLKPVEKSTSYLIA

SEQ ID NO: 19991 - protein, 451 aa, unidentified
  REGION 1..451: note = Bioreactor metagenome
MWTYHYFVVSCYSLRRVNVVFVISKEGKPLMPTKNHAKVRILLKHKKAKVIRRKPFTIQLLYETTTYTQPITLGIDSGYSYIGFSAITEKEELICGEVKLLQGISERLKERAMYRRQRRSRLRYRKPRFDNRKKCSDWLPPSIQHKFNSHIRFINFLKKILPVTDVVIEVANFDTHKLKNLDVEGIGYQQGEQEGFYNLREYILYRDNYKCQLCGREDLPLEVHHIGFWKQDRTDRPSNLITLCIKCHTPKNHQENGKLWGLEPIQKPFKEATFMSTVRWELVNTLGCKHTYGYITKSKRISLNLEKTHYNDAFCIAGGINQARTKPIIFEQIRRNNRSLEKFYDAKYIDIRTGKVATGQELFCGRRTRNKNYNTENLRKYRGQKISKGQRRIRTQRYFYQPKDIVIYNGKKYVVKGVQNKGNYIKLEKLNKPVKLSLVKPYEFRKGFCVV

SEQ ID NO: 19992 - protein, 460 aa, unidentified; identical to SEQ ID NO: 7594
  REGION 1..460: note = Human gut metagenome

SEQ ID NO: 19993 - protein, 413 aa, unidentified; identical to SEQ ID NO: 2636
  REGION 1..413: note = Human gut metagenome

SEQ ID NO: 19994 - protein, 430 aa, unidentified
  REGION 1..430: note = Human gut metagenome
MPKVYVLNRHGRPLMPCTPAKARHLLDAGKAKVRHRTPFTIQLLYGSTGYTQEVILGVDAGSKTIGLSAATETEELFSAEVKPRNDVVELMSARRQFRRARRNRTTRYRKPRFDNRVRSKHKGWLAPSVEVKIQEHMTAIRRACAILPVSKVVVETAEFDLQLLKAVAEGKPVPQGEDYQKGEMYGHYNVRQYVLWRDSYTCCICGVHGSVRKGVPLHVHHLESRRVGGDAPDNLVTLCTACHDKLHKGIIMAADIKKRKRRSTRDATFMGIMRMTLLRRLREQLPVPVVETRGYITKATRENLLVLPKSHTNDALAIAHGPQGFRAEYLPNIRQADRLYTIRPVRHHNRQLHKATILKGGVRKTNQAEKYICGFRLYDKVLYNGIECFVWGRRTSGSFLLRQLNGEKVKDSVSYKHLKLLERSQSYLVA

SEQ ID NO: 19995 - protein, 512 aa, unidentified
  REGION 1..512: note = Human gut metagenome
MSTVYVLNKDGKPLMPTTRCGHVRHLLKEQKARVVTSKPFTIQLLYEADDVVQSLCLGIDPGRTNIGVAAVKADGTAVFTAHLETRNKEIPKLMKKRKESRRARRTNGRRCRRQRRAKANGTISKKCVKNDTAQNGSVSKRAKEIGVIKRHLPGCEKDVLCIGIKNKEAKFSNRTRPEGWLTPTANQLLQTHINLVKKIQKFLPISDVVLEINKFAFMRLDNPNVQKWQYQQGPLYQKANLEETVSEMQEHHCLFCKKKIDHYHHVVPQHKNGSNTIDNIIGLCTQHHDLVHKDATWQKRLAKKKTGLNKKYGALSVLNQIIPALTKELSSLFPKHFFVTNGKSTYDYRAAHGVSKDHWLDAYCIACSVLPNDTCDKTINSRVPYELKHFRRHDRRALNNENMSRVYTFNGKMVATNRHKATEQTTDSLEEFRQRQPNDVCNLKVKEHHPTYRNMNRNYPGSVFLVGNQVHVMQGIAGSKDGEATTYKDTNANSIAAGKCKFVAKNSGILFV

SEQ ID NO: 19996 - protein, 425 aa, unidentified; identical to SEQ ID NO: 10000
  REGION 1..425: note = Human gut metagenome

SEQ ID NO: 19997 - protein, 536 aa, unidentified
  REGION 1..536: note = Human gut metagenome
VLRPRYQYPTRWYPSREQGSGNGCLSGEENTDLKQEVSGTLSKGDHSHPGEQDFCVPAITIQGGPAMSVFVVGLNGCRLMPTSERKARLLLKHGKASVYRKVPFTIKLNYKTGSTTQSGYLGIDTGSQHIGVSVVREDGTVLHKEEIGLRDSMSKRKLMQSRASSRRGRRHRKTRYRHPKWRPKAKRVYCEIPDRKRRHWKKKEITFTSKRPKGWLPPSLQSKTDHHIRWIKKLQDLLPEGYRLSIELGRFDPARLKDPEIHGELYQKGPQYDYENVRAYVLNRDRYTCQVCGKKGGKLHVHHILYRSYGATDDPQYMATVCSDCHNTENHHQGGILYQWMQKQKKFTRGLRDATFMNILRKRLIEAFPGATFTYGNITKADRERLKLPKSHGNDATAIAIVKTGIMTVKDKEPVIYIQQVRRKKRSLHEETPRKGRKEPNRKASRYDKNTKAVTVTKRKNKKKISITGCLFDRVELNGKKGWISGFTDKSCYVKDENDQYIRTSPKYKQVSLSKLKILHHCGNWAIGARRSLGKG

SEQ ID NO: 19998 - protein, 442 aa, unidentified
  REGION 1..442: note = Human gut metagenome
MVYVLNKDGQPLMPTNRHGKVRRLLKTNKAKVIKRCPFTIQLLYDTTNHTQNITLGIDAGSKHIGLSATTKNKVLFEADVELRNDISKLLEARCKFRRSRRNRKTRYRKKRFDNRVSSKHKGWLAPSIEHKIQSHFAMVEKVHRILPVTKIVVETASFDTQLLKAQLEGKPIPQGTDYQNGELAGWNIREYIFHRDNYTCQWCKGKSKDPVLVTHHHAYWKGDHTNKPSSLITLCNTCNDSKYHKKGANRLWGWEPKITNSYKHAAFMGVMRWTFYNRLKEIYPNVSMTYGYITKNARIENNLPKAHYVDARCISGHPKAKSSGEYFYYKKVRCHNRQLHKANTLKGGIRKRNQAEYTVKGFRLFDRVEYKNNEYFVFGRRASGFFDIRTLDGQKVNKGSISFKKLKLKETSKTYLIERRMADTGVSLAPLTTEVTSFRQNN

SEQ ID NO: 19999 - protein, 460 aa, unidentified; identical to SEQ ID NO: 8636
  REGION 1..460: note = Human gut metagenome

SEQ ID NO: 20000 - protein, 419 aa, unidentified; identical to SEQ ID NO: 6954
  REGION 1..419: note = Human gut metagenome

SEQ ID NO: 20001 - protein, 447 aa, unidentified; identical to SEQ ID NO: 7023
  REGION 1..447: note = Human gut metagenome

SEQ ID NO: 20002 - protein, 431 aa, unidentified
  REGION 1..431: note = Human gut metagenome
MPNKVYVINKHGRPLMPCSPAKARHLLDEGKAKVKKRTPFTIQLVYGSSGYTQEVILGVDAGSKSIEISASTKKEEVFAADVTPRNDVVDLLSTRREFRRARRNRKTRYRKPRFNNRVRSKHKGWLAPSVEVKIQEHITSIKRVCRILPVSKVVIETAEFDLQLLKAIEEGKPVPQGEDYQQGEMYGHYNVRQYVLWRDGYTCQCCGAHATKKKEVRLHVHHLESRKVDGDAPDNQVTLCESCHEKLHKGLIAEKDFKKRKRKSTRDATFMGIMRKTLMQRLCSELPIPVIETRGYITKATREKLLVLPKSHTNDALAIAQGKQGFNVGYLPGIVQINKIYTIRPVRHHNRQLHKATILKGGIRKSNQTEKYVFGYCLFDKVQFNGQDCFIWGRRTTGIFTIKTINGKMIKDGISFKKLKPVEKSTGYLIA

SEQ ID NO: 20003 - protein, 414 aa, unidentified
  REGION 1..414: note = Human gut metagenome
MVYVINKQGQALMPTERFGKVRRLLKNSLAHVVCRIPFTIQLDYDTTDYTQPVSLGVDAGSKHIGISATTSEKELYAADVELRNDIVDKLSTRREQRRTRRSRLRYRKARFNNRVSSKRKGWLAPSVENKIQTHLTIVEKIHKFLPITNIVVETASFDIQKINNPSISGSEYQQGEQLDFFNVREYVLFRDNHTCQHCKGKSKDEVLNVHHIESRKTGSDSPKNLITLCETCHKAYHRGEFKLNVKRGKSFRDAAFMGIMRWSFYDRLKNIYPNVSMTFGYITKNTRITNNLPKEHYVDARCISGNPVAKPLGYYFYQKKVRCQNRQIHKANFLKGGRKKLNQAPFLVKGFRLFDLVEYKKELYYIFGRRSSGSFDIRKLDGTKVNKGSINCRHLRLISTRKSILTEKRMQVNL

SEQ ID NO: 20004 - protein, 493 aa, Moorena sp.
VRNKGNRLIRRHRNMQKLLVELKNTSGDAPQVPCSVSGALNREETLSVPYKVLANNSSDEDLLSGKRGQDLRVPVINMHGKPLMPTRPRKARILLNQEKATVVQRSPFTIQLKYPSGETKQNITLGIDAGYSTIGFNAVTEKKELLSGELTLRKRISKLLKQRRSYRRARRNRLWHRKPRFNNRSKTRGWFAPSIKHKLETHLRLIDRLKNILPITKVIVEVASFDTHKLQNPEIKGVEYQQGELQGYEVREYLLEKWKHKCAYCGKSNLPLEIEHIVPKIRRGSYRVSNLTLACHKCNQKKGNKTAAEFGHSEIQKKAKRALKATAFMNIVRWRLVNTLMCEWTYGYITKHDRIKLGMEKNHINDAFVIAGGKAQERSRSYTLTQTRRNNRSIQLNRRGYKPFIRRQRYKLQPNDLVKYLKTLCRVKGVHNYGKYVIVEGKIGEIFDINVKKVELVKYGKGIQWNTILKEVKKGNSSLLLREMISLPKYYEN

SEQ ID NO: 20005 - protein, 526 aa, unidentified
  REGION 1..526: note = Human gut metagenome
LLRQERFIVKEVANMSTVYVLNKDGKPLMPTTRGGHVRHLLKEQKARVVRAKPFTIQLLYETNDVVQPLYLGIDPGRTNIGVAVVKANGTAVFTAHLETRNKEVPKLMQDRKKARRARRTNGRRCRRQRRAKANGTISKKCVKQDTAQSKNPSKRAKEIGIIKRRLPGYKKDVLCIGIKNKEAKYTNRTRPEGWLTPTANQLLQTHINLVRKIQKFLPISDVVLEVNKFAFMRLDNPDIQKWQYQQGPLYQKGSLENAVSEMQEHHCLFCDKPIDHYHHVVPQSENGSNTIANIVGLCAEHHNLVHKDAAWQKKLAEEKVGLNKKYGALSVLNQIIPALTNKLSVLFPKHFFVTAGKSTHDYRATHGVSKDHWLDAYCIACSVLPSDVCDSNINNHMPYELKQFRRHARRALNNENMNRVYTLNDKAVAINRHKATEQEAASLEEFRKEHPNDVCKLKVKEHHPTYRNMNRNYPGSIFLVGKHVHIMQGIAGSKDGKATTYKDSNANSITASKCKFVAKNSGILFV

SEQ ID NO: 20006 - protein, 428 aa, unidentified
  REGION 1..428: note = Human gut metagenome
LKVFVLNMRGRPLMPCSPARARHLLKAGKAVVRRRTPFTIQLRIATGETKQSVTLGVDAGAKHVGLSAATEKEEVFASEVELRQDITGLLAARLSLRRDRRHRKTRYRAPRFLNRVRSKHKGWLAPSVENRIQAHMSRIDAVCRLLPVTRIVIETASFDVQKIRNPEVEGTGYQQGDQLGFWNVREYVLFRDSHVCQHCHGHSKDKILNVHHLESRQTGGDAPNNLITLCETCHKACHAGKIKLKVKRGQSFRAEAFMGIMRWTLLDRMRKAHSGLPVENTYGYLTKNTRITPGLPKTHCVDAYCIAGNLKAVRRGVCLHQRQVRKHNRQIHKCTVLSKTLKDGTKIGYRKLNQTPHLVKNFRLFDKVRCLGQTGFIFGRRSSGYFDVRRLDGVKLSSGISYRKLTLLEKRSTYLTELRKEDGASSPV

SEQ ID NO: 20007 - protein, 493 aa, unidentified
  REGION 1..493: note = Human gut metagenome
MAVVYVISASGKPLMPTTRCGHVRGLLNEGKARVVEREPFTIQLKYETEEMTQPLYLGIDPGRTNVGAAVVREDGECVFTAQLTTRNKDVPKLMKARKQFRMAHRRLKRRCKRQRRAKGAGTLSQKGEFQRLLPGYEKPILCKGIRNKEARFNNRQRPVGWLTPTANHLLLTHLNMVKKLQKLLPITDVVLEVNRFAFMAMENSNIRRWQYQRGPLYGKGSVEDAVYAQQDGHCLFCGKPIAHYHHVVPQHKNGSDTLENRVGLCNEHHDLVHKDRAWEAKMKETKAGLNKKYHALSVLNQIIPALTEQLAELFPQHAFVTTGEDTADFREDHGIAKEHHLDAYCIACSVLAEPSTVAAPTAKPHRLMQFRRHDRQVCHKENIKRVYLLDGKAVATNRHKAIEQKDDSLEEFCKTHTQQEVSALTVKGHKPIYKEIQRFMPGGVFLFNGKVHTLQGSRGRYKGMPKYYIGTDGEKNHAKRCIFLQQNCGLRWA

SEQ ID NO: 20008 - protein, 520 aa, Moorena sp.
MGDLRNKPVYVQNADGQPLMPTTPARARRMLDQGKARIAIRSPFTIRLLQQIESPQLQPVRVGLDTGSKAMGIAAIANGKAIFVGELPLRQFQKGSAVADRAMHRRARRSRLRYRKARFLNRTRKKCKVCGGNTPKSDRKSGGRAELCRKCAAEGHHAFAGIAKVPGWISPTLKAKKDNHVHAVKNLAKILPVSEVVVEVADWDIQKIRNPDISGYEYQNGPLAHYENLRAYVYARDGWTCQYCKSEDGNLTLDHIIPESRGGPTTPNNLVAACYNCNRAKGNQTAEEWGYPDIQERVKKNELAFKHAAHVGSIKNHIIYELSKEFPVRTTYGFYTHIKRRDELGLEKRHGHDAVAIACRWGEKVEVVSPIYQGRLKPSRRRQKYQMLMFPQYRYKPRTKKGKKDLDNQLAKLKYNSKNDPERLKAIARQLRALAPEFWEGKGYFVPKERNKRIVAKDGTIFKKSDYVEAVVSGKKCRGYVTALYSSGRLKVETSEGIKSASPDRSRKLQSARSIMWWEE

SEQ ID NO: 20009 - protein, 340 aa, Aneurinibacillus sp.; identical to SEQ ID NO: 10078

SEQ ID NO: 20010 - protein, 432 aa, unidentified
  REGION 1..432: note = Human oral metagenome
WQEGQFSERKAAEMLNNQKEYAFVLDAEGKKLDPTIIQNAWRLVRQKKATLIAKRPMTIQLKKVVDTPNNDEIRMGIDDGAKYVGLALVQKCKTKNKVIFVATMEHRIDVHKKIVQRHEYRRYRRYLKRYRKDKSLNRANSRKQGWISPTIKQKRHAVIRIVDVLSKYICIDSIYLEDVAIDIRVLTEGHQIYGEQYQISNRLDENLRKATVLRDNCKCQLCGKKNCRLEVHHITPRRMNGSNTIGNLITLCSDCHSKVTGREMEFADQFYSKIGKKRNNYGLIYASHVMIGKTWLREELAKRAQLTLTTGGDTANKRINWNLEKSHEVDAVCITSLRPEFVNVKKWRIKPLRHQIKKRKTIEVLRFRHRDIVSYVYRNGEYHEGYVTAIFPLSKRRKENLSFQSQTKHCCRVAINKCKFICRPNKFYWLSS

SEQ ID NO: 20011 - protein, 420 aa, unidentified
  REGION 1..420: note = Human gut metagenome
MQYVYVLNKHGEPLMPCSSGKARLLLKQQKACVVKRTPFTIKLLFGSTGYKQPITLGVDAGSKHVGLSASTEKRELYCEEFTPRNDVVDLLSTRKQNRRSRRNRKTRYRAPRFDNRVHSKRKGWLAPSVEVKIQEHITVIKRICRILPITLVRVETAEFDTQRLKAMLEGKPLPVGTDYQLGEIYDEYNVRQYVLKRDHYTCQCCGAHTTTKKTVKLHVHHLESRKVGGNAPSNLITLCTTCHDALHKGKVSLDGKERGKPLRDAAFMGIMRKTLMARLRDELSIPVQGTYGYITKMRREQNDIKKSHVNDARCISKHPLAEPCSVCYRTKAIRHHNRQTHKANFSKGSIRKRSQMPYVVEGYRLWDKVLYKGQECFVSGRRASGSFTLKKLDGTRISKGVTFKKLRLLEPATNYLIERM

SEQ ID NO: 20012 - protein, 442 aa, unidentified; identical to SEQ ID NO: 15850
  REGION 1..442: note = Human gut metagenome

SEQ ID NO: 20013 - protein, 452 aa, Petrotoga sp.; identical to SEQ ID NO: 7138

SEQ ID NO: 20014 - protein, 335 aa, Enterococcus sp.; identical to SEQ ID NO: 12846

SEQ ID NO: 20015 - protein, 423 aa, Moorena sp.; identical to SEQ ID NO: 12394

SEQ ID NO: 20016 - protein, 431 aa, unidentified
  REGION 1..431: note = Human gut metagenome
MPNKVYIINKHGRPLMPCSPAKARHLLDAGKAKVKKRTPFTIQLVYGSSGYTQEVILGVDAGSKTIGMSASTTKEELLSAEVKPRNDVVDLLSTRREFRRAQRNRKTRYRKPRFDNRVRSKHKGWLAPSVEVKIQEHITAIRRVCGILPVSKVVVETAEFDLQLLKAIADGKPVPQGEDYQQGEMYGHYNVRQYVLWRDGYTCQCCGAHATKKKEVRLHVHHLESRKVGGDAPDNQVTLCESCHEKLHKGLIAEKDFKKRKRRSTRDATFMGIMRKTLMQRLCSELPIPVIETRGYITKATREKLLVLPKSHTNDALAIAQGKQGFNVGYLPEIAQIDKIYTIRPVRHHNRQLYKATILKGGIRKSNQTKKYVFGYRLFDKVQFNEQDCFIWGRRTTGIFTIKTINGKMIKDGISFKKLKPVEKSTRYLIA

SEQ ID NO: 20017 - protein, 411 aa, unidentified; identical to SEQ ID NO: 2663
  REGION 1..411: note = Human gut metagenome

SEQ ID NO: 20018 - protein, 451 aa, unidentified; identical to SEQ ID NO: 13438
  REGION 1..451: note = Human gut metagenome

SEQ ID NO: 20019 - protein, 480 aa, unidentified; identical to SEQ ID NO: 2726
  REGION 1..480: note = Human gut metagenome

SEQ ID NO: 20020 - protein, 305 aa, Lactobacillus sp.; identical to SEQ ID NO: 17440
  SITE 211: note = misc_feature - Xaa can be any naturally occurring amino acid

SEQ ID NO: 20021 - protein, 518 aa, unidentified
  REGION 1..518: note = Human gut metagenome
MTPKKRKEASRMSEYIYVLGMDGDPQMPTKRKRHVEKLLQAGRARVFRQIPFTIQLTYENKPVLQPVTIAEDPGRSNIGMAVVSLSGELLSAAVVQTRNKEIVKLMEKRKQHRRASRNGERKARQRLAKKCHTMIKTGFLMRKLPMYGKDKQVRCNVIKNTEAKFCNRKREDGWLTPSAEHLVRTHINLIHKMQKFLPITDVAIEINRFAFLSLEDPSISGVDFQNGPLKGYDDLNAAIEDLQDGHCLMCNSPIEHRHHIVPRNMQGSNTIGNIAGLCCKCHERVHKDARFEDRLKKKKAGLNKRYAAVSVLNQAIPFICKRLEQEFGKEHVHYCSGRDTSMVRRSLGYHKTKEKQLHEVDAWCIAVLALQHVPEKAPEFDHVHEILQFRRQDRSRIKAQTSRAYYHEGKKIAKNRKKAEGQREDSLQEWRKRQVERYGKEQTRKMISQLEVKESIRRYNRLDRLMPGAVFYYQGVRYVMRGQHSNGQYLQAVGMGDKDFPAKKCKIVVHNQGLVFVS

SEQ ID NO: 20022 - protein, 414 aa, unidentified; identical to SEQ ID NO: 3441
  REGION 1..414: note = Human gut metagenome

SEQ ID NO: 20023 - protein, 466 aa, unidentified; identical to SEQ ID NO: 13189
  REGION 1..466: note = Human gut metagenome

SEQ ID NO: 20024 - protein, 443 aa, Anoxybacillus sp.; identical to SEQ ID NO: 13210

SEQ ID NO: 20025 - protein, 489 aa, Moorena sp.
MDMVYVLNKDGKPLMATTRGGRVRYLLKEKKARVVCTTPFTIQLNYDTPDITQDLILGIDPGRTNIGVAAVKEDGQCVFSAHLETRNKDVPLLMEKRAAFRRNHRNLDRRRKRQRRAKAAGTIVENETIERLLPGYEKPVVCHYVRNKEARFNNRCRPQGWLTPTANHLLQTHINLIAKIAKLLPVTKVVVELNRFAFMAMDNPNIRRWEYQQGPLYGLGSVEDAVYAQQDGHCLFCKKPIDHYHHVVPRNKNGSETLANRCGLCAKHHDLVHKDKAWTDKLVTRKEGMNKKYHALSVLNQIIPHLMEYLGSKTLYDVYATDGKSTKGFRIAKNVPKEHYTDAYCIACSILDTAIEVSAPTSPFKLKQFRRHDRQSCIRQMVDRKYLLDGKVVAANRHKAIEQKSDSLEEFREAYGDAAVSQLTVRPHLPQHKDMTRIMPGAVMDFNGTIGVMQSSTVGSFYKSTEGHKSTPRKCVLLMRNAGMVFIPA

SEQ ID NO: 20026 - protein, 413 aa, Clostridium sp.; identical to SEQ ID NO: 4134

SEQ ID NO: 20027 - protein, 452 aa, unidentified
  REGION 1..452: note = Human gut metagenome
MVFVLSNTNKKLMPTNEYRARKLLKSGKATIYKYRPFTIKLTEREDGYTQLVEYCCDTGYQHIGISIKSHRHEYVNEERILLKNETERHNDCRKYRRTRRNRLRYRKARWNNRRNNQICKDGFAPSIRNKRDVHISLFKMYYEICPITSATFEMGQFDTQVLKAIEEGKSLPEGIDYQHGEQYGYITLREAVFSRDNYTCICCGKSAIKDYVILKIHHLGYLIGDRSNRMANLGTVCSNCHTSKNHQKGGKLYNLKPRLKSFKGVTFMTMVRYDMFNKLKETAPDVNFHMTYGAITKLKRKDCNIKKSHNNDAYCMGKFHPKHRTNFMCYQKLKRNNRILSKFYDAKYIDLRDGTTKTGKQLSCNRTNRSEMRNSDKNERIYRGKKVSKGKTIVRKQHYQYRPHDYIWYQGTKYIVKGVQDKGKRIALQERLPISVIKIEKFIHANGWAKIY

SEQ ID NO: 20028 - protein, 231 aa, unidentified
  REGION 1..231: note = Human gut metagenome
MSTVYVLNKDGKPLMPTTRGGHVRHLLKEQKARVVRAKPFTIQLLYETNDVVQPLYLGIDPGRTNIGVAVVKANGTAVFTAHLETRNKEIPKLMQDRKKARRARRTNGRRCRRQRRAKANGTISKKCVKQTTAQNGSVSKRAKDIGVIKRRLPGCEKDVLCIGIKNKETKFTNRTRPEGWLTPTANQLLQTHINLVKKIQKFLPISDVVLEVNKFAFMRLDNPNIQKWQYQ

SEQ ID NO: 20029 - protein, 449 aa, unidentified
  REGION 1..449: note = Wastewater metagenome
MAVFVLDKRKAPLMPCSEKRARHLLARGRAVVHKMRPFTIRLKDRLAADSVFQPLQIKIDPGSKTTGFAVARENAQESKNQAVLCLFELVHRGFQIKQALGERRAHRRHRRSKLRYRPARFDNRTKPKGWLPPSLQHRVDTTAAWVKRIIRLAPVTGIQQELVRFDTQQLENPEISGVEYQQGALLGYEVREYLLEKWGRECAYCGTQEVPLEVEHIIPRSKGGSNRVSNLTLACTPCNQNKSNQPLQVFFQQDKDLKKRLKKNGKSSDKQLERVLKQCKKPLRDAAAVNATRWALLNTLKGTGLPVKTGTGGQTKFNRRQLGIPKTHALDAACVGVVESLTGWQRPTLTIKATGRGSYKRTLLDRFGFPRGYLMREKSVHGFQTGDLVKAEVATGKKAGVHVGRVAIRKSGSFNIQMLDQLVQGISWKYCRIIQRGDGYGYHQTLTLK

SEQ ID NO: 20030 - protein, 423 aa, unidentified; identical to SEQ ID NO: 3951
  REGION 1..423: note = Human gut metagenome

SEQ ID NO: 20031 - protein, 419 aa, Anaeromusa sp.; identical to SEQ ID NO: 9140

SEQ ID NO: 20032 - protein, 430 aa, Moorena sp.; identical to SEQ ID NO: 14357

SEQ ID NO: 20033 - protein, 465 aa, unidentified; identical to SEQ ID NO: 5709
  REGION 1..465: note = Human gut metagenome

SEQ ID NO: 20034 - protein, 418 aa, unidentified; identical to SEQ ID NO: 6835
  REGION 1..418: note = Human gut metagenome

SEQ ID NO: 20035 - protein, 358 aa, unidentified
  REGION 1..358: note = Human gut metagenome
VRYRHPKWRHHTVRAYIQKGCRKKGVKRHWKKLKVQVSSPRPEGWLPPSLQSKTDHHIRWIHRLLDVLPKDTGMVLEAGRFDVARMKNLEIHGELYQRGPQYDYENVKAYVFDRDNYKCRCCHAKAGTRRKNGTVVKLIAHHIDYRSKGASDNPDALASVCDACHTAANHQPGGVLYDWMVKNKRFKQGLRDTAFMNILRRRLFEAFPDAEYTYGNITAARRKELMLPKSHADDAVAIACTGMDISSIGKRPDHVVYVQQVRKKKRSLHEANPRKWSKTKNRFAVRNSKNTKEVNGVCLFDRVEVPGKGYGWVTGFIIQPPVEMGDFLPGRVKEGKMRKEHEKVICRIRNRKHYVRWL

SEQ ID NO: 20036 - protein, 424 aa, unidentified; identical to SEQ ID NO: 13009
  REGION 1..424: note = Human gut metagenome

SEQ ID NO: 20037 - protein, 456 aa, Moorena sp.
MLTYVLAADGSPLMPTYNISKVRRMLKDGRAVIAGHKPGFTIRLTYALPDQKTPHTQKIELCEDTGYQHIGVSVKSKKHEYVHLQVDTLADEKNHHDAQRRYRRNRRNRLRYRAPRFDNRTHSKKPGWIAPSLQHKADIHVRLVSTFQNVLPICDVYLEVGTFDTQVLEAKEKGLPIPEGSDYQHGARYGIATLREAAFYRDGYKCQCCGKGIKDGRILRVHHIGYWKTPSDHTDRMGNLITVCTKCHTAANHKKGGKLFGWKPKMKPLTGAAFMNTVRWKIVQAVKDLDSNLTVHTTYGAYTKLSRREHSIAKTHANDAYCMGAFQPRHRTTEQLLKKKRRNNRVLSKFYDAKYIDSRDGVKKSGSELSCGRTNRSEQRNGEKNLRIFHGSKVSKGRITVRRQRYPIQPGTVVLYNKRKIAVLGTHGNGTKVLLPTKKDVSPKKVAIVYHAGAFV

SEQ ID NO: 20038 - protein, 431 aa, unidentified
  REGION 1..431: note = metagenome
MPNKVYIINKHGRPLMPCSPAKARHLLDAGKAKVKKRTPFTIQLVYGSSGYTQEVILGVDAGSKTIGMSVSTTKEELLSAEVKPRNDVVDLLSTRREFRRARRNRKTRYRKPRFDNRVRSKHRGWLAPSVEVKIQEHITSIKRVCRILPVSKVVIETAEFDLQLLKAIADGKPVPQGEDYQKGEMYGHYNVRQYVLWRDGYTCKCCGAHTTKKKEVRLHVHHLESRKVGGDAPDNQVTLCESCHEKLHKGLIAEKDFKKRKRKSTRDATFMGIMRKTLMQRLCSELPIPVVKTRGYITKATREKLLVLPKSHTNDALAIAQGKRGFNVGYLPEIAQIDKIYTIRPVRHHNRQLHKATILKGGIRKSNQTEKYVFGYCLFDKVQFNGQDCFIWGRRTTGIFTIKTINGKMIKDGISFKKLKLVEKSTSYLIA

SEQ ID NO: 20039 - protein, 453 aa, Halomonas sp.; identical to SEQ ID NO: 8186

SEQ ID NO: 20040 - protein, 428 aa, Enterococcus sp.; identical to SEQ ID NO: 4335

SEQ ID NO: 20041 - protein, 425 aa, Nodularia sp.; identical to SEQ ID NO: 2911

SEQ ID NO: 20042 - protein, 389 aa, unidentified
  REGION 1..389: note = Human gut metagenome
MPCSPAKARLLLKEKKAIVKRRTPFTIQLTIATGEAKQPITLGVDSGYKHIGLSATTEKAELHASQVELRQDITDLLSARLALRRSRRSRKTRYRAPRFNNRVASKRKGWLAPSVENRIAAHMSRVEAVMRVLPVTAITVETAAFDTQLLKNPDIAGAAYQQGEQLGFWNVREYVLFRDGHVCQHCRGKSKDPILNVHHIESRRTGGDAPNNLITLCETCHKAFHRGEIELKVRRGKSFKAETFMGIMRWTLFERLKKAHPELRVRNTYGYLTKHKRISHGIAKSHCADAYCIADNLGAKRLSGYLFQKQTRKHNRQLHKLSILKGGLRKKNQAPYEVKGFRLFDKVICKGEEAFIFGRRTSGSFDVRRLDGTRISAGINYKKLRLLEP

SEQ ID NO: 20043 - protein, 416 aa, unidentified
  REGION 1..416: note = Human gut metagenome
MVYVLDKNGQPLMPTDRHRKIRLMLQSGQAKVIKRCPFTIQLTYNTGHQAQEISLGIDAGSKHIGVSATTKTRVLYEADVELRNDIVDLLSSRRELRRGRRNRKTRYRPARFDNRRREDGWLAPSIRQKIGTHLTVVENICKILPISRITVETASFDIQKIKNPDIQGAEYQQGDQLGFWNNREYVLFRDNHTCQCCKGKSKDKILNVHHIESRKTGGNAPNNLITLCEICHTGYHKGAIQLPKTVKRGMRFKDAAFMGIMRWAFYEALKQQYEPVGTPVHNTYGYITKHTRIEHNLPKEHYVDARCISGNPDAFPNGEYYYQKKVRCHNRQMHKLTILKGGIRKQNQATYLVKGYRLFDKVSYQRKEYFVFGRRKSGFFDIRTLSGKQVNKGSLSCKKLKFIATRMYYLIERRAV

SEQ ID NO: 20044 - protein, 527 aa, Streptomyces sp.; identical to SEQ ID NO: 8145

SEQ ID NO: 20045 - protein, 442 aa, unidentified
  REGION 1..442: note = Human gut metagenome
MVTVQQSTHHLPFGRVFIRRNLFMVYVISQDGKPLMPCSDPIARLLLKQGKAKVKKREPFTIKLTYETTNHTQGLTLGVDTGSGTIGTAVSKDNGDIVYMSEVVVRNDITDKMTQRAKYRRNRRNRKTRYRKARWLNRASSIKKDRFSPTMQSKLHSHVREIEYIQSILPVTEMVFETGQFDMQLMKNPSLANPKVRPWGYQKGANYGFENTKAMVLNRDNYTCQCCKGKHKDSKLEVHHIVFRSQGGSDEESNLLTLCHTCHKDLHSGKINPKLSGKVKGNLKYATQMNSIRKQLFRFYPNAIETFGYVTKANRLHLGVDKEHYYDACTIATQGNAFNVKSNLYKKKCVSDGDFQKTKGIRSEEPIVTDKICGFRKFDKVRYFGNDYFIKGRMSTGYAILMDIDGNKIDFSTMPRGYKTPKLSNCKRITARSTVMTQVKVV

SEQ ID NO: 20046 - protein, 455 aa, unidentified
  REGION 1..455: note = Human gut metagenome
GIDPGRTNIGVAVVKTDGTAVFTAHLETRNKEIPKLMKKRKDSRRARRTNGRRCRRQRRAKANGTISKKCVKQTTAQNGSVSKRAKEIGVIKRRLPSCEKEVLCIGIKNKEAKFNNRTRPEGWLTPTANQLLQTHVNVVKKIQKFLPISDVVLEINKFAFMQLNNPNIQKWQYQQGPLYQKADLEEAVSEMQEHHCMFCKNPIDHYHHVVPQHKNGSNTIDNIVGLCTKHHDLVHKDTAWYEKLTKKKTGLNKKYGALSVLNQIIPALTKGLSSLFQKHFFVTTGKSTYDYRAAHGVSKDHWLDAYCIACSVLPNDVCDSNINSHVPYELKQFRRHDRRALHKENINRVYTLNGKKVATNRHKAIEQTTDSLEEFRQNHPDDVCKLKVKEHHPEYRNPKRNFPGCVFLVGKRTHVMQGTSGSHNGKADGYYDTNGNSYPSGKCKFVAKNKGIVFA

SEQ ID NO: 20047 - protein, 502 aa, unidentified; identical to SEQ ID NO: 16429
  REGION 1..502: note = Human gut metagenome

SEQ ID NO: 20048 - protein, 419 aa, unidentified; identical to SEQ ID NO: 4877
  REGION 1..419: note = Human gut metagenome

SEQ ID NO: 20049 - protein, 423 aa, unidentified
  REGION 1..423: note = Human gut metagenome
MVYVLNIDGQPLMPTDRHGKVRHLLKDGRAEVVKCCPFTIRLLYDSTHYTQDIVLGVDAGSKHIGLSGTTETKELYASDVELRNDIVDLISTRRQNRRSRRNRKIRYRKARFQNRVSGKKNWLAPSIRQKVDTHMTVVSRVCMILPVTKIIVETASFDIQKIKDPDISGTGYQHGEQLDFWNVREYVLSRDGHTCQCCKGKSKDPVLNVHHIESRKTGGDAPNNLITLCETCHKSYHSGAVQLPKAIHRGMRFKDAAFMGIMRWAFYNKLKEVYEPQDIEVSMTFGYLTKNTRIRHYLPKEHYIDARCISGHPEAIPNNEVFYQKKVRCHNRQIHKNTILKGGVRKRNQTGYLVKGFRLFDKVAYKGREYFIFGRRQSGFFDLRNLSGCKVNKGSLSYRKIGFLEPRQYYLCERRVMDTQGCA

SEQ ID NO: 20050 - protein, 418 aa, unidentified; identical to SEQ ID NO: 6784
  REGION 1..418: note = Human gut metagenome

SEQ ID NO: 20051 - protein, 279 aa, unidentified
  REGION 1..279: note = Human gut metagenome
VVVETAEFDLQLLKAIADGKPVPQGEDYQKGEMYGHYNVRQYVLWRDNYTCQCCGTHPSKKKEVRLHVHHLESRKVGGDAPDNQVTLCESCHEKLHKGLIAEKDFKKRKRRSTRDATFMGIMRKTLMQRLCSELPIHVVETRGYITKATREKLLVLPKSHINDALAIAQGKQGFNVGYLPGIIQTDKIYTIRPVRHHNRQLHKATILKGGIRKSNQTEKYVFGYCLFDKVQFNGQDCFIWGRRTTGIFTIKTINGKMIKDGISFKKLKPVEKSTSYLIA

SEQ ID NO: 20052 - protein, 428 aa, unidentified; identical to SEQ ID NO: 5036
  REGION 1..428: note = Human gut metagenome

SEQ ID NO: 20053 - protein, 442 aa, unidentified; identical to SEQ ID NO: 7529
  REGION 1..442: note = Human gut metagenome

SEQ ID NO: 20054 - protein, 419 aa, unidentified
  REGION 1..419: note = Human metagenome
MVYVINKEGQALMPTERFGKVRRLLKNGLAHVICRIPFTIRLNYETTHFVQPISLGVDAGSKHIGISATTSEKELYAADVELRNDIVDKLSTRREQRRTRRNRLRYRKARFNNRVSSKHKGWLAPSVENKIQTHLTVVEKIHKFLPITKIIVETASFDIQKIKNLSISSEEYQQGEQLGFFNVREYVLFRDNHTCQHCKGKSKDHILNVHHIESRKTGGNSPSNLITLCESCHKAYHNGKIDIKIKRGASFRDATFMGIARWTTYERVKNIYPNVSMTFGYITKNTRITNGLPKEHYVDARCISGNPKSKPLGYYFYQKKVRCQNRQIHKANFLKGGRKKLNQSPFLVKGYRLFDLVEYQKELYYIFGRRDRGFFDIRKLDGTKVNKGSISCKHIRLVSKRRSILTERRNSCSIPPTKL

SEQ ID NO: 20055 - protein, 411 aa, unidentified; identical to SEQ ID NO: 6901
  REGION 1..411: note = Human gut metagenome

SEQ ID NO: 20056 - protein, 419 aa, unidentified
  REGION 1..419: note = Human oral metagenome
MLVYVLKQNGQPFMPTERFGKVRRLLKEGKAKVVRREPFTIKLLYEPETDVVQECYCGVDTGSKHIGVAVVGNDKVLYQSQTELRNDIKRKMDARRTSRRSRRNRKTRYRKSRFLNRRNSIKKDRLPPSVKHKVQSHIDEIEFCKKILPISDLILEVSQFDTALMKNPSLMDEKIKKWGYQQGFNYGYSSRRSAILNRDNYTCQCCGKKNCRLEVHHIKFRRDGGTDDEENLITLCEDCHKGVHAGTVTLNKKPKKSKGLKHATHMSIIRSQLLKKYPDAIETFGFVTSENRNHLKLEKDHYIDACIIASGGLEFKELDVIYRKRRVSKGDYQVTRGVRGEQKLPTGKIYGFRKFDKVKYFGKEHFIKGRMSSGFAGLMDIFGNEVDFDFMPKGSKTPKLSNCERISARRSILCIKERK

SEQ ID NO: 20057 - protein, 264 aa, Moorena sp.
MCKVFVLDSEKRPLDPIHSARARQLLRNKKAAIYRRFPFVIILKDSHPDSSVTTLRLKLDPGAQTTGIALVSDATGEVVFAAELKHRGFAIREALTSRRQLRRSRRTRKTRYRQPRFLNRKRSEGWLAPSLQSRVHNIKTWVKKLCKFALIAAISQELVRFDMQLMRNPDLQGKEYQQGLLAGYETREYLLEKWGRQCAYCGVKNVPFQVEHIHPRAKGGTNSVTNLTLSCEKCNTKKGTKDIKEFLKKSHDYYHKSWRKLKDH

SEQ ID NO: 20058 - protein, 439 aa, unidentified
  REGION 1..439: note = Human gut metagenome
MVTVQQSTHHLPFGRVFIRRNLFMVYVISQDGKPLMPCSDPIARLLLKQGKAKVKKREPFTIKLTYETTNYTQGLTLGVDTGSGTIGTAVSKDNGDIVYMSEVVVRNDITDKMTQRAKYRRNRRNRYRKARWLNRASSIKKDRFSPTMQSKLHSHVREIEYIQSILPVTEMVFETGQFDMHLMKNPSLANPKVRPWGYQKGANYGFENTKAMVLNRDNYTCQCCKGKHKDSKLEVHHIVFRSQGGSDEESNLLTLCHTCHKDLHSGKINPKLSGKVKGNLKYATQMNSIRKQLFRCYPNAIETFGYVTKVNRLHLGVAKEHYYDACTIATQGNAFNVKSNLYKKKCVSDGDFQKTKGIHSEQPIVTDKICGFRKFDKVRYFGNDYFIKGRMSTGYAILMDIDGNKIDFSTMPRGYKTPKLSNCKRITARSTVMTQVKVV

SEQ ID NO: 20059 - protein, 458 aa, unidentified
  REGION 1..458: note = Human gut metagenome
LTKDENRPSGRTTGLRAEQAEPAGIRKGDTLKVFVLNMRGKPLMPCSPAKARHMLKAGKAVVVRRTPFTIKLTIATGETKQDVTLGVDAGARHVGISATTEKEEVFASEVALRQDITGLLADRLAFRRARRNRKTRYRAPRFNNRVRSKHKGWLAPSVENRIQAHISRIEAVCRLLPVTKIVIETASFDIQKIRNPEVEGTGYQQGDQLGFWNVREYVLFRDGHICQHCRGRSKDPILNVHHLESRKTGGDAPNNLITLCETCHKAYHAGKIKLKVKRGQSFRAEAFMGIMRWTLLDRVRKAHPGLPVENTYGYLTKHTRITHGLPKTHCVDAYCIAGNLKAVRRGVYLHQRQMRKHNRQIHKFTVLSKRLEDGTKIGYRKLNQSPYLVHGFRLFDKVRCLGQIGFIFGRRSSGYFDVRRLDGVKLSPSISWRKLTLLEKRSTYLTELRKQDGASSPV

SEQ ID NO: 20060 - protein, 396 aa, unidentified
  REGION 1..396: note = Candidatus Anoxychlamydiales bacterium
MPCKPRKAKILLKQKKAKVVKMTPFTIQLLRPTKRNVQKINLGIDVGYNHVGLSAITNSKEIYAEEIHLREDIVSLNSERRQYRKSRRYRKTWYRKPRFLNRKKDKGWLAPSIKHKLDSHVKVIKKVKKILPISKIIVEVASFDIQKIKNPNISDKEYQEGDQLGFWNVREYVFHRDNHKCQNCIGKSKDTILNVHHITSRKTGGNRPDNLITLCKTCHLKYHDNELKISFKKSKNFKAETFISSIRWKLIEILKIENNISYTFGYKTKRNRILQKLKKSHITDAFVIAGGTNQIRQSGFFYTKQVRRSNRKLFKGIRSHLKNTATRFIKGFQRFDKVFWNKKTCFIFGRRKTGYFDLRQLNGVKIHASAKAKDCILLETFKTFLTEWRVGVSSHP

SEQ ID NO: 20061 - protein, 413 aa, unidentified; identical to SEQ ID NO: 13149
  REGION 1..413: note = Human gut metagenome

SEQ ID NO: 20062 - protein, 423 aa, unidentified
  REGION 1..423: note = Human gut metagenome
VLQAPNPVQHWRRMSTGLRAVQAEPAGIRKGDALKVFVLNMRGRPLMPCSPAKARHLLKAGKAVVRRRTPFTIQLRIATGETKQSVTLGVDAGAKHVGLSAATEKEEVFASEVELRQDITGLLAARLSLRRERRQRKTRYRAPRFLNRVRSKHKGWLAPSVENRIQAHMSRIDAICGLLPVTKIVIETASFDIQKIKHPDVEGTDYQQGDQLGFWNVREYVLFRDGHVCQHCHGHAKDKILNVHHLESRQTGGDAPNNLITLCETCHKACHAGKIKLKVKRAQSFRAEAFMGIMRWTLLDRMRKAHSGLPVENTYGYLTKNTRITLGLPKTHCVDAYCIAGNLKAVRRGVCLHQRQVRKHNRQIHKCTVLSKTLKDGTKIGYRKLNQTPHLVKNFRLFDKVRCLGQTGFIFGRRSSGYFDVRR

SEQ ID NO: 20063 - protein, 430 aa, unidentified; identical to SEQ ID NO: 6024
  REGION 1..430: note = Spirochaetales bacterium UBA4629

SEQ ID NO: 20064 - protein, 544 aa, unidentified
  REGION 1..544: note = Human gut metagenome
MKQKKQKVMVYIINKKGKPLMPTTRCGHVRKLLDSKKAVVVSSNPFTIRLKYDTPNGVQDVFAGIDSGRENIGSGASNEDGDCLYLGELKTSNKSIKMKMTERAGFRKERRSHDRQNKQRKARKDHTEIQNGNADICRTTISCKSVQISYPAAEKSVTHKIIRGKEGKFANRHRDEGWITPSARQLVQMHMNDLKSMCRILPISHVTLERVAFDFQKLENENIKAWEYGKGKLYGYDSPEEYIHDVQGGKCLICGKPHIDYLHHIIPRSKGGSNKVSNLAGLCYDCHYGPMGVHNCQDTQDRLPELKNEANKQYKVSLLNSVMPVLIEEMDKFCKANSIIFSICGGHDTAKVRDMYDLQKDHCIDGFAISLAGRNVKSVDVMPDRIHQKQRYKKKSKNIIQKRNCREYYDGKKLAAVNRHKGTDQKADSLEEYMNTYAETHTADECKKHFESLTVKPARRTYTFHKEGRICPFHIGDKVRYEKKNKIKGNTKVETFICEGIRFPKDENKAKVEHNKTKSKKMKFCRVLEPGCTPYIDYRKLVLI

SEQ ID NO: 20065 - protein, 420 aa, unidentified; identical to SEQ ID NO: 7360
  REGION 1..420: note = Human gut metagenome

SEQ ID NO: 20066 - protein, 512 aa, unidentified; identical to SEQ ID NO: 14331
  REGION 1..512: note = Human gut metagenome

SEQ ID NO: 20067 - protein, 442 aa, unidentified; identical to SEQ ID NO: 2807
  REGION 1..442: note = Human gut metagenome

SEQ ID NO: 20068 - protein, 431 aa, unidentified; identical to SEQ ID NO: 6230
  REGION 1..431: note = Human gut metagenome

SEQ ID NO: 20069 - protein, 425 aa, Tolypothrix sp.; identical to SEQ ID NO: 3714

SEQ ID NO: 20070 - protein, 512 aa, unidentified
  REGION 1..512: note = Human gut metagenome
MSTIYVLNKDGKPLMPTTRGGHVRHLLKEQKARVVRTKPFTIQLLYETDDVVQPLYLGIDPGRTNIGVAVVKADGTAVFTAHLETRNKEIPKLMKKRKDSRRARRTNGRRCRRQRRAKANDTLSTKRVKQTTAQNGSASKRAKEIGVIRRRLPGCEKDVLCIGIKNKEAKFNNRTRPEGWLTPTANQLLQTHINLVKKIQKFLPISDVVLETNKFAFMQLDNPNIQKWQYQQGPLYKKESLESAVSEMQEHHCLFCKKQIDHFHHVVPQHKNGSNTIGNIVGLCARHHDLVHKETAWQEKLAKKKTGLNKKYGALSVLNQIIPALTKELGVLFPKHFFVTTGKSTYDYRAAHGVCKDHWLDACCIACSVLPNDVCDSSINNRVPYELKQFRRHDRRVLHKENMNRVYTLNSKKAATNRHKATEQESASLEEFRKEHPDDVCKLKVKEHHPTYRNMNRNYPGSVFFVDKQVHVMQGIARSKDGKATTYKDTNANLITAEGCKFVAKNSGILFV

SEQ ID NO: 20071 - protein, 470 aa, unidentified; identical to SEQ ID NO: 2825
  REGION 1..470: note = Human gut metagenome

SEQ ID NO: 20072 - protein, 423 aa, Phormidium sp.
MSNHVFVLDTNRKPLTPCKPGVARSLLRAEKASVFRRYPFTIILNKEVDANPEPLELKLDPGSKVSGMALKQGNHIIFAAELQHRGEPIKKALLSRRQLRRSRRNRKTRYRPARFLNRTRPQGWLAPSLQHRVDTLMTWVNRFRRLAPVGSMAQELVRFDLQLMENPEISGVEYQQGELQGYEVREYLLEKWDRTCAYCGAQHVPLEVEHIQPRSKGGSDRVSNLTLACHSCNQAKGHGDIRDFLSGQPDVLSRLLGQAKSPLKDAAAVNSTRWALFKALKATGLPVTTGTGGQTKFNRLRLNLPKAHWLDAACVGPVESLDILTSKPLLILAKGHGTRQMCGTNKYGFPTRHRSRRQIHKGFQTGDIVTATVTAGKKIGSYVGRVLCRASGSFDITTASVRVAGISHKYCKPIHRKDGYAYA

SEQ ID NO: 20073 - protein, 442 aa, unidentified; identical to SEQ ID NO: 12866
  REGION 1..442: note = Human gut metagenome

SEQ ID NO: 20074 - protein, 477 aa, unidentified; identical to SEQ ID NO: 2707
  REGION 1..477: note = Human gut metagenome

SEQ ID NO: 20075 - protein, 414 aa, unidentified
  REGION 1..414: note = Human gut metagenome
MPCSPAKARLLLKEKKAIVKRRTPFTIQLTIATGETKQPVGLGVDAGYKHVGLSASTDKAELYASQVELRQDITDLLSARRALRRARRNRKTRYRAPRFNNRIRTKRKGWLAPSVENRINAHLSRIEAVLRLLPVTKITVETASFDMQRLKNPDISGKEYQEGEQLGFWNVREYVLFRDGHVCRHCHGRSKDPVLNVHHLESRRTGSDSPDNLITLCETCHKALHRGEITLKAKRGQSFRAQAFMGIMRREVLNRLKASYPELKVHETYGYLTKHARIANGIVKSHGADAFCIAGNLGAERLGEFFFQKQTRRNNRQIHKLSILKGGIRKRNQAPFEIKGFRLFDKVACKGEESFIFGRRSSGYFDVRKLDGTRISAGISYKKLRLLEKRRTYLTEIRKEEALPPLPEGRGLRA

SEQ ID NO: 20076 - protein, 213 aa, unidentified
  REGION 1..213: note = Human gut metagenome
MSTIFESRKYGGNAPDNHGTLCDDCHKKFHLGIITDVKLKTRRRQSTRDAAFMGIMRKTLMWRLRTELFIPVAETKGYITKATREKLLVLPKSHTRDALAIAQGRHGFGIKEYAYVEPANHIYTVRPVRHHNRQLHKASILKGGIRKRNQASKYVFGFRLYDKVLYQGKACFVWGRRTSGTFLLRTIDGIKVKDGVSYRNLTLLERSSNYLIA

SEQ ID NO: 20077 - protein, 428 aa, Enterococcus sp.; identical to SEQ ID NO: 4335

SEQ ID NO: 20078 - protein, 416 aa, unidentified
  REGION 1..416: note = Human gut metagenome
MVYVLGQDGHPLMPTCRHGKVRRMLKSGMAKVVKRCPFTIQLRYESTIHTQEINLGIDAGSKTIGVSATTEKKVLYESEVILRNDIVGLLSGRRALRSSRRNRKTRYRKPRFDNRKKPDGWLAPSIRQEIETHVTVVGNVIKILPVTKIIVETASFDIQKIKNPEIEGEGYQHGEQLNFWNVREYVLFRDGHTCQCCKGKSKDSILNVHHIESRKTGGNAPNNLITLCETCHKAYHKGIITLPKEIYRGMRFRDAAFMGVMRWAFYDRLKELYNPLGVEVINTYGYITKNTRIEYGLPKEHYVDARCISGNPAAKPLDHYYFQKKVRCHNRQIHKNTILKGGYRKRNQVEYEVKGFRLYDQVLWKGQKCFIFGRRSTGRMDLRLLDGTHVNASVGYKNLKLLSMRKNYLIEQRKAG

SEQ ID NO: 20079 - protein, 450 aa, unidentified
  REGION 1..450: note = Archaeon sp.
MQKLLVEFENTPRDAPQVPCSISGALNRDKSLSVPCIVLADNNSDKDQHSGKSGQALSVPVINMRGKPLMPTRPRKARILLQQGKAIVIQRAPFTIQLCYLTGNYTQNIKLWIDTGYSTIGFSTINNKCELLSGELTLQKRISKLIEEKSNYRKTRRSRLWHRKSRFNNRNKPEGWFAPSIQHKLKTHLRLIEKLKKILPVTKITIEVASFDTQKLQNPEITGVEYQQEELQGYEVREYMLEKWKHKCAYCGKSNLPIEIEHIIPKSRGGTDRVSNLTLVCHKCNQKKGNQTAAEFGHSEIQKKTKQTLKATAFMNIVRWRLVNTLKCSWTYGYITKHARIKLGMKKSHVNDAFIAGGNVQERSRSYELTQTRRNNSSIQTNRKGHKPSVRKKRYRLQPNDLVKYIKSLCKVKGVHNYGKYVIVEDKIEEIFDINVKKVEMVKHGKGIQF

SEQ ID NO: 20080 - protein, 442 aa, unidentified; identical to SEQ ID NO: 2903
  REGION 1..442: note = Human gut metagenome

SEQ ID NO: 20081 - protein, 512 aa, unidentified
  REGION 1..512: note = Human gut metagenome
MSTVYVLNKDGKPLMPTTRGGHVRHLLKEQKARVVRAKPFTIQLLYETNDVVQPLYLGIDPGRTNIGVAVVKANGTAVFTAHLETRNKEVPKLMQDRKKARRARHTNGRRCRRQRRAKANGTISKKCVKQDTAQSKNPSKRAKEIGIIKRRLPGYKKDVLCIGIKNKEAKYTNRTRPEGWLTPTANQLLQTHINLVRKMQKFLPISDVVLEVNKFAFMRLDNPDIQKWQYQQGPLYQKGSLENAVSEMQEHHCLFCDKPIDHYHHVVPQSENGSNTIANIVGLCAEHHNLVHKDAAWQKKLAEEKVGLNKKYGALSVLNQIIPALTNKLSVLFPKHFFVTAGKSTHDYRAAHGVSKDHWLDAYCIACSVLPSNVCDSNINNHMPYELKQFRRHDRRVLNNENMNRVYTLDNKAVAINRHKATEQEAASLEEFRKEHPNDVCKLKVKEHHPTYRNMNRNYPGSIFLVGKHVHIMQGIAGSKDGKATTYKDSNANSITASKCKFVAKNSGILFV

SEQ ID NO: 20082 - protein, 407 aa, unidentified; identical to SEQ ID NO: 11574
  REGION 1..407: note = Human gut metagenome

SEQ ID NO: 20083 - protein, 403 aa, unidentified
  REGION 1..403: note = Human gut metagenome
IQLLYDTTNHTQDITLGVDAGSKHIGLSATTEDKVLFEADAELRNDISKLLEARYTFRRSRRNRKTRYRKKRFDNRVSSKHKGWLAPSIEHKIQSHFAMVEKVHRILPVTKIVVETASFDTQLLKAQLEGKPIPQGTDYQNGELAGWNIREYIFHRDNYTCQWCKGKSKDPVLVTHHHADWKGDHTNKPSSLITLCNTCNDSKYHKKEANRLWGWEPKITNSYKHAVFMGVMRWTFYNRLKEIYPNVSMTYGYITKNTRIENNLPKAHYVDARCISGHPEAKSNGEYFYYKKVRCHNRQLHKANTLKGGIRKRNQAEYTVKGFRLFDRVEYQNNEYFVFGRRASGFFDIRTLDGQKVNKGSISFKKLKLKETSKTYLIERRMADTGVSLAPLTTEVTSLRQTG

SEQ ID NO: 20084 - protein, 456 aa, unidentified
  REGION 1..456: note = Human gut metagenome
MKQKGGHRMPDTDYIYVLGRDGKPQMPTKRKRYIKKLLDSGKARIACRIPYTIQLLYENEPVLQPLMAGIDPGHTNIGVSVVNKNAEPVFSAVVETRNKDIKKLMDERRVHRRASRNGERKARQRLARRFGTILKAGMVMRKLPQYAVNKFVTCKIIRNTQARFCNRVREAGWLTPSARQLVETHVNVVKKIQKFLPVTDVTLEVNLEVNRFAFALMDDPETSGINFQNGPLLEKLKVGILKKYGALSVLNQAIPYIWSRLAEHVDTEHLNACTGRDTSMARQSLGYEKTKDNQMHEADAFCIACLGAGLIPAAAPGLTYVHKIVQFRRHDRAIINNQRERTYRLNGKIIAKNRRPRFEQKCPSLSGWYEEQVKCHGRKEADRLRSQLTVEKSTRRYNDPDRLMPGALFKYMGEYHVLSGQLSNGQYLRAYGDKKTNYPAKKCLIIRHNEGLVFVA

SEQ ID NO: 20085 - protein, 415 aa, unidentified; identical to SEQ ID NO: 10041
  REGION 1..415: note = Human gut metagenome

SEQ ID NO: 20086 - protein, 390 aa, unidentified
  REGION 1..390: note = IscB polypeptide
MSTVFVIDGEGKPLLPTCEARARLLLKKKKARVYSVVPFTIQLTKVIDNPVGEFSIGIDDGGKFIGISIAHEEKIVFAGNIKLRLDVHRKMLQRAQYRSTRRSRIRHREVRFLNRGQLGWIPPTIHQKKESILRVVDDLSKRLNITKCIVEQGQFDISSINKGYKLVGKEYQQAEYEGNNWREKVLWRDKYTCQHCDSKHNLHTHHIKQIINGGTNIVSNGVILCQECHESLHRGEWIWIGKIKNFKYPTHLQQGKWWLFNELKKRIDKVQICYGWMTAMKRKELGLNKDHYHDASAMINANKYHCKPYEILPRRTKKWENHPTRKCIEKKGFKHFDIVKAKHKTRGIIIGSIRSLKAKAITLRTNFDNNFTVSYSKTKLLWRPRGLIYC

SEQ ID NO: 20087 - protein, 406 aa, unidentified; identical to SEQ ID NO: 19726
  REGION 1..406: note = Human gut metagenome

SEQ ID NO: 20088 - protein, 420 aa, unidentified; identical to SEQ ID NO: 16221
  REGION 1..420: note = Human gut metagenome

SEQ ID NO: 20089 - protein, 416 aa, Parasutterella sp.; identical to SEQ ID NO: 10114

SEQ ID NO: 20090 - protein, 418 aa, unidentified
  REGION 1..418: note = Human gut metagenome
MVYVLNKNNEPVMPCSERKARLLLKQGRAVIYRKDVFTIKLINGSYGYKQHITIGIDCGSKHIGISATTNKKELFSANAELRNDIVKLLSDRKSLRRNRRYRKTRYRKPRFDNRRIKEGWIAPSIRQKIDSHVRIVSLIHKLLPVKQVNVEVVAFDMQKIKNPDIKRSEYQMGEQLDSYNVREYVLFRDNHICQHCKGKSKDDVLQVHHIESRKTGGNAPNNLVTLCKTCHEKYHSGEITLNVNRGKSFRDASAMSTMRWFLYEELKSRFSNVNITYGYITKYKRIKLGLSKEHYNDAYCISGNLNTSRLCNHHLIRFIPRHSRILHVQKFSKGGVRRSASAPYWLNGGKPSKHGIIFTRFDKVKFNSVVCFISGSSNGFASLRDINWNKVHGCKTTVTVNKLVLVSRRRGSMLFGEL

SEQ ID NO: 20091 - protein, 413 aa, unidentified
  REGION 1..413: note = Human gut metagenome
MTSYAFVLDANGKQLAPTKEQKAWFFIRKKRASLVSKYPIVIQLMKEIPEKEICQDEIRCGIDDGGLHVGIALVQKCKTKNKVVFKGTIEQRNDVKHLMEVRRGYRRYHRYHKRYRQARFDNRKSSKREGRIAPSILQKRQATIRVIHWLNKWINITNYWLEDVSVDIRALTDGYQSYRWQYQKSNRLDENIRKAAILRDGGKCMECGKSNCRLEVHHIKPKRRNGSNTLDNLITLCESCHQKTEGQEELYMDRYFSLLKSSDNKNLNYAQHVMIGKMWLRKQLSGLGVLYLTSGGDTANKRIDWNIEKSHANDAVCITDLRPDTCDVKEWTMKPMRRQSKAKTDHVLGIHHRDLVEYTFKNGETHRGYVTALYPEQKAINFQSPTKHCKKVNARKCKLLWKYSKIYWFENAS

SEQ ID NO: 20092 - protein, 470 aa, unidentified
  REGION 1..470: note = Human gut metagenome
MNVFVVGLNGCRLMPVSERKARLLLDDGKASVYRKVPFTIKLNYKTGSTTQPGYLGIDTGSQHIGVSVVRKDGTVLHKEEISLRDSMTKRKLLEAKASLRRGRRYRKTRYRHPKWRPKTKRVYCEVPDKKGRHWQKQKNTFTSKRPEGWLPPSLQSKTDHHIRWIKKLQNFLPEGYRLSIELGRFDPARMKDPEIHGELYQKGPQYDYENVRAYVLDRDRYTCQVCRRKGGKLHVHHILYRSQGASDTPQYMATVCSSCHTTENHLPGGILYQWMQEQKKFTRGLRDATFMNILRKRLMKTFPDAVFTYGNITKVDREKLKLSKNRGNDATAIALVRTGVTSVKDEEPVLYIQQVRRKKRSLHEETPRKGRKEPNRTAARNSKNTKAVTVTKRRGGKKVSVTACLFDRVELNGKKGWITGFTGKACRIVDTEGNYVAATDKYTQVNISSIRILHHTGNWVTGLKRNVGKR

SEQ ID NO: 20093 - protein, 397 aa, unidentified
  REGION 1..397: note = Sutterellaceae bacterium UBA7100
IVKRRTPFAIQLTIATGETKQPVSLGVDAGYEHVGLSASTEKAELYASEVELRQDITDLLSARRALRQSRRNRKTRYRAPRFDNRIRTKRKGWLAPSVENRINAHLSRIEAVLRLLPVTKITVETASFDLQLLKNPDISGKEYQEGEQLDFWNIREYVLCRDGHVCQHCYGRSKDPVLNVHHLESRRTGGDSPGNLITLCETCHKALHRSEITLKAKRGQSFRAEAFMGIMRWKVLNRLKASHPELEVNNTYGYRTKHARIANDIAKSHCADAFCIAGNLGAERLGEFFFQKQTRRNNRQSHKLSILKGGIRKRNQAPFEVNGFRLFDKVACKGEEGFIFGRRSSGFFDVRKLDGTRISAGISYKKLHLLEKRRTYLTEIRKEEALPSLREGRGLRA

SEQ ID NO: 20094 - protein, 431 aa, unidentified
  REGION 1..431: note = metagenome
MPNKVYVINKHGRPLMPCSPAKARHLLDAGKAKIKKRTPFTIQLVYGSSGYTQEVILGVDAGSKTIGMSVSTTKEELLSAEVKPRNDVVDLQSTRREFRRARRNRKTRYRKPRFDNRVRSKHKGWLAPSVEVKIQEHITSIKRVCRILPVSKVVIETAEFDLQLLKAIADGKPVPQGEDYQQGEMYGHYNVRQYVLWRDDYTCQCCGAHATKKKEVRLHVHHLESRKVGGDAPDNQVTLCESCHEKLHKGLITEGDFKKRKRRSTRDATFMGIMRKTLMQRLCSELPIPVVETRGYITKATREKLLVLPKSHTNDALAIAQGKQGFNVGYLPEILQIDKIYTIRPVRHHNRQLHKAAILKGGIRKSNQAGKYVFGYRLFDKVQFNEQDCFIWGRRTTGIFTIKTINGKMIKDGISFKKLKLLEKSTSYLIA

SEQ ID NO: 20095 - protein, 406 aa, unidentified; identical to SEQ ID NO: 2703
  REGION 1..406: note = Human gut metagenome

SEQ ID NO: 20096 - protein, 515 aa, unidentified; identical to SEQ ID NO: 15867
  REGION 1..515: note = Human gut metagenome

SEQ ID NO: 20097 - protein, 431 aa, unidentified; identical to SEQ ID NO: 15618
  REGION 1..431: note = Human gut metagenome

SEQ ID NO: 20098 - protein, 425 aa, unidentified; identical to SEQ ID NO: 10997
  REGION 1..425: note = Human gut metagenome

SEQ ID NO: 20099 - protein, 406 aa, unidentified; identical to SEQ ID NO: 6031
  REGION 1..406: note = Human gut metagenome

SEQ ID NO: 20100 - protein, 428 aa, unidentified
  REGION 1..428: note = Human gut metagenome
LKVFVLNMRGRPLMPCSPARARHLLKAGKAVVRRRTPFTIQLRIATGETKQSVTLGVDAGAKHVGLSAATEKEEVFASEVELRQDITGLLAARLSLRRDRRHRKTRYRAPRFLNRVRSKHKGWLAPSVENRIQAHMSRIDAVCRLLPVTRIVIETASFDVQKIRNPEVEGTGYQQGDQLGFWNVREYVLFRDGHICQHCRGRSKDPILNVHHLESRKTGGDAPNNLITLCETCHKAYHAGKIKLKVKRGQSFRAEAFMGIMRWTLLDRVRKAHPGLPVENTYGYLTKHTRITHGLPKTHCVDAYCIAGNLKAVRRGVYLHQRQMRKHNRQIHKFTVLSKRLEDGTKIGYRKLNQSPYLVHGFRLFDKVRCLGQIGFIFGRRSSGYFDVRRLDGVKLSPSISWRKLTLLEKRSTYLTELRKQDGASSPV

SEQ ID NO: 20101 - protein, 416 aa, unidentified
  REGION 1..416: note = Human gut metagenome
MEFVYVLDLNGAPLMPTRRFGNVRRMLRDKKAKVVRRKPFTIKLLYEPTTYIVQELTLGVDTGSTHIGAAVYGQHKIYYQSQTEIRNDIKKKMDERRGYRRQRRNLNTRYRKPRWLNRANSIKKCRFSPTMISKFNAHIREIEFIKKIMPIKTLVLETGTFDPHLMKHEGEAFNRHWGYQKGLNYGFANTKAMILNRDNYICQCCKGKHKDSKLEVHHIVFRSQGGSDEESNLITLCHTCHSNLHAGKLELKKVGKVKGQLKHATQMNSIRVQLLKHYSEAVETFGYTTKENRLGLGINKKDHYLDACVIASGGDWFLNNNKVFYKKVVRKGNRVLQMFRKVPIHLSKGRCFGFRRYDTVKFEGKEYFIYATSNSGSFIIQDIFGVKPEIEGKKTKGSVNWKDLKLVNSRRTVLCT

SEQ ID NO: 20102 - protein, 413 aa, Moorena sp.
MQNYVFVIDTNKQPLNPIPPKKARRLLDKGKAAVFRMYPFTIILKTAVDNPSGSPCQIKIDPGSQTTGFALVQNNQVIWGMELEHRGGFIKKKLESRKAVRRGRRNRHTRYRKPRFLNRKRSEGWLPPSLEHRVSTIETWVKRLTKFCPINEIWVERVKFDTQKMQKPEISGVEYQQGELAGYEVREYLLEKWGRECTYCGKQSVPLQIEHIQPKSFGGSNSAKPTLRERVSNLCLACEKCNQRKGNKPIEEFLKNKPILLQKIKTKTKQPLLDSAAVNTTRNKLVKVLQNILLVVTGTGAQTKYNRIKLGLPKQHWIDAACVGDIETLVLKTSQPLLVTCKGQGGRQKAALNKYGYPIRHNPLKPIKGWVTGDIAKHQKLGIGKVTPRSKGSFGFTPLGMKGYKSCKPQDIS

SEQ ID NO: 20103 - protein, 452 aa, unidentified; identical to SEQ ID NO: 14057
  REGION 1..452: note = Human gut metagenome

SEQ ID NO: 20104 - protein, 431 aa, unidentified
  REGION 1..431: note = Human gut metagenome
MDAWDIIVVLNKRGKPLMPCSPAKARLLLKEKKAIVKRRTPFTIQLTIATGETKQPVGLGVDAGYKHVGLSASTDKAELYASQVELRQDITDLLSARRALRRARRNRKTRYRAPRFNNRIRTKRKGWLAPSVENRINAHLSRIEAVLRLLPVTKITVETASFDMLLLKNPDIAGKEYQEGEQLGFWNVREYVLFRDGHVCQHCYGRSKDPVLNVHHLESRRTGSDSPDNLITLCETCHKALHRGEITLKAKRGQSFRAQAFMGIMRREVLNRLKASYPELKVHETYGYLTKHARIANGIVKSHGADAFCIAGNLGAERLGEFFFQKQTRRNNRQIHKLSILKGGIRKRNQAPFEAKGFRLFDKVACQGEEGFIFGRRSSGYFDVRKLDGTRISAGISYKKLRLLEKRRTYLTEIRKEEALPPLPEGRGLRA

SEQ ID NO: 20105 - protein, 411 aa, unidentified
  REGION 1..411: note = Human gut metagenome
RARRTNGRRCRRQRRAKANGTISKKCVKQATAQNGSVSKRANEIGVIKRHLPGCEKNVLCIGIKNKEAKFSNRTRPEGWLTPTANQLLQTHVNLVKKIQKFLPISDVVLEVNKFAFMRLDNPNVQKWQYQQGPLYQKASLEEAVSEMQEHHCLFCKNTIDHYHHVVPQHKNGSNTIGNIVGLCAKHHDLVHKDTSWQEKLAKKKTGLNKRYGALSVLNQIIPALTKELSSLFPKHFFATNGKSTYDYRAAHGVSKDHWLDAYCIAGSVLPNDACDNNINNRVPYELKQFRRHDRRALHKENMSRVYTLNGKSVATNRHKAIKQTTDSLEEFRQRQPNDVCKLKVKEHHPEYRNPKRNFPGCVFLVGKHTHVMQGTSGSHNGKADGYYDTNGNSYSSGKCKFVVKNEGIVFT

SEQ ID NO: 20106 - protein, 501 aa, Nonomuraea sp.; identical to SEQ ID NO: 3887

SEQ ID NO: 20107 - protein, 439 aa, Lactobacillus sp.; identical to SEQ ID NO: 16568

SEQ ID NO: 20108 - protein, 477 aa, unidentified
  REGION 1..477: note = Human gut metagenome
MIIALDKNKRPLGFLTERRCRILMERKRAVLYRVFPTVVILMDMDVRKLQDLPSYRIKIDPGSKYTGIAIVRNDTDELVYAMQIEHRGDAVRAGLQKRKMARRNRRSRETGYRRAKWGNRCLSDGDKKSYNSSRKDGWLPPSIRSVADNVLTWVQRLSRWVNITDCSLEAVRFDTQLLENPNIKGEEYQHGTLFGYEIREYLLEKFGHTCQYCGGKSGDSVLEWEHIHPKSRGGSDRVKNAILSCSSCNRDKDNQTLEEWIGQIRSRISREKGKRKELDSGRIERIQKVIDGKPEGQPMRYATWVSSSRRYLEKHLFQIFRDVECSSGGRTKYNRIRLGYSKEHHYDALCVGTVPEKGYHDRTNGYYLYAKATGRGTRLRGAVNQCGVIITKWTSRKKNFFGFQTGDIVVAEVPHKIPRPYKYEGRFVGRVMVRASGSFDIRTTDGKLATVKAGFCRLLQANSGCAYSMERTIPLDH

SEQ ID NO: 20109 - protein, 417 aa, Streptomyces sp.
MGHGPPLPAPAITLREVDPPMATFSAGQQIHRAVPPQRRALESAGADTPRIGHETARGRHISLAAPSGEHVREETVGGSPAPDGDTPRPAEAGEKPRERHPSVFVLDRHGAPLQPCHPARARKLLGKGRAVVARHTPLVIRLKDRTIAESTVEGVELGIDPGSRHTAIAVFTATGGERRGRFAVRLDHRGAQIRRKLQQRADFRHGRRTRSLRYRAPRHDNRARREGWLAPSLRRRVDTTVAWVDRLARWAPVTAVHVESVAFDTHAISSGGPLEGAEYQHGTLHGTEVREYLRTRCKRARGYRGATGVPLNVDHVRPPSRGGSDRVSSLVLACVPCNQEKANRPVEDRILNHLPKTHTLDALAVGELGAVTETDRQPCTDRRVHRAWHTRPDPQRRVRVPPSASASAEAIPRVHDR

SEQ ID NO: 20110 - protein, 411 aa, unidentified; identical to SEQ ID NO: 2663
  REGION 1..411: note = Human gut metagenome

SEQ ID NO: 20111 - protein, 451 aa, unidentified
  REGION 1..451: note = Human gut metagenome
MPVAVISKTGERLMPTSEHRARKLLKSGKAIKYSYHPFTIQLAERESGDVQPIELCMDTGYIHIGISVKSEKHEYLAEQIDTLTDEKARHDACRMYRRQRRSRKRYRQPRFNNRKRNDRWIAPSLEHKKSIHIQAILRICKVMPVTDITLEMGNFDTQVLKAREEGKPLPHGADYQHGERYGIATLREAVFTRDDYKCQCCGRTIKDGAILHVHHIKYRSQGGTNRMSNLITVCDKCHTPANHKQGGKLYNWKPKIASFKGATYMTTIRWKLYNEVKALFPDIDIHVTYGAETKERRRALDIDKSHVNDAFVMGQFHPKHRSKPICYKKKRRNNRCLEKFYDAKYIDSRDGKKRSGQELFNGRISRNHKKDSENLHQYRLQKVTPGRRAIRRQHYPIQPHDIIVYNGNKIEVSGCQHKGTRVVFSKTKKSVQISKIKLFKYAGGYSKSVFN

SEQ ID NO: 20112 - protein, 413 aa, unidentified; identical to SEQ ID NO: 3295
  REGION 1..413: note = Human gut metagenome

SEQ ID NO: 20113 - protein, 465 aa, unidentified; identical to SEQ ID NO: 8068
  REGION 1..465: note = Human gut metagenome

SEQ ID NO: 20114 - protein, 440 aa, unidentified
  REGION 1..440: note = Human metagenome
VGVPQQCEIFYERIYMVFVLDKSKKPLDMISNAEARILLRKKLAVIHKVYPFTIRLRDNSCGSDDKTYTVKIDPGSKTTGIAIVDNKDSVVMLAEIEHRGHIVKKNMDSRRAVRRSRRNRKTRYRPARFLNRTKPKGWIAPSIKSRADNVINFIKKYKKLININKVMIENVSFDVAQMSSDDNLVGIDYQQGPLYDTNLREFIFSKTNGRCSYCGAKATEIDHIVPRAKGGTDSTYNLIPACKSCNEKKSNLSLKEFGKLMNKDFSHLKPKRLPKDAAIVQSARNYMIREITKLVSDATIHDSWLTKYNREQLGLPKEHYYDALSVGEVPSRFNFLTDKVLQISAKGRGSRQMCRVDKYGFPRTSAKASKIVEGFQTGDMVKAIVPKGPKAGEYLGRVAVRSRRKFDIKTKSGLVKDIWYKHFYLIQRSDGYLYSYKERS

SEQ ID NO: 20115 - protein, 414 aa, unidentified
  REGION 1..414: note = Human gut metagenome
MVYVINKQGQALMPTERFGKVRRLLKNSLAHVVCRIPFTIQLDYDTTDYTQPVSLGVDAGSKHIGISATTSEKELYAADVELRNDIVDKLSTRRELRRTRRSRLRYRKARFNNRVSSKRKGWLAPSVENKIQTHLTVVENIHKFLPITNIVVETASFDIQKINNPSISGSEYQQGEQLDFFNVREYVLFRDNHICQHCKGKSKDKVLNVHHIESRKTGGDSPKNLITLCETCHKAYHRGEFKLNIKRGKSFRDSAFMGIMRWSFYNRLKNIYPNVSMTFGYITKNTRITNNLPKDHYVDARCISGNPVAKPLGYYFYQKKVRCQNRQIHKANFLKGGRKKLNQAPFLVKGFRLFDLVEYQKELYYIFGRRSSGSFDIRKLDGTKVNKGSINCKYLRLIDTRKSILIEKRTQVNL

SEQ ID NO: 20116 - protein, 415 aa, unidentified; identical to SEQ ID NO: 2744
  REGION 1..415: note = Human gut metagenome

SEQ ID NO: 20117 - protein, 544 aa, unidentified; identical to SEQ ID NO: 19655
  REGION 1..544: note = Human gut metagenome

SEQ ID NO: 20118 - protein, 480 aa, unidentified; identical to SEQ ID NO: 18342
  REGION 1..480: note = Human gut metagenome

SEQ ID NO: 20119 - protein, 420 aa, unidentified
  REGION 1..420: note = Human gut metagenome
MQYVYVLNKHGEPLMPCSPRKARLLLKQKKACVIKRTPFTVKLLHGSAGYKQTVTLGVDAGSKHIGISATTEKHELYREEATPRNDVVDLLSARRAFRRSRRNRKTRYRAPRFNNRVHSKHKGWLAPSVEVKIQEHITLIKHVFRILPVTLVRVETAEFDTQRLKAMLEGKPLPVGTDYQLGEMYDEYNVRQYVLKRDNYTCQCCGAHSTKTKGVKLHVHHIETRRTGGNAPNNLITLCKACHKALHAEKVTLDGKKRGKPLKNAAFMGIMRKTLMERLRKELKIPVQGTYGYITKYLREKNGIPKSHTNDARCISKNPLAIPCDTCYYTKAVRHHNRQLHKATILKGGIRKANQAPYIVKGYRLWDKVAYNGTECFITGRRTSGYFALKELDGTVVSNSISYKKLRLLEAATNYITERK

SEQ ID NO: 20120 - protein, 512 aa, unidentified
  REGION 1..512: note = Human gut metagenome
MATVYVLSKTGKPLMPTTRCGHVRILLKQKKARVVSLKPFTIQLLYDCEEGTQPIVLGIDPGRTNIGLSAVRKDTGEAVFTAQMETRNKEIPKLMKDRRAFRRKHRSYGRRKVRQRRASAHDTNSPKCAKQKTAQNGGVSKQAQKVGVIKRHLPGCEEPVICIGIKNKEARFNNRLRPKGWLTPTANHLLQTHITVVNKVRRFLPITDVVLEVNKFAFMALDNPHVQKWMYQHGPLKGYGSVEEAVSVQQDGHCIFCKNEIANFHHIVPQSKRGSNTIGNVVGLCSEHHELVHKDSTWEQKLKTKKQGMNKKYGALSVLNQIIPRLCDTLTNMYVEHFYVTDGQSTKAFRNEHDIRKDHYLDAYCIACSVLSSSCRSNVPDEKDVFHIMQFRRHDRRACHQERVDRKYYLEGKLVATNRHKAIEQKNDSLEEYVAAGGCVDKLFAPKHPPLYRRKGRIMPGTVFLVGNKTKMMIASQGTHNGVPNYYRFTDGSRATPKNCKPIYQNTGIVFV

SEQ ID NO: 20121 - protein, 430 aa, unidentified
  REGION 1..430: note = Spirochaetales bacterium UBA6368
MVYVLNIHGQPLMPTTRYGKVRRMLKEKQAKVIKRCPFTIQLLYENPNFVQEVSLGVDAGSKTIGISATTPTSELYAAEVKLRTDVVTNLSSRHECRRSRRNRKTRYRQKRFDNRKVNKQNGWIAPSICNKIVTHLTTVDKITKILPVSEIHVEVASFDIQKIKNPDITGIEYQQGEQLDFWNVREYVLFRDQYTCMCCKGRSKDKILNVHHIESRKTGGDAPNNLITLCETCHNDYHNGTIQLPKTIKRGMSFRDATFMGVMRWAFYNKVKEIYEAKGIPVSLTYGYITKNLRIKNNLPKTHYVDARCISGHSNVEPLGYYFLQKKVRCHNRQIHKLKFMKGHYRKRNKADYEILGFKLFDKVLFQNIECFIFGRRSTGRMDLRKLDGTHINASANYKNLKLLENSKHILTERRTGRFLPVASNRVSTS

SEQ ID NO: 20122 - protein, 419 aa, Geobacillus sp.; identical to SEQ ID NO: 2623

SEQ ID NO: 20123 - protein, 351 aa, unidentified; identical to SEQ ID NO: 10636
  REGION 1..351: note = Human gut metagenome

SEQ ID NO: 20124 - protein, 423 aa, unidentified; identical to SEQ ID NO: 4062
  REGION 1..423: note = Human gut metagenome

SEQ ID NO: 20125 - protein, 418 aa, unidentified
  REGION 1..418: note = Human gut metagenome
MIYVRSKEGKALMPSERGGRIGYLLRHGKAHVVSRVPFVVQLDYESTTYTQDVSLGIDAGSKHIGVSASSERKELLAAQVELRSDVVNLLSTRRELRQTRRNRKTRYREQRFYNRKKKDGWLTPSVEQKVESHLKVIRLVHKLLPITKTTIEVAQFDAQKIKNTDIKGNEYQQGEQMGFWNVREYVLARDGHKCVHCKGKSRDPILNVHHLESRKTGGNSPSNLVTLCETCHKAYHRGEFELKIKRGTTLRDAAVMNIMRWAVYEQAKEEFRNVHLTYGYVTKHTRIENGITKTHAADAFCIAKNVHAIRLGTFFMCRCVPRHTRALHVANPKKGGIRRSCIASHKIGKSRFQRFDMVLWKGKECFIFGSTKGRPVLRDIKGIKMHENNSVNIKTISFLKRLRKNIIVEERTFESRII

SEQ ID NO: 20126 - protein, 450 aa, Moorena sp.; identical to SEQ ID NO: 2935

SEQ ID NO: 20127 - protein, 509 aa, unidentified
  REGION 1..509: note = metagenome
MPDTDYIYVLGADGKPQMPTKRKRHVKRLLDTGKARIACHVPYTIQLLYENTPVLQPVMLAEDPGRTNIGMAVLSVKGELLMSAVVETRNRKIVRLMNHRRGYRRASRNGERKARQRLAKRFSTMLKAGMLMRKLPKFAADKFITCHYIRNTESRFCNRKRPDGWLTPTSRQLVETHINLIHKIQKYLPVTDIAMEVNRFAFLSLENPSVSGVDFQNGPLKGFDSLHDAVNELQHGKCLLCDKKIEHYHHIVPRFMNGSNTIGNIAGLCMECHNKVHKRAAYQKKLNDVKKGLDKKYGALSALNQAVPFICKRLEAEFGKEHVSYCTGRDTAKMRSSFGFQKTKDNQMHETDAWCIGILALNRIPDVVPNFGQTYCIRQFRRQDRSFVYAQTERVYKLDGVIVAKNRKKRTEQKTDSLEDWYNRQVVLYGKKKADFMRSRLTAVKSKRRYNDLTHVMPGAIFMYNGERYVLSGRLSKGLLFRAVGDAKTNYPASKCKIIRHNEGLVFVC

SEQ ID NO: 20128 - protein, 420 aa, unidentified; identical to SEQ ID NO: 6416
  REGION 1..420: note = Human gut metagenome

SEQ ID NO: 20129 - protein, 406 aa, unidentified
  REGION 1..406: note = Human gut metagenome
MVYVQDIDGKPMMPTTRHGKVRRLLKDSKAVVVNTCPFTIKLMYKTSGYKQEIVLGVDAGTKHVGLSATTKSKELYSSEVILRSDIVELLSTRRELRRTRRNRLRYRKPRFDNRIKSKRTGWIAPSVRHRIDAHIRIINNVCSILPISRIIVEIAQFDTQKIKNPDISGNEYQEGDQLGFWNVREYVLARDGHKCQHCKGKSKDPILNVHHIESRKTGGDSPSNLITLCETCHKEYHKGNIDLKVKRGKSLRDAAVMGIMKWKLYDELKSRCDNVSMTFGYITKYNRIKYGIEKSHTSDAFVISRNFNAKRIERQYLKRLIRRHNRQIHKMKILKGGKKKNNQAPFEVFGFRLFDKVLYNNEILFVYGRRKSGNFNIRDFNGENPKDVSHKKLKLIRGKRHLIILK

SEQ ID NO: 20130 - protein, 442 aa, unidentified
  REGION 1..442: note = Human gut metagenome
MSTSVFVLDKKHRPLMPCRPARARRLLRVGRARVVKRFPFVIRLVDRTVEQSEVQPVLIKLDPGSRETGAAVVRDDEKKRHHALAFFVIKHRGGAIRDALKARSAFRRRRRSQNFRCRSPRFLNRVKPKGWLPPSLRHRVETTLSFVRRMCRYLPVSGIAAELVKFDSQKLQTPEVSGIEYQQGTLFEYEVREYLLEKFGRKCVYCGAEGVPLNIDHVVPRAKGGSNRVSNLVLACMSCNQKKGARSLEDFLKGKPKVLARVRRELKTPLRDAAAVNATRWVLFNELKATGLPVETGSGALTKLNRHAFGVEKEHWLDALCVGRLNGVVTRKGLNVLEIRCMGRGSRQRTRLTKYGFPRGYLMRQKCVHGFATGDMVEANVPKGKKAGLWRGRVAVRVSGSFNIQTPKGVIQGVGWKHCRLISHNDGYGYAWLGHAPHSSPA

SEQ ID NO: 20131 - protein, 420 aa, unidentified; identical to SEQ ID NO: 10448
  REGION 1..420: note = Human gut metagenome

SEQ ID NO: 20132 - protein, 414 aa, unidentified; identical to SEQ ID NO: 2856
  REGION 1..414: note = Human gut metagenome

SEQ ID NO: 20133 - protein, 427 aa, Moorena sp.; identical to SEQ ID NO: 3216

SEQ ID NO: 20134 - protein, 424 aa, unidentified; identical to SEQ ID NO: 8578
  REGION 1..424: note = Human gut metagenome

SEQ ID NO: 20135 - protein, 420 aa, unidentified; identical to SEQ ID NO: 6507
  REGION 1..420: note = Human gut metagenome

SEQ ID NO: 20136 - protein, 477 aa, unidentified; identical to SEQ ID NO: 2707
  REGION 1..477: note = Human gut metagenome

SEQ ID NO: 20137 - protein, 330 aa, unidentified
  REGION 1..330: note = Human gut metagenome
MVYVQDIDSKPMMPTTRHGKVRRLLKDNKAVVVNTCPFTIKLTYKTSDYKQEIVLGVDTGTKHVGLSATTKSKELYSGEVILRSDVVELLSTRKELRRTRRNRLRYRKPRFDNRIKSKRTGWVAPSVRHRIDAHIRVIDNVCSILPISRIIVEVAQFDTQKIKNPNISVNEYQEGNQLGFWNVREYVLTRDGHKCQHCKGKSKDPILNVHHIESRKTGGDSPSNLITLCETCHKEYHKGNIDLKVKRGKSLRDAAVMGIMKWKLYDELKSKYDNVSMTFGYITKYNRIKYGIEKSHISDAFVISKNFNALMLEYHYKVRLVRRHNRQIHK

SEQ ID NO: 20138 - protein, 447 aa, unidentified; identical to SEQ ID NO: 12599
  REGION 1..447: note = Human gut metagenome

SEQ ID NO: 20139 - protein, 420 aa, unidentified
  REGION 1..420: note = Human metagenome
MVYILNKHNEPMMPCSERKARLLLKQGRAVIYRKDVFTIKLINGSYGYKQHITLGVDCGSKHIGVSATTDKQELFSANAELRNDVVKLLSDRRMLRRSRRFRKTRYRKPRFDNRRIKEGWLAPSIRQKIDSHVRIVSLIHKLLPVKQVNVEVAAFDMQKIKNPDIKSSEYQMGEQLDSYNVREYVLFRDNHICQHCKGKSKDDVLQVHHIESRKTGGNAPNNLVTLCKTCHEKYHSGEITLNVNRGKSFRDAIAMSTMRWFLYEELKSRFSNVNITYGYITKYKRIKLGLSKEHYNDAYCIAGNLNTSRLCNHHLIRFIPRHSRILHVQKFSKGGVRRSASAPYWLNGGKPSKHGIIFTRFDKVKFNSVVCFISGSSNGFASLRDINWNKVYGCKTTVTVNKLALVSRRRGSMLFGELCG

SEQ ID NO: 20140 - protein, 512 aa, unidentified; identical to SEQ ID NO: 9077
  REGION 1..512: note = Human gut metagenome

SEQ ID NO: 20141 - protein, 457 aa, unidentified; identical to SEQ ID NO: 9139
  REGION 1..457: note = Human gut metagenome

SEQ ID NO: 20142 - protein, 419 aa, unidentified
  REGION 1..419: note = Human gut metagenome
MVYVISQDGKPLMPCSDPIARLLLKQGKAKVKKREPFTIKLTYETTNYTQGLTLGVDTGSGTIGTAVSKDNGDIVYMSEVVVRNDITDKMTQRAKYRRNRRNRKTRYRKARWLNRASSIKKDRFSPTMQSKLHSHVREIEYIQSILPITEMVFETGQFDMQLMKNPSLANPKVRPWGYQKGANYGFENTKAMVLNRDNYTCQCCKGKHKDSKLEVHHIVFRSQGGSDEESNLLTLCHTCHKDLHSGKINPKLSGKLKGNLKYATQMNSIRKQLFRFYPNAIETFGYVTKANRLHLGVDKEHYYDACTIATQGNAFNVKSNLYKKKCVSDGDFQKTKGIRSEEPIVTDKICGFRKFDKVRYFGNDYFIKGRMSTGYAILMDIDGNKIDFSTMPRGYKTPKLSNCKRITARSTVMTQVKVV

SEQ ID NO: 20143 - protein, 397 aa, unidentified
  REGION 1..397: note = metagenome
IVKRRTPFTIQLTIATGETKQPVSLGVDAGYEHVGLPASTEKAELYASEVELRQDITDLLSARRALRQSRRNRKTRYRAPRFDNRIRTKRKGWLAPSVENRIDAHLSRIEAVLRLLPVTKITVETASFDLQLLKNPDISGKEYQEGEQLGFWNIREYVLCRDGHVCQHCYGRSKDPVLNVHHLESRRTGGDSPGNLITLCETCHKALHRGEITLKAKRGQSFRAEAFMGIMRSEVLNRLKASHPELEVNNTYGYRTKHARIANDIAKSHCADAFCIAGNLGAERLGEFFFQKQTRRNNRQIHKLSILKGGIRKRNQAPFEVNGFRLFDKVACKGEEGFIFGRRSSGFFDVRKLDGTRISAGISCKKLHLLEKRRTYLTEIRKEEALPALPEGRGLRA

SEQ ID NO: 20144 - protein, 439 aa, unidentified
  REGION 1..439: note = Human metagenome
MVLVIDKHKKPCNTISNAYARVLLFKKQAVIHKRFPFTIRLKNDNAVLKDKSYTVKLDPGSKTTGIAITDDKDSVIMLAELEHIGHLIKKDLNSRRIVRKSRRQRKTRYRPARFLNRTKPKGWLAPSVRSRADNVINFIKKYKKLINIDKVMIENVSFDTAQMSSNSKLYGIKYQQGPLYQNKLRSFIFSRSNDKCVYCGAKATEIDHVIPRSSGGTNSIYNLVASCRNCNQMKSNLTLKAFGKKMNKNYSHLEPKKLPKDAAIIQSSRNYMVKEITKLVSNITLHDAWMTKYNREELGLPKEHYYDALSVGEVPNKFNFLTDKILQISAKGRGSRQMCRMDKYGFPGTKPKGSKLVKGFQTGDMVKAVVPSGLNAGKHLGRVIIKSSGYFEIKSKNSSVQGINHKYCRLIQKGDGYLYNYKESDFLSAIAKRVMICLH

SEQ ID NO: 20145 - protein, 544 aa, unidentified
  REGION 1..544: note = Human gut metagenome
MKQKKQKVMVYILNKKGKPLMPTTRCGHVRKLLNSKKAVVVNSNPFTIRLKYDTPNGVQDVFAGIDSGRENIGSGVSNEDGDCLYLGELKTSNKSIKIKMAERTGFRRERRRHDRQSKQRKAKKDHTEIQNGNDDICRTTISCKSVQISYPAAEESVTHKIIRGKEGKFANRHRDEGWITPSARQLVQMHMNDLKSMCKILPISHVTLERVAFDFQKLENENIKVWEYGKGKLYGYDSPEEYIHDVQDGKCLVCGKPHIDYLHHIIPRSKGGSDKVSNLAGLCYDCHYGPMGVHNCRETQDRLPELKNEANKQYKVNLLNSVMPVLIEEMDKFCKANSIIFSICEGHDTAKVRDMYDLQKDHCIDGFAISLVDRNVKSVDVMPDRIYQKQRYKKKSKNIIQKRNCREYYDGKKLVAVNRHKGTDQKADSLEEYMNTYAETHTADECKKHFDSLTVKPARRTYTFHKEGRICPLHIGDKVRYEKKNKIKGNTKVDTFICEGIYFSKDENKAEVEHNKTKSKKMKFCRAIESGCIPYIDYIKLALI

SEQ ID NO: 20146 - protein, 469 aa, unidentified; identical to SEQ ID NO: 9984
  REGION 1..469: note = Human gut metagenome

SEQ ID NO: 20147 - protein, 444 aa, unidentified
  REGION 1..444: note = Wastewater metagenome
MAVFVIDRRQAPLMPCSEKRARLLLARGRARVHRLIPFTIRLIDREVAQSELQPLELKIDPGSKTSGLALVRNNDTVNAETGKITATAHVLNLFELTHRGFQISKALTARSQMRRRRRSANLRYRAPRFLNRKNKGEGWLAPSLQHRIDTTLSWVARIRNVAPITHLAQELVRFDMQQLENPEIAGVQYQQGELRGYEVREYLLEKWHRQCAYCDVSEVPLQIEHIHPKARGGSNRVSNLTLACAPCNLKKAAQDITQFLAKDPKRLTKIQAQAKRPLRDAAAVNATRWKLLNALKGLGLPVRTGSGGLTKFNRSRLVIPKTHALDAVCVGEVDFVEQWQKPTLVIKATGRGSYQRTRLNRFGFPRGYLTRQKRIHGFQTGDRVKAMVTKGKKVGTYMGRVAVRASGSFNIQSAEGLVQGISHRYCTLIQRSDGYGYSLRSDSN

SEQ ID NO: 20148 - protein, 470 aa, unidentified; identical to SEQ ID NO: 7775
  REGION 1..470: note = Human gut metagenome

SEQ ID NO: 20149 - protein, 414 aa, unidentified
  REGION 1..414: note = Human gut metagenome
MPCSPAKARLLLKEKKAIVVRRTPFTIQLTIATGESKQPVSLGVDAGYKHVGLSASIEKAELYASEVELRKDITDLLSARRALRQSRRNRKTRYRAPRFDNRIRTKRKGWLAPSVENRINAHLSRIEAVLRLLPITKITVETASFDMQRLKNPDISGKEYQEGEQLGFWNVREYVLFRDGHVCRHCHGRSKDPVLNVHHLESRRTGSDSPDNLITLCETCHKALHRGEITLKAKRGQSFRAQAFMGIMRREVLNRLKASYPELKVHETYGYLTKHARIANGIVKSHGADAFCIAGNLGAERLGEFFFQKQTRRNNRQIHKLSILKGGIRKRNQAPFEAKGFRLFDKVACQGEEGFIFGRRSSGSFDVRKLDGTRISAGISCKKLRLLEKRRTYLTEIRKEEALPPLPEGRGLRA

SEQ ID NO: 20150 - protein, 430 aa, unidentified
  REGION 1..430: note = Human gut metagenome
MPKVYVLNRHGRPLMPCTPAKARHLLDAGKAKVRHRTPFTIQLLYGSTGYAQEVILGVDAGSKTIGLSASTETEELFSAEVKPRNDVVELMSARRQFRRARRNRATRYRKPRFDNRVRSKHKGWLAPSVEVKIQEHMTAIRRACAILPVSKVVVETAEFDLQLLKAVAEGKPVPQGEDYQKGEMYGHYNVRQYVLWRDSYTCRICGVHGSVRKGVPLHVHHLESRRVGGDAPDNLVTLCTACHDKLHKGIIMAADIKKRKRRSTRDATFMGIMRMTLLRRLREQLPVPVVETRGYITKATRENLLVLPKSHTNDALAIAHGPQGFRAEYLPNIRQADRLYTIRPVRHHNRQLHKATILKGGVRKANQAEKYICGFRLYDKVLYNGIECFVWGRRTSGSFLLRQLNGEKVKDGVSYKHLKLLERSQSYLVA

SEQ ID NO: 20151 - protein, 416 aa, Moorena sp.; identical to SEQ ID NO: 9725

SEQ ID NO: 20152 - protein, 426 aa, unidentified; identical to SEQ ID NO: 7828
  REGION 1..426: note = metagenome

SEQ ID NO: 20153 - protein, 443 aa, unidentified; identical to SEQ ID NO: 11672
  REGION 1..443: note = Human gut metagenome

SEQ ID NO: 20154 - protein, 507 aa, unidentified
  REGION 1..507: note = Human gut metagenome
VLNKDGKPLMPTTRGGHVRHLLKEQKARVMRTKPFTIQLLYETDDVVQPLYLGIDPGRTNIGVAVVKTDGTAVFTAHLETRNKEIPKLMKKRKDSRRARRTNGRRCRRQRRAKANGTISKKCVKQDTAQNGSVSKRAKEIGVIKRHLPGCEKEILCIGIKNKEAKFNNRTRPEGWLTPTANQLLQTHINLVKKIQKFLPISDVVLEINKFAFMQLDNPNIQKWQYQQGSLCQKANLEEAVSEMQEHHCLFCKNPIDHYHHVVPQHKNGSNTIDNIVGLCTKHHDLVHKDTVWQEKLAKKKTGLNKKYGALSVLNQIIPALTKGLSSLFQKHFFVTTGKNTYDYRAAHSVSKDHWLDAYCIACSVLPNDVCDNSINSRVPYELKQFRRHDRRALNNENISRVYTLNDRKVAINRHKAVEQTADSLEEFRQNHPDNVCKLKVKEHHSTYRNMNRNYPGSVFLVGKQVHIMQGIAGSKDGKSTKYNDTNATTIAAGKCKFIAKNSGILFV

SEQ ID NO: 20155 - protein, 418 aa, unidentified; identical to SEQ ID NO: 20125
  REGION 1..418: note = Human gut metagenome

SEQ ID NO: 20156 - protein, 462 aa, unidentified
  REGION 1..462: note = Human gut metagenome
MSVLVIGSNGRALMPTNPRKARLLLKKKTASVVCRHPFTIQLLYKTGCATQEGSIGIDTGSQHIGVGITCGDKVILKDEHALRSSMEKRSLLVARAAMRRGRRYRKVRYRKPKWRHHTKRMYFEKPNRRGQHWRKVKTTTQSPRPKGWLPPSLQSKCDHHFRIIDRYLKYLPDPITRNLVIETGRFDMARMNDPTIHGEMYQRGPMYDAENLRAYIFARDNYQCACCKAKAGTTRKADGTTVKLVAHHILFRSRGATDNPKYIISVCDHCHTTKAHQPGGVLYSWMENNKKVTRGLRDATFMNILRKRLFARYPQAAFTYGNITAADRKQLRLPKSHANDAVAISLLGKEASTVKNICQTMHYKQIRKSKRSLHEAIPRKGRKNPNTKAVRNKKNTTQVNGFKLWDSVLANGKKLFICSFTGTSAYLIDKNGCYISQPGKTYKQWPLSKLKRLHPNGNWLMA

SEQ ID NO: 20157 - protein, 460 aa, unidentified
  REGION 1..460: note = IscB polypeptide
MSKQTLQREFKNVPTGAPLACSSTSTPLNRLETVSVVSKVLSCNNPEVGQRKQVSGLKVTVPVLSITGSPLMPCSLAKARHLLERRRAKIVNLNPFAIKLTFDCENKVQEVSLGIDTGYRHIGFSAITEVKEIVSGEVELDDKTSKRLTERRMYRGHRRSRLRYRKPRFNNRKTSEGWLPPSIQRRLDTHINMVNKLKELTPVRKVTVEIGAFDIQKLMDPEISGKEYQHGDLYGYNNLKAFLFSRESGKCQLCNKKIVKGEKAHLHHIKPRSETGTDRPSNIALLHENCHDKMHKKKLYKKLKGPKEYKAETFMSIMAARLKKALDCDVTYGYETATKRNLLRIEKSHVNDALVIAGGTNQERCLPYKVEQKRINNRVLQTNRKGFIPSIRKKRHSIQNRDFVWINNKRYLCGGVASRGAEVYYFERSGKKLINTKKIEKVYHTGSMVWISGVVFTELV

SEQ ID NO: 20158 - protein, 390 aa, unidentified
  REGION 1..390: note = Human gut metagenome
WFFIRKKRASLVSKYPIVIQLMKEIPEKEICQDEIRCGIDDGGLHVGIALVQKCKTKNKVVFKGTMEQRNDVKHLMEVRRGYRRYHRYHKRYRQARFDNRKSSKRKERIAPSILQKRQATIRVINWLNKWINITNYWLEDVSVDIRALTDGYQSYRWQYQKSNRLDENIRKAAILRDGGKCMECGKSNCRLEVHHIKPKRRNGSNTLDNLITLCESCHQKTEGQEELYMDRYFSLLKSSDNKNLNYAQHVMIGKMWLRKQLSGLGVLYLTSGGDTANKRIDWNIEKSHANDAVCITDLRPDTCDVKEWTMKPMRRQSKAKTDHVLGIHHRDLVEYTFKNGETHRGYVTALYPEQKAINFQSPTKHCKKVNARKCKLLWKYSKIYWFENAS

SEQ ID NO: 20159 - protein, 411 aa, unidentified; identical to SEQ ID NO: 3917
  REGION 1..411: note = Human gut metagenome

SEQ ID NO: 20160 - protein, 509 aa, unidentified
  REGION 1..509: note = Human gut metagenome
MPDTDYIYVLGADGKPQMPTKRKRHVKRLLDTGKARIACHVPYTIQLLYENTPVLQPVMLAEDPGRTNIGMAVLSVKGELLMSAVVETRNRKIVRLMNHRRGYRRASRNGERKARQRLAKRFSTMLKAGMLMRKLPKFAADKFITCHCIKNTESRFCNRKRPDGWLTPTSRQLVETHINLIHKIQKYLPVTDIAMEVNRFAFLSLENPSVSGVDFQNGPLKGFDSLHDAVNELQHGKCLLCDKKIEHYRHIVPRFMNGSNTIGNIAGLCMECHNKVHKRAAYQKKLNDVKKGLDKKYGALSALNQAVPFICKRLEAEFGKEHVSYCTGRDTAKMRSSFGFQKTKDNQMHETDAWCIGILALNRIPDVVPNFGQTYCIRQFRRQDRSFVYAQTERVYKLDGVIVAKNRKKRTEQKTDSLEDWYNRQVVLYGKKKADFMRSRLPAVKSKRRYNDLTRVMPGAIFMYNGERYVLSGRLSKGLLFRAVGDAKTNYPASKCKIIRHNEGLVFVC

SEQ ID NO: 20161 - protein, 490 aa, unidentified; identical to SEQ ID NO: 3566
  REGION 1..490: note = Human gut metagenome

SEQ ID NO: 20162 - protein, 426 aa, unidentified; identical to SEQ ID NO: 11153
  REGION 1..426: note = metagenome

SEQ ID NO: 20163 - protein, 424 aa, unidentified; identical to SEQ ID NO: 5075
  REGION 1..424: note = Human gut metagenome

SEQ ID NO: 20164 - protein, 339 aa, unidentified
  REGION 1..339: note = Human gut metagenome
VDAGSKTIGLSASTAKEEVFAAEVMPRNDVVENLSTQREFRRARRNRTTRYRKPRSDNRVRSNHERWLAPSVKVKIQEHITSIKRVRTILPISKVVIETAEFDLQLLKAIQEGKPIPEGEDYQKGEMYGSYNVCQYVLWRDNYTCICCGVRGTPKNPVRLHVHHFESRKYGGNAPDNHGTLCDDCHKKFHLGIITDVKLKTRRRQSTRDAAFMGIMRKTLMWRLRTELFIPVAETKGYITKATREKLLVLPKSHTRDALAIAQGRHGFGIKEYAYVEPANHIYTVRPVRHHNRQLHKASILKGGIRKRNQASKYIFGFRLYDKVLYQGKACFVWGRRTT

SEQ ID NO: 20165 - protein, 413 aa, unidentified; identical to SEQ ID NO: 3023
  REGION 1..413: note = Human gut metagenome

SEQ ID NO: 20166 - protein, 195 aa, unidentified
  REGION 1..195: note = Human gut metagenome
MICIVLCIIANARTKHVGLSATTKSKELYSSEVLLRNDIVDLLSTRRELRKTRRNRLRYRKPRFNNRIKSKRSGWIAPSVKYKVDAHIRVIDNVCSILPIFRIVIEVAQFDTQKIKNPNISGKEYQEGDQLGFWNTREYVLARDGHKCQYCKGKSKDKILNVHHIESRKTGGNPPSNLITLCETCHKEYHKGNYF

SEQ ID NO: 20167 - protein, 455 aa, unidentified
  REGION 1..455: note = Human gut metagenome
VIKSSEGKERCPLHQTPSNIDEGCLLPERAWRQNLRVFVINQRGKPLMPCSPAKARVLLREKKARVKRRTPFTIQLTTATGEARQDVSLGVDAGYRHVGLSASTEKAELYASEAVLRDDITDLLSARLALRRARRNRKTRYRAPRFSNRVHSKNKGWLAPSVEHKIASHLKLVENVCRLLPVTNITVETASFDMQAIKNPDIKGTEYQQGEQLGFWNVREYVLWRDGHQCQHCRGKSGDPILNVHHLESRRTGGDAPNNLVTLCETCHKAYHAGRIDLKLKRGRSMRAEAFMGIMRWTFFYRLKEIHADKTVENTYGYLTKHTRITHGIEKSHCADAYCIAGNLSAERLPEYLYQKQVRKHNRQIHKLTIGRGGIRKRQQTPFEVKGFRLFDKVRLGGEEGYIFGRRSSGYFDVRRLDGQKLSAGVSFKKLHLLEKRKTYLTVLLPRLKTKVSAP

SEQ ID NO: 20168 - protein, 413 aa, unidentified; identical to SEQ ID NO: 19628
  REGION 1..413: note = Human gut metagenome

SEQ ID NO: 20169 - protein, 453 aa, unidentified
  REGION 1..453: note = Human gut metagenome
MLMAVAVVSRTGVPLMPTSPYRARKLLASGKAEKYGYDPFTIRLTERETGDTQPVELCMDTGYIHIGVSVKSEKHEYLALQIDTLTDEKKKHEKCREKRRNRRSRKRYRKPRFDNRKRDKGWLAPSLEHKKEIHVRAAERICRVVPVTDITMEMGNFDTQVLKAREEGCPLPQGTDYQQGERYGTATLREAVFSRDNYTCLCCGRTMKDGAYFHVHHIQYRSQGGTDRMANLATVCEKCHTPANHQPGGKLYNWKPEIKSFKGATFMTAVRWQMYREIKEKIPDVSIHLTYGAATKERRRALDIEKSHVNDAFVMGRFHPGHRARPELYIKKRRNNRVLESFYDARYIDSRDGKRKPGKELFNGRISRNHKKDSENLHKYRLRKVSKGKRSIRKKHYPIQPHDILVYCGRKYETAGCHNLGTGAILLPERRSIAVSKLKIYRYSGGYYKAEFN

SEQ ID NO: 20170 - protein, 400 aa, unidentified
  REGION 1..400: note = Human gut metagenome
AKIKKRTPFTIQLVYGSSGYTQEVILGVDAGSKTIGVSALTKKEELFAANVIPRNDVVDLLSTRREFRRARRNRKTRYRKPRFDNRVRSKHKGWLAPSVEVKIQEHITAIRRVCGILPVSKVVVETAEFDLQLLKAIADGKPVPQGEDYQKGEMYGHYNVRQYVLWRDDYTCQCCGAHATKKKEVRLHVHHLESRKTGGDASGNLVTLCESCHEKLHKGLITEDDFKKRKRKSTRDATFMGIMRATLLQRLRSELPIPVVETRGYITKATREKLLVLPKSHTNDALAIAQGKHGFNVGYLPGIAQIDKIYTIRPVRHHNRQLHKATILKGGIRKSNQAEKYVFGYRLFDKVQFNGQDCFIWGRRTTGIFTIKTINGKMIKDGISFKKLKPVEKSTSYLIA

SEQ ID NO: 20171 - protein, 512 aa, unidentified
  REGION 1..512: note = Human gut metagenome
MSTVYVLNKDGKPLMPTTRGGHVRYLLKEKKARVVTSKPFTIQLLYETDDVVQPLYLGIDPGRTNIGVAVVKTDGTAVFTAHLETRNKEIPKLMQGRKKARRARRTNGRRCRRQRRAKANGTISKKCVKQTTAQNGSVSKRAKKIGVIKRHLPGCEKKVLCIGIKNKEAKFSNRTRPEGWLTPTANQLLQTHINLIKKIRKFLPVNDVVLEINKFAFMQLDNPNIQKWQYQQGPLYQKASLEEAVSEMQEHHCLFCKQSIVHYHHVVPQSENGSDTIGNIVGLCTKHHDLVHKDTAWQKKLAKKKTGLNKKYGALSILNQIIPALTKELSSLFPKHFFATNGKSTHDYRAAHDVSKDHWLDAYCIACSILPNDTCDKNINGRVPYKLKQFRRHDRRALHNENMSRVYTLDGKKVATNRHKAIKQTTDSLEEFRQRQPNDVCKLKVKEHHPEYRNPERNFPGCVFLVGKHTHVMQGTSGSHNGKADGYYDTNGNSYPSGKCKFVAKNKGIVFA

SEQ ID NO: 20172 - protein, 436 aa, unidentified
  REGION 1..436: note = Candidatus Gottesmanbacteria bacterium
MSNVLVMDTNKQPLRPCHPAVARILLKHGKAAVYRQFPFTIILKYEVTGPVEPLRLKIDPGSKTTGMAIVDDATGEVVWAAEIEHRGQRIRDRLLARRQLRRGRRNRKTRYRKPRFDNRRRREGWLPPSLESRVANVETWVNRLRRWCALGNLSYELVRFDTQQLQNPEVNGVEYQQGELLGYEVREYLLEKWQRQCAYCGVENVPLEVEHIVPKSRGGSNRVSNLTLACVPCNGKKGNQTAAEFGFPEIQAQAKHPLKDATVVNATRWALYRRLAALGLDIEVGTGGRTKFNRTRQGLPKAHWLDAACVGASTPELQLNGTSPWAVKAKGWGQRQMCRMDRYGFPRTGAKQAHRVHGFATGDLVQAVVPTGKKQGVHVGRVAIRTQGTFRVGVVDGINWRYCTRRQAGDGYDYTKEGARLPPTLERRGFPSREFL

SEQ ID NO: 20173 - protein, 512 aa, unidentified; identical to SEQ ID NO: 4545
  REGION 1..512: note = Human gut metagenome

SEQ ID NO: 20174 - protein, 544 aa, Streptomyces sp.
MTTFLAGEQTHRAVLPQQPALESASADTPGSRDETAHGLPAAMPGTGTEHGRGETGGVRTGTRRRHARSAVSTAETAETGSDDAPRPAASRVFVLAKGGEPLMPCHPARARELLAGGRAVVARRAPFTIRLKHRTRAGSAVEGVQLRLDPGSRATGIAITDERHRIGPTGRTAVARRGLITIELRHRGQQIHGGMVRRAAYRRRRRSANLRYRAPRHDNRPRPDGWLPPSLRHRIDSTMAVVVRLCRYAPVLEIHVEQVAFDTTAFAGVMPSGTQAGVESTYGASEVREFLLAKWKRSCAYCDATGVPLNIDHVRARSRGGSDRVSNLVLACIPCNQAKGTAPVQEFLADRPARLERVIAQLRRPLQDVAATNATRLQLVKALAAQGVPVHAWSGGRTHWNRLAMGLPKSHTLDALATGVIDRARGDALVRVPAQILVVASTGRGSYARTTPDRFGFPRLQRPRGKVHHGYSTGDLVAAVVPKGKWAGSWVERVAVRTSGQHRITTLTSRFDVSHRNLRLLQRADGYTYAFADEIRLSGRHRPA

SEQ ID NO: 20175 - protein, 448 aa, unidentified
  REGION 1..448: note = Human gut metagenome
MSTGLRAVQAEPAGIRKGDALKVFVLNMRGRPLMPCSPAKARHLLKAGKAVVRRRTPFTIQLRIATGETKQSVTLGVDAGAKHVGLSAATEKEEVFASEVELRQDITGLLAARLSLRRDRRHRKTRYRAPRFLNRVRSKHKGWLAPSVENRIQAHMSRIEAVCRLLPVTRIVIETASFDVQKIRNPEVEGTGYQQGDQLGFWNVREYVLFRDGHVCQHCHGHSKDKILNVHHLESRQTGGDAPNNLITLCETCHKACHAGKIKLKVKRGQSFRAEAFMGIMRWTLLDRMRKAHSGLPIENTYGYLTKNTRITLGLPKTHCVDAYCIAGNLKAVRRGVCLHQRQVRKHNRQIHKCTVLSKTLKDGTKIGYRKLNQTPHLVKSFRLFDKVRCLGQTGFIFGRRSSGYFDVRRLDGVKLSSGISYRKLTLLEKRSTYLTELRKEDGASSPV

SEQ ID NO: 20176 - protein, 414 aa, unidentified; identical to SEQ ID NO: 2588
  REGION 1..414: note = Human gut metagenome

SEQ ID NO: 20177 - protein, 494 aa, unidentified; identical to SEQ ID NO: 12763
  REGION 1..494: note = Human gut metagenome

SEQ ID NO: 20178 - protein, 413 aa, unidentified; identical to SEQ ID NO: 3924
  REGION 1..413: note = Human gut metagenome

SEQ ID NO: 20179 - protein, 470 aa, unidentified; identical to SEQ ID NO: 14746
  REGION 1..470: note = Sponge metagenome

SEQ ID NO: 20180 - protein, 475 aa, unidentified; identical to SEQ ID NO: 4985
  REGION 1..475: note = Human gut metagenome

SEQ ID NO: 20181 - protein, 456 aa, unidentified; identical to SEQ ID NO: 10647
  REGION 1..456: note = Human gut metagenome

SEQ ID NO: 20182 - protein, 447 aa, unidentified
  REGION 1..447: note = Human gut metagenome
EDPGRTNIGAAVLSPLGDLLFAAVIETRNKEIKKLMADRQKSRQASRRGERKARQRLAKRYGSMVKSGMVMRKLPMYAADKFVICKFIRNTQARFCNRKRCPDWITPTVQHLVQTHLNIIRKISRYLPVTDIAFEVNRFAFMHMENPEAMGVDFQNGPLKGYGDVKEAIRTQQHGKCLMCKKPISHFHHIVPRSRGGSDTIQNLAGLCTECHTKVHTDTAFRKDFDEKKSGQLKKYGALSALNQAVPFICKKLLEEYGEEHVHFCRGLDTSLIRTAFGFEKTKKNQMHEVDAYCIGLAALEVNEVETPAFDHTFQIRQFRRQDRSIIHHQTGRSYYQGKEKVAQNRKPGFEQKTTALSQWYEEQVRIHGEKEAEKLRSQLRVEKSCRHYNDMDRFLPGAVFLYEGKRYVLSGRITNGKYLRACGQGMKNFPAAECTFIRHNAGLVFI

SEQ ID NO: 20183 - protein, 420 aa, unidentified
  REGION 1..420: note = Human gut metagenome
MQYVYVLNKHGEPLMPCSPGKARLLLKQQKACVVRRTPFTIKLLFGSAGYKQPITLGVDAGSKHVGLSASTEKRELYSEEFTPRSDVVELLSTRRQNRRSRRNRKTRYRVPRFDNRVHSKHKGWLAPSVEVKIQEHITVIKHICKILPISLVRVETAEFDTQRLKAMLAGKPLPVGTDYQLGEMYDEYNVRQYVLKRDHYTCQCCGTHNTAKKVVKLHVHHLESRKTGGNAPSNLVTLCTTCHKNLHKGRVTFDGKERGKPLRDAAFMGIMRKTLMVRLKEELPIPVQGTYGYITKMRREQNDIKKSHTNDARCISKHPLAEPCSVCYRTKAIRHHNRQTHKANFSKKGIRKRSQMPYLVEGFRLWDKVLYKGQECFVSGRRSSGSFALKKLDGTSISKGVTFKKLRLLEPATNYLIERM

SEQ ID NO: 20184 - protein, 518 aa, unidentified; identical to SEQ ID NO: 3878
  REGION 1..518: note = Human gut metagenome

SEQ ID NO: 20185 - protein, 431 aa, unidentified
  REGION 1..431: note = Human gut metagenome
MPNKVYVINKHGRPLMPCSPAKARHLLDEGKAKIKKRTPFTIQLLFGSTGYTQEVILGVDAGSKTIGLSASAETEELLSAEVKPRNDVVDLLSTRREFRRARRNRKTRYRKPRFDNRVRSKHKGWLAPSVEVKIQEHITTIRRVYGILPVSKVVVETAEFDLQLLKAIEEGKPVPQGEDYQQGEMYGHYNVRQYVLWRDDYTCQCCGAHATKKKEVRLHVHHLESRKVGGDAPDNQVTLCESCHEKLHKGLIAEKDFKKRKRRSTRDATFMGIMRKTLMQRLYSELPIPVIETRGYITKATREKLLVLPKSHTNDALAIAQGKRGFNVGYLPEIAQIDKIYTIRPVRHHNRQLHKAAILKGGIRKSNQAGKYVFGYRLFDKVQFNGQDCFIFGRRTSGYFVVKTIDGKVIHNSASFKKLKLVERASNYLIA

SEQ ID NO: 20186 - protein, 343 aa, unidentified
  REGION 1..343: note = Human gut metagenome
MSEVVVRNDITDKMTQRAKYRRNRRNRKTRYRKARWLNRASSIKKDRFSPTMQSKLHSHVREIEYIQSILPVTEMVFETGQFDMQLMKNPSLANPKVRPWGYQKGANYGFENTKAMVLNRDNYTCQCCKGKHKDSKLEVHHIVFRSQGGSDEESNLLTLCHTCHKDLHSGKINPKLSGKVKGNLKYATQMNSIRKQLFRFYPNAIETFGYVTKANRLHLGVDKEHYYDACTIATQGNAFNVKSNLYKKKCVSDGDFQKTKGIRSEQPIVTDKICGFRKFDKVRYFGNDYFIKGRMSTGYAILMDIDGNKIDFSTMPRGYKTPKLSNCKRITARSTVMTQVKVV

SEQ ID NO: 20187 - protein, 421 aa, unidentified; identical to SEQ ID NO: 4361
  REGION 1..421: note = Human gut metagenome

SEQ ID NO: 20188 - protein, 368 aa, unidentified
  REGION 1..368: note = Human gut metagenome
VSDMVYVLGQDGHPLMPTCRHGKVRRMLKSGMAKVVQRCPFTIQLQYESTTHTQKINLGIDAGSKTIGVSATTESKVLYESEVVLRNDIVELLSGRRALRRSRRNRKTRYRKPRLDNRRRPDGWLAPSIRQKIKTHVTVVENVMKILPVTKIIVETASFDIQKIKNPEIEGAEYQYGEQLDFWNVREYVLFRDGHTCQCCKGKSKDNILNVHHIESRKTGGNAPNNLITLCETCHKAYHKGIITLPKEIHRGMRFRDAAFMGIMRWAFYDRLKELYTPLDVEVVNTYGYITKNTRIEHGLPKVHYVDARCISDNPASKPMDHYYFQKKVRCHNRQIHKNTILKGGIRKRNQAAYLVNGFRLFDKVKYQ

SEQ ID NO: 20189 - protein, 459 aa, unidentified; identical to SEQ ID NO: 10093
  REGION 1..459: note = uncultured beta proteobacterium

SEQ ID NO: 20190 - protein, 426 aa, unidentified
  REGION 1..426: note = Anaerobic digester metagenome
MVFVLDANKKPLSPCHEAVARKLLKQGKAAIFKRYPFTIILNKSVDNTDNKQEYRLKIDYGSKHTGLAILQNNNVIWLAQIDHRTDIKKKLDERRSYRRRRRNKNLRYRQPKFLNRRRKGGWIPPSLESRINNIKTWVKRLQKLVPLTHMSYENVKFDTQLMRNPEISGIEYKQGTLQGYEVKEYLLEKYNRKCCYCGKENVPLEVEHIIPKSRGGTNRIDNLCLSCHECNQKKGNLTAEEFGYPEAQRQVKETLKDTSVVNSTRWKVYDVLLRIGLPVECGTGALTKMNRIKLDLPKEHYFDACCVGQSTPDKLYFKTKDVLYIKAKGRGSRCRTNLDKYGFPRGYLTRQKYFFGFQTGDMVKAIVLKGKYKGIWYGEVSCRKTGYFDIKNKDGQRIIQGINHKYFTIVQRFDGYSYRREVAILT

SEQ ID NO: 20191 - protein, 427 aa, Moorena sp.; identical to SEQ ID NO: 5764

SEQ ID NO: 20192 - protein, 456 aa, Halomonas sp.; identical to SEQ ID NO: 2773

SEQ ID NO: 20193 - protein, 423 aa, unidentified
  REGION 1..423: note = Human gut metagenome
MRVFVFNMRGRPLMPCSQRKARLLLRENKAMIYKYHPFTIQLTYTTGETKQDCHIGIDTGSKYIGAAVRSEDKVFWKGEIELRQDIRSNLDTKRIYRRSRRNRKTRYRKPRFLNRKRRDEWLPPSLQSRINHTFHWIDTLSSLVPNPILHIEVGKFDVAKMINPEIHGVDYQHGQTYGFFDERYFVFARDNYTCQCCGKSKNKILNTHHIIYRSNGGTNRVDNLITVCTDCHTSQNHRKGGIFYQWQEQHKKVKQYKEPPFMNTLRKRIFVAYPDAEITYGSETTPKRKAMKLDKTHYNDAIVISGINEIKENPEEWLLIKQFRKKKRSLHEATARKGRKKPNRNQTRNSKNTPYYKGFYLNDKVSVFGKSGYTGFTSNAAYIKDENNDYITLPNKTYKQVSINKMKLECHNNNWQYIIKNAV

SEQ ID NO: 20194 - protein, 408 aa, unidentified
  REGION 1..408: note = Human gut metagenome
VKRFPFVIRLVDRTVEQSEVQPVLIKLDPGSRETGAAVVRDDEKKRHHALAFFVIKHRGGAIRDALKARSAFRRRRRSQNFRCRSPRFLNRVKPKGWLPPSLRHRVETTLSFVRRMCRYLPVSGIATELVKFDSQKLQNPEVSGVKYQQGTLFEYEVREYLLEKFGRKCVYCGAEGVPLNIDHVVPRAKGGSNRVSNLVLACVSCNQKKGARSLEDFLKGKPEVLARVRRELKTPLRDAAAVNATRWVLFNELKATGLPVETGSGALTKLNRHAFGVEKEHWLDALCVGRLNGVVTRKGLNVLEIRCMGRGSRQRTRLTKYGFPRGYLMRQKCVHGFATGDMVEANVPKGKKAGLWRGRVAVRVSGSFNIQTPKGVIQGVGWKHCRLISHNDGYGYAWLGHAPHSSPA

SEQ ID NO: 20195 - protein, 441 aa, unidentified
  REGION 1..441: note = Human oral metagenome
MMVYVLDMNGQPLMPTHNGAKVRVLLKQKRAKVVSKCPFTIKLLYESTSFTQPLTLGVDTGSKYVGSAVVNDVTSEVLYESQVELRDDIKKKMDRRRVFRRSRRNKLRYRPKRFNNRKSSKRKDRYNPTLISKFQGHTREIEFIKSILPVTDVVLEVGEFDTQLLQDPTLVYHKWDYSKGELYQQENFKQAAKSRDGYGCQCCGRKNCRLEVHHLLPRSRGGSDKLANLITLCTDCHHLAHSSEEQLLAFQKKFSKKAKGTLKYATQMNVLRHMLQRKYPIAELTYGFITKEIRRIFGLEKSHMIDACCIASRGSEFHNKNSNRYKKKCVAKGDYARTDICGRKFTILPKGKIVGFRRYDKVLYNNKEYFVVGRRSIGKVYLIDIDNNRVQVERMRRGTGERYMSKAEIKVSLVRKIASSRTCVCTINKRQPLFRFSGSCR

SEQ ID NO: 20196 - protein, 426 aa, Moorena sp.; identical to SEQ ID NO: 8077

SEQ ID NO: 20197 - protein, 420 aa, unidentified; identical to SEQ ID NO: 16965
  REGION 1..420: note = Human gut metagenome

SEQ ID NO: 20198 - protein, 403 aa, unidentified
  REGION 1..403: note = Human gut metagenome
MPCSPAKARLLLKEKKAIVVRRTPFTIQLTIATGETKQPVSLGVDAGYKHVGLSASTEKAELYASEVELRQDVSDLLSARRALRQSRRNRKTRYRAPRFDNRIRTKRKGWLAPSIENRINAHLSRIEAILRLLPVTKITVETASFDMQLLKNPDISGKEYQEGEQLGFWNVREYVLFRDGHVCQHCHGRSKDPVLNVHHLESRRTGGDSPGNLITLCETCHKALHRGEITLKAKRGQSFRAEAFMGIMSWEVLNRLKASHSELEVNNTYGYRTKHARIANGIDKSHCADAFCIAGNLGAKRLGEFFFQKQTRRNNRQIHKLSILKGGLRKRNQAPFEVKGFRLFDKVACKGEEGFIFGRRSSGSFDVRKLDGTRISAGISYKKLRLLEKRQTYLTEIRNSECA

SEQ ID NO: 20199 - protein, 425 aa, unidentified; identical to SEQ ID NO: 9663
  REGION 1..425: note = Human gut metagenome

SEQ ID NO: 20200 - protein, 411 aa, unidentified
  REGION 1..411: note = Human gut metagenome
VCLIANLLLTLAKVSYTARYVPAYRFKHITKKEVPYMVYVLDIDGQPLMPTSRHGKVRRLLNSHLAKVVKRCPFTIQLLYQSTKETQPVSLGVDAGSRHIGLSATTEREVVYQEELVPRNDIVKLLSARRALRRSRRNRKTRYRRVRFNNRVHSKHKGWLAPSVEVKIQEHITATKRICQILPIFDIHVETAEFDLQRLKAMEEGRLLPAGTDYQLGEQYDFYNTRQYVLHRDEYTCQCCGTHDNNVKLHVHHVESRQTGGEAPNNLITLCEHCHKSIHAGKMMLPKGKKRGKSYRDAAFMGIMRNTLLERLRKEVNVPVTMTYGYITKYWREKAGLEKSHINDAICISKHPYARPLETYYLTKAVRHHNRQIHKTKFSKGGIRKRNQAPYLVKGFRLFDKVLYQGESYFI

SEQ ID NO: 20201 - protein, 442 aa, unidentified
  REGION 1..442: note = Human gut metagenome
MSTSVFVLDKKPRPLMPCRPARARRLLRAGRARGVKRFPFVIRLVDRTVEQSEVQPVLIKLDPGSRETGAAVVRDDEKKRHHALAFFVIKHRGGAIRDALKARSAFRRRRRSQNFRCRSPRFLNRVKPKGWLPPSLRHRVETTLSFVRRMCRYLPVSGIATELVKFDSQKLQNPEVSGVKYQQGTLFEYEVREYLLEKFGRKCVYCGAEGVPLNIDHVVPRAKGGSNRVSNLVLACVSCNQKKGARSLEDFLKGKPEVLARVRRELKTPLRDAAAVNATRWVLFNELKATGLPVETGSGALTKLNRHAFGVEKEHWLDALCVGRLNGVVTRKGLNVLEIRCMGRGSRQRTRLTKYGFPRGYLMRQKCVHGFATGDMVEANVPKGKKAGLWRGRVAVRVSGSFNIQTPKGVIQGVGWKHCRLISHNDGYGYAWLGHAPHSSPA

SEQ ID NO: 20202 - protein, 456 aa, Halomonas sp.; identical to SEQ ID NO: 8380

SEQ ID NO: 20203 - protein, 440 aa, Lactobacillus sp.; identical to SEQ ID NO: 5150

SEQ ID NO: 20204 - protein, 440 aa, Moorena sp.; identical to SEQ ID NO: 5150

SEQ ID NO: 20205 - protein, 430 aa, unidentified
  REGION 1..430: note = IscB polypeptide
MQSVLVLSSDKQPLDPCHPARARKLLTAGRAAVYRRAPFTIILKGRTAVESVTHAYAVKVDPGSRVTGVAVVNEQGRVVWAGEIEHRGQQVREALLARRQHRRSRRNRHCRYRPARFDNRRRKAGWLPPSLESRIANVLTWVGRLRRFLPVTSLAQELVKFDTQLMEQPEIKGVAYQQGTLYGYEVREYLLEKWGRKCTYCGATNVPLQIEHITPKSRGGSDRVSNLTLACAPCNQRKDNQTAAEFGYPELQAQARQPLKDAAAVNTTRWALYYRLQESGLPVEVGTGGRTKFNRTKLNLPKAHFIDAACVGESGARAQVDETLRPLAIRATGHGSRQMCRMDKYGFPRTGPKQARRVHGFRTGDLVRAVVPAGKKTGTHSGRVAVRSSGSFDITTTSGTVQGIGWRHCRLIHRADGYAYATGGGASSTR

SEQ ID NO: 20206 - protein, 458 aa, Sharpea sp.; identical to SEQ ID NO: 8245

SEQ ID NO: 20207 - protein, 394 aa, unidentified
  REGION 1..394: note = Human gut metagenome
VSDMVYVLGQDGHPLMPTCRHGKVKRMLKSGMAKVVKKCPFTIQLQYESTTHTQKINLGIDAGSKTIGVSATTDSKVLYESEVVLRNDIVELLSGRRALRRSRRNRKTRYRKPRLDNRRRPDGWLAPSIRQKIETHVTVVGNVMKILPVTKIIVETASFDIQKIKNPEIEGEGYQHGEQLDFWNVREYVLFRDGHTCQCCKGKSKDNILNVHHIESRKTGGNAPNNLITLCETCHKAYHKGIITLPKEIHRGMRFRDAAFMGIMRWAFYDRLKELYNPLGAEVINTYGYITKNTRIEHGLPKEHYVDARCISDNPAAKPLDHYYFQKKVRCHNRQIHKNTILKGGIRKRNQASYEVKGFRLYDQVLWKGQKCFIFGRRSTGRMDLRLLDGTHIN

SEQ ID NO: 20208 - protein, 403 aa, unidentified
  REGION 1..403: note = Human gut metagenome
LLKEKKAIVVRRTPFTIQLTIATGEAKQPVSLGVDAGYKHVGLSASTEKAELYASEVELRQDVSDLLSARRALRQSRRNRNTRYRAPRFDNRIRTKRKGWLAPTVENRINVHLSRIETVLRLLPVTKITVETASFDTQLLKNPDIAGKEYQEGEQLGFWNVREYVLFRDGHVCQHCHGRSKDPVLNVHHLESRRTGGDSPGNLITLCETCHKALHRGGITLKAKRGQSFRAEAFMGIMRWEVLNRLKASHPELEVNNTYGYWTKHARIANGIAKSHCADAFCIAGNLGAERLGEFLFQKQTRRNNRQIHKLSILKGGRRKRNQASFEVKGFRLFDKVACKGEEIFIFSRRSSGYFDVRKLDGTRISAGISYKKLRLLEKRRTYLTEIRKEAFSPLPEGRSLRA

SEQ ID NO: 20209 - protein, 480 aa, unidentified
  REGION 1..480: note = Human gut metagenome
LYTKPLDNIGEGSLPPSGEINLKGMTFMVYVKSIDGKALMPTSNAKARKLLKQKKAKVVSLRPFVVKLTYKTKTEYTQKLNLGVDSGYSNIGFSVIDAKQEYIAGEVKLLEGMKKRLLEKASYRRIRRSRLRYRKARWNNRVKSKKKGWLAPSLKHKLDTHIKFIDYLKNILPIEKITIEVANFDIQKMKDDLISGIDYQNGDMFGFWNVREFVLHRDGHKCQNPNCKHKDKKEQILKIHHIRYRSKGGSDRPENLITLCSKCHTPANHKKGKFLYDWCVNGKKVRGFKDATFMSMIRWYLVNDLKSKHNNVSITYGYITKNHRIQNGIEKSHLNDAFAIAKGTNQARTKDRFLVIQDRLKNRSLEKFYDSKIIDIRTGKKVSGGELSCGRSTRNKNLNTENLRKYRGDKISKGQRRIRKQKYFYQPNDLVKYDGKVYTVKGTQNEGKYIALKEIKKVPKEELLIPYVFKKGLNWSYGLC

SEQ ID NO: 20210 - protein, 425 aa, Acidithiobacillus sp.
MQRVLVLDKNRQPLMPCHPARARQLLRRGKAAVFRRFPFTIILKDRESGVTQPTALKLDPGSKTTGLALVADFARQGKVLVWAAELQHRGAAIRKALADRRAHRRFRRSKLRYRAPRFQNRTRPKGWLAPSLQHRVDTAMSWVHRLRRWAPVTGLSTMIHRFDTQLLQNPEISGIEYQQGELQGYEVREYLLEKWGRKCAYCDAENLPLTIDHIHPKSRGGSDRVSNLTLACVPCNQRKGNRDVTEFLAHDPKRLARIEAQRKAPLRDAAAVNSTRWALWQQLTATGLDVEVGSGGRTKHNRSQQRYPKAHWIDAACVGESGADVRLDPHHRPLTIQGTGHGERQRARLNRYGFPRGHKPRARSFLGFRTGDLVRCAKPKTKPFIGRVAIRFRPSFVVAGKKDRKHESHPKYLRILQKGDGYVYA

SEQ ID NO: 20211 - protein, 424 aa, unidentified
  REGION 1..424: note = Human gut metagenome
MASMQYVYVLNKHGEPLMPCSPGKARLLLKQQKACVVKRTPFTIKLLYGSAGYKQPVALGIDAGSKHVGLSASTEKRELYCEEFTPRNDVVDLLSTRKQNRRSRRNRKTRYRAPRFDNRVHSKHKGWLAPSVEVKIQEHITVIKRICRILPITLVRVETAEFDTQRLKAMLEGKPLPVGTDYQLGEMYDEYNVRQYVLKRDNYTCQCCGAHPTEKKPIRLHVHHIESRHVGGNAPNNLITLCVACHKALHEGKITLDKGKKRGKPLRDAAFMGIMRNTLLARLKDELNIPVKQTYGYITKLLREKNKIPKSHVNDARCIAKAPNAKPCDTMLYTRALRHHNRQIHKAKILKGGIRKKNQAPYLVKGFRLWDKVRYNGEECFITGRRSSGYFALKKYDGTVISNSASYKKLMLLEAATNYITERS

SEQ ID NO: 20212 - protein, 518 aa, unidentified; identical to SEQ ID NO: 7632
  REGION 1..518: note = Human gut metagenome

SEQ ID NO: 20213 - protein, 361 aa, unidentified
  REGION 1..361: note = Human gut metagenome
LPGCEKDVLCIGIKNKEAKFNNRTRPTGWLTPTANQLLQTHINLVKKIQKFLPISDVVLEVNKFAFMQLDNPNIQKWQYQKGPLYQKESLKSAVSEMQEHHCLFCKKKIDHYHHVVPQHKNGSNTIDNIVGLCTQHHDLVHKDATWQKRLAKKKTGLNKKYGALSVLNQIIPALTKELSSLFPKHFFVTNGKSTYDYRAAHGVRKDHWLDAYCIACSVLPNDTCDKTINSRVPYELKQFRRHDRRALNNENMSRVYTLNENVVATNRHKATKQTTDSLEEFRQRQPNDVCNLKVKEHHPTYRNMSRNYPGSVFLVGNQVHVMQGVAGSKDGKATTYKDTNANSIAAGKCKFVAKNSGILFV

SEQ ID NO: 20214 - protein, 515 aa, unidentified; identical to SEQ ID NO: 5111
  REGION 1..515: note = Human gut metagenome

SEQ ID NO: 20215 - protein, 411 aa, unidentified
  REGION 1..411: note = Human gut metagenome
MVYVQDIDGKPMMPTTRHGKVRRLLKDNKAVVVNTCPFTIKLTYKTSDYKQEIVLGVDSGTKHVGLSATTKSKELYASEVILRSDVVDLLSTRRGLRRTRRSRLRYRKQRFNNRVKSKKRGWIAPSVRHKIDSHIRIISFVYSILPVSKLIVEVAQFDTQKIKNPEISGKEYQEGEQLGFWNVREYVLARDGHKCQHCKGKSKDPILNIHHIESRKIGGDSPSNLITLCETCHKEFHKGNIKLKVSRGKSLRDAAVMGIMKWKLYEELKSRYDNVSMTFGYITKYNRINHGIEKSHVSDAFVISRNFNSERLGYYYKRKLVRRHNRQIHKMKILKGGIRKRNQAPFKVFGFKLFDKVMFQGEEHFIYARRLSGQFNIRDINGENKKDVSCKKLKYVSHGLVSVKTNLFLSQ

SEQ ID NO: 20216 - protein, 545 aa, unidentified; identical to SEQ ID NO: 6325
  REGION 1..545: note = Human gut metagenome

SEQ ID NO: 20217 - protein, 430 aa, unidentified; identical to SEQ ID NO: 4817
  REGION 1..430: note = Human gut metagenome

SEQ ID NO: 20218 - protein, 412 aa, unidentified
  REGION 1..412: note = Anaerobic digester metagenome
MLVYIINRHGEPLMPCKPRKARLLLKEDKAKVVKRTPFTIQLLHGSSGYKQPITLGVDAGSKHVGISATTENNVLFEAEVKLRNDIVKLLADRRSLRRNRRNRKTRYRKARFDNRKKPKGWLAPSVKNKIDTHIKIIDFVHRILPITKTIVEAAQFDIQKIKNPNIQGKEYQQGDQLGFWNVREYVFWRDGHHCRGRKGCKNKILQVHHIESRKTGGDAPNNLITLCGQCHKDYHAGKLKLNLKRGNSYRDATFMGIMRWAVYHRLKEKYSNIKLTYGYITKNIRIKTSLAKSHMVDARCISGNPLSKPLNSHYYFKQVRGQNRQLHKANFKKGIRKANKSPKYVYGFQLFDKVFYDNQECFIFGRRTSGYFDLRKLDGTKVHTSANYKKLKPLESASSLLCERRHGVSSHQ

SEQ ID NO: 20219 - protein, 414 aa, unidentified; identical to SEQ ID NO: 4015
  REGION 1..414: note = metagenome

SEQ ID NO: 20220 - protein, 418 aa, unidentified
  REGION 1..418: note = Human gut metagenome
MVYVLNIDGQPLMPTTRHGKVKHLLKDGKAKVVKRCPFTIKLLYETPNCTQDLTLGVDTGSGAIGTAVSTDDGEIVYMSEVVVRNDITDKMTQRAKYRRNRRSRKTRYRKARWLNRKNSIKKDRFSPTMVSKLHSHVKEIEYIKSILPITTMVFETGTFDTYLMKNPSLVNENVRHWGYQKGTNYGFENTKAMVLNRDNYTCQYCKGKHKDSKLEVHHIVFRSKHGSDEESNLITLCHTCHKALHSGKISLKLEGKVKGNLKYATQMNSIRKQLFRIYPEAIETFGYITKANRLKLGVDKEHFYDACVIATHGNKFSVRCNLYKKKCVSDGDFQQTKGVRSEQRIPTCKIQGFRKFDKVRYFGKEYFIKGRLSTGYAILMDIDGNKSDFSYMPKGFKTPKIINLKRLEARSSWIVIFK

SEQ ID NO: 20221 - protein, 431 aa, unidentified; identical to SEQ ID NO: 2746
  REGION 1..431: note = Human gut metagenome

SEQ ID NO: 20222 - protein, 349 aa, unidentified; identical to SEQ ID NO: 18101
  REGION 1..349: note = Human gut metagenome

SEQ ID NO: 20223 - protein, 514 aa, unidentified; identical to SEQ ID NO: 16920
  REGION 1..514: note = Human gut metagenome

SEQ ID NO: 20224 - protein, 420 aa, unidentified; identical to SEQ ID NO: 3089
  REGION 1..420: note = Human gut metagenome

SEQ ID NO: 20225 - protein, 417 aa, unidentified
  REGION 1..417: note = Human gut metagenome
LMPCSPAKARHLLDTGKAKVKKRTPFTIQLVYGSSGYTQEVILGVDAGSKTIGMSVSTTKEELLSAEVKPRNDVVDLLSTRREFRRVRRNRKTRYRKPRFDNRVRGKNKGWLAPSVEVKIQEHITAIKRVCHILPVSKVVVETAEFDLQLLKAIEEGKPVLQGEDYQQGEMYGHYNVRQYVLWKDNYICQCCGAHATKEKEVRLHVHHLESRKTGGDAPGNLITLCDSCHEKFHKELITEKDLMKRKRKSTRDATFMGIMRKTLMQRLYSELPIPVIETRGYITKATREKLLVLPKSHTNDALAIAQGKHGFNAGYLLGILQIDKIYTIRPVRHHNRQLHKAAILKGGIRKSNQAGKYVFGYRLFDKVQFNEQDCFIWGRRTTGIFTIKTINGKMIKDGISFKKLKLVEKSTSYLIA

SEQ ID NO: 20226 - protein, 418 aa, unidentified; identical to SEQ ID NO: 12063
  REGION 1..418: note = Human gut metagenome

SEQ ID NO: 20227 - protein, 415 aa, unidentified; identical to SEQ ID NO: 3582
  REGION 1..415: note = Human gut metagenome

SEQ ID NO: 20228 - protein, 414 aa, unidentified
  REGION 1..414: note = Human gut metagenome
MPCSPAKARLLLKEKKAIVKRRTPFTIQLTIATGEAKQPVSLGIDAGYKHVGLSASTEKAELYASEVELRQDITDLLSARRALRQSRRNRKTRYRAPRFDNRISTKRKGWLAPSVENRINAHLSRIEAVLRLLPVTKITVETASFDLQLLKNPDISGKEYQEGEQLGFWNIREYVLCRDGHVCQHCYGGSKDPVLNVHHLESRRTGGDSPDNLLTLCETCHKALHRGEITLKTKRGQSFRAETFMGIMRWEVLNRLKASHSELKVHNTYGYLTKHARIENGIAKSHGADAFCIAGNLGAERLGEFFFQKQTRRNNRQIHKLSILKGALRKRNQASFEVKGFRLFDKVACQGEEGFIFGRRSSGFFDVRKLDGTRISAGISYKKLHLLEKRQTYLMEIRKEEAFPPLPEGRGLRA

SEQ ID NO: 20229 - protein, 462 aa, unidentified
  REGION 1..462: note = Human gut metagenome
MSVLVIGRNGRALMPTNPRKARLLLKKKTASVVCRHPFTIQLLYKTGCATQKGSIGIDTGSQHIGVGITCGDRVILKDEHALRSSMEKRSLLATRAVMRRGRRYRKVRYRKPKWRHHTKRMYFEKANRRGQHWRKVKTTTQSPRPKGWLPPSLQSKCDHHFCIIDRYLKYLPDPITRNLVIETGRFDMARMNDPTIHGEMYKRGPMYDAENLRAYIFARDNYQCACCKAKAGTTRKADGTTVKLVAHHILFRSRGATDNPKYMVSVCDHCHTTKAHQPGGILYSWMENNKKVTRGLRDATFMNILRKRLFARYPQAAFTYGNITAADRKQYHLPKSHVNDAVAVSLFGKEVPTVRDTCQTTYYKQVRKSKRSLHEAIPRKGRKRPNTKAVRNKKNTTQVNGFKLWDSVLADGKKLFICSFTGTSAYLIDKNGCYISQPGKTYKQWPLSKLKRLHPNGNWLMA

SEQ ID NO: 20230 - protein, 515 aa, unidentified; identical to SEQ ID NO: 5111
  REGION 1..515: note = Human gut metagenome

SEQ ID NO: 20231 - protein, 415 aa, Bacillus sp.; identical to SEQ ID NO: 2671

SEQ ID NO: 20232 - protein, 515 aa, unidentified; identical to SEQ ID NO: 2896
  REGION 1..515: note = Human gut metagenome

SEQ ID NO: 20233 - protein, 417 aa, unidentified
  REGION 1..417: note = Human gut metagenome
MPCSPAKARLLLKEKKAIVKRRTPFTIQLTIATGEARQPVTLGVDSGYKHIGLSATTEKDELYASQVELRQDITDLLSARLALRRSRRSRKTRYRAPRFDNRVASKREGWLAPSVENRIAAHMSRVEAVMRVLPVTAITVETAAFDTQLLKNPDIAEAAYQQGEQLGFWNVREYVLFRDGHVCQHCRGKSKDPILNVHHIESRRTGGDAPNNLITLCETCHKAFHRGEIELKVRRGKSFKAETFMGIMRWTLFERLKKAHPELRVRNTYGYLTKHKRISHGIAKSHCADAYCIADNLGAKRLEGFFFQKQTRKHNRQIHKLSILKGGLRKKNQAPYEVKGFRLFDKVICKGEEAFIFGRRTSGSFDVRRLDGTRISAGINYKKLRLLEPRTTYLTEFRKEAALPHLHECRGFRAEFL

SEQ ID NO: 20234 - protein, 450 aa, Moorena sp.; identical to SEQ ID NO: 2935

SEQ ID NO: 20235 - protein, 427 aa, Mastigocladus sp.; identical to SEQ ID NO: 3596

SEQ ID NO: 20236 - protein, 410 aa, Bacillus sp.; identical to SEQ ID NO: 16732

SEQ ID NO: 20237 - protein, 512 aa, unidentified; identical to SEQ ID NO: 3720
  REGION 1..512: note = Human gut metagenome

SEQ ID NO: 20238 - protein, 418 aa, Moorena sp.; identical to SEQ ID NO: 7959

SEQ ID NO: 20239 - protein, 537 aa, unidentified; identical to SEQ ID NO: 9239
  REGION 1..537: note = Human gut metagenome

SEQ ID NO: 20240 - protein, 376 aa, unidentified; identical to SEQ ID NO: 16909
  REGION 1..376: note = metagenome

SEQ ID NO: 20241 - protein, 415 aa, unidentified; identical to SEQ ID NO: 10543
  REGION 1..415: note = Human gut metagenome

SEQ ID NO: 20242 - protein, 413 aa, unidentified
  REGION 1..413: note = Human gut metagenome
LKVFVLNMRGKPLMPCSPAKARHMLKAGKAVVVRRTPFTIKLTIATGETKQDVTLGVDAGARHVGISATTEKEEVFASEVALRQDITGLLADRLAFRRARRNRKTRYRAPRFNNRVRSKHKGWLAPSVENRIQAHISRIEAVCRLLPVTKIVIETASFDIQKIRNPEVEGTGYQQGDQLGFWNVREYVLFRDGHICQHCRGRSKDPILNVHHLESRKTGGDAPNNLITLCETCHKAYHAGKIKLKVKRGQSFRAEAFMGIMRWTLLDRVRKTHPELPVENTYGYLTKHKRIALGLPKTHCADAFCIAGNLKALRRGDFLFQQQTRKHNRQIHRCSILKGGVRKLNQAPFLVKGFRLFDKVRIGGQIGFVFGRRVRGIFNIRRLDKTVIGTDINCKKLSLLETRKTFLTELRKE

SEQ ID NO: 20243 - protein, 415 aa, Bacillus sp.; identical to SEQ ID NO: 7196

SEQ ID NO: 20244 - protein, 406 aa, unidentified; identical to SEQ ID NO: 4082
  REGION 1..406: note = Human gut metagenome

SEQ ID NO: 20245 - protein, 448 aa, unidentified
  REGION 1..448: note = Human gut metagenome
MSTGLRAVQAEPAGIRKGDALKVFVLNMRGRPLMPCSPARARHLLKAGKAVVRRRTPFTIQLRIATGETKQSVTLGVDAGAKHVGLSAATEKEEVFASEVELRQDITGLLAARLSLRRDRRHRKTRYRAPRFLNRVRSKHKGWLAPSVENRIQAHMSRIDAVCRLLPVTRIVIETASFDVQKIRNLEVEGTGYQQGDQLGFWNVREYVLFRDGHVCQHCHGYSKDKILNVHHLESRQTGGDAPNNLITLCETCHKACHAGKIKLKVKRAQSFRAEAFMGIMRWTLLDRMRKAHSGLPVENTYGYLTKNTRITLGLPKTHCVDAYCIAGNLKAVRRGVCLHQRQVRKHNRQIHKCTVLSKTLKDGTKIGYRKLNQTPHLVKSFRLFDKVRCLGQTGFIFGRRSSGYFDVRRLDGVKLSSGISYRKLTLLEKRSTYLTELRKEDGASSPV

SEQ ID NO: 20246 - protein, 429 aa, Ktedonobacter sp.
LSNVFVIDSYYKPLNPVHSAHARLLLTRGKAAVFRRYPFTIILHRVVEQPEVQPLRLKLDPGSKTTGIALVNDANGKVVFAAELSHRGHAIKESLERRRAVRRSRRQRKTRYRKPRFQNRRRKEGWLPPSSESRLSNILTWVARLRRYAPITAISQELVKFDMQLMENPDITGVEYQQGTLQGYEVREFLLFKWERTCAYCGKQDVPLQIEHIHPRANGGTNRISNLCLACEPCNTAKGTQDIAVFLAKKPEVLKRILAQAKKPLKDASAVNATRWALLERLKTFGLPVECGSGGLTKYNRTTRGLAKTHWLDAACVGKSTPDVIVQKRLVPLFITATGHGRRQMCTPDERGFPKQHKKRKRTFLGYRTGDVVKAITPKGTFEGKIAIRHRPSFRLGKVDIHPKYMRCVHQADGYEYRQKGVRQAPPHV

SEQ ID NO: 20247 - protein, 454 aa, unidentified; identical to SEQ ID NO: 8101
  REGION 1..454: note = uncultured beta proteobacterium

SEQ ID NO: 20248 - protein, 426 aa, Anoxybacillus sp.
MVFVLDTNKRPLAPCHEAVARKLLKQGKAAIYRRFPFTIILKKSVDESEIKATYRLKIDYGSRHTGLAILRGQEVVWLGQLDHRTDIKERIDKRRAFRRARRNRKTRYRKPRFLNRKRKEGWLPPSLESRVQNIQTWVSRLKKLCPIGHISYENAKFDTQLMRNPEINGVEYQQGTLQGYEVREYLLEKFGRKCCYCGKENVPLEVEHIIPKSRGGTDRVDNLCLACHDCNQRKGSKTAEEFGYPHIQKQVKEPLKDASAINSTRWKAYEVLKQTGLDVECGTGARTKMNRIRLDLPKTHYFDACCVGESTPNHLYFKTKEVLFIKAKGRGSRSRTNLDRYGFPRGYLARQKFFFGFQTGDMVKAVVPRGKYQGVWFGEVACRKTGSFDIKGKDGKRIAQGINYRYVQVIQRFDGYAYGKGVAELA

SEQ ID NO: 20249 - protein, 428 aa, unidentified; identical to SEQ ID NO: 7377
  REGION 1..428: note = Human gut metagenome

SEQ ID NO: 20250 - protein, 415 aa, unidentified; identical to SEQ ID NO: 6883
  REGION 1..415: note = Human gut metagenome

SEQ ID NO: 20251 - protein, 423 aa, unidentified
  REGION 1..423: note = Human gut metagenome
MVYVLNIDGQPLMPTDRHGKVRHLLKDGRAEVVKRCPFTIRLLYDSTHYTQDIVLGVDAGSKHIGLSGTTETKELYASDVELRNDIVDLISTRRQNRRFRRNRKTRYRKARFLNRLSDKKDWLAPSIRQKVDTHMTVVSRVCMILPVTKIIVETASFDIQKIKDPDISGTGYQQGEQLDFWNVREYVLFRDGHTCQCCKGKSKDPVLNVHHIESRKTGGDAPNNLITLCETCHKSYHSGAVQLPKAIHRGMRFKDAAFMGVMRWNFYNKLKEIYELQGIEIRMTFGYLTKNTRIRHHLPKEHYIDARCISGHPEAIPNNEVFYQKKVRCHNRQIHKNTILKGGIRKRNQTGYLVKGFRLFDKVAYKGREYFIFGRRQSGFFDLRNLSGCKVNKGSLSYRKIGFLEPRQYYLCERRVMDTQGYA

SEQ ID NO: 20252 - protein, 414 aa, unidentified
  REGION 1..414: note = Human gut metagenome
MPCSPAKARLLLKEKKAIVKRRTPFTIQLTIATGETKQPVSLGVDAGYKHVGLSASTEKAELYASEVELRQDITDLLSARRALRQSRRNRKTRYRAPRFDNRISTKRKGWLAPSVENRINAHLSRIEAVLRLLPVTKITVETASFDLQLLKNPDISGKEYQEGEQLGFWNIREYVLCRDGHVCQHCYGRSKDPVLNVHHLESRGTGGDSPGNLITLCETCHKALHRGEITLKAKRGQSFRAEAFMGIMRWEVHNRLRALHPGIEVSNTYGYRTKHARIANGIAKSHCADAFCIAGNLGAERLCEFFFQKQTRRNNRQIHKLSILKGGIRKRNQAPFEVKGFRLFDKVACQGEEGFIFGRRSSGFFDVRKLDGTRISAGISCKKLHLLEKRRTYLTEIRKEEALPPLPEGRGLRA

SEQ ID NO: 20253 - protein, 400 aa, unidentified
  REGION 1..400: note = Bioreactor metagenome
MPTCRNGKVRHLLRDKKAAIVNLHPFTIQLSQERSNVVQPITLGVDTGYENVGLSATTEKKVLFECNVKLRSDISNNIATRKQLRRSRRSRKARYRESRFMNRRRCIGWLPPSVQSRVDAQKFLIAKVHKILPIATIVVEVAKFDIHKLKNPMIEGSDYQHGEQMGFWNVREYVLCRDGHKSRKCKGKSNDYILNVHHIESRRTGGNAPDNLITLCETCHKNYHKGLISLEGIKRGNSYKSESFMCIMKNFLVNSLTQTYNNVLTTFGYITKNARINNHLKKDHNIDARCISGNPNAEPPKEIYLIKKVRCHNRKIHKCKFLKGGKRLLNQSPYLMHGFRLFDKVLFDSKTAFVYGRRLNGSFLIKNIHGNTISSSISYKKLKLLKRRSGWIMDYDVCLG

SEQ ID NO: 20254 - protein, 414 aa, unidentified
  REGION 1..414: note = Human gut metagenome
MPCSPAKARLLLKEKKAIVVRRTPFTIQLTIATGESKQPVSLGVDAGYKHVGLSASTEKAELYASEVELRQDITDLLSARRALRQSRRNRKTRYRAPRFDNRIRTKRKGWLAPSVENRINAHLSRIGAILRLLPVTKITVETASFDTQLLKNPDISGKEYQEGEQLGFWNVREYVLFRDGHACQHCHGRSKDPVLNVHHLESRRTGGDSPGNLLTLCETCHKALHRREIKLKTKRGQSFRAEAFMGIMRWEVLNRLKASHPELEVHNTYGYRTKHTRIVNGIDKSHCADAFCIAGNLGAKRLGEFFFQKQTRRNNRQIHKLSILKHGLRKRNQAPFEVKGFRLFDKVVCQGEEGFIFGRRSSGSFDVRKLDGTRISAGISYKKLRLLEKRRTYLKEIRKEEALPPLPEGRSLRA

SEQ ID NO: 20255 - protein, 415 aa, unidentified; identical to SEQ ID NO: 13500
  REGION 1..415: note = Human gut metagenome

SEQ ID NO: 20256 - protein, 431 aa, unidentified
  REGION 1..431: note = Human gut metagenome
MDAWDIIVVLNKRGKPLMPCSPAKARLLLKEKKAIVKRRTPFTIQLTIATGESKQPVSLGVDAGYKHVGLSASTEKAELYASEVELRQDITDLLSARRALRQSRRNRKTRYRAPRFDNRIRTKRKGWLAPSVENRINAHLSRIEAVLRLLPVTKISVETASFDMQLLKNPDIAGKEYPEGEQLGFWNVREYVLFRDRHVCQHCYGRSKDPVLNVHHLESRRTGGDSPGNLITLCETCHKALHRGDITLKAKRGKSFRAEAFMGIMRWEVHNRLRALHPGIEVSNTYGYRTKHARIANGIAKSHCADAFCIAGNLGAERLCEFFFQKQTRRNNRQIHKLSILKGALRKRNQAPFEVKGFRLFDKVACQGEEGFIFGRRSSGFFDVRKLDGTRISAGISYKKLHLLEKRQTYLIEIRKEEAFPPLPEGRGLRA

SEQ ID NO: 20257 - protein, 417 aa, unidentified
  REGION 1..417: note = Human gut metagenome
MPCSPAKARLLLKERKAIVKRRTPFTIQLTIATGEAKQPVALGVDSGYKHIGLSATTEKAELYASEVELRQDITDLLSARLALRRSRRSRKTRYRAPRFDNRVASKREGWLAPSVENRIVPHMSRVEAVMRVLPVTAITVETAAFDTQLLKNPDITGAAYQQGEQLGFWNVREYVLFRDGHVCQHCSGKSKDPILNVHHIESRRTGGDAPNNLITLCETCHKAFHRGEIKLKVKRGKSFKAETFMGIMRWTLFERLKKAHPELSVRHTHGYLTKHKRISHGIAKSHCADAYCIAGNLGAMRLNSYLFQKQTRKHNRQIHKLSILKGGLRKKNQAPYEVKGFRLFDKVICKDEEAFIFGRRSSGSFDVRRLDGTRISAGISYKKLRLLEPRTTYLTEFRKEAALPPLHKCRGFRAEFL

SEQ ID NO: 20258 - protein, 469 aa, Desulfobacter sp.; identical to SEQ ID NO: 2403

SEQ ID NO: 20259 - protein, 454 aa, Moorena sp.; identical to SEQ ID NO: 12703

SEQ ID NO: 20260 - protein, 471 aa, unidentified
  REGION 1..471: note = Human gut metagenome
RQVPFTIQLTYKNQPVLQPVTIAEDPGRSNIGMAVVSLSGELLSAAVVQTRNKEIVKLMEKRKQHRRASRNGERKARQRLAKKCHTMIKTGFLMRKLPMYGKDKRVRCNVIKNTEAKFCNRKREDGWLTPSAEHLVRTHINLIHKMQKFLPISDVAIEINRFAFLSLEDPSISGVDFQNGPLKGYDDLNAAVEDLQDGHCLMCNSPIEHRHHIVPRSMQGSNTIGNIAGLCCKCHERVHKDSAFEDSLKKKKAGLNKRYAAVSALNQAIPFICKRLEQEFGKEHVHYCSGRDSSMVRRSLGYHKTKEEQLHEVDAWCIAVLSLQHVPEKAPEFDHVHEILQFRRQDRSRIKAQTSRAYYHERKKIAKNRKKAEGQREDSLQEWRKRQVERYGEEQTRKMISQLKVKKSIRRYNRLDRLMPGAVFYYQGVRYVMRGQHCEGTYLQAVGMGSKDFPAKKCKIVAQNEGLVFVS

SEQ ID NO: 20261 - protein, 417 aa, Sutterella sp.
MPCSPAKARLLLKEKKAIVKRRTPFTIQLTIATGEAKQPVALGVDSGYKHIGLSATTEKAELYASEVELRQDITDLLSARLALRCSRRSRKTRYRAPRFDNRVASKREGWLAPSVENRIAAHMSRVEAVMRVLPVTAITVETAAFDTQLLKNPDIAEAAYQQGEQLGFWNVREYVLFRDGHVCQHCRGKSKDPILNVHHIESRRTGGDAPNNLITLCETCHKAFHRGEIELKVRRGKSFKAETFMGIMRWTLFERLKKAHPELSVRNTYGYLTKHKRISHGIAKSHCADAYCIADNLGAKRLEGFFFQKQTRKHNRQIHKLSILKGGLRKKNQAPYEVKGFRLFDKVICKGEEAFIFGRRTSGSFDVRRLDGTRISAGISCKKLRLLEPRTTYLTEFRKEAALPPLHECSGSRAEFR

SEQ ID NO: 20262 - protein, 412 aa, unidentified; identical to SEQ ID NO: 13242
  REGION 1..412: note = Human metagenome

SEQ ID NO: 20263 - protein, 474 aa, unidentified
  REGION 1..474: note = Anaerolineae bacterium
MGEVDHSSKEEAGFLLACKPKEFFVGKVFVLNKDGKPLMPTTERKARLLRQSGQARRVSCNPYQIQLLYGSSGYVQPVDAGIDAGYGEVGFSAVSPTEELLGGELTLLTGMVERRKERAMYRRTRRSRRRHRQPRGNRQHQPEGWLAPSIQHKLDSHIRLVETKLRGLLPIRKLTIEVANFDIQALKTPGISGSQYQQGEQASFWNVREYILHRDDHECQNPACQHLGQAKALQVHHLGYWKGDRSDRPANLITLCVFCHVPANHQPDGFLYGWQPQLKSFKPETFMTTVRWRLSQTLEADATYGYLTKCRRIALGLPKSHPNDAFVIAGGTTQTRAKTLYLEQIRRNNRSLQKFYDAQYLDSRTGQKASGQKLFSGRRTRNQNLNGENLHPYRGQKLSKGRVSIRRQRYAYQPGDLVRFEGQKYRVKGIQNYGAYIKLDGLPKPVKTALVSPLRWRKGMCQKWNTNGTIEPSI

SEQ ID NO: 20264 - protein, 425 aa, Parasutterella sp.
  SITE 425: note = misc_feature - Xaa can be any naturally occurring amino acid
LRVFVLNKRGKPLMPCSPAKARHLLKEKKAIVVRRTPFTIQLTIATGESKQPVSLGVDAGYKYVGLSASTEKAELYASEVELRQGITDLLSARRALRRARRNRKTRYRAPRFDNRIRTKRKGWLAPSVENRINAHLSRIETVLRMLPVTKITVETASFDMQLLKDPDISGKEYQEGEQLGFWNVREYVLFRDGHVCQHCHGRLKDPVLNVHHLKSRRTGGDSPGNLITLCETCHKALHRGEITLKAKRGQSFRAETFMGIMRREVLDRLKASHPKLEVQNTYGYRTKHARISNGIAKSHCADAFCIAGNLGAKRLGEFLFQKQTRRNNRQIHKLSILKGSLRKRNQAPFEVKGFRLFDKVAYQGEEGFIFGRRSSGFFDIRRLDGTRISAGINYKKLRLLEKRRTYLTEIRKEEARRPLPEGRGX

SEQ ID NO: 20265 - protein, 434 aa, Moorena sp.; identical to SEQ ID NO: 8083

SEQ ID NO: 20266 - protein, 355 aa, unidentified
  REGION 1..355: note = Human gut metagenome
SKHIGISATTKTKVLYESDVELRDDIVKLLATRRQLRRSRRSRKTRYRPVRFDNRKRKEGWLAPSIRQKIGSHLTVVANACKILPINQIIVETASFDIQKIKDPEIQGIEYQQGEQMDFWNIREYVLFRDGHICQCCKGRFKDKILNVHHIESRKTGGNAPNNLITLCETCHKGYHNGTVILPKNIKHGMQFKDAAFMGIMRWTFYNTLKEQYEPDIPVSMTYGYLTKNTRIEHGLPKEHYIDARCISGNPDAVSDGTYYYQKKVRCHNRQIHKQTILKGGIRKSNQAEYLVKGYRLFDKVRYQGREYFIFGRRKSGFFDIRTLSGEKVNKGSISVKKLTFADTRKNYLIERRTV

SEQ ID NO: 20267 - protein, 417 aa, unidentified; identical to SEQ ID NO: 2708
  REGION 1..417: note = gut metagenome

SEQ ID NO: 20268 - protein, 452 aa, Moorena sp.; identical to SEQ ID NO: 3322

SEQ ID NO: 20269 - protein, 377 aa, unidentified
  REGION 1..377: note = Human gut metagenome
LRVFVLNKRGKPLMPCSPAKARLLLKEKKAIVKRRTPFTIQLTIATGEAKQPVSLGIDAGYKHVGLSASTEKAELYASEVELRQDITDLLSARRALRQSRRNRKTRYRAPRFDNRIRTKRKGWLAPSVENRINAHLSRIEAVLRLLPVTKITVETASFDLQLLKNPDISGKEYQEGEQLGFWNIREYVLCRDGHVCQHCYGRSKDPVLNVHHLESRRTGGDSPGNLITLCETCHKALHRGEITLKAKRGQSFRAEAFMGIMRWEVLGRLKASHPELEVNNTYGYRTKHARIANDIAKSHCADAFCIAGNLGAERLGEFFFQKQTRRNNRQIHKLSILKGGIRKRNQAPFEVKGFRLFDKVACQGEEGFIFGRRSSGF

SEQ ID NO: 20270 - protein, 423 aa, unidentified; identical to SEQ ID NO: 3951
  REGION 1..423: note = Human gut metagenome

SEQ ID NO: 20271 - protein, 465 aa, unidentified
  REGION 1..465: note = Human gut metagenome
MNTCVCVLSNSGERLMPTFRLGKVRRLLKDGKAKIIKHHPFTIQLLYDSKTNTQPIEICEDVGYNYIGISVKSQSHEYVSAQYDTLQDEKACHDSCRKLRRTRRNRLRYRKPRFDNRKRGEGWLAPSLKHKKELNVNIVKMYCTVMPITHATVEVGSFDTMLVKAIQEGKAVPEGADYQKGPRYNLATLREAVFYRDNYVCKICGRKATEGAILHMHHMFYWKGRHGNSLNELLTVCEKCHTPANHQKSGKLYGFGEKIKFADLSGAAFMNTVRWQIVNELYVAFGKPFVTITYGAMTKEKRIALQLEKSHNNDAYAMGEFHPNLRCMFEHYEKARRNNRILEKFYDSRYIDIRTGEIATGKELFNGRINRNHKKDSENLHKYRGKRTYAGHRALLRKKVNLNPGDLVSLNGENLIVHSTHTKKNGAVNVEFETPAKSGQKSASLKKLKIVKAANSIHPAWKKIS

SEQ ID NO: 20272 - protein, 414 aa, unidentified; identical to SEQ ID NO: 4252
  REGION 1..414: note = Human gut metagenome

SEQ ID NO: 20273 - protein, 470 aa, unidentified
  REGION 1..470: note = Human gut metagenome
MSVFVVGLNGCRLMPTSERKARLLLKQGKAFVEQKVPFTIRLNYKTGSTTQLGYLGIDTGSQHIGVSVVREDGTVLHKEEIGLRDSMSKRKLLEAKASLRRGRRYRKTRYRHPKWRPKTKRVYCEVPDRKGRHWQKKKITFTSKRPKGWLPPSLQSKTDHHIRWIKKLQDLLPEGYRLSIELGRFDPARMKNPEIHGDLYQKGPQYDYENVRAYVLDRDRYTCQICKKKGGKLHVHHILYRSHGATDDPQYMVIVCSDCHSAQNHLPGGILYQWMQEQKRFSRGLRDATFMNILRKRLIRAFPEAVFTYGNVTKVDREKLKLPKSHGNDATAIALVKTGITAVKDKESVICIQQVRRKKRSLHEETPRKGRKEPNRTAARNNKNTKAVTVTKRQNKKKVSMTGCLFDRVELNGKKGWISGFTGKSCYVKDADDQYLSTSPKYKQVSLSKLRILHHCGNWIIGAKKTLGKG

SEQ ID NO: 20274 - protein, 396 aa, unidentified; identical to SEQ ID NO: 4508
  REGION 1..396: note = Human gut metagenome

SEQ ID NO: 20275 - protein, 445 aa, Myxosarcina sp.; identical to SEQ ID NO: 19933

SEQ ID NO: 20276 - protein, 420 aa, unidentified; identical to SEQ ID NO: 3247
  REGION 1..420: note = Human gut metagenome

SEQ ID NO: 20277 - protein, 456 aa, unidentified; identical to SEQ ID NO: 11534
  REGION 1..456: note = Human gut metagenome

SEQ ID NO: 20278 - protein, 411 aa, unidentified; identical to SEQ ID NO: 6901
  REGION 1..411: note = Human gut metagenome

SEQ ID NO: 20279 - protein, 493 aa, unidentified; identical to SEQ ID NO: 10490
  REGION 1..493: note = Human gut metagenome

SEQ ID NO: 20280 - protein, 472 aa, unidentified
  REGION 1..472: note = Human gut metagenome
VVGNRLLSIKPLINIGEGVIYSSICTGLSLQTYQKRKEVPCMVYVLDIDGQPLMPTTRHGKVRRLLNGHLAKVVKRCPFTIQLLYQSTKETQPVSLGVDAGSKHIGMAATTEKKVVYQEELSPRNDVVKLLSARRTLRRTRRNRKTRYRKPRFNNRAHSKHKGWLAPSVEVKIQEHITAIKRICQILPISEIHVETAEFDLQRLKAMDEGSPLPVGIDYQLGEQYDFYNTRQYVLHRDGYTCQCCGTHDNNIKLHVHHIESRQTGGDAPNNLIILCEHCHKALHEGKLELPKGKKRGKSYRDATFMGVMRKTLLERLKKEIDVPVEGTYGYITKYWRERAGLEKSHIHDAVCISKYPYAKPLDTYYLTKAVRNHNRQIHKSNFSKGGIRKRNQAPYLVKGFRLFDKVLYQGKEYFIFGRRATWYFDIRTLDGTKVNKGSISYKKLRIQDTAKAYLKEARAIPHMNKFTCVLA

SEQ ID NO: 20281 - protein, 426 aa, Anoxybacillus sp.
MVFVLDTNKRPLAPCHEAVARKLLKQGKAAIYRRFPFTIILKKSVDESEIKATYRLKIDYGSRHTGLAILRGQEVVWLGQLDHRTDIKERIDKRRAFRRARRNRKTRYRKPRFLNRKRKEGWLPSSLESRVQNIQTWVNRLKKLCPIENISYENAKFDTQLMRNPEINGVEYQQGTLQGYEVREYLLEKFGRKCCYCGKENVPLEVEHIIPKSRGGTDRVDNLCLACHDCNQRKGSKTAEEFGYPHIQKQVKESLKDASAINSTRWKVYEVLKQTGLDVECGTGARTKMNRIRLDLPKTHYFDACCVGESTPNHLYFKTKEVLFIRAKGRGSRSRTNLDRYGFPRGYLARQKFFFGFQTGDMVKAVVPRGKYQGVWFGEVACRKTGSFDIKGKDGKRIAQGINYRYVQVIQRFDGYAYGKGVAELA

SEQ ID NO: 20282 - protein, 412 aa, unidentified
  REGION 1..412: note = IscB polypeptide
MPTNRLGKVRHLLKDGLAKVVQRTPFTIQLLYDSDEYTQPITLGVDAGSKTIGLSATLVPPSNGRTETDKKEVFSAEVQLRTDIVDLLSTRKQNRGTRRSHKTRYRKARFQNRKKDKDWLAPSIRHKIDTHLTMVDKIHKILPIIKIIVEVAQFDIQKIKNPDISGVEYQQGVQLDFFNAREYVLYRDDHKCQLCNGKSKDKILNVHHIESRKTGGDAPNNLVTLCETCHKKHHEGYLKLKVKRGQLFKDASFMGIMRWAFYNTLKEKYPNVLMTYGYITKNTRITNKLSKDHRTDALCITGNPTVVGLDTWYYCKKVRCQNRQIHKNTINKGGARKLNQSPFVVFDIRLFDKVKYNDQECFVFGRRVSGSFDIRLLDGTTVNAGVGYKKVKVLEQRKTILIERRKAIPPHA

SEQ ID NO: 20283 - protein, 426 aa, unidentified; identical to SEQ ID NO: 15348
  REGION 1..426: note = Bioreactor metagenome

SEQ ID NO: 20284 - protein, 512 aa, unidentified; identical to SEQ ID NO: 8121
  REGION 1..512: note = Human gut metagenome

SEQ ID NO: 20285 - protein, 431 aa, unidentified
  REGION 1..431: note = Human gut metagenome
MDAWDIIVILNKRGKPLMPCSPAKARLLLKEKKAIVARRTPFTIQLTIATGEAKQPVSLGVDAGYKHVGLSASTEKAELYASEVELRQDVSDLLSARRALRQSRRNRNTRYRAPRFDNRIRTKRKGWLAPTVENRINVHLSRIETVLRLLPVTKITVETASFDTQLLKNPDIAGKEYQEGEQLGFWNVREYVLFRDGHVCQHCHGRSKDPVLNVHHLESRRTGGDSPGNLITLCETCHKALHRGEIKLKAKRGRSFRAETFMGIMRWGVLNRLKASHPKLEVHNTYGYRTKHARISNGIAKSHCADAFCIAGNLGAERLGEFFFQKQTRRNNRQIHKLSILKGGIRKRNQAPFEVKGFRLFDKVACQGEEGFIFGRRSSGFFDVRKLDGTRISAGISCKKLHLLEKRRTYLTEIRKEEALPPLPEGRGLRA

SEQ ID NO: 20286 - protein, 427 aa, Alicyclobacillus sp.; identical to SEQ ID NO: 2399

SEQ ID NO: 20287 - protein, 416 aa, unidentified; identical to SEQ ID NO: 18097
  REGION 1..416: note = Human gut metagenome

SEQ ID NO: 20288 - protein, 431 aa, Moorena sp.; identical to SEQ ID NO: 17669

SEQ ID NO: 20289 - protein, 428 aa, unidentified
  REGION 1..428: note = Human gut metagenome
LKVFVLNMRGQPLMPCSPAKARHLLKAGKAVVKRRTPFTIQLRIATGETKQNVTLGVDAGAKHVGLSATTEKEEVFASEVELRQDITGLLAARLSLRRDRRHRKTRYRAPRFLNRVRSKHKGWLAPSVENRIQAHMSRIDAVCRLLPVTKIVIETASFDIQKIKDPSVEGTDYQQGDQLGFWNVREYVLFRDGHVCQHCHGHAKDKILNVHHLESRQTGGDAPNNLITLCETCHKACHAGKIKLKVKRAQSFRAEAFMGIMRWTLLDRMRKAHSGLPVENTYGYLTKNTRITPGLPKTHCVDAYCIAGNLKAVRRGVCLHQRQVRKHNRQIHKCTVLSKTLKDGTKIGYRKLNQTPHLVKNFRLFDKVRCLGQTGFIFGRRSSGYFDVRRLDGVKLSSGISYRKLTLLEKRSTYLTELRKEDGASSPV

SEQ ID NO: 20290 - protein, 402 aa, unidentified; identical to SEQ ID NO: 9694
  REGION 1..402: note = Human gut metagenome

SEQ ID NO: 20291 - protein, 414 aa, unidentified; identical to SEQ ID NO: 6490
  REGION 1..414: note = gut metagenome

SEQ ID NO: 20292 - protein, 434 aa, unidentified; identical to SEQ ID NO: 7534
  REGION 1..434: note = Human gut metagenome

SEQ ID NO: 20293 - protein, 443 aa, Anoxybacillus sp.
MVEENMTCFMQRKGENPMVFVLDTNKRPLAPCHEAVARKLLKQGKAAIYRRFPFTIILKKSVDESEIKATYRLKIDHGSKHTGLAILRGQEVVWLGQLDHRTDIKERIDKRRAFRRARRNRKTRYRKPRFLNRRRKDGWLPPSLESRVQNIQTWVNRLKKLCPIGYISYENAKFDTQLMRNPEISGIEYQQGTLQGYEVREYLLEKFGRKCCYCGKENVPLEVEHIIPKSRGGTDRVDNLCLACHDCNQRKGSKTAEEFGYPHIQKQVKETLKDTSAINSTRWKAYEVLKQTGLDVECGTGARTKMNRIRLDLPKTHYFDACCVGESTTNHLYFKTKEVLFIKAKGRGSRSRTNLDRYGFPRGYLARQKFFFGFQTGDMVKAVVPRGKYQGVWFGEVACRKTGSFDIKGKDGKRIAQGINYRYVQVIQRFDGYAYGKGVAELA

SEQ ID NO: 20294 - protein, 418 aa, unidentified; identical to SEQ ID NO: 15678
  REGION 1..418: note = Human gut metagenome

SEQ ID NO: 20295 - protein, 408 aa, unidentified; identical to SEQ ID NO: 5302
  REGION 1..408: note = Human gut metagenome

SEQ ID NO: 20296 - protein, 427 aa, Parasutterella sp.; identical to SEQ ID NO: 7064

SEQ ID NO: 20297 - protein, 444 aa, Moorena sp.
MIPTSNIVEANFTLEIGEAEMSNYTLVIDANNQPLSPCHPSVARKLLASKKAAVYRRYPFTIILNKTVENPQIEPIELKLDPGSKTTGVALVQGNKVLWGAELTHRGQAIKMSLESRRSFRRSRRNRHTRYRQARFLNRTRQSSLLAPSLQHRVETTLTWVNKLLRLAPISSIVQELVRFDLQQLENPEISGVEYHEGELAEYEVREYLLNKWDRKCAYCGIENVPLQIDHIHSKAKGGSNRISNLCLACEQCNIKKGTQSIEQFLAKKSDILKRIFSQAKRPLKDAATVNSTRWELFNRLQETGLPVATGSGGLTKFNRTRLNLPKAHWLDAACVGLVESLKVLTSKPLLIKATGHGTRQMCRPDKFGFPSRYVPRLKFVNGFQTGDIVKAIVTSGKKIGIYVGRVTVRSSGSFNIYTSELVSGISYKYCSVIHRKDGYSYAT

SEQ ID NO: 20298 - protein, 417 aa, unidentified
  REGION 1..417: note = Human gut metagenome
MPCSPAKARLLLKEKKAIVKRRTPFTIQLTIATGEARQPVALGVDSGYKHIGLSATTEKAELYASQVELRQDITDLLSARLALRRSRRSRKTRYRAPRFNNRVASKRKGWLAPSVENRIAAHMSRVEAVMRVLPVTAITVETAAFDTQLLKNPDIAGEAYQQGEQLGFWNVREYVLFRDGHVCQHCRGKSKDPILNVHHIESRRTGGDAPNNLITLCETCHKAFHRGEIKLKVKRGKSFKAETFMGIMRWTLFERLKKAHPELRVRNTYGYLTKHKRISHGIAKSHCADAYCIADNLGAKRLEGFFFQKQTRKHNRQIHKLSILKGGLRKKNQAPYEVKGFRLFDKVICKGEEAFIFGRRTSGSFDVRRLDGTRISAGISCKKLRLLEPRTTYLTEFRKEAALPPLHECRGFRAEFL

SEQ ID NO: 20299 - protein, 544 aa, unidentified
  REGION 1..544: note = Human gut metagenome
MKQKKQKVIVYILNKKGKPLMPTTRCGHVRKLLDSKKAVVVNSNPFTIRLKYDTPNGIQDVFAGIDSGRENIGSGASNEDGDCLYLGELKTSNKSIKIKMAERTGFRRERRRHDRQSKQRKAKKDHTEIQNGNDDICRTTISCKSVQISYPVAEESVTHKIIRGKEGKFANRHRDEGWITPSARQLVQMHMNDLKSMCKILPISHVTLERVAFDFQKLENENIKVWEYGKGKLYGYDSPEEYIHDVQDGKCLVCGKPHIDYLHHIIPRSKGGSDKVSNIAGLCYDCHYGPMGVHNCQDTQNRLPELKNEANKQYKVSLLNSVMTVLIEEMDKFCKANSIIFSICEGHDTAKVRDMYDLQKDHCIDGFAISLVDRNVKSVDVMPDRIYQKQRYKKKSKNIIQKRNCREYYDDKKLVAVNRHKGTDQKADSLEEYMNTYAETHTTDECKKHFDSLVVKPARRTYTFHKEWRICPFHIGDKVRYEKKNKIKGNTKVDTFICEGIYFSKDENKAEVEHNKTKSKKMKFCRTIESGCIPYIDYRKLALI

SEQ ID NO: 20300 - protein, 470 aa, unidentified; identical to SEQ ID NO: 2825
  REGION 1..470: note = Human gut metagenome

SEQ ID NO: 20301 - protein, 415 aa, unidentified; identical to SEQ ID NO: 7777
  REGION 1..415: note = Human gut metagenome

SEQ ID NO: 20302 - protein, 431 aa, unidentified
  REGION 1..431: note = Human gut metagenome
MPNKVYVINKHGRPLMPCSPAKARHLLDAGKAKVKKRTPFTIQLVYGSSGYTQEVILGVDAGSKTIGMSASTTKEELLSAEVKPRNDVVDLLSTRREFRRARRNRKTRYRKPRFDNRVRSKHKGWLAPSVEVKIQEHITSIKRVCRILPVSKVVVETAEFDLQLLKAIADGKPVPQGEDYQKGEMYGHYNVRQYVLWRDDYTCQCCGAHATKKKEVRLHVHHLESRKTGGDAPGNLVTLCDSCHEKLHKGLIAEKDFKKRKRRSTRDATFMGIMRKTLMQRLCSELPIPVIETRGYITKATREKLLVLPKSHTNDALAIAQGKQGFNVGYLPGILQIDKIYTIRPVRHHNRQLHKAAILKGGIRKSNQVGKYVFGYRLFDKVQFNEQDCFIWGRRTTGIFTIKTINGKMIKDGISFKKLKILEKSTSYLIA

SEQ ID NO: 20303 - protein, 419 aa, unidentified; identical to SEQ ID NO: 3670
  REGION 1..419: note = Human gut metagenome

SEQ ID NO: 20304 - protein, 431 aa, unidentified
  REGION 1..431: note = Human gut metagenome
MPNKVYVINKHGRPLMPCSPAKARHLLDGGKAKVKKRTPFTIQLLFGSTGYTQEVILGVDAGSKTIGLSASAETKELFSAEVKPRNDVVDLLSTRRESRRARRNRKTRYRKPRFDNRVRSKHKGWLALSEEVKIQEHITAIKMVCRILPVSKVVIETAEFDLQLLKAIADGKPVPQGEDYQKGEMYGHYNVRQYVLWRDGYTCQCCGAHTTKKKEVRLHVHHLESRKTGGDAPGNLVTLCDSCHEKLHKGLITEDDFKKRKRRSTRDATFMGIMRKTLMQRLCSELPIPVIETRGYITKATREKLLVLPKSHTNDALAIALGKQGFNVGYLPGIAQIDKIYTIRPVRHHNRQLHKAAILKGGIRKSNQAGKYVFGYRLFDKVQFNGQDCFIWGRRTTGIFTIKTINGKMIKDGISFKKLKPVEKSTSYLIA

SEQ ID NO: 20305 - protein, 420 aa, unidentified; identical to SEQ ID NO: 3685
  REGION 1..420: note = Human gut metagenome

SEQ ID NO: 20306 - protein, 515 aa, unidentified
  REGION 1..515: note = Human gut metagenome
MTALEERLSKTEYIYVLGFDGKPQMPTRRKRHVLKLLKTGRARIAEDIPFTIRLTYRNAPVLQPVTLAEDPGRTNIGAAVLSPLGDLLFAAVIETRNKEIKKLMADRKKSRQASRRGERKARQRLAKRYGSMVKSGMIIRKLPMYAADKFVTCKFIRNTQARFCNLKRCPDWITPTVQHLVQTHLNIIRKISRYLPVTDIAFEVSRFAFMHMENPEAMGVDFQNGPLKGYGDVKEAIRTHQHGKCLMCKKPIAHFHHIVPRSRGGSDTIQNLAGLCPECHTKVHTDTAFRKDFDEKKSGQLKKYGALSALNQAVPFICKKLLEEYGEEHVHFCRGLDTSLIRTALGFEKTKKNQMHEVDAYCIGLAALEVNEVETPAFDHTFQIRQFRRQDRSIIHHQTGRSYYQGKEKVAQNRKPGFEQKTTALSQWYEEQVRIHGEKEAEKLRSQLRVEKSCRHYNDMDRFLPGAVFLYEGKRYVLSGRITNGKYLRACGQGMKNFPAAECTFIRHNAGLVFI

SEQ ID NO: 20307 - protein, 445 aa, unidentified
  REGION 1..445: note = Bioreactor metagenome
MVFVLDKHKKPLMPCTEKRARLLLQRGRAVIHKMEPFTIRLRDRTLEKSNVQLLRLKLDPGSKTTGVAIIDESKPDCSRVIFLGEIRHKAGIKKSLDNRRAIRHSRRNRKTRYRKARFDNRKRPKGWLPPSLQARVDQTLNTVTKLRKFLPIAAISTEHVKFDTQFMQNAEISGIEYQQGELFGYEVREYLLEKWGRKCAYCGKTDVPLEIEHIIPKSRGGSNRVSNLTLSCKLCNQKKGTMTAAEFGFPEVQAQAKKSLRDAAMMNATRWALFNKLKKIGLPVECGTGARTKKQRIEHGLPKTHYYDACCVGISTPKRLMIIPQYISVWTVIGRGTRRMCNTDKYGFPKGHRTSKKMYFGFQTGDIVKAAVPKGKYMGTWIGRVAVRASGYFDLKDGQGKRICQGVSYKHCRLIQRANGWQYEKYLRKEKSRIPPTAKAVGFLR

SEQ ID NO: 20308 - protein, 420 aa, unidentified
  REGION 1..420: note = Human gut metagenome
MQYVYVLNKHGEPLMPCSPRKARLLLKQKKACVIKRTPFTVKLLYGSAGYKQPVTLGVDAGSKHIGISATTEKHELYREEATPRNDVVDLLSARRAFRRSRRNRKTRYRAPRFNNRVHSKHKGWLAPSVEVKIQEHITLIKHVCRILPVTLVRVETAEFDTQRLKAMLEGKPLPVGTDYQLGEMYDEYNVRQYVLKRDNYTCQCCGAHSTKTKGVKLHVHHIETRRIGGNAPNNLITLCKACHKALHAEKVTLDGKKRGKPLKDAAFMGIMRKTLMERLRKELKIPVQGTYGYITKYLREKNGIPKSHTNDARCISKNPLAIPCDTCYYTKAVRHHNRQLHKATILKGGIRKANQAPYIVKGYRLWDKVAYNGTECFITGRRTSGYFALKELDGTVVSNSISYKKLRLLEAATNYIIERK

SEQ ID NO: 20309 - protein, 430 aa, unidentified; identical to SEQ ID NO: 5683
  REGION 1..430: note = Human gut metagenome

SEQ ID NO: 20310 - protein, 493 aa, unidentified; identical to SEQ ID NO: 18058
  REGION 1..493: note = Human gut metagenome

SEQ ID NO: 20311 - protein, 449 aa, unidentified
  REGION 1..449: note = Marine metagenome
MAVFVLDKQKRPLMPCTEKRARLLLQRGRAVVVRLAPFTIRLKDRVGGETQPLRVKLDPGSQTTGIAVVRESESIDPDTGEVERVEHVLWLGEIEHRGQAIRKALERRRNFRRSRRYRKTRFRAPRFQNRTRPEGWLPPSLQHRVDTTTSWVARLQRLAPISALSQELVRFDMQLMQNPEISGVDYQQGTLAGYELREYLLEKWNRTCAYCGKTEVPLQIEHIVARSKGGSNRPSNLTLACHRCNERKGNQPVEVFLKRKPEVLKRLQAQAKVPLRDAAAVNATRWALFAALKATGLPIETGSGGRTKYNRSRLAIPKTHALDAACVGRVDQVQGWNRPVLAIQATGRGAYCRTRAFKNGFPRGSLIRHKRVRGFQTGDWVRAEVPKGKQAGLHLGRVAVRKTGSFNIQMPGKTSEGISHRDCRLLQRADGYGYAFQPKPQMEAARGAA

SEQ ID NO: 20312 - protein, 470 aa, Blautia sp.; identical to SEQ ID NO: 2925

SEQ ID NO: 20313 - protein, 476 aa, unidentified
  REGION 1..476: note = Human gut metagenome
LEVVGTEGVSHPGLPGKYKYKGGQLMSVAVISKTGERLMPTSEYRARKLLKSGKAIKHSYHPFTIQLTERETGDIQPIELCMDTGYIHIGISVKSEKHEYLAEQIDTLTDERGRHDACHMYRRQRRSRKRYRQARFNNRKRDQGWIAPSLEHKKKIHIQAISRINKVMPITDITMEMGNFDTQVLKAKEEGKPLPQGAEYQHCERYGIATLREAVFARDDYKCQCCGRAIKDGAIFHVHHVKYRSKGGTNSISNLATVCDKCHTPKNHKPGGKLYNWKPKLSSFKGATFMTTIRWQLYSEVKALFSDIDIYIAYGAATKERRRELDIDKSHVNDAFAMGQFHPKHRIKAVLYKKKRRNNRCLEKFYDAKYIDSRDGKKRSGQELFNGRINRNHKKDSENLHQYRLQKVTAGKRTVRKQHYKIQPHDIVIYENRKRETAGCHCNGTRMMLLPDKKSSSIKKVKIYRYAGGYFKSAFN

SEQ ID NO: 20314 - protein, 415 aa, Bacillus sp.; identical to SEQ ID NO: 2431

SEQ ID NO: 20315 - protein, 443 aa, Anoxybacillus sp.; identical to SEQ ID NO: 3379

SEQ ID NO: 20316 - protein, 461 aa, Parasutterella sp.; identical to SEQ ID NO: 3646

SEQ ID NO: 20317 - protein, 453 aa, unidentified
  REGION 1..453: note = Human gut metagenome
PITIAEDPGRSNIGMAVVSLSGELLSAAVVQTRNKEIVKLMEKRKQHRRASRNGERKARQRLAKKCHTMIKAGSLMRKLPMYGKDKRVQCNVIRNTEARFCNRKREDGWLTPSAEHLVQTHINLIHKMQKFLPITDVAFEINRFAFLSLEDPSISGVDFQNGPLKGYDDLNAAIEDLQDGHCLMCNSPIEHRHHIVPRSMQGSNTIGNIAGLCCKCHERVHKDARFEDRLKKKKAGLNKRYAAVSALNQAIPFICKRLEQEFGKEHVHYCSGRDTSMVRRSFGYHKTKEEQLHEVDAWCIAVLSLRQIPEKAPEFDHVHELLQFRRQDRSRIKSQTSRAYYHEGKKIAKNRKKAEGQREDSLQEWRKQQVKRYGEEQTRKMISQLEIKKSIRRYNRLDRLMPGAVFYYQGIRYVMRGQHCEGTYLQAVGMGSKDFPAKKCKIVAHNEGLVFVS

SEQ ID NO: 20318 - protein, 432 aa, unidentified; identical to SEQ ID NO: 17289
  REGION 1..432: note = Cyanobacteria bacterium UBA8553

SEQ ID NO: 20319 - protein, 457 aa, unidentified
  REGION 1..457: note = Human gut metagenome
MDAVAVISASGKPLMPTNPVRARKLIKKGKAVIYKYRPLFTIRLTERTDGDIQTIEYCCDTGYQHIGLSIKSRKHEYVNEQRDLLPNETERHNDSRKYRKARRRRKLRHRACRRDNRHDNQICKDGYAPSIRNKRDQHISLYRSYTEILPVERAVFEMGQFDTQVLKAIEKGEPLPQGKDYQHGERYGYATLREAVFARDDYTCICCGKNAFKDKRILCIHHLGFRIGDRTNRLANLATVCTKCHTPKNHQPKGKLYNLKPELKDFKGATFMTMVRWDMLDKLKAVSKDIRVDVTYGAATKEARRDLKIKKSHANDAYCMGSFYPSHRTDLKRYEKCRRNNRVLSKFYDATYIDIRDGKKKKANALGCNRTKRRESRRSEKNERIYRGEKISKGRIVLRTRRAVIRPGDIVYVGKKKYIVASSKNLGAQLKLADGSLLTTSKVTKIIHCGGWKTIAL

SEQ ID NO: 20320 - protein, 456 aa, unidentified; identical to SEQ ID NO: 6866
  REGION 1..456: note = Human gut metagenome

SEQ ID NO: 20321 - protein, 378 aa, unidentified
  REGION 1..378: note = Human gut metagenome
MVYVISKQGTPLMPTERFGKVRRILKNSLAHVVRRIPFTIQLDYDTTEFAQPITLGIDAGSKHIGVSATTTEKELYAADVELRNDIVDKLSTRRKQRRTRRNRLRHRKPRFDNRVSSKNKGWLAPSIENKIHTHMSVVKNVCKILPVSNIVVETASFDMQKIKHLDIQGEEYQQGEQFGFWNVREYVLWRDGHVCQHCHGKSKDPVLNVHHLESRKTGGDAPSNLITLCETCHKAYHRGKFELKIKRGKPLRDAAFMGIMRWAFYKRLKKEHPNVSMTFGYITKNTRITNNLPKEHYVDARCISGHPKAKPMGYYFYQKKVRCHNRQIHKVNFLKGGRKRLNQAPFLVRGFRLFDLVSYEGILYYVFGRRRTAVEKNL

SEQ ID NO: 20322 - protein, 527 aa, unidentified
  REGION 1..527: note = Human gut metagenome
MGKGKWAARKPGITSGLENTWISKKPQGTGSGRAAAAYPYVDAGREGVSRKGFFMVAVVTCTGKPLMPTSAYRARKLLKAGRAVIYKYRPYFTIQLLDREDGEVQEIEYKSDTGSQHVGISVCTEKKELLSEQRDLPVMETEHHNDRRKNRRTRRNRKRYRKPRFDNRATKPVDGHQKWFAPSIRHKLEIQVRLFQEFCRVVPVTSAVFEMGKFDSQALKAILEGKPLPEGEDYQKGEQYGTDTLRAAVFLRDSHTCQFCKRSIKDGAFLHVHHVGYWKGDRTDRPANLATACEQCHTPANHGKHGILYGKEPEFHSLKDASYMTMVRWTMLEELREAAPEVAIRITYGVTTKRKRQKLKLPKSHVNDAYAMGKFHPVKRADTQYWQKTRRHDRILQRFYDAVYLDTRDGKEKKGNELSCGRINRNHKKDSENLRRCRGHKISSGYFSVRRDGNKLQPGSIVQYNGERMTVHGTHTSYRKNKKGEQVKYVNVEFTSPASDGRKSASLKKCSILSRNYNTGWKRYQPV

SEQ ID NO: 20323 - protein, 465 aa, unidentified
  REGION 1..465: note = Human gut metagenome
MSTCVCVLSNSGERLMPTFRLGNVRHLLKDGKAKIVKHHPFTIQLLYDSKTNTQPIEICEDVGYNYIGISVKSQSHEYVSAQYDTLQDEKACHDSCRKLRRTRRNRLRYRKPRFDNRKRGEGWLAPSLRHKKELNVNVVKMYCAVMPITHATVEVGSFDTMLVKAIQEGKAIPEGADYQKGPRYNLATLREAVFYRDNYTCQVCGRKIADGAILHMHHMFYWKGRHGDSLNELLTVCEKCHTPANHQKGGKLYGFGENVKFADLSGAAFMNTVRWQIVNELYAAFGKDFVTVTYGAMTKEKRIALRLEKSHNNDAYAMGEFHPNCRCTFEHYEKVRRNNRILEKFYDSRYIDIRTGEIATGKELFNGRINRNHKKDSENLHRYRGKRTYAGHRALLRKKVNLNPGDLVSLNGEVLVVHSTHTNKKGAVNVEFKTPGKSGQKSASLKKLKIVKAADSMHSAWEKIS

SEQ ID NO: 20324 - protein, 443 aa, unidentified
  REGION 1..443: note = metagenome
LTKDENRPSGRTTGLRAEQAEPAGIRKGDTLKVFVLNMRGKPLMPCSPAKARHMLKAGKAFVVRRTPFTIKLTIATGETKQDVTLGVDAGARHVGISATTEKEEVFASEVALRQDITGLLADRLAFRRARRNRKTRYRAPRFNNRVRSKHKGWLAPSVENRIQAHMSRIDAVCRLLPVTKIVIETASFDVQKIKNPTIEGTDYQQGDQLGFWNVREYVLFRDGHVCQHCHGRSRDKILNVHHLESRKTGGDAPNNLITLCETCHKAYHAGKIKLKVKRGQSFRAEAFMGIMRWTLLDRVRKTYPKLPVENTYGYLTKHKRIALGLPKTHCADAFCIAGNLKALRRGDFLFQQQTRKHNRQIHKCSILKGGVRKLNQAPFLVKGFRLFDKVRIGGQIGFVFGRRVRGTFNIRRLDKTVIGTDINCKKLSLLETRKTFLTELRKE

SEQ ID NO: 20325 - protein, 424 aa, unidentified; identical to SEQ ID NO: 4871
  REGION 1..424: note = Human gut metagenome

SEQ ID NO: 20326 - protein, 442 aa, unidentified
  REGION 1..442: note = Human gut metagenome
MVTVQQSTHHLPFGRVFIRRNLFMVYVISQDSKPLMPCSNPIARLLLKQGKAKVKRREPFTIKLIYETTDYTQDLTLGVDTGSGTIGAAVSKDNGDIVYMSEVVVRNDITDKMTQRAKYRRNRRNRKTRYRKARWLNRSNSIKKDRFSPTMQSKLHSHVKEIEYIQSILPITEMVFETGQFDMQLMKNPSLANPKVRPWGYQKGTNYGFENTKAMVLNRDNYTCQCCKGKHKDSKLEVHHIVFRSQGGSDEESNLITLCHTCHKDLHSGKINLKLSGKVKGNLKYATQMNSIRKQLFRLYPNAIETFGYVTKANRLHLGVDKEHYYDACTIATQGNAFNVKSDLYKKKCVSDGDFQKTKGIRSEQPIVTDKICGFRKFDKVRYFGKDYFIKGRMSTGYAILMDIDGNKIDFSTMPRGYKTPKLSNCKRITARSTVMTQVKVV

SEQ ID NO: 20327 - protein, 437 aa, Clostridium sp.; identical to SEQ ID NO: 3563

SEQ ID NO: 20328 - protein, 184 aa, unidentified
  REGION 1..184: note = Human gut metagenome
LLMVAVVDLFGKPLMPTNEYRARRLLKQKKAKIFGYRPFTIQLTERKSTEIQPIELCMDTGYIHIGISAKSERHEYLGMQIDTLTDEKLKRDDKRQYRRQRRNRKRYRAPRFDNRRRKEGWIAPSLEHKKEIHIDAIQRICKVMPITDITLEMGNFDTHVLKAVEEGKPLPQGSDYQHGERYGI

SEQ ID NO: 20329 - protein, 470 aa, unidentified; identical to SEQ ID NO: 2949
  REGION 1..470: note = Human gut metagenome

SEQ ID NO: 20330 - protein, 472 aa, Psychromonas sp.; identical to SEQ ID NO: 9157

SEQ ID NO: 20331 - protein, 338 aa, unidentified
  REGION 1..338: note = Human gut metagenome
LSARRALRQSRRSRNTRYRAPRFDNRIRTKRKGWLAPTVENRINVHLSRIETVLRLLPVTKITVETASFDTQLLKNPDIAGKEYQEGEQLGFWNVREYVLFRDGHVCQHCHGRSKDPVLNVHHLESRRTGGDSPGNLITLCETCHKALHRGEIKLKAKRGRSFRAETFMGIMRWGVLNRLKASHPKLEVHNTYGYRTKHARIANGIAKSHCADAFCIAGNFGAKRLGEFFFQKQTRRNNRQIHKLSILKGGIRKRNQAPYEIKGFRLFDKVACQGEEGFIFGRRSSGFFDVRKLDGTRISAGISYKKLHLLEKRRTYLTEIRKEEVLPPLPEGRGLRA

SEQ ID NO: 20332 - protein, 470 aa, unidentified; identical to SEQ ID NO: 5320
  REGION 1..470: note = Human gut metagenome

SEQ ID NO: 20333 - protein, 426 aa, Parasutterella sp.; identical to SEQ ID NO: 3045

SEQ ID NO: 20334 - protein, 512 aa, unidentified; identical to SEQ ID NO: 5549
  REGION 1..512: note = Human gut metagenome

SEQ ID NO: 20335 - protein, 394 aa, Psychromonas sp.; identical to SEQ ID NO: 8651

SEQ ID NO: 20336 - protein, 594 aa, unidentified; identical to SEQ ID NO: 4104
  REGION 1..594: note = Human gut metagenome

SEQ ID NO: 20337 - protein, 512 aa, unidentified; identical to SEQ ID NO: 18365
  REGION 1..512: note = Human gut metagenome

SEQ ID NO: 20338 - protein, 518 aa, unidentified
  REGION 1..518: note = Human gut metagenome
MTPKKRKEASRMSEYIYVIGVDGDPQMPTKRKRHVEKLLQAGRARVFRQIPFTIQLTYENKPVLQPITIAEDPGRSNIGMAVVSLSGELLSAAVVQTRNKEIVKLMEKRKQHRRASRNGERKARQRLAKKCHTMIKAGSLMRKLPMYGKDKRVQCNVIRNTEARFCNRKREDGWLTPSAEHLVQTHINLIHKMQKFLPITDVAFEINRFAFLSLEDPSISGVDFQNGPLKGYDDLNAAIEDLQDGHCLMCNSSIEHRHHIVPRSMQGSNTIGNIAGLCCKCHERVHKDARFEDRLKKKKAGLNKRYAAVSALNQAIPFICKRLEQEFGKEHVHYCSGRDTSMVRRSFGYHKTKEEQLHEVDAWCIAVLSLRQIPEKAPEFDHVHELLQFRRQDRSRIKAQTSRAYYHEGKKIAKNRKKAEGQREDSLQEWRKQQVKRYGEEQTRKMISQLEIKKSIRRYNRLDRLMPGAVFYYQGIRYVMRGQHCEGTYLQAVGMGSKDFPAKKCKIVAHNEGLVFVS

SEQ ID NO: 20339 - protein, 501 aa, Moorena sp.; identical to SEQ ID NO: 9337

SEQ ID NO: 20340 - protein, 417 aa, unidentified
  REGION 1..417: note = Human oral metagenome
MLVYVLKQNGQPFMPTERFGKVRRLLKEGKAKVVRREPFTIRLLYEPKTDVVQECYCGVDTGSKHIGVAVVGNDKVLYQSQTELRSDIKKKMNRKRASRRNRRNRKTRYRKPRFLNRRNSIREDRLPPSVKHKVQAHIDEIEFCKKILPISDLILEVSQFDTALMKNPSLMNEKVKHWGYQKGFNYGYSSRRSAILHRDNYTCQCCGKKNCRLEVHHIKFRSNGGTDDEENLITLCEDCHKGVHAGMVVLSKKPKKSKNLKYATHMSIIRSYLLQKYPNTIETFGFVTSENRNHLNLPKDHYIDACVIASGGLEFKELDVIFYKRRVSKGDYQLTKGIRGEQKLPIGKIYGFRKFDKVKYLGKEYFIKGRISKGGYAVLMDVFGNKVDFSSMSKGHKTPKLSNCDRISTRRSCLCIS

SEQ ID NO: 20341 - protein, 455 aa, unidentified; identical to SEQ ID NO: 12675
  REGION 1..455: note = Human gut metagenome

SEQ ID NO: 20342 - protein, 458 aa, Scytonema sp.; identical to SEQ ID NO: 12967

SEQ ID NO: 20343 - protein, 470 aa, unidentified; identical to SEQ ID NO: 2949
  REGION 1..470: note = Human gut metagenome

SEQ ID NO: 20344 - protein, 431 aa, unidentified
  REGION 1..431: note = Human gut metagenome
MPNKVYVINKHGRPLMPCSPAKARHLLDDGKAKVKKRTPFTIQLVYGSSGYTQEVILGVDAGSKTIGMSASTTKEELLSAEVKPRNDVVDLLSTRREFRRARRNRKTRYRKPRFDNRVRSKHKEWLAPSVEVKIQEHITSIKRVCRILPVSKVVVETAEFDLQLLKAIADGKPVPQGEDYQKGEMYGHYNVRQYVLWRDDYTCQCCGAHATKKKEVRLHVHHLESRKVGGDAPDNQVTLCESCHEKLHKGLIAEKDFKKRKRRSTRDATFMGIMRKTLMQRLCSELPIPVIETRGYITKATREKLLVLPKSHTNDALAIAQGKRGFNVGYLPEIAQIDKIYTIRPVRHHNRQLHKAAILKGGIRKSNQAGKYVFGYRLFDKVQFNGQDCFIFGRRTSGYFVVKTIDGKVIHNSASFKKLKLVERASNYLIA

SEQ ID NO: 20345 - protein, 431 aa, unidentified
  REGION 1..431: note = Human gut metagenome
MPNKVYVINKHGRPLMPCSPAKARHLLDAGKAKVKKRTPFTIQLVYGSSGYTQEVILGVDAGSKTIGMSASTTKEELLSAEVKPRNDVVDLLSTRREFRRAQRNRKTRYRKPRFDNRVRSKHKGWLAPSVEVKIQEHITSIKRVCRILPVSKVVIETAEFDLQLLKAIEEGKPVPQGEDYQQGEMYGHYNVRQYVLWRDGYTCQCCGAHATKKKEVRLHVHHLESRKVDGDAPDNQVTLCESCHEKLHKGLIAEKDFKKRKRKSTRDATFMGIMRKTLMQRLCSELPIPVIETRGYITKATREKLLVLPKSHTNDALAIAQGKQGFNVGYLPGIVQINKIYTIRPVRHHNRQLHKATILKGGIRKSNQTEKYVFGYRLFDKVQFNGQDCFIWGRRTTGIFTIKTINGKMIKDGISFKKLKLAEKSTSYLIA

SEQ ID NO: 20346 - protein, 417 aa, Moorena sp.
MVYVLNTDGVPLMPCSAAIARLLLKEGYARVKCRTPFTLKLLRIPETTYTQSLTHGVDTGSDKIGSTVVTQQGDVVYTSEVTIRNDINKKMTGRKSCRRNRRSRKTRYRAARFANRGNSIRSDRFSPTMTSKINAHLKEVSYVASILPITTLIVETGNFDPHALKNPDVLKDPSLYQKGVNYGFANTKAYVLCRDGYVCQHCKGKSKDTRLHVHHLVYHSNGGSDDEANLLVLCETCHRGVHDNSIVLKKNGKRKGQLKHATQMNSIRVQCLRALPHAQETFGFITKEHRQLLGLEKSHINDAAVIASQGNVINFNGTKLLEKKCVSDGDYQQMKGIRGQQRIPTGKIKGFRKFDKVRYQGVDCFIKGRMSTGYAILMDINGEKLTFSNTPKFNGMKRLSARTSWIMSQKTTANICS

SEQ ID NO: 20347 - protein, 430 aa, Moorena sp.; identical to SEQ ID NO: 3555

SEQ ID NO: 20348 - protein, 421 aa, Ktedonobacter sp.
MNVVYVLSPDRVPLMPCSCAIARLLLKQGKAKVVRRTPFTIKMYTQPVDTHTQPLTLGIDTGSAVIGSAVSDECGNILYVSEGEVRNDIAQTMKNRATSRRNRRYRKTRYRPARWLNRRNSLKTGRFSPTMTSKTEAHLREIRFVQSLLPIQSRVLETGTFNPHALKHPAVLQNKWMYQKGINYGLANTKAYVLTRDGYVCQRCKGQSKDRRLEVHHIVFRSQQGSDEEANLLTLCKTCHEGLHAGTVTLKQKGKRKGNLLHATQMNSIRIQLLSRVEAIETWGFVTKEHRLLAGLPKEHIFDAAMIATRGNIPVFQTTEVLLKKCISDGDYQQTKGKHSQQRIPTGKIAGFRKFDKVRYLGVEYFIKGRMSTGYAILMDLSGNKLALKPTPKFDNMKRVSARSSWIINQKAMPSFSSSPT

SEQ ID NO: 20349 - protein, 446 aa, unidentified; identical to SEQ ID NO: 14643
  REGION 1..446: note = Human gut metagenome

SEQ ID NO: 20350 - protein, 315 aa, unidentified
  REGION 1..315: note = Human gut metagenome
VYKRQHKGWLAPSVEVKIQEHITTIRRVYGILPVSKVVVETAEFDLQLLKAIADGKPVPQGEDYQKGEMYGHYNVRQYVLWRDDYTCQCCGAHATKKKEVRLHVHHLESRKVGGDAPDNQVTLCESCHEKLHKGLIAEKDFKKRKRRSTRDATFMGIMRKTLMQRLYSELPIPVIETRGYITKATREKLLVLPKSHTNDALAIAQGKRGFNVGYLPEIAQIDKIYTIRPVRHHNRQLHKAAILKGGIRKSNQAEKYVFGYRLFDKVQFNEQDCFIWGRRTTGIFTIKTINRKMIKDGISFKKLKLVEKSTSYLIA

SEQ ID NO: 20351 - protein, 361 aa, unidentified
  REGION 1..361: note = Human gut metagenome
LSKVKTMRVFVFNMRGRPLMPCSQRKARLLLRENKAKIYKYHPFTIQLTYTTGETKQDCHIGIDTGSKYIGAAVRSEDKVFWKGEIELRQDIRSNLDTKRIYRRSRRNRKTRYRKPRFLNRKRRDEWLPPSLQSRINHTFHWIDTLSSLVPNPILHIEVGKFDVAKMINPEIHGVDYQHGQTYGFFDERYFVFARDNYTCQCCGKSKNKILNTHHIIYRSNGGTNRVDNLITVCTDCHTSQNHRKGGIFYQWQEQHKKVKQYKEPPFMNTLRKRIFVAYPDAEITYGSETTPKRKAMKLDKTHYNDAIVISGINEIKENPEEWLLIKQFRKKKRSLHEATARKGRKKPNRNQTRNSKNTPY

SEQ ID NO: 20352 - protein, 346 aa, Arthrospira sp.; identical to SEQ ID NO: 2872

SEQ ID NO: 20353 - protein, 457 aa, unidentified
  REGION 1..457: note = Human gut metagenome
MDAVAVISASGKPLMPTNPVRARKLIKKGKAVIYKYRPLFTIRLTERTDGDIQTIEYCCDTGYQHIGLSIKSRKHEYVNEQRDLLPNETERHNDSRKYRRARRRRKLRHRACRRDNRHDNQICKDGYAPSIRNKRDQHISLYRSYTEILPVERAVFEMGQFDTQVLKAIEKGEPLPQGKDYQHGERYGYATLREAVFARDDYTCICCGKNAFKDKRILCIHHLGFRIGDRTNRLANLATVCTKCHTPKNHQPKGKLYNLKPELKDFKGATFMTMVRWDMLDKLKVVSKDIQVDVTYGAATKEARRDLKIKKSHANDAYCMGSFHPSHRTDLKRYEKCRRNNRVLSKFYDATYIDIRDGKKKKANALGCNRTKRRESRRSEKNERIYRGKKVSKGRIVLRTKRAVIRPGDIVYVGKKKYIVASSKNLGKQLKLADGSLLTTSKVTKIIHCGGWKTVTL

SEQ ID NO: 20354 - protein, 514 aa, Nocardiopsis sp.; identical to SEQ ID NO: 6273

SEQ ID NO: 20355 - protein, 470 aa, unidentified; identical to SEQ ID NO: 2949
  REGION 1..470: note = Human gut metagenome

SEQ ID NO: 20356 - protein, 415 aa, unidentified
  REGION 1..415: note = Human gut metagenome
VLGQDGHPLMPTCRHGKVKRMLKSRMAKVVKKCPFTIQLQYESTTHTQKINLGIDAGSKTIGVSATTESKVLYESEVVLRNDIVELLSGRRALRRSRRNRKTRYRKPRLDNRRRPDGWLAPSIRQKIKTHVTVVENVMKILPVTKIIVETASFDIQKIKNPEIEGAEYQYGEQLDFWNVREYVLFRDGHTCQCCKGKSKDNILNVHHIESRKTGGNAPNNLITLCETCHKAYHKGVITLPKEIHRGMRFRDAAFMGIMRWAFYDRLKELYTPFGVEVINTYGYITKNTRIEHGLPKEHYVDARCISGNPAAKPLGHYYFQKKVRCHNRQIHKNTILKGGIRKRNQAAYLVKGYRLFDKVKYQNQEYFIFGRRSSGFFDIRTLDGTKVNKGSISCKKLQLVEKSKHYLTEQRKVTT

SEQ ID NO: 20357 - protein, 502 aa, unidentified; identical to SEQ ID NO: 2616
  REGION 1..502: note = Human gut metagenome

SEQ ID NO: 20358 - protein, 450 aa, Moorena sp.; identical to SEQ ID NO: 4205

SEQ ID NO: 20359 - protein, 430 aa, Desulfobacter sp.
LSVFVLDTNKKPQNPVHPAKARLLLTEGKASVFRQFPFTIILKETVLDVASNPLRIKIDPGSRETGIAVINDDTGEIVFAMELRHRGWQIKNNLESRRAIRRSRRNRKTRYRKPRFDNRTRAKGWLPPSLKSRVHNIETWVNRLCRFCNIQAISMELVRFDMQKIQNPEISGVAYQQGELMGYEVREYLLEKWDRTCAYCGKTDIPLEIEHIVPRSKGGSNRVSNLTLACTACNRKKGNKPLEEFLSRKPGLLKRIQKQSKVPLKDAGAVNTTRWDLFRTLKKTGLPVETGSGGLTKFNRTTRGLYKTHWLDAACVGKSTPEKMFQIDKAVLIVKADGHGSRQMCRVNKFGFPRTTAKSTEKKVKGFQTGDIVKAVVTSGKKVGTYIGRVAVRKSGSFNIKTVDKTVQGISWKYCRLLHASDGYSYNTTC

SEQ ID NO: 20360 - protein, 423 aa, unidentified; identical to SEQ ID NO: 3951
  REGION 1..423: note = Human gut metagenome

SEQ ID NO: 20361 - protein, 426 aa, unidentified
  REGION 1..426: note = Human metagenome
MVFVLDKSKKPLDMISHAKARILLKNRLAVVHKIYPFTIRLKDNSCVGNDKTYTVKFDPGSKHTGVAITDNKDSVVMLAEIEHRGHLIKKDLTSRRMIRRHRRNRKTRYREARFQNRTKPEDWLAPSVKSRANNVINFIKKYKKILNINKVLIERVSFDVAQMTSDTKLWGVAYQQGPLYQTKLKSYLFKKCNGRCVYCGNKAEEIEHIIPKSKGGTNSPYNLVIACKKCNKLKGKSSLKEFGELMNKDYSHLEPKNLPRDASIVQAARNYMVKEITKLVSDTTLHDAWLTKYNRDELGLPKEHYYDALSVGEIPSKFNFLTDKILLISAKGRGSRQMCRVDKYGFPRTSPKGSKSVKGFQTGDMVKAIVPKGLKQGEYLGKVAVRSSGKFDIQTKTKTIEGINHKYCHLIQRGDGYLYSYKEREF

SEQ ID NO: 20362 - protein, 515 aa, unidentified; identical to SEQ ID NO: 5017
  REGION 1..515: note = Human gut metagenome

SEQ ID NO: 20363 - protein, 439 aa, Lactobacillus sp.; identical to SEQ ID NO: 17347

SEQ ID NO: 20364 - protein, 446 aa, Pseudomonas sp.; identical to SEQ ID NO: 10661

SEQ ID NO: 20365 - protein, 420 aa, unidentified; identical to SEQ ID NO: 2681
  REGION 1..420: note = Human gut metagenome

SEQ ID NO: 20366 - protein, 406 aa, unidentified
  REGION 1..406: note = Human gut metagenome
MVYVQDINGKPMMPTTRHGKVRRLLKDKKAVVVNLCPFTIKLMYVTSDYKQEIVLGVDAGTKHVGLSATTKSKELYSSEVILRNDIVDLLSTRRELRRARRNRLRYRKPRFNNRIKSKRPGWTAPSVKYKIDAHIRVIDNVYSILPIFRIVIEVAQFDTQKIKNPEISGKGYQEGDQLEFWNTREYVLARDGHKCQYCKGKSKDSILNVHHIESRKTGGDSPSNLITLCETCHKEYHKGNIDLKIRRGKSLRDAAVMGIMKWRLYEELKSRYDRVFMTFGYITKHNRIKYGIEKSHTSDAFVISKNINAKRIERQYLKRLIRRHNRQIHKMKILKGGKKKNNQAPFEVFGFRLFDKVLYNNKIFFVYGRRKSGSFNIRDFNGENSKDVSRKKFKLIRGKRHLIILK

SEQ ID NO: 20367 - protein, 412 aa, unidentified; identical to SEQ ID NO: 3155
  REGION 1..412: note = Human gut metagenome

SEQ ID NO: 20368 - protein, 407 aa, unidentified; identical to SEQ ID NO: 4911
  REGION 1..407: note = Human gut metagenome

SEQ ID NO: 20369 - protein, 277 aa, unidentified
  REGION 1..277: note = Human gut metagenome
MPNKVYVINKHGRPLMPCSPAKARHLLDEGKAKVKKRTPFTIQLVYGSSGYTQEVILGVDAGSKTIGMSASTTKEELLSAEVKPRNDVVDLLSTRREFRRARRNRKTRYRKPRFDNRVRSKHKGWLAPSVEVKIQEHITSIKRVCRILPVSKVVIETAEFDLQMLKTIADGKPVPQGEDYQKGEMYGHYNVRQYVLWRDNYTCQCCGAHATKKKEVRLHVHHLESRKTGGDAPDNLITLCESCHEKLHKGVIAEGDCKSVSVVPHGMPHSWASCGRL

SEQ ID NO: 20370 - protein, 461 aa, Moorena sp.
MQRVFVLDATGEALMPCHPARARKLLKAGRAVVVHQQLFTIKLLDRVGGETQPVMLKLDPGSRVSGLVLVGHFARGAEVLWAGELTHRGPAIRDNLTQRASVRRSRRSRKTRYRKPRFLHRRRRAGWLAPSLQSRVDNILSWVRRLRGWCPVSGLAMELVRFDTQLLQNPEISGVEYQQGTLHGYEVREYVLEKWGRQCAYCDATGVALQVEHIQARTAGGSHRVSNLTLACEDCNQAKGSQDIRTFLAHDPPRLARILAQAQTPLRDAAAVNSTRWALYEALQVMELPLEGGTGGRTKYNRTQQAYPKAHWVDAACVGVSGAQVALDPAMPILQIKAMGRGSRQMCRMDKYGFPRTGPKRFKRVQGFQTGDLVVAVVLTGKKAGRYVGRVAVRASGYFNILTRQGTLVQGIPARCCRVQQRADGYHYAIGPVWCDEASLPQCLASPLLSSSGSKPEVSRS

SEQ ID NO: 20371 - protein, 462 aa, unidentified; identical to SEQ ID NO: 7335
  REGION 1..462: note = Human gut metagenome

SEQ ID NO: 20372 - protein, 424 aa, unidentified; identical to SEQ ID NO: 3434
  REGION 1..424: note = Human gut metagenome

SEQ ID NO: 20373 - protein, 408 aa, unidentified; identical to SEQ ID NO: 11651
  REGION 1..408: note = Human gut metagenome

SEQ ID NO: 20374 - protein, 461 aa, Verrucomicrobium sp.; identical to SEQ ID NO: 6401

SEQ ID NO: 20375 - protein, 270 aa, unidentified
  REGION 1..270: note = Human gut metagenome
LQLLKAIEEGKPVPQGEDYQQGEMYGHYNVRQYVLWRDSYTCCICGVHGSVRKGVPLHVHHLESRRVGGDAPDNLVTLCTACHDKLHKGIIMAADIKKRKRRSTRDATFMGIMRMTLLRRLREQLPVPVVETRGYITKATRENLLVLPKSHANDALAIAHGPQGFRAEHLPNIRQADRLYTIRPVRHHNRQLHKATILKGGVRKTNQAEKYICGFRLYDKVLYNGIECFVWGRPTSGSFLLRQLNGEKVKDGVSYKHLKLLERSQSYLVA

SEQ ID NO: 20376 - protein, 489 aa, unidentified
  REGION 1..489: note = Human gut metagenome
VQNKDGKPLMPTTRYCYVRLLLKEKKARVVCTTPFTIQLNYDTPDITQDLILGIDPGRTNIGVAVVKEDGQCVFSAHLETRNKEVPLLMKKRVAFRRNHRTLDRRRKRQRRAKAAGTTIAEGSVERLLPSYEKPVVCHYIRNKEARFNNRSRHQGWLTPTANHLLQTHINLIAKIAKFLPITKMVVELNRFAFMAMDNPNIRRWEYQQGPLYGLGSVEDAVYAQQDGHCLFCKKPIDHYHHVVPRHKGGSETLANRCGLCERHHALVHKDKAWAEKLVTRKGGMNKKYHALSVLNQIIPFLMEYLGEETPYDVYATDGKSTKGFRVAKYVPKEHYTDAYCIACAILGADTKVSAPVEPFELKQFRRHDRQACIRQMVDRKYLLGGEVVATNRRKAIEQKSDSLQEFRDAYGDAAVSQLTVRPHSPQYKDMARIMPGAMMDFDGAVGVFQGSSGRNNGTPNYYNSTKGARVLTKRCALLAKNVGMVFIPA

SEQ ID NO: 20377 - protein, 426 aa, unidentified; identical to SEQ ID NO: 3604
  REGION 1..426: note = Cyanobacteria bacterium UBA11149

SEQ ID NO: 20378 - protein, 263 aa, unidentified
  REGION 1..263: note = Human gut metagenome
MVYVVANDGQPLMPTERHGKVCRMLKSGMAKVVKKCPFTIQLQYESERNVQPVSLGVDAGSKHIGISATTKTKVLYESDVELRDDIVKLLATRRQLRRSRRSRKTRYRPVRFDNRKRKEGWLAPSIRQKIGSHLTVVANACKILPINQIIVETASFDIQKIKDPEIQGIEYQQGEQMDFWNIREYVLFRDGHICQCCKGRSKDKILNVHHIESRKTGGNAPNNLITLCETCHKGYHNGTVILPKNIKHGMHLWVSCAGHSTTH

SEQ ID NO: 20379 - protein, 451 aa, unidentified; identical to SEQ ID NO: 5203
  REGION 1..451: note = Human gut metagenome

SEQ ID NO: 20380 - protein, 460 aa, unidentified
  REGION 1..460: note = Human gut metagenome
MWTNRPQGLAYNILRKEAASVVYVLNKDGKPLMPTNRCGHVRKLLKSGKAIVVKRKPFTIKLTYDTPDCVQPISLGVDTGYTHVGVSAVTDTQEVYAAQVELLTGQKKRLDDRRKYRRTRRNRLRHRPPRFNNRRRNPGWLPPSLQHKVDSHIRIVEGIKAILPITEVHFEIGNFDTHKMKKPSIRPWQYTEGEMKGFDSVKEYVKNRDNYTCQLCGKQHKDGKGLVVHHFLYWKGRHSNNPNEMVILCDTCNSVANHEKSGPLWGWEPKQLRQLQQATFMNALAVRLMTVYPDADFMYGELTAQHREEYNIPKSHTNDAFIIAGGKSQLRFDFPFNVEQRRRNNRSLEKFYYAKYIDSRDGSKQPGKVLSSIRVKRKTPPKDSGFRQFRQSKVSKGKRYIRKKRHFYQPGDLVITPLGKAIVKGTICSGNSIQFYNFSRTFAPSKVEPIKFGKGFCFQT

SEQ ID NO: 20381 - protein, 509 aa, unidentified
  REGION 1..509: note = Human gut metagenome
VYVLNKDGKPLMPTTRCGHVRYLLKEKKARVVKTKPFTIQLLYETNDVVQPLYLGIDPGRTNIGVAVVKADGTAVFTAHLETRNKEIPKLMQGRKKARRARRTNGRRCRRQRRAKANGTISKKCVKQTTAQNGSVSKRAKKIGVIKRHLPGCEKEVLCIGIKNKEAKFSNRTRPEGWLTPTANQLLQTHINLVKKIQKFLPISDVVLEINKFAFMQLDNPNIQKWQYQQGPLYQKANLEEAVSEMQEHHCLFCKNTIDHYHHVVPQHKNGSNTIGNIVGLCAKHHDLVHKDTSWQEKLAKKKTGLNKRYGALSVLNQIIPALTKELSSLFPKHFFATNGKSTYDYRAAHGVSKDHWLDAYCIAGSVLPNDACDNNINSHVPYELKQFRRHDRRALHKENMSRVYTLNGKSVATNRHKAIKQTTDSLEEFRQRQPNDVCKLKVKEHHPEYRNPKRSFPGCVFLVGKQTHVMQGTSGSHNGKADGYYDTNGNSYSSGKCKFVAKNEGIVFA

SEQ ID NO: 20382 - protein, 409 aa, unidentified
  REGION 1..409: note = Fermentation metagenome
MVYVLNIQGKPLMPCKKAKARKLLKQGKAKVIKKEPFTIQLIFECENQVQEVTLGVDAGSKAIGLSVTTDKDELFSAEVELRNDIVDLLSTRRQNRRTRRNRLRYRKPRFLNRVGSKNKGWLAPSIENKINTHLKVISKIYEILPISKTIVEVASFNIQKIKNPDIQGKEYQQGEQLDFWNVREYVLFRDGHKCQGKKNCKNKILNVHHIESRKIGGDSPNNLITLCENCHEDYHDGRLKLNLKRGQSFRDATFMGIMRWSFYNRLKEIYPNVQMTYGYITKNTRIVNGLPKEHRIDALCISGNLSVKQSEYWYYIKQIRKHNRQIHKANILKGGKKKLNQAPYEVKGFRLFDKVKYKGQECFIFGRRSSGYFDLRKLDKVVVHRSASYKDLELIQKSNSLLIERRSAG

SEQ ID NO: 20383 - protein, 390 aa, Moorena sp.
LSDLEVENCTTHNHQLKIDPGAKTTGLAILQNDTVIWSAEITHRGFQIRDALTSRRQLRRSRRNRKTRYRKPRFLNRKRPSGWLAPSLMSRVHNILTWVKKLIRLCPIAGIFQELVRFDTQKMENPEISGTEYQQGTLCGYEIREYLLEKWNRKCAYCGATDVRLEIEHIKPKSLGGSDRVNNLAIACHDCNQTKGNQEIEQFLSGKPDILKRILSQAKRSLADAAAVNSTRWKLYNELKLTGLPVKTGSGGQTKYNRRQFSLPKTHWLDAACVGDVQSIFVEDYQILSIVAKGHGTRQICRTDKFGFPKRYCSRTKIHKGFQTGDIVKAVVTKGKKIGTYVGRVATRKTGSFNISTANGLIQGISYKYCTPIHKKDGYAYQINTLPSLS

SEQ ID NO: 20384 - protein, 414 aa, unidentified
  REGION 1..414: note = Human gut metagenome
MPCSPAKARLLLKEKKAIVKRRTPFTIQLTIATGETKQPVGLGVDAGYKHVGLSASTDKAELYASQVELRQDITDLLSARRALRRARRNRKTRYRAPRFNNRIRTKRKGWLAPSVENRINAHLSRIEAVLRLLPVTKITVETASFDMLLLKNPDIAGKEYQEGEQLGFWNVREYVLFRDGHVCQHCYGRSKDPVLNVHHLESRRTGGDSPGNLITLCETCHKALHRGEITLKTKRGHSFRAEAFMGIMRWEVLNRLKASHSELEVNNTYGYRTKHARIVNGIDKSHCADAFCIAGNLGAKRLGEFFFQKQTRRNNRQIHKLSILKGGIRKRNQAPFEAKGFRLFDKVACQGEEGFIFGRRSSGSFDVRKLDGTRISAGISCKKLRLLEKRRTYLTEIRKEEALPPLPEGRSLRA

SEQ ID NO: 20385 - protein, 294 aa, Parasutterella sp.; identical to SEQ ID NO: 18518

SEQ ID NO: 20386 - protein, 396 aa, unidentified; identical to SEQ ID NO: 4508
  REGION 1..396: note = Human gut metagenome

SEQ ID NO: 20387 - protein, 415 aa, unidentified
  REGION 1..415: note = Human gut metagenome
MVYVLDKDGHPLMPTNRHRKVRRMLKSGQAKVVKKCPFIIQLMYESEHNVQSVSLGIDAGSKRIGVSATTKTTVLYEADVELRDDIAKLLATRRQMRSSRRSRKTRYRPKRFDNRRREKGWVAPSIRQKINTHLVTVARVCENLPVSQIIVETASFDIQKIKNPEIQGVEYQRGEQMDFWNVREYVLFRDGHVCQCCKGKKKDPILNVHHIESRKSGGDAPNNLITLCETCHKGYHNGTIKLPKKIKRGMKFKDAAFMGIMRWTFYNTLKEKYEPDIPVSMTYGYLTKNTRIQHNLPKGHHIDARCISGNPDAKSDGVYYYQKKIRCHNRQIHKFNTLRKGVRKLNQSDYLVKGYRIFDKVRYQGKEYFIFGRRKKGFFDIRTLSGEKVNNGSLSIKKIAFVDTRKNYITERRTV

SEQ ID NO: 20388 - protein, 420 aa, Moorena sp.; identical to SEQ ID NO: 2647

SEQ ID NO: 20389 - protein, 427 aa, unidentified
  REGION 1..427: note = bioreactor sludge metagenome
MNNVVFVLDTDKRPMTPCSPARARQLMRQGEAAVYRRHPFTLILKEARPDAIVKALTIKIDPGAKTTGFALMDAAHRVLFAAELTHRGRAIKESLDARRALRRDRRNRKTRCRAARFDNRRRPKGWLAPSLQHRVATTMTWVGRFRRWTEIDAIALERVKFDMQKMQNPEISGVEYQQGALAGYQVREYLLEKFNRQCVYCGAKDVPLEIEHVHPKALGGSDRVSNLTLACRPCNEKKGATPVDVFLKGRPAVLAKLKAQLKKPLAAAAAVNATRNALFDALLATGLTVETGDGAQTKFNRTRQGYGKAHWIDAACCGDSGAAITLDPAMQPLRIQATGHGNRQMCGTDKYGFPIRHRQTIKRHFGFETGDLVRAVVPMGKRKGTHVGRLLCRASGSFDISTSNGRAAGISHRYCRILQRLDGYAYA

SEQ ID NO: 20390 - protein, 423 aa, Clostridium sp.; identical to SEQ ID NO: 5342

SEQ ID NO: 20391 - protein, 507 aa, unidentified
  REGION 1..507: note = Human gut metagenome
MSEYIYVLGIDGNPQMPTKRKRYVEQLLQTGRARIFRQVPFTIQLTYKNEPVLQPVTIAEDPGRSNIGMAVVSLSGELLSAAVVQTRNKEIVKLMEKRKQHRRASRNGERKARQRLAKKCHTMIKTGFLMRKLPMYGKDKRVRCNVIKNTEAKFCNRKREDGWLTPSAEHLVRTHINLIHKMQKFLPITDVAIEINRFAFLSLEDPSISGVDFQNGPLKGYDDLNAAIEDLQDGHCLMCNSPIEHRHHIVPRNMQGSNTIGNIAGLCCKCHERVHKDARFEDRLKKKKAGLNKRYAAVSVLNQAIPFICKRLEQEFGKEHVHYCSGRDTSMARRSLGYHKTKEKQLHEVDAWCIAVLALQHVPEKAPEFDHVHEILQFRRQDRSRIKAQTSRAYYHEGKKIAKNRKKAEGQREDSLQEWRKRQVERYGKEQTRKMISQLEVKESIRRYNRLDRLMPGAVFYYQGVRYVMRGQHSNGQYLQAVGMGDKDFPAKKCKIVVHNQGLVFVS

SEQ ID NO: 20392 - protein, 465 aa, unidentified
  REGION 1..465: note = Human gut metagenome
MSTCVCVLSNSGKRLMPTFRLGKVRHLLKDGKAKIVKHHPFTIQLLYDGKTNTQPIEICEDVGYNYIGISVKSQSHEYVSAQYDTLQDEKACHDSCRKYRRTRRNRLRYRKPRFDNRKRSEGWLAPSLRHKKELNVNVVKMYCAVMPITHATVEVGSFDTMLVKAIQEGKAIPEGADYQKGPRYNLATLREAVFYRDNYTCQVCGRKVADGAILHMHHMFYWKGRHGDSLNELLTVCEKCHTPANHQKGGKLYGFGENVKFADLSGAAFMNTVRWQIVNELYAAFGKDFVTVTYGAMTKEKRIALRLEKSHNNDAYAMGEFHPNCRCTFEHYEKVRRNNRTLEKFYDSRYIDIRTGEIATGKELFNGRINRSHKKDSENLHKYRGKRIRKGYRALRRKKVALNPGDLVSLNGEILTVHGTHTKKNGSVNVEFKTPSKSGKKSTSLKKLKIIKTISPMRSAWDKVS

SEQ ID NO: 20393 - protein, 477 aa, unidentified; identical to SEQ ID NO: 17885
  REGION 1..477: note = Freshwater metagenome

SEQ ID NO: 20394 - protein, 448 aa, Eubacterium sp.; identical to SEQ ID NO: 9395

SEQ ID NO: 20395 - protein, 458 aa, Scytonema sp.; identical to SEQ ID NO: 11397

SEQ ID NO: 20396 - protein, 456 aa, unidentified
  REGION 1..456: note = Human gut metagenome
MSTCVCVLSNSGKRLMPTFRLGKVRRLLKDGKAKIIKHHPFTIQLLYDSKTNTQPIEICEDVGYNYIGISVKSESHEYVSAQYDTLQDEKEHHDDCRKYRRTRRNRLHYRKPRFDNRKRDDGWLAPSLEHKKELNVNVIKMYCEVMPITHAIVEVGSFDTMLVKAIEEGKATPESADYQKGPRYKLATLREAVFYRDNYTCQVCGRKANEGAILHVHHMFYWKGRHGNSLSELITVCEKCHTPANHQKGGKLFGFGEDKEFANLSGAAFMNAVRWQIVDALHATYGKEFVTITYGAMTKEKRIILGIEKTHNNDAYAMGDYHPVHRCVFRHYQKRRRNNRVLEKFYDATYIDTRTGNKAKGKELFNGRISRNHKKDSEDLHKYRSKKVSKGRCSIRRQRYAIQPYDTVRLESKTYITSGCHNKGTRLLIPANGKSKSVAISKVQVVCHAGAWIQII

SEQ ID NO: 20397 - protein, 535 aa, unidentified
  REGION 1..535: note = Human gut metagenome
VLRPRYQYPTRWYPSREQGSGNGCLSGEENTDLEQEVSGTLSKGDHSHPGEQDFCVPAITIQGGPAMSVFVVGLNGCRLMPTSERKARLLLKHGKASVYRKVPFTIKLNYKTGSTTQSGYLGIDTGSQHIGVSVVREDGTVLHKEEIGLRDSMSKRKLMQSRASSRRGRRHRKTRYRHPKWRPKAKRVYCEIPDRKGRHWKKKEITFASKRPKGWLPPSLQSKTDHHIWWIKKLQDLLPEGYRLSIELGRFDPARLKDPEIHGELYQKGPQYDYENVRAYVLNRDRYTCQVCGKKGGKLHVHHILYRSHGATDDPQYMATVCSDCHNTENHQQGGILYQWMQKQKKFTRGLRDATFMNILRKRLIEAFPGATFTYGNITKADRERLRLPKSHGNDATAIAIVKTGIMTVKDKEPVIYIQQVRRKKRSLHEETPRKGRKEPNRTASRYDKNTKAVTVTKRKNKKISITGCLFDRVELNGKKGWISGFTDKSCYVKDENDQYIRTSPKYKQVSLSKLKILHHCGNWAIGAKRSLGKG

SEQ ID NO: 20398 - protein, 448 aa, unidentified
  REGION 1..448: note = Bioreactor metagenome
LAKGKLLRKEVHFLLVYVLNKHGRPLMPCKPSKARKLLKQGKAKIVKYEPFTIQLLYGSSGYKQKCVLGIDAGSKNIGLVVTIEDGRVIYKAQATLRQDIRENIETRRRLRRTRRHRKTRYRKPKTFTSKWGNGWLSPSIRARIDAHYNIVKKICSIMPIKEIVVEVGQFDVQAIINPDIQGEEYQNGELKGFDSVKEYVKIRDNFQCHYANLRPDIPCSGKLTVDHIIPRSRGGTDNPTNLVCCCEMHNMAKGNMSYKKFTGHEPPSIRDFRPTVFMNVLMKHLVPRLQELAPTKYTFGYVTRRRRKEWGLEKSHINDAIAIAGIKPRWQDNVWYYIRQVRKKKRSLHEEIPRKGRNKPNREAKRNNKNVKEIVTKSGKWCLWDKVKITTTGGIGFISGFTGKWVYVQDIDGNYLQLSDKYKQINPSELVLICRNNNYVTQQFISHL

SEQ ID NO: 20399 - protein, 442 aa, unidentified
  REGION 1..442: note = Human gut metagenome
MSTSVFVLDKKHRPLMPCRPARARRLLRAGRARVVKRFPFVIRLVDRTVEQSEVQPVLIKLDPGSRETGAAVVRDDEKKRHHALAFFVIKHRGGAIRDALKARSAFRRRRRSQNLRCRSPRFLNRVKPKGWLPPSLRHRVETTLSFVRRMCRYLPVSGIATELVKFDSQKLQTPEVSGIEYQQGTLFEYEVREYLLEKFGRKCVYCGAEGVPLNIDHVVPRAKGGSNRVSNLVLACVSCNQKKGARSLEDFLKGKPEVLARVRRELKTPLRDAAAVNATRWVLFNELKATGLPVETGSGALTKFNRHAFGVEKEHWLDALCVGRLNGVVTRKGLNVLEIRCMGRGSRQRTRLTKYGFPRGYLMRQKCVHGFATGDMVEANVPKGKKAGLWRGRVAVRVSGSFNIQTPKGVIQGVGWKHCRLISHNDGYGYAWLGHAPHSSPA

SEQ ID NO: 20400 - protein, 419 aa, unidentified; identical to SEQ ID NO: 3628
  REGION 1..419: note = Human gut metagenome

SEQ ID NO: 20401 - protein, 457 aa, unidentified
  REGION 1..457: note = Human gut metagenome
MDAVAVISASGKPLMPTNPVRARKLIKKGKAVIYKYRPLFTIRLTERTDGDIQTIEYCCDTEYQHIGLSIKSRKHEYVNERRDLLPNETERHNDSRKYRKARRRRKLRHRACRRDNRHDNQICKDGYAPSIRNKRDQHISLYRSYTEILPVERAVFEMGQFDTQVLKAIEKGEPLPQGKDYQHGERYGYATLREAVFARDDYTCICCGKNSFKDKRILCVHHLGFRIGDRTNRLANLATVCTKCHTPKNHQPKGKLYNLKPELKDFKGATFMTMVRWDMLDKLKVVSKDIQVDVTYGAATKEARRDLKIKKSHANDAYCMGSFHPSHRTDLKRYEKCRRNNRVLSKFYDATYIDIRDGKKKKANALGCNRTKRRESRRSEKNERIYRGEKVSKGRIVLRTKRAVIRPGDIVYVGKKKYIVASSKNLGKQLKLADGSLLTTSKVTKIIHCGGWKTVTL

SEQ ID NO: 20402 - protein, 420 aa, unidentified; identical to SEQ ID NO: 2812
  REGION 1..420: note = Human gut metagenome

SEQ ID NO: 20403 - protein, 456 aa, unidentified
  REGION 1..456: note = Human gut metagenome
MSTCVCVLSNSGERLMPTFRLGKVRRLLKDGKAKIVKHHPFTIQLLYDSKTNTQPIEICEDVGYNYIGISVKSKSHEYVSAQYDTLQDEKEHHDDCRKYRRTRRNRLRYRKPRFDNRKRSEGWLAPSLEHKKQLNIRLIERYVSVIPITRATVEVGSFDTMLLQAIQKGESKPEGVDYQKGPRYNLATLREAVFYRDNYTCQVCGRKIADGAILHMHHMFYWKGRHSNSLDELLTVCEKCHTPANHQKSGKLYGFGEDVKFANLSGAAFMNTVRWQIVNELYAAFGKPFVTFTYGAMTKEKRIALHLEKSHNNDAYAMGDYHPAHRCEFGHYQKRCRNNRVLEKFYDATYIDTRTGNKAKGKELFNGRISRNHKKDSEDLHKYRSKKVSKGRRSIRRQRYAIQPYDTVRLESKTYITSGCHNKGTRLLIPANGKSKSVAISKVQVVCHAGAWIQII

SEQ ID NO: 20404 - protein, 429 aa, unidentified
  REGION 1..429: note = Human gut metagenome
MLWKFYRLIGRTSVRPISLAYRKKELFMRTVYVLDMNGKPLMPTCRFGKVRRMLKSGEVKVVDTLPFTVQLDRPTKTHVVQSVTLGCDPGRTNIGLAAVRSDGTDLYRSHCETRNKEIVDLMDARRAARRASRRGERLARKRLAAKHETATTFPNGRKLPGCKEPIMLKDIINTEARFNNRVRPAGWLTPTATQLLRTHLNLIKRISRILPVSDIALEINKFAFMQLDEPDKNKWNIDFQHGPLYGTGGLKAAVRQLQNDTCLLCQENVIEHFHHLVPRSKRGDNTINNIAGLCQKCHEAVHKSADTAEKLSTLKKGQTKHYGGTSVLNQIIPKLVEELGKTYHENLHLTYGGQMKEFRTKHKLEKTHDTDAYCIAAGTMQTVKPNIRTDVYEIKQFRRHNRANIYHQTERAYKLNGQTVTRNRRKRTD

SEQ ID NO: 20405 - protein, 423 aa, unidentified; identical to SEQ ID NO: 3951
  REGION 1..423: note = Human gut metagenome

SEQ ID NO: 20406 - protein, 455 aa, unidentified
  REGION 1..455: note = Soda lake metagenome
MSVFVLDKQKRPLMPCSEKRARLLLQRGRALVHRRYPFTIRIKDRVGGETQPLRLGIDPGSRTTGLSLMRERAEDQRHVLCLFDLVHRGFQIREALDQRRAFRRRRRSQLRYRAPRFNNRTRREGWLAPSLQHRVDTLSAWVDRLCRLAPITSLSQELVRFDTQKLINPEISGVEYQQGTLLGYEVREYLLEKWGRECAYCGEKDTPLEIEHVVATSNGGSNRITNLTLACHACNQAKGNDALETFFARDQGLKRRLKKHTLSAQTRYQRVIREQKRPLRDASAVNATRWALFNTLKATGLAVSVGSGGLTKYNRQRLGIPKTHALDAACVGHFRTLHDGNCPTLVIKAMGRGSYQRTRLNRYGFPRGYLMREKRAKGFQTGDMVKAIVPGGKKAGTHTGRVAIRKTGSFNIQTQDGAVQGISYRHCTLVQRGDGYGYHQTITETHKGGAENAVA

SEQ ID NO: 20407 - protein, 493 aa, unidentified; identical to SEQ ID NO: 2644
  REGION 1..493: note = Human gut metagenome

SEQ ID NO: 20408 - protein, 450 aa, Moorena sp.; identical to SEQ ID NO: 2935

SEQ ID NO: 20409 - protein, 423 aa, unidentified; identical to SEQ ID NO: 2301
  REGION 1..423: note = Human gut metagenome

SEQ ID NO: 20410 - protein, 413 aa, unidentified; identical to SEQ ID NO: 3220
  REGION 1..413: note = Human gut metagenome

SEQ ID NO: 20411 - protein, 554 aa, Streptomyces sp.; identical to SEQ ID NO: 3107

SEQ ID NO: 20412 - protein, 431 aa, unidentified
  REGION 1..431: note = Human gut metagenome
MPNKVYVINKHGRPLMPCSPAKARHLLDEGKAKVKKRTPFTIQLVYGSSGYTQEVILGVDAGSKTIGMSASTTKEELLSAEVKPRNDVVDLLSTRREFRRARRNRKTRYRKPRFDNRVRSKHKGWLAPSVEVKIQEHITAIRRVCGILPVSKVVVETAEFDLQLLKAIADGKPVPQGEDYQQGEMYGHYNVRQYVLWRDGYTCQCCGAHATKKKEVRLHVHHLESRKVGGDAPDNQVTLCESCHEKLHKGLIAEKDFKKRKRKSTRDATFMGIMRKTLMQRLCSELPIPVVKTRGYITKATREKLLVLPKSHTNDALAIAQGKQGFNVGYLPGIVQINKIYTIRPVRHHNRQLHKATILKGGIRKSNQTEKYVFGYCLFDKVQFNGQDCFIWGRRTTGIFTIKTINGKMIKDGISFKKLKLVEKSTSYLIA

SEQ ID NO: 20413 - protein, 494 aa, unidentified; identical to SEQ ID NO: 8423
  REGION 1..494: note = Human gut metagenome

SEQ ID NO: 20414 - protein, 442 aa, unidentified
  REGION 1..442: note = Human gut metagenome
MSTTVFVLDKKHRPLMPCRPARARRLLRVGRARVVKRFPFVIRLVDRTVEQSEVQPVLIKLDPGSRETGAAVVRDDEKKRHHALAFFVIKHRGGAIRDALKARSAFRRRRRSQNLRCRSPRFLNRVKPKGWLPPSLRHRVETTLSFVRRMCRYLPVSGIAAELVKFDSQKLQTPEVSGIEYQQGTLFEYEVREYLLEKFGRKCVYCGAEGVPLNIDHVVPRAKGGSNRVSNLVLACMSCNQKKGARSLEDFLKGKPKVLARVRRELKTPLRDAAAVNATRWVLFNELKATGLPVETGSGALTKLNRHAFGVEKEHWLDALCVGRLNGVVTRKGLNVLEIRCMGRGSRQRTRLTKYGFPRGYLMRQKCVHGFATGDMVEANVPKGKKAGLWRGRVAVRVSGSFNIQTPKGVIQGVGWKHCRLISHNDGYGYAWLGHAPHSSPA

SEQ ID NO: 20415 - protein, 423 aa, Arthrospira sp.; identical to SEQ ID NO: 3521

SEQ ID NO: 20416 - protein, 427 aa, unidentified
  REGION 1..427: note = gut metagenome
LRVFILNKRGKPLMPCSPAKARLLLKEKKAIVVRRTPFTIQLTIATGEAKQPVSLGVDAGYKHVGLSASTEKAELYASEVELRQDVSDLLSARRALRQSRRSRNTRYRAPRFDNRIRTKRKGWLAPTVENRINVHLSRIETVLRLLPVTKITVETASFDTQLLKNPDIAGKEYQEGEQLGFWNVREYVLFRDGHVCQHCHGRSKDPVLNVHHLESRRTGGDSPGNLITLCETCHKALHRGEIKLKAKRGRSFRAETFMGIMRWGVLNRLKASHPKLEVHNTYGYRTKHARIANGIAKSHCADAFCIAGNFGAKRLGEFFFQKQTRRNNRQIHKLSILKGGIRKRNQAPFEVKGFRLFDKVACQGEEGFIFGRRSTGYFDVRKLDGTCISAGISYKKLHLLEKRRTYLTEIRKEEALPPPPEGRGLRA

SEQ ID NO: 20417 - protein, 515 aa, unidentified
  REGION 1..515: note = Human gut metagenome
VAYMSTVYVLNKDGKPLMPTTRGGHVRHLLKEQKARVVRTKPFTIQLLYETDDVVQPLYLGIDPGRTNIGIAVVKTDGAAVFTAHLETRNKEIPKLMKKRKDSRRARRTNGRRCRRQRRAKANGTISKKCVKQTTAQNGSVSKRAKEIGVIKRHLPGCEKEVLCIGIKNKEAKFNNRTRPEGWLTPTANQLLQTHINLVKKIQKFLPISDVVLEVNKFAFMQLDNPNIQKWQYQQGPLYQKANLEEAVSEMQEHHCLFCKKPIDHYHHVVPQHKNGSNTISNIVGLCTKHHDLVHKEAVWQEKLAKKKTGLNKKYGALSALNQIIPALTKELSSLFPKHFFATNGKSTYDYRTAHGVSKDHWLYAYCIACSVLANDVCDSNINSHVPHELKQFRRHDRRALHKENMSRVYTLNGKKIATNRHKATEQTADSLEEFRQNHPDDVCKLKVKEHHPEYRNPKRNFPGCVFLVGKQAHVMQGISGSHNGKADGYYDTNGNSYPSSKCKFVAKNEGIVFA

SEQ ID NO: 20418 - protein, 412 aa, unidentified; identical to SEQ ID NO: 4932
  REGION 1..412: note = Human gut metagenome

SEQ ID NO: 20419 - protein, 431 aa, unidentified
  REGION 1..431: note = Human metagenome
VLVYVLDKNGQPLMPTHNGAKVRVLLKQKRVKVVSKCPFTIKLLYESTSFTQPLTLGVDTGSKYVGSAVINDVTAEILYESQLELRDDIKSKMDRRRQFRKARRNRLRYRPVRFNNRNASKRKNRYSPTLISKFQGHAREIKFVMFVLPISSIVLEVGEFDTQLLQDPTLAYHKWGYSRGELYQQENFKQAARARDGYKCQCCGKKNCRLEVHHLLPRNRGGSDKLANLITLCTDCHHLAHSSEEQLLAFQKKFGKKARGTLRYATQMNVLRHMLQRKYPEAELTYGFITKEMRRVFALEKSHMVDACCIAGRGVEFHTENSNRYKKKCVPKGDYARTGVFGGKFIVLPKGKIAGFKRYDKILYNNNEYFVAGRMSSGYIYLIDIDNNRVQVESTKRSTMEKYMSKAKIKVSLVKKISSTKTCICTCGQKY

SEQ ID NO: 20420 - protein, 470 aa, unidentified
  REGION 1..470: note = Human gut metagenome
MSVFVVGLNGCRLMPTSERKARLLLKQGKAFVEQKVPFTIRLNYKTGSTTQLGYLGIDTGSQHIGVSVVREDGTVLHKEEIGLRDSMSKRKLLEAKASLRRGRRYRKTRYRHPKWRPKTKRVYCEVPDRKGRHWQKKKITFTSKRPKGWLPPSLQSKTDHHIRWIKKLQDLLPEGYRLSIELGRFDPARMKNPEIHGDLYQKGPQYDYENVRAYVLDRDRYTCQICKKKGGKLHVHHILYRSHGATDDPQYMVTVCSDCHSAQNHLPGGILYQWMQEQKRFSRGLRDATFMNILRKRLIRAFPEAVFTYGNVTKVDREKLKLPKSHGNDATAIALVKTGITAVKDKESVICIQQVRRKKRSLHEETPRKGRKEPNRTAARNNKNTKAVTVTKRQNKKKVLMTGCLFDRVELNGKKGWISGFTGKSCYVKDADDQYLSTSPKYKQVSLSKLRILHHCGNWIIGAKKTLGKG

SEQ ID NO: 20421 - protein, 418 aa, unidentified; identical to SEQ ID NO: 5466
  REGION 1..418: note = Human gut metagenome

SEQ ID NO: 20422 - protein, 431 aa, unidentified; identical to SEQ ID NO: 2697
  REGION 1..431: note = Human gut metagenome

SEQ ID NO: 20423 - protein, 422 aa, unidentified
  REGION 1..422: note = Human gut metagenome
LNKRGKPLMPCSPAKARLLLKEKKAIVVRRTPFTIQLTIATGESKQPVSLGVDAGYKHVGLSASTEKAELYASEVELRQDITDLLSARRALRRARRNRKTRYRAPRFDNRIRTKRKGWLAPSVENRINAHLSRIEAVLRLLPITKITVETASFDMQRLKNPDISGKEYQEGEQLGFWNVREYVLFRDGHVCRHCHGRSKDPVLNVHHLESRRTGGDSPGNLITLCETCHEALHRGEIALKTKRGHSFRAEAFMGMMRWEVLNRLKASHSELEVNNTYGYRTKHARIVNGIDKSHCADAFCIAGNLGAERLCEFFFQKQTRRNNRQIHKLSILKGGIRKRNQAPFEIKGFRLFDKVACKGEESFIFGRRSSGSFDVRKLDGTRISAGISCKKLRLLEKRRTYLTEIRKEEALPPLPEGRGLRA

SEQ ID NO: 20424 - protein, 451 aa, unidentified; identical to SEQ ID NO: 10609
  REGION 1..451: note = Human gut metagenome

SEQ ID NO: 20425 - protein, 415 aa, unidentified
  REGION 1..415: note = Human gut metagenome
MVYVVANDGQPLMPTERHGKVCRMLKSGMAKVIKKCPFTIQLQYESKRNVQPVSLGVDAGSKHIGISATTKTKVLYESDVELRDDIVKLLATRRQLRRSRRNRKTRYRPARFDNRKRKEGWLAPSIRQKMESHLTVVANVCKILPVSRIIVETASFDIQKIKNPDIQGVEYQQGEQMDFWNIREYVFFRDGHTCQCCKGRSKDKILNVHHIESRKTGGNAPNNLITLCETCHKGYHNGTVILPKNIKRGMKFKDAAFMGIMRWAFYNALKEQYEPAIPVSMTYGYLTKNIRIRHNLPKEHHIDARCISGNPDAVSDGTYYYQKKVRCHNRQIHKQTILKGGIRKSNQAGYLVKGYRLFDKVRYHGREYFIFGRRKTGFFDIRTLSGEKVNKGSISVKKLTFADTRKNYLTERRTV

SEQ ID NO: 20426 - protein, 442 aa, unidentified; identical to SEQ ID NO: 2834
  REGION 1..442: note = Human gut metagenome

SEQ ID NO: 20427 - protein, 427 aa, Scytonema sp.; identical to SEQ ID NO: 8798

SEQ ID NO: 20428 - protein, 515 aa, unidentified
  REGION 1..515: note = Human gut metagenome
MTALEEKLSKTEYIYVLGFDGKPQMPTRRKRHVLKLLKTGRARIAEDIPFTIRLTYRNATVLQPVTLAEDPGRTNIGAAVLSPLGDLLFAAVIETRNKEIKKLMADRQKSRQASRRGERKARQRLAKRYGSMVKSGMVMRKLPMYAADKFVICKFIRNTQARFCNRKRCPDWITPTVQHLVQTHLNIIRKISRYLPVTDIAFEVNRFAFMHMENPEAMGVDFQNGPLKGYGDVKEAIRTQQHGKCLMCKKPITHFHHIVPRSRGGSDTIQNLAGLCTECHTKVHTDTAFRKDFDEKKSGQLKKYGALSALNQAVPFICKKLLEEYGEEHVYFCRGLDTSLIRTAFGFEKTKKNQMHEVDAYCIGLAALEVNEVETPAFDHTFQIRQFRRQDRSIIHHQTGRSYYQGKEKVAQNRKPGFEQKTTALSQWYKEQIRIHGEKEAEKLRSQLRVEKSCRHYNDMDRFLPGAVFLYEGKRYVLSGRITNGKYLRACGQGMKNFPAAECTFIRHNAGLVFI

SEQ ID NO: 20429 - protein, 456 aa, Lactobacillus sp.; identical to SEQ ID NO: 5354

SEQ ID NO: 20430 - protein, 416 aa, unidentified
  REGION 1..416: note = Human gut metagenome
MVYVLDKNGQPLMPTDRHRKVRLMLQSGQAKVIKRCPFTIQLNYDSGHQTQEISLGIDAGSKHIGVSTTTKIKVLYEVDVELRNDIVDLLSSRRELRRGRRNRKTRYRQAKFNNRRRGNGWLAPSIRQKIGTHLTVVENICKMLPISRIMVETASFDIQKIKNPDIQGAEYQQGDQLGFWNIREYVLFRDNHTCQCCKGKSKDKILNVHHIESRKTGGNAPNNLITLCEICHTGYHKGAVQLPKTVKRGMRFKDAAFMGIMRWAFYEALKQQYEPVGTPVHNTYGYITKHTRIEHNLPKEHYVDARCISGNPDAFPSGEYYYQKKVRCHNRQIHKLTILKGGIRKQNQATYLVKGYRLFDKVSYQGKGYFVFGRRQSGFFDIRTLSGEKVNKGSLSCKKLKFIATRTYYLTERRAV

SEQ ID NO: 20431 - protein, 431 aa, unidentified
  REGION 1..431: note = Human gut metagenome
MPNKVYVINKHGRPLMPCSPAKARHLLDDKKAKVVKRMPFTIRLLYGSTKYIQPIILGVDAGSKTIGLSASTAKGEVFAAEVMPRNDVVENLSTRREFRRARRNRTTRYRKPRSDNRVRSNHERWLAPSVKVKIQEHITSIKRVCTILPISKVVIETAEFDLQLLKAIQEGKPIPEGEDYQKGEMYGSYNVCQYVLWRDNYTCICCGVRGTPKNPVRLHVHHFESRKYGGNAPDNHGTLCDDCHKKFHLGIIADVKLKTRRRQSTRDAAFMGIMRKTLMWRLRTELFIPVAETKGYITKATREKLLVLPKSHTRDALAIAQGRHGFSIKEYAYVEPANHIYTVRPVRHHNRQLHKASILKGGIRKRNQASKYVFGFRLYDKVLYQGKACFVWGRRTSGTFLLRTIDGIKVKDGVSYRNLTLLERSSNYLIA

SEQ ID NO: 20432 - protein, 423 aa, Moorena sp.
MRVFVLNKNRQPLDPCRPARARILLSTGKAKVYRRYPFTIILTEEIIDPVTHDHRIKIDPGAKTSGFAIFQGERVVWGAELIHRGFQIRDSLTSRRQLRRSRRNRKTRYRKPRFLNRTRPKGWLAPSLMSRVQNIETWTKKLIKLCPVAGISQELVKFDTQKLENPEISGIEYQQGTLYGYELREYLLEKWNRKCAYCGTTGTQLEIEHIKPKSKGGSDRVSNLAIACHPCNQAKSNQDIELFLSNKPSILKRILSKAKRPLADAACVNSTRWKLYHDLKSTGLPVEVGSGGLTKFNRCRQNLPKTHWLDAANVGKVETLIIEVTNPLIITAKGHGTRQICRTNKYGFPTRHCSRIKFHKGFQTGDIVRAVVTKGKKIGTYVGRVATRKSGSFNISTKSGLVEGISHKYCQFIHRKDGYAYTT

SEQ ID NO: 20433 - protein, 518 aa, unidentified
  REGION 1..518: note = Human gut metagenome
MANLKLIDELLEKTEYIYVLGIDGKPQMPTNRKVRVRKLFKLGMAKIVDTVPFTMRLLYKNEPVLQPITIAEDPGRTNIGTAVLTQLGDLVFSAVVETRNKSIKKLMADRKAHRQASRRGERKARQRLAKRHGSMIKAGMIMRKLPQYAADKFVTCKIIKNTEARFCNRKRMPDWLTPTVNHLVQTHINLIKKIEKYLPITDVAIEVNRFAFMQMENPNISGVNFQNGPLKGFDDVKAAIREQQHGKCLMCKNDIEHFHHIIPRSKGGSDTIQNQAGLCKKCHTKIHADVEFQAKLKDKKNGLIKKYGALSALNQAVPFICKELIKIYGAEHVHFCTGKDTSLIRSSLGYEKTKDNQMHEVDAYCICLAAIGADKAKRPNFNNVFKIKQFRRQDRSIVNYQRERTYYLEGKKIATNRKPRFEQKGDALSGWYSEQVKLKDKKYADKLTGRITVKKSTRGYNSKNRVMPGTVFYYNGKRLVLTGQLTGGKYYRTYGDTKINYPVNKCQIYKHNEGLVFV

SEQ ID NO: 20434 - protein, 406 aa, unidentified; identical to SEQ ID NO: 13187
  REGION 1..406: note = Human gut metagenome

SEQ ID NO: 20435 - protein, 406 aa, unidentified; identical to SEQ ID NO: 16733
  REGION 1..406: note = Human gut metagenome

SEQ ID NO: 20436 - protein, 483 aa, unidentified
  REGION 1..483: note = Human gut metagenome
LPITLAKRTTFIENPYGTATSSGMERVSELIGNTKRKGLLMVAVVDLFGKPLMPTNEYRARKLLKRKKAKIFCYRPFTIQLTEQKSIEVQPIELCMDTGYIHIGISAKSERHEYLGMQIDTLTDEKLKRDDKRQYRRQRRNRKRYRAPRFDNRRRKEGWIAPSLEHKKEIHIDAIQRICKVMPITDITLEMGNFDTQVLKAVEEGKPLPQGSDYQHGERYGIATLREAVFLRDGYKCQCCEKTVKDGAILHVHHIKYRSQGGTNRMSNLITVCDKCHTQKNHKPGGKLWNWKPKLAEFKGASYMTSIRWMLYNEVTALLTNRSIHITYGAKTKESRRELDIEKSHVNDAYVMGLFHPKHRTQPVYFKKKRRNNRVLERFYDAKYIDSRDGKKQSGQELFNGRISRNHRKDSENLHLYRKQKVTKGKRSIRNKHYPIQPHDILLYQKKKYETAGCHNNGTRAILLPEKKSVALRQLTMYQYAGG

SEQ ID NO: 20437 - protein, 466 aa, unidentified
  REGION 1..466: note = Human gut metagenome
MSTCACVFSKSGKRLMPTIRLGKVRHLLKDGKAEIIKHHPFTIQLLYDSETNIQPIEICEDVGYNYIGISVKSQSHEYVSVQYDTLQDEKDCHDSCRKMRRIRRNRLRCRKPRFDNRKRNKDWLAPSLEHKKELNVNVIKMYCEVVPITHVTVEVGSFDTMLVKAIQEGKAIPEGADYQKGPRYNLATLREAVFYRDNYTCKVCGRKAKNDSAILHVHHMFYWKGRHGNSLNELLTVCEKCHTPANHQKGSKLYGFGENIKFANLSGAAFMNTVRWQIVNELYATFGKLFVTFTYGAMTKEKRIALHLEKSHNNDAYAMGNFHPVDRCAFEHYKKVKRNNRILEKFHDSQYIDIRTGKVANGRSLFNGRINRSHKKDSENLHKYRGKRTRKGYRALRRKKVALNPGDLVSLNGEILVVHSTHAGKNGYVGVEFKTPSKSGKKSVSLKKLKIVKTSNSMHSAWTKVS

SEQ ID NO: 20438 - protein, 440 aa, Moorena sp.; identical to SEQ ID NO: 3187

SEQ ID NO: 20439 - protein, 536 aa, unidentified; identical to SEQ ID NO: 6224
  REGION 1..536: note = Human gut metagenome

SEQ ID NO: 20440 - protein, 370 aa, unidentified
  REGION 1..370: note = Human gut metagenome
LSKVKTMRVFVFNMRGRPLMPCSQRKARLLLRENKAKIYKYHPFTIQLTYTTGETKQDCHIGIDTGSKYIGAAVRSEDKVFWKGEIELRQDIRSNLDTKRIYRRSRRNRKTRYRKPRFLNRKRRDEWLPPSLQSRINHTFHWIDTLSSLVPNPILHIEVGKFDVAKMINPEIHGVDYQHGQTYGFFDERYFVFARDNYTCQCCGKSKNKILNTHHIIYRSNGGTNRVDNLITVCTDCHTSQNHRKGGIFYQWQEQHKKVKQYKEPPFMNTLRKRIFVAYPDAEITYGSETTPKRKAMKLDKTHYNDAIVISGINEIKENPEEWLLIKQFRKKKRSLHEATARKGRKKPNRNQTRNSKNTPYYKGFYLNDK

SEQ ID NO: 20441 - protein, 413 aa, unidentified; identical to SEQ ID NO: 3587
  REGION 1..413: note = Human gut metagenome

SEQ ID NO: 20442 - protein, 407 aa, Moorena sp.
  SITE 407: note = misc_feature - Xaa can be any naturally occurring amino acid
LSNVFVLDTNKQALNPVHPGRARRLLSSGQAAVFKKYPFTIILKCAASSPHVWPLRVKLDPGSKTTGLAIVNDASGEVVFAASLIHRGHAIRERLEKRRAARRSRRQRKSRYRQSRFDNRGTKKKGWIAPSVQSRVCNVITWVKRLVRLCPITAISQELVKFDLQQMDHPEISGVNYQQGTLSGYEVREYLLDKWGRQCAYCGAKDVPLEVEHINPRSKSGDDRVCNLTLACEPCNTKKGTQDIRVFLAHQPELLAKLLAQAKSPLKDAAAVNITRWVLHAQLKAFGLPLECGSGGRTKFNRITRGLEKTHWCDAACVGASTPAEAEEVQARLSHRGSGESGSSSSLQACRHACWKDVSQSEWGIHDCHGRRDGHGYWQEVLPHAATSRRLWVHTERRGGVSSRPIX

SEQ ID NO: 20443 - protein, 427 aa, Moorena sp.; identical to SEQ ID NO: 9869

SEQ ID NO: 20444 - protein, 439 aa, unidentified
  REGION 1..439: note = metagenome
MSVFVLDKHGKPLMPCSEKRARLLLSRHRARVHRLVPFVIRLTDIRLQDVALQPLQVKLDPGSKTTGVAVVRVAEPVDIGRSVSVLFLMELIHRGRQISESLTARRAMRRRRRGQLRYRAPRFNNRTKPKGWLAPSLRHRVETTINWVARLRRWAPVTGLVSELVRFDMQVMENPDISGVEYQQGTLFGYEVREYLLEKWGRSCAYCSKKEVPLQIEHVVPKARGGSNRISNLTLACGPCNTKKGARSIEEFVKDSATLKRILAKLKAPLRDAAAVNSTRWVLLNELKKTGLPVESASGGRTKFNRSQLGIPKTHALDAVCVGKIDAVIDWRRPTLTVTCMGRGTYQRAKLNKFGFPRGYSIREKRIKGFQTGDIVLAMVPASSKKAGQYIGRVAIRKTGSFNIQAGGNVIEGISHKYCQLIQRGDGYRYHQSQTKIAN

SEQ ID NO: 20445 - protein, 443 aa, unidentified; identical to SEQ ID NO: 16421
  REGION 1..443: note = Human oral metagenome

SEQ ID NO: 20446 - protein, 390 aa, unidentified; identical to SEQ ID NO: 4490
  REGION 1..390: note = Human gut metagenome

SEQ ID NO: 20447 - protein, 512 aa, unidentified
  REGION 1..512: note = Human gut metagenome
MSTIYVLNKDGKPLMPTTRGGHVRHLLKEQKARVVRTKPFTIQLLYETDDVVQPLYLGIDPGRTNIGVAVVKADGTAVFTAHLETRNKEIPKLMKKRKDSRRARRTNGRRCRRQRRAKANDTLSTKRVKQTTAQNGSASKRAKEIGVIRRRLPGCEKDVLCIGIKNKEAKFNNRTRPEGWLTPTANQLLQTHINLVKKIQKFLPISDVVLETNKFAFMQLDNPNIQKWQYQQGPLYKKESLESAVSEMQEHHCLFCKKQIDHFHHVVPQHKNGSNTIGNIVGLCARHHDLVHKETAWQEKLAKKKTGLNKKYGALGVLNQIIPALTKELGVLFPKHFFVTTGKSTYDYRAAHGVCKDHWLDACCIACSVLPNDVCDSSINNRVPYELKQFRRHDRRALNNENMSRVYTLNDNVVATNRHKATEQESASLEEFRKEHPDDVCKLKVKEHHPTYRNMNRNYPGSVFFVDKQVHVMQGIARSKDGKATTYKDTNANLITAEGCKFVAKNSGILFV

SEQ ID NO: 20448 - protein, 512 aa, unidentified; identical to SEQ ID NO: 4049
  REGION 1..512: note = Human gut metagenome

SEQ ID NO: 20449 - protein, 417 aa, unidentified
  REGION 1..417: note = Human gut metagenome
MPCSPAKARLLLKEKKAIVKRRTPFTIQLTIATGEARQPVTLGVDSGYKHIGLSATTEKAELYASEVELRQDITDLLSARLALRRSRRSRKTRYRAPRFDNRVASKRKGWLAPSVENRIAAHMSRVEAVMRVLPVTAITVETAAFDTQLLKNPDIAGEAYQQGEQLGFWNVREYVLFRDGHVCQHCRGKYKDPILNVHHIESRRTGGDAPNNLITLCETCHKAFHRGEIKLKVKRGKSFKAETFMGIMRWTLFERLKKAHPELRVRNTYGYLTKHKRISHGIAKSHCADAYCIADNLGAKRLEGFFFQKQTRKHNRQIHKLSILKGGLRKKNQAPYEVKGFRLFDKVICKGEEAFIFGRRTSGSFDVRRLDGTRISAGISCKKLRLLEPRTTYLTEFRKEAALPHLHECRGFRAEFL

SEQ ID NO: 20450 - protein, 456 aa, Halomonas sp.; identical to SEQ ID NO: 6593

SEQ ID NO: 20451 - protein, 443 aa, Anoxybacillus sp.; identical to SEQ ID NO: 13210

SEQ ID NO: 20452 - protein, 424 aa, unidentified; identical to SEQ ID NO: 3434
  REGION 1..424: note = Human gut metagenome

SEQ ID NO: 20453 - protein, 414 aa, unidentified; identical to SEQ ID NO: 4779
  REGION 1..414: note = Human gut metagenome

SEQ ID NO: 20454 - protein, 414 aa, unidentified; identical to SEQ ID NO: 4015
  REGION 1..414: note = Human gut metagenome

SEQ ID NO: 20455 - protein, 536 aa, unidentified
  REGION 1..536: note = Human gut metagenome
LTFVSIYVQRVYGRTRRFFQSAALHSGRQARGNIYPAGQTAGVLQKEVRTMAAVYVISASGKPLMPTTRCGHIRGLLNAGKARVVEREPFTIQLKYETPDVTQPLYLGIDPGRTNVGSAVVREDGECVFTAQLTTRNKDVPKLMKARKQFRMAHRRLKRRCKRQRRAKAAETLSQKGEFQRLLPGYEESILCKGIRNKEARFNNRQRPAGWLTPTANHLLLTHLNMVKKLQKLLPITDVVLEVNRFAFMAMENPSIRRWQYQQGPLYGKGSVEDAVYAQQDGHCLFCGKPIAHYHHVVPQHKNGSETLENRVGLCNEHHDLVHKDRAWDAKMKETKAGLNKKYHALSVLNQIIPALTEQLTAMFPQHAFVTTGKDTADFREDYGIAKEHHLDAYCIACSVLAEPTKVAAPTGKPHRLMQFRRHDRQVCHKENIKRVYLSEGKAVATNRHKAIEQKDDSLEEFRKTHTQQEVSALTVKDHQPVYKDMRRFMPGGVFLFNGKVHTLQRSHGRYKGMPFYYIDTDGSKNHAKGCIFLQQ

SEQ ID NO: 20456 - protein, 424 aa, unidentified; identical to SEQ ID NO: 3434
  REGION 1..424: note = Human gut metagenome

SEQ ID NO: 20457 - protein, 442 aa, unidentified
  REGION 1..442: note = Human gut metagenome
MVTVQQSTHHLPFGRVFIRRNLFMVYVISQDGKPLMPCSDPIARLLLKQGKAKVKKRDPFTIKLTYETTNYTQGLTLGVDTGSGTIGTAVSKDNGDIVYMSEVVVRNDITDKMTQRAKYRRNRRNRKTRYRKARWLNRASSIKKARFSPTMQSKLHSHVREIEYIQSILPVTEMVFETGQFDMQLMKNPSLANPKVRPWGYQKGANYGFENTKAMVLNRDNYTCQCCKGKHKDSKLEVHHIVFRSQGGSDEESNLLTLCHTCHKDLHSGKINPKLSGKVKGNLKYATQMNSIRKQLFRFYPNAIETFGYVTKANRLHLGVDKEHYYDACTIATQGNAFNVKSNLYKKKCVSDGDFQKTKGIRSEQPIVTDKICGFRKFDKVRYFGNDYFIKGRMSTGYAILMDIDGNKIDFSTMPRGYKTPKLSNCKRITARSTVMTQVKVV

SEQ ID NO: 20458 - protein, 470 aa, unidentified; identical to SEQ ID NO: 2825
  REGION 1..470: note = Human gut metagenome

SEQ ID NO: 20459 - protein, 470 aa, unidentified; identical to SEQ ID NO: 2825
  REGION 1..470: note = Human gut metagenome

SEQ ID NO: 20460 - protein, 417 aa, unidentified
  REGION 1..417: note = Human oral metagenome
MFVYVISKDGQPLMPTTRFGKVRRLLRDKKAKVIRSCPFTIKLLYEPESLVVQGVVLGQDTGSKYIGTACVVGDRVIYQSEIALRDDIKKKMDDRRASRTSRRYRKTRYRKPRFLNRANSTKKDRLSPSVKSKVQSHIDEIEFCKKILPISKIVLEVSQFDTHLMKNPSLIFEKVKHWGYQEGFNYGYSSRREAVLHRDNYTCQCCGKKHVRLEVHHIIFRCMGGTDDEKNLITLCEKCHKLIHDGVLILTKKPRKLNLKYATQMSIIRSQLLKIYPDAIETFGFVTKENRNNLNLSKGHFIDACVIASGGKKFKQLNWLFKKKRVAKQNRKLCNGVRGEKKLPTGKILGFKKFDKVKYLGEICFIKGRRTSGGFVLMDIDNNAIDFRDRGGRQNPSYKLLERLNTRKSILCISQNF

SEQ ID NO: 20461 - protein, 439 aa, unidentified
  REGION 1..439: note = Human metagenome
MVFVLDRSKKPLDMISHAKARILLKNRLAVVHKVYPFTIRLKDNSCVSNNRTYTVKLDPGSRTTGVAIVDDKNQVVMLAEIEHRGHLIKKDLDSRRAVRRSRRSRKTRYRPARFLNRTRPKGWLAPSVKSRADNVINFIKKYKKLININKIMIENVSFDTAQMSSDTKLWGNDYQQGNLYNKNLREFVFSKTKGRCSYCEEKATEIDHIIPRSNGGTNSSYNLTPACRPCNEKKSNLSLKEFGKLMNKDYSQLEPKKLSKDAAIVQSARNYMIKEITKLVSNTTSYDAWLTKYNRDRLDLSKQHYYDALSVGNIENFRFLTDKVLQISAKGRGSRQMCRMDKFGFPRTKPKGSKLVKGFQTGDMVKAIVPKGLKKGEYLGKVAVRFSGYFNIQTKTQVIQDIGYKYCRLIQRSDGYSYNYKECDSLSAIHNRVSIADFR

SEQ ID NO: 20462 - protein, 420 aa, unidentified
  REGION 1..420: note = Human gut metagenome
MVYILNKHNEPMMPCSERKARLLLKQGRAVIYRKDVFTIKLINGSYGYKQHITMGIDCGSKHIGISATTNKKELFSANAELRNDIVKLLSDRKSLRRNRRYRKTRYRKPRFDNRRIKEGWLAPSIRQKIDSHVRIVSLIHKLLPVKQVNVEVAAFDIQKIKNPYIKSSEYQMGEQLDSYNVREYVLFRDNHICQHCKGKSKDDVLQVHHIESRKTGGNAPNNLVTLCKTCHEKYHSGEITLNVNRGKSFRDASVMSTMRWFLYEELKSRFSNVNITYGYITKYKRIKLGLSKEHYNDAYCITGNLNTSRLCNHHLIRFIPRHSRILHVQTFSKGGNRRSASAPYWLNGGKPSKVGIKFTMFDKVKFNSVVCFISGSSNGFASLRDINWNKVHGCKTTVTVNKLALVSRRRGSMLFGELCG

SEQ ID NO: 20463 - protein, 427 aa, Nostoc sp.
MSKVFVLDTEKRPLDPIHPAQARQLLGNKKAAVFRRFPFTIILKESRADASVSDLRIKLDPGAKITGIALVNDSTGEVVFAADLKHRGFAIRDALISRRQLRRSRRNRKTRYRKPRFLNRIRPEGWLAPSLMSRVHNVETWVNRLRKFAPITAISTELVKFDMQLMRNPKIEGKEYQQGTLAGYETREFLLEKWNRQCAYCGIKDIPLQIEHIHPRSKGGSNSITNLTLSCEKCNVKKGTKDIKDFLKKDPTRLQKILVQAKKPLADAAAVNATRYKLLEVLKSTDLPVECGSGGLTKFNRTNQQLQKTHWLDAACVGQSTPILIIKGIKPLLITANGHGTRQMCRTDKFGFPNRYVPKLKFIKGFQTGDIVKAVVTNGKKIGEYIGRVAVRSTGSFNISAQRGLIQGINYKFCKSIHKKDGYSYSS

SEQ ID NO: 20464 - protein, 515 aa, unidentified
  REGION 1..515: note = Human gut metagenome
MTALEEKLSKTEYIYVLGFDGKPQMPTRRKRHVLKLLKTGRARIAEDIPFTIRLTYRNSPVLQPVTLAEDPGRTNIGAAVLSPLGGLLFAAVIETRNKEIKKLMADRQKSRQASRRGERKARQRLAKRYGSMVKSGMVMRKLPMYAADKFVTCKFIRNTQARFCNRKRCPDWITPTVQHLVQTHLNIIRKISRYLPVTDIAFEVNRFAFMHMENPKAMGVDFQNGPLKGYDDVKEAICTQQHGKCLMCKKPISHFHHIVPRSRGGSDTIQNLAGLCPECHTKVHTDTTFRKDFDRKKSGQLKKYGALSALNQAVPFICKKLLEEYGEEHVHFCGGLDTSLIRTALGFEKTKKNQMHEVDAYCIGLAALEVNEVETPAFDHTFQIRQFRRQDRSIIHHQTGRSYYQGKEKVAQNRKPGFEQKTTALSQWYEEQVRIHGEKEAEKLRSQLRVEKSCRHYNDMDRFLPGAVFLYEGKRYVLSGRITNGKYLRACGQGMKNFPAAECTFIRHNAGLVFI

SEQ ID NO: 20465 - protein, 427 aa, Moorena sp.
MSNYAFVLDSHKKPLQPCHPSVARKLLTNGRSAVFRRYPFTIILKEEKTNIGNHPIELKIDPGSKTTGIALVCNSKVIWGTELTHRGFQIKDKLQSRANCRRGRRNRNTRYRKPRFLDPSRAQDTRTKGWLAPSLQHRVLTTLTWVKRLCKYAPIKSFAQELVRFDTQKIANPEITGTEYQQGTLLGYEVREYLLEKWGRSCTYCSKENTPLEVEHIVPRASRGSNRISNLCLACHSCNTRKGVRSIEDFLKKKPELLDRIKKQAKAPLRDAAAVNSTRCALYHQLKITGLPITVASGGKTKYNRIRLGLPKTHWLDAACVGEVVSLKVLTKKPLLIKARGQGGRQKCAVNKYGYPTRHNPLKPIMGWQTGDIARFNGVIGRLTTRSNGRFYITTTSKRVVNIRPKELDLIKAINRKDGYEYGLTNL

SEQ ID NO: 20466 - protein, 451 aa, unidentified
  REGION 1..451: note = Human gut metagenome
VLHARNLSITLAKVSYGLYDAGLPQKIIQKERSTYMVYVLSQNGQPLMPTIRHGKVRRLLKEGKANVVKKCPFTIRLTYPSGDQTQEISLGIDSGSKYIGISATTQKKVLYEAEVELRNDISKLLAARRQNRRSRRSRKTRYRKPRFDNRKRKEGWLAPSVQQKVDCHLKVVEDVCKLLPVTRIIAEVASFDIQKIKDPKIHGTDYQQGDQLGFWNVREYVLFRDGHTCQCCKGKSKDKILNVHHIESRQTGGNAPNNLITLCETCHKGYHKGQVKLPKKIKRGMTFKDAAFMGIMRWAFYDRLKEIYLPLGIDVSLTYGYLTKNTRIAHQLPKTHYLDARCISGHPDAISDGIYYHQKKIRCHNRQLHKANTLKGGIRKRNQAEYLVHGFRLFDKVRYQGKDYFIFGRRKSGYFDIRDLNGEKINKGSISYKKLRLVETRRSYLTERRLA

SEQ ID NO: 20467 - protein, 512 aa, unidentified
  REGION 1..512: note = Human gut metagenome
MSTVYVLNKDGKPLMPTTRGGHVRHLLKEQKARVVRAKPFTIQLLYETNDVVQPLYLGIDPGRTNIGVAVVKANGTAVFTAHLETRNKEIPKLMQDRKKARRARRTNGRRCRRQRRAKANGTISKKCVKQTTAQNGSVSKRAKDIGVIKRRLPGCEKDVLCIGIKNKETKFTNRTRPEGWLTPTANQLLQTHINLVKKIQKFLPISDVVLEVNKFAFMRLNNPNIQKWQYQQGPLYKKESLESAVSEMQEHHCLFCKKPIDHYHHVVPQHKNGSNTIGNIVGLCAKHHDLVHKDSAWEKKLAKKSTGLYKKYGALGVLNQIIPTLTNELSSLFPKHSFVTNGKSTYDYRAAHGVSKDHWLDAYCIACSVLPSNVCDSNINNHMPYVLKQFRRHDRRVLNNENMNRVYTLNNKAVAINRHKAKDQKTVSLEEFRKEHPDDVCKLKVKEHHPTYRNMNRNFPGSVFLVGKQIHVMQGIASSKDGKATKYNDTSATAIAAGKCKFVAKNTGILFV

SEQ ID NO: 20468 - protein, 321 aa, unidentified
  REGION 1..321: note = Human gut metagenome
MSTVYVLNKNGKPLMPTTRCGHVRRLLKEQKARAVASKPFTIQLLYETDDVVQPLYLGIDPGRTNIGVAVVKTDGTAVFTAHLETRNKEIPKLMKKRKDSRRARRTNGRRCRRQRRAKANGTLSKKCVKQTTAQNGSVSKRAKKIGVIKRHLPGCEKEALCIGIKNKEAKFNNRTRPEGWLTPTANQLLQTHINLVKKIQKFLPISDVVLEVNKFAFMRLDNPNIQKWQYQQGPLYQKASLEEAVSEMQEHHCLFCKNTIDHYHHVVPQHKNGSNTIDNIVGLCTKHHDLVHKETAWQEKLAKKKTGLNKKYGALSVSLQV

SEQ ID NO: 20469 - protein, 450 aa, Moorena sp.; identical to SEQ ID NO: 2935

SEQ ID NO: 20470 - protein, 414 aa, unidentified
  REGION 1..414: note = Human gut metagenome
MPCSPAKARLLLKEKKAIVVRRTPFTIQLTIATGETKQPVSLGVDAGYKHVGLSASTEKAELYASEVELRQDITDLLSARRALRQSRRNRKTRYRAPRFDNRIRTKRKGWLAPSVENRINAHLSRIEAVLRLLPVTKITVETASFDLQLLKNPDISGKEYQEGEQLGFWNIREYVLCRDGHVCQHCYGRSKDPVLNVHHLESRRTGGDSPGNLITLCETCHKALHRGELTLKAKRGQSFRAEAFMGIMRWEVLNRLKASHPELEVNNTYGYRTKHARISNGIAKSHCADAFCIAGNLGAKRLGEFFFQKQTRRNNRQIHKLSVLKHGLRKRNQVPFEVNGFRLFDKVACKGEEGFIFGRRSSGYFDVRKLDGTRISAGISYKKLHLLEKRQTYITEIRKEEALPPLPEGRGLRA

SEQ ID NO: 20471 - protein, 424 aa, Anabaena sp.; identical to SEQ ID NO: 9570

SEQ ID NO: 20472 - protein, 502 aa, unidentified; identical to SEQ ID NO: 16429
  REGION 1..502: note = Human gut metagenome

SEQ ID NO: 20473 - protein, 483 aa, unidentified
  REGION 1..483: note = IscB polypeptide
MDNIVKANITPEMGDDPYGSLGNYMVFVISSDKKPLDPCNPARARKLLNQGKASVFKQYPFTIILKSRWSFVSKTSDYRLKIDPGSKVAGFAIVSAVSNKVIWSAEIQHRGSIIKRLLEARRGIRRSRRNRKTRYRKARFMNRRRQGQFSPNISIDEVKQIKGKGWLPPSLCSRMYNVETWVRRLVKLCPIKTISYELTKFDTQRMQNPDISGIKYQQGELAGYDVREYLLEKYERKCVYCGAKDVPLEVEHVIPKDKDGSDRVSNLVISCRKCNMRKANKSIEEFLKSKPEQLAKIKRQLKEPLKDTASMNATRWALFNNLKALGFPIEIGTGATTKYNRSKLDLPKEHWIDAACVGLSTPDNLDVGNIKPLYIKAVGYGSRQMCDVYGSSCHGQKSESGKVKMPGYPRSKAKSLKCYGGIQTGDIVKAIVLSGKEKGTHIGKVAIRSTGDFHVINKTGDHDHIHRRFCELIQHADGYSYNY

SEQ ID NO: 20474 - protein, 372 aa, unidentified; identical to SEQ ID NO: 9123
  REGION 1..372: note = Human gut metagenome

SEQ ID NO: 20475 - protein, 420 aa, unidentified; identical to SEQ ID NO: 15458
  REGION 1..420: note = Human gut metagenome

SEQ ID NO: 20476 - protein, 425 aa, unidentified; identical to SEQ ID NO: 3148
  REGION 1..425: note = Human gut metagenome

SEQ ID NO: 20477 - protein, 428 aa, unidentified; identical to SEQ ID NO: 7211
  REGION 1..428: note = Human gut metagenome

SEQ ID NO: 20478 - protein, 456 aa, Moorena sp.; identical to SEQ ID NO: 9034

SEQ ID NO: 20479 - protein, 408 aa, Beggiatoa sp.; identical to SEQ ID NO: 14362

SEQ ID NO: 20480 - protein, 457 aa, unidentified
  REGION 1..457: note = Human gut metagenome
VWLYQAVYNHGEGFLPSSEERTAFYWLLIYRKEHGIMQYVYVLNKHGEPLMPCSPGKARLLLKQQKACVVKRTPFTIKLLYGSAGYKQPITLGVDAGSKHVGLSASTEKRELYCEEFTPRNDVVDLLSTRKQNRRSRRNRKTRYRAPRFDNRVHSKRKGWLAPSVEVKIQEHITVIKRIRRILPITLVRVETAEFDTQRLKAMLKGKPLPVGTDYQLGEMYDEYNVRQYVLKRDNYTCQCCGAHPTEKKPVRLHVHHLESRHVGGNAPNNLITLCVACHKALHEGKITLDKGKKRGKPLRDAAFMGIMRNTLLARLKDELNIPVKQTYGYITKLLREKNKIPKSHVNDARCIAKAPNAKPCDTMLYTRALRHHNRQIHKAKILNGGIRKKNQAPYLVKGFRLWDKVRYNGEECFITGRRSSGYFALKKYDGTVISNSASYKKLMLLEAATNYITERS

SEQ ID NO: 20481 - protein, 464 aa, unidentified; identical to SEQ ID NO: 6627
  REGION 1..464: note = Human gut metagenome

SEQ ID NO: 20482 - protein, 390 aa, unidentified; identical to SEQ ID NO: 4490
  REGION 1..390: note = Human gut metagenome

SEQ ID NO: 20483 - protein, 483 aa, unidentified
  REGION 1..483: note = Human gut metagenome
MKVYVIGLNGIGLAPTTPRKARLLLKNGRAKIAFRQPFTIQLTYKTGCTHPKEMVIGIDTGSQHIGAGIISKETEQVVSKEEYELRSSMEKRSLLETRKAYRRGRRYRKVRYRHPKFKPATRRVYVEKPITQNKHQTHWKKQTNTFDSARPEGWLPPSIQSKLDHHIRIISRYQNALPKDAQLRIEVGRFDVQHMENPQIRGEMYQKGAMYEYENKKAFVFSRDGYTCKCCKCKAGSKRKDGTTVKLVVHHVDFRSQGASDNPNRLVTVCDRCHTTAAHKPGGILYDWMLKEKKFTRGYRDTSIMNILRRRLWQAFPDAAFTYGNITAADRKILHIDKTHGNDAVAITAHGMDRITDIPNTTYYRQMRKQKRSLHEATPRKGRKEPNRTAKRNAKNTCVVKGIYLNDKVKAFGQTGWVTGFSGTSSVYIKNREGEYITVPGKNHKMVPLAELSVRTHCNNWAVSDIKTISNRRQENCDAEMCM

SEQ ID NO: 20484 - protein, 470 aa, unidentified; identical to SEQ ID NO: 2825
  REGION 1..470: note = Human gut metagenome

SEQ ID NO: 20485 - protein, 424 aa, unidentified; identical to SEQ ID NO: 11636
  REGION 1..424: note = Human gut metagenome

SEQ ID NO: 20486 - protein, 360 aa, unidentified
  REGION 1..360: note = Human gut metagenome
LSKVKTMRVFVFNMRGRPLMPCSQRKARLLLRENKAMIYKYHPFTIQLTYTTGETKQDCHIGIDTGSKYIGAAVRSEDKVFWKGEIELRQDIRSNLDTKRIYRRSRRNRKTRYRKPRFLNRKRRDEWLPPSLQSRINHTFHWIDTLSSLVPNPILHIEVGKFDVAKMINPEIHGVDYQHGQTYGFFDERYFVFARDNYTCQCCGKSKNKILNTHHIIYRSNGGTNRVDNLITVCTDCHTSQNHRKGGIFYQWQEQHKKVKQYKEPPFMNTLRKRIFVAYPDAEITYGSETTPKRKAMKLDKTHYNDAIVISGINEIKENPEEWLLIKQFRKKKRSLHEATARKGRKKPNRNQTRNSKNTP

SEQ ID NO: 20487 - protein, 460 aa, unidentified
  REGION 1..460: note = Human gut metagenome
MVAVVDLFGKPLMPTNEYRARKLLKRKKAKIFGYRPFTIQLTERKDTEIQPIELCMDTGYIHIGISAKSERHEYLGMQIDTLTDEKLKHDDKRQYRRQRRNRKRYRAPRFDNRRRKEGWIAPSLEHKKEIHIDAIQRICKVMPITDLTLEMGNFDTQVLKAVEEGKTLPQGSDYQHGERYGIATLREAVFLRDGYKCQCCEKTVKDGAILHVHHIKYRSQGGTNRMSNLITVCDKCHTPQNHKPGGKLWNWKTKLAEFKGASYMTSIRWMLYNEVTALLPNSSVHITYGAKTKESRRELDIEKSHVNDAYVMGLFHPKHRTQPVYFKKKRRNNRVLEKFYDAKYIDGRDGKKRSGQELFNGRISRNHKKDSENLHLYRKQKVTKGKRSIRNRHYPIQPHDILLYQKNKYETAGCHNNGTRAILLPEKKSVALRQLTIYQYAGGYYRVPYESNKKEERTGS

SEQ ID NO: 20488 - protein, 431 aa, Moorena sp.
MSYVFVIDQEKRPLDPVHPGRARKLLSSGKAAVYRRFPFVLILKHPVSEAHPQPLRLKIDPGSKTTGLAVLNDTSGQVLWAAELVHRGEEVHQALQKRAGVRRGRRSRHTRYRAARFSNRRRKRGWLAPSLCSRMQNVQTWTRRLMRWCPLGAISYEAVRFDTQAIQNPEIKGVAYQHGTLAGLEVKEYLLLKWRHKCVYCQKGDIPLEVEHIVPKRRGGSDRITNLTLACEACNQQKGSQTAQAFGFPHLQAQALQPLKDAAAVNSTRWALYERLKATGLPIEVSTGGQTKWNRKQRGIPKSHWLDAVCVGPSTPERVQWQHVIPLLITARGRQCRQLCNVDGWGFPRSRPKGPSKVFGFQTGDMVQAVVTRGKRMGTYVGRVAIKTDGYFKITGTHGIVEGIHARYCSPLHRVDGYEYQKGSAALPPQM

SEQ ID NO: 20489 - protein, 405 aa, unidentified
  REGION 1..405: note = metagenome
VSVVREDGTVLHKEEIGLRDSMSKRKLLEAKASLRRGRRYRKTRYRHPKWRPKTKRVYCEVPDRKGRHWQKKKITFTSKRPKGWLPPSLQSKTDHHIRWIKKLQDLLPEGYRLSIELGRFDPARMKNPEIHGDLYQKGPQYDYENVRAYVLDRDRYTCQICKKKGGKLHVHHILYRSHGATDDPQYMVTVCSDCHSAQNHLPGGILYQWMQEQKRFSRGLRDATFMNILRKRLIRAFPEAVFTYGNVTKVDREKLKLPKSHGNDATAIALVKTGITAVKDKESVICIQQVRRKKRSLHEETPRKGRKEPNRTAARNNKNTKAVTVTKRQNKKKVSMTGCLFDRVELNGKKGWISGFTGKSCYVKDADDQYLSTSPKYKQVSLSKLRILHHCGNWIIGAKKTLGNG

SEQ ID NO: 20490 - protein, 411 aa, unidentified
  REGION 1..411: note = Human gut metagenome
MVYVQDIDGKPMMPTTRHGKVRRLLKDNKAVVVNTCPFTIKLTYKTSDYKQEIVLGVDAGTKHVGLSATTKSKELYSGEVILRNDIVELLSTRRESRRTRRNRLRYRKPRFENRVKSKRLGWVAPSVRHRIDAHIRIINNVCSILPVSRVIVEVAQFDTQKIKNPEISGKEYQEGDQLGFWNVREYVLARDGHKCQHCKGKSKDPILNIHHIESRKTGGDSPSNLITLCETCHKEFHKGNIKLKVKRGKSLRDAAVMGIMKWRLYDKLKSLYPNVRMTFGYITKHDRINHGIEKSHVSDAFVISRNFDSERLGYYYKLKLVRRHNRQIHKMKIPKGGKKRMNQSPFKVFGFKLFDKVMFQGEERFIYARRLSGQFKIKDIDGNNERNISYKKLRYVSHGLISVSYTHLRAH

SEQ ID NO: 20491 - protein, 426 aa, Parasutterella sp.; identical to SEQ ID NO: 3045

SEQ ID NO: 20492 - protein, 419 aa, Geobacillus sp.; identical to SEQ ID NO: 2623

SEQ ID NO: 20493 - protein, 420 aa, Petrotoga sp.; identical to SEQ ID NO: 11467

SEQ ID NO: 20494 - protein, 465 aa, unidentified
  REGION 1..465: note = Human gut metagenome
MSTCVCVLSNNGERLMPTIRLGRVRHLLKDGKAKIIKHHPFTIQLLYDSKTNTQPIEICEDVGYNYIGISVKSQSHEYVSAQYDTLQDEKACHDSCRKLRRTRRNRLRYRKPRFDNRKRGEGWLAPSLKHKKELNVNVVKMYCTVMPITHATVEVGSFDTMLVKAIQEGKVIPEGADYQKGPRYNLATLREAVFYRDNYVCKICGRKATEGAILHMHHMFYWKGRHGNSLNELLTVCEKCHTPANHQKSGKLYGFGEKIKFADLSGAAFMNTVRWQIVNELYVAFGKPFVTITYGAMTKEKRIALQLEKSHNNDAYAMGEFHPNLRCMFEHYEKARRNNRILEKFYDSRYIDIRTGEIATGKELFNGRINRNHKKDSENLHKYRGKRTYAGHRALLRKKVNLNPCDLVSLNGENLIVHSTHTKKNGAVNVEFETPAKSGQKSASLKKLKIVKAANSIHPAWKKIS

SEQ ID NO: 20495 - protein, 493 aa, unidentified; identical to SEQ ID NO: 3154
  REGION 1..493: note = Human gut metagenome

SEQ ID NO: 20496 - protein, 442 aa, Lactobacillus sp.; identical to SEQ ID NO: 7095

SEQ ID NO: 20497 - protein, 461 aa, Parasutterella sp.; identical to SEQ ID NO: 3646

SEQ ID NO: 20498 - protein, 416 aa, unidentified
  REGION 1..416: note = Human gut metagenome
MPCSPAKARHLLDAGKAKVKKRTPFTIQLVYGSSGYTQEVILGVDAGSKTIGMSASTTKEELLSAEVKPRNDVVDLLSTRREFRRARRNRKTRYRKPRFDNRVRSRHKGWLAPSEEVKIQEHITAIKMVCRILPVSKVVVETAEFDLQLLKAIADGKPVPQGEDYQKGEMYGHYNVRQYVLWRDGYTCQCCGAHTTKKKEVRLHVHHLESRKTGGDAPGNLVTLCDSCHEKLHKGLITEDDFKKRKRRSTRDATFMGIMRKTLMQRLCSELPIPVIETRGYITKATREKLLVLPKSHTNDALAIAQGKHGFNVGYLPGIAQIDKIYTIRPVRHHNRQLHKATILKGGIRKSNQAEKYVFGYRLFDKVQFNGQDCFIWGRRTTGIFTIKTINGKMIKDGISFKKLKPVEKSTSYLIA

SEQ ID NO: 20499 - protein, 512 aa, unidentified; identical to SEQ ID NO: 2792
  REGION 1..512: note = metagenome

SEQ ID NO: 20500 - protein, 440 aa, Moorena sp.; identical to SEQ ID NO: 5150

SEQ ID NO: 20501 - protein, 460 aa, unidentified; identical to SEQ ID NO: 8636
  REGION 1..460: note = Human gut metagenome

SEQ ID NO: 20502 - protein, 492 aa, unidentified; identical to SEQ ID NO: 4486
  REGION 1..492: note = Human gut metagenome

SEQ ID NO: 20503 - protein, 315 aa, unidentified
  REGION 1..315: note = Human gut metagenome
LRVFVWNKRRKPLMPCSPAKARHLLKEKKAAVVRRTPFTIQLTIATGESKQPVTLGVDAGYKHVGLSASTEKAELYASEVELRPDVSDLLSARRTLRQSRRNRKTRYRAPRFDNRIRTKRKGWLAPSVENRINAHLSRIGAILRLLPVTKITVETASFDTQLLKNPDISGKEYQEGEQLGFWNVREYVLFRDGHVCQHCHGRSKDPVLNVHHLESRRTGGDSPGNLIALCETCHKELHRGEITLKAKRGQSFRAETFMGIMRWEVLDRLKASHPKLEVQNTYGYRTKHARIVNGIAKSHCADAFCIAGNLGAERL

SEQ ID NO: 20504 - protein, 447 aa, unidentified; identical to SEQ ID NO: 8436
  REGION 1..447: note = Human gut metagenome

SEQ ID NO: 20505 - protein, 480 aa, unidentified; identical to SEQ ID NO: 16902
  REGION 1..480: note = Human gut metagenome

SEQ ID NO: 20506 - protein, 460 aa, unidentified; identical to SEQ ID NO: 3778
  REGION 1..460: note = Human gut metagenome

SEQ ID NO: 20507 - protein, 499 aa, unidentified
  REGION 1..499: note = Human gut metagenome
LMPTTRGGHVRHLLKEQKARVVRAKPFTIQLLYETNDVVQPLYLGIDPGRTNIGVAVVKANGTAVFTAHLETRNKEVPKLMQDRKKARRARRTNGRRCRRQRRAKANGTISKKCVKQDTAQSKNPSKRAKEIGIIKRRLPGYKKDVLCIGIKNKEAKYTNRTRPEGWLTPTANQLLQTHINLVRKMQKFLPISDVVLEVNKFAFMRLDNPDIQKWQYQQGPLYQKGSLENAVSEMQEHHCLFCDKPIDHYHHVVPQSENGSNTIANIVGLCAEHHNLVHKDAAWQKKLAEEKVGLNKKYGALSVLNQIIPALTNKLSVLFPKHFFVTAGKSTHDYRAAHGVSKDHWLDAYCIACSVLPSNVCDSNINNHMPYELKQFRRHDRRVLNNENMNRVYTLDNKAVAINRHKATEQEAASLEEFRKEHPNDVCKLKVKEHHPTYRNMNRNYPGSIFLVGKHVHIMQGIAGSKDGKATTYKDSNANSITASKCKFVAKNSGILFV

SEQ ID NO: 20508 - protein, 544 aa, Streptomyces sp.; identical to SEQ ID NO: 20174

SEQ ID NO: 20509 - protein, 411 aa, unidentified; identical to SEQ ID NO: 3917
  REGION 1..411: note = Human gut metagenome

SEQ ID NO: 20510 - protein, 420 aa, unidentified; identical to SEQ ID NO: 3288
  REGION 1..420: note = Human gut metagenome

SEQ ID NO: 20511 - protein, 512 aa, unidentified; identical to SEQ ID NO: 17480
  REGION 1..512: note = Human gut metagenome

SEQ ID NO: 20512 - protein, 472 aa, Moorena sp.; identical to SEQ ID NO: 2630

SEQ ID NO: 20513 - protein, 411 aa, unidentified; identical to SEQ ID NO: 3917
  REGION 1..411: note = Human gut metagenome

SEQ ID NO: 20514 - protein, 431 aa, unidentified; identical to SEQ ID NO: 8316
  REGION 1..431: note = Human oral metagenome

SEQ ID NO: 20515 - protein, 521 aa, unidentified
  REGION 1..521: note = Human gut metagenome
MKQKKQKVIVYILNKKGKPLMPTTRCGHVRKLLDSKKAVVVNSNPFTIRLKYDTPNGIQDVFAGIDSGRENIGSGASNEDGDCLYLGELKTSNKSIKIKMTERTGFRRERRRHDRQSKQRKAKKDHTEIQNGNDDICRTTISCKSVQISYPVAEESVTHKIIRGKEGKFANRHRDEGWITPSARQLVQMHMNDLKSMCKILPISHVTLERVAFDFQKLENENIKVWEYGKGKLYGYDSPEEYIHDVQDGKCLVCGKPHIDYLHHIIPRSKGGSDKVSNIAGLCYDCHYGPMGVHNCQDTQNRLPELKNEANKQYKVSLLNSVMTVLIEEMDKFCKANSIIFSICEGHDTAKVRDMYDLQKDHCFDGFAISLVGRNVESVDVIPDRIYQKQRYKKKSKNIIQKRNCREYYDGKKLVAVNRHKGTDQKADSLEEYMNTYAETHTADECKNQFESLTVKPARRTYTFHKEGRICPFHIGDKVRYEKKNKIKGNTKVDTFICEGIYFSKDENKAEVEHNKTKSKK

SEQ ID NO: 20516 - protein, 223 aa, unidentified
  REGION 1..223: note = Human gut metagenome
MVYVLDKNGQPLMPTDRHRKVRLMLQSGQAKVIKRCPFTIQLNYDSGHQTQEISLGIDAGSKHIGVSATTKIKVLYEADVELRNDIVNLLSSRREFRRGRRNRKTRYRQAKFNNRRRGNGWLAPSIRQKIGTHLTVVENICKILPISRIMVETASFDIQKIKNTDIQGAEYQQGDQLEFWNVREYVLFRDGHICQCCKGKSKDKILNVHHIESRKTGAMPRTI

SEQ ID NO: 20517 - protein, 362 aa, unidentified
  REGION 1..362: note = Human gut metagenome
VLGVDAGTKHVGLSATTKGKELYSSEVILRNDIVDLLSTRRELRRSRRNRLRYRKPRFNNRIKSKRPGWVAPSVKYKVDAHIRVIDNVCSILPVSRIVIEVAQFDTQKIKNPNISGKEYQEGDQLGFWNVREYVLARDGHKCQYCKGKSKDKILNVHHIESRKTGGDSPSNLITLCETCHDDYHKGNIDLKIKRGSSLRDAAVMGIMKWRLYEELRSKHNRVSITFGYVTKYNRINHGIEKSHVSDAFVISKNFNAIRLGCYYKVRLVRRHNRQIHKQKIQKGGIKRLNQSTFEVFGFRLFDRVMFENGYYFIFGRRKIGSFDIRDIDSKRQNNITYKKLKLSRCKRFMIQMELNKKNTDMF

SEQ ID NO: 20518 - protein, 404 aa, unidentified
  REGION 1..404: note = Human gut metagenome
MVYVINKQGQAIMPTERFGKVRRLLKNSLAHVVCRIPFTIQLDYDTTDYTQPVSLGVDAGSKHIGISATTSEKEMYAADVELRNDIVDKLSTRREQRRTRRSRLRYRKARFNNRISSKRKGWLAPSVENKIQTHLTIVEKIHKFLPITNIVVETASFDIQKINNPSISGSEYQQGEQLDFFNVREYVLFRDNHICQHCKGKSKDKVLNVHHIESRKTGGDSPKNLITLCETCHKAYHRGEFELNVKRGKSFRDAAFMGIMRWSFYDRLKNIYPNVSMTFGYITKNTRITNNLPKDHYVDARCISGNPVAKPLGYYFYQKKVRCQNRQIHKANFLKGGRKKLNQAPFLVKGFRLFDLVEYQKELYYIFGRRSSGSFDIRKLDGTKVNKGSINCKHLRLIDKKKVY

SEQ ID NO: 20519 - protein, 372 aa, unidentified
  REGION 1..372: note = Human gut metagenome
TTHTQKINLGIDAGSKTIGVSATTESKVLYESEVVLRNDIVELLSGRRALRRSRRNRKTRYRKPRFDNRRRPDGWLTPSIRQKIKTHVTVVENVMKILPVTKIIVETASFDIQKIKNPKIEGAEYQYGEQLDFWNVREYVLFRDGHTCQCCKGKSKDNILNVHHIESRKTGGNAPNNLITLCETCHKAYHKGVITLPKEIHRGMRFRDAAFMGIMRWAFYDRLKELYTPFGVEVINTYGYITKNTRIEHGLPKEHYVDARCISGNPAAKPLGHYYFQKKVRCHNRQIHKNTILKGGIRKRNQAAYLVNGYRLFDKVKYQNQEYFIFGRRSSGFFDIRTLDGTKVNKGSISCKKLQLVEKSKHYLTEQRKVTT

SEQ ID NO: 20520 - protein, 424 aa, Enterococcus sp.; identical to SEQ ID NO: 4034

SEQ ID NO: 20521 - protein, 524 aa, unidentified
  REGION 1..524: note = Human gut metagenome
MEILRIDWKDICPTGQSGLPQKESFMRPVYVLDMNGKPLMPTCRFGKVRRMLKSGEAKVVDTLPFTIQLDRPTKTHVVQSVTLGCDPGRTNIGLAAVRSDGTDLYRSHCETRNKEIVDLMDARRAARRASRRGERLARKRLAAKHETATTFPDGRKLPGYEKPIMLKDIINTEARFNNRVRPAGWLTPTATQLLRTHLNLIKRISRILPVSDIALEINKFTFMQLDEPDKNKWNIDFQHGPLYGTGGLKAAVRQLQNDTCLLCQENVIEHFHHLIPRSKRGDNTINNIAGLCQRCHEAVHKSADTAEKLSTLKKGQTKRYGGTSVLNQIVPKLVEELGKTYHEHLHLTYGWQTKEFRTKHKLEKTHDTDAYCIAAGTMQTVKPNIRTDVYEIKQFRRHNRANIHHQTERTYKLNGQTVARNRRKRTDQKTDSLAEWFENTVKQYGQQKAEHLRAGLKVRKSTRYYNSKDRVMPGAVFQYEGNRYVVTGQLSGGQYYRAYGKGNQNFPAKKIRIISLNRGLVYVA

SEQ ID NO: 20522 - protein, 430 aa, Scytonema sp.; identical to SEQ ID NO: 3555

SEQ ID NO: 20523 - protein, 413 aa, unidentified
  REGION 1..413: note = Human gut metagenome
MTKYAFVLDADGKPLSPTKETKAWFLIRKKRARLVSKYPMVIQLNKRISGDDICKDEIRCGIDDGGLHVGIALVQKCATKNKVILKGTIEQRNDVKHLMVTRKGHRKYRRYHKRYRQARFNNRASSRRKGRIAPSILQKRQATIRVVNQLNKWINVTNYWLEDVSIDIRVLTDGYRPYRWQYQISNRLDENIRKAVILRDKCRCMECGKSNCILEVHHIKPKRLNGSNTLENLITLCKSCHQKTEGNEELFMNKYFSLLKSSDNKGLNYAQHTMIGKYWLREHLSAMGLLHLTNGGDTANKRIDWDIVKTHCNDAICIADLKPDTCDVKEWTIKPIRRQSKAKTTSVLGIQHRDLVEYTLKNGETRRGYVTALYPQLTALSFQSPIQRYSKVNARKCKLLWKFNKIYWIENVI

SEQ ID NO: 20524 - protein, 425 aa, unidentified; identical to SEQ ID NO: 8847
  REGION 1..425: note = Human gut metagenome

SEQ ID NO: 20525 - protein, 364 aa, unidentified
  REGION 1..364: note = Human gut metagenome
MVYVQDINGKPMMPTTRHGKVRRLLKDKKAVVVNLCPFTIRLTYVTSDYKQEIVLGVDAGTKHVGLSATTKSKELYSSEVILRSDIVDLLSTRRELRKTRRNRLRYRKPRFDNRVKSKRSGWIAPSVKYKIDAHIRIVDNVCSILPISRIVIEVAQFDTQKIKNPNISGKEYQEGDQLGFWNVREYVLARDGHKCQYCKGKSKDKILNVHHIESRKTGGDSPYNLITLCETCHKEYHKGNIDLKIRRGKSLRDAAVMGIMKWRLYEELKSKYDNISMTFGYVTKYNRIKHGIEKSHVSDAFVISKNFNAIRLGYYYKVRLVRRHNRQIHKQKIPKGGVKRLNQSPFEVFGFRLFDRVMFENSYY

SEQ ID NO: 20526 - protein, 331 aa, unidentified
  REGION 1..331: note = Human gut metagenome
LRVFVLNKRGKPLMPCSPAKARLLLKEKKAIVKRRTPFTIQLTIATGESKQPVTLGVDAGYKHVGLSASTEKAELYASEVELRQDVSDLLSARRALRQSRRNRKTRYRAPRFNNRLRTKRKGWLAPSVENRINAHLSRIEAVLRLLPVTKITVETASFDMQLLKNPDIAGKEYQEGEQLGFWNVREYVLFRDRHVCQHCYGRSKDPVLNVHHLESRGTGGDSPGNLITLCETCHKALHRGEITLKAKRGQSFRAEAFMGIMRWEVLGRLKASHPELEVNNTYGYRTKHARIANDIAKSHCADAFCIAGNLGAERLGEFFFQKQTRRNNRQI

SEQ ID NO: 20527 - protein, 427 aa, Enterococcus sp.; identical to SEQ ID NO: 3871

SEQ ID NO: 20528 - protein, 428 aa, unidentified
  REGION 1..428: note = Human metagenome
LKVFVLNMRGQPLMPCSPAKARHLLKAGKAVVKRRTPFTIQLRIATGETKQNVTLGVDAGAKHVGLSDTTEKEEVFASEVELRQDITGLLAARLSLRRDRRHRKTRYRAPRFLNRVRSKHKGWLAPSVENRIQAHMSRIDAVCRLLPVTKIVIETASFDIQKIKDPSVEGTDYQQGDQLGFWNVREYVLFRDGHVCQHCHGYSKDKILNVHHLESRQTGGDAPNNLITLCETCHKACHAGKIKLKVKRGQSFRAEAFMGIMRWTLLDRMRKAHSGLPVENTYGYLTKNTRITLGLPKTHCVDAYCIAGNLKAVRRGVCLHQRQVRKHNRQIHKCTVLSKTLKDGTKIGYRKLNQTPHLVKNFRLFDKVRCLGQTGFIFGRRSSGYFDVRRLDGVKLSSGISYRKLTLLEKRSTYLTELRKEDGASSPV

SEQ ID NO: 20529 - protein, 512 aa, unidentified; identical to SEQ ID NO: 10560
  REGION 1..512: note = Human gut metagenome

SEQ ID NO: 20530 - protein, 406 aa, unidentified
  REGION 1..406: note = Human gut metagenome
MVYVQDIDGKPLMPTTRHGKVRRSLKANKATVVNPCPFTIQLTYESTDHKRPVTLGIDAGAKHIGFSATTEKEELFACETILRTDIVDLLSTRSQNRRTRRSRLRYRKPKFNNRVFSKKKGWVAPSVKQRIDSHLNEVNEIHKILPITKIVIEAAQFDTHKMKNPNISGIDYQNGEQLGFWNVREYVLFRDGHKCSYCKGKSKDPILNIHHIESRKTGGDSPSNLITLRETCHKEYHKGDIDLKARRGKSLCGAAIMGIMKWRLYDELKSRYSNVSMTFGYITKYNRIKYGIEKSHTSDAFVISKNFNAKRIEYQYLKRLARRHNRQIHKMKILKGGKKKDNQAPFEVFGFRLFDKVLYNNEINFIYGRRKSGNFNIRDFNGENPKDVSYKKLKLIRGKRHPIILK

SEQ ID NO: 20531 - protein, 393 aa, unidentified; identical to SEQ ID NO: 10946
  REGION 1..393: note = Human gut metagenome

SEQ ID NO: 20532 - protein, 417 aa, unidentified; identical to SEQ ID NO: 5192
  REGION 1..417: note = Human gut metagenome

SEQ ID NO: 20533 - protein, 461 aa, Parasutterella sp.; identical to SEQ ID NO: 3646

SEQ ID NO: 20534 - protein, 466 aa, unidentified; identical to SEQ ID NO: 2809
  REGION 1..466: note = Human gut metagenome

SEQ ID NO: 20535 - protein, 474 aa, Lactobacillus sp.; identical to SEQ ID NO: 16230

SEQ ID NO: 20536 - protein, 456 aa, unidentified; identical to SEQ ID NO: 6594
  REGION 1..456: note = Human gut metagenome

SEQ ID NO: 20537 - protein, 460 aa, unidentified; identical to SEQ ID NO: 7734
  REGION 1..460: note = Mouse gut metagenome

SEQ ID NO: 20538 - protein, 424 aa, unidentified; identical to SEQ ID NO: 6292
  REGION 1..424: note = Human gut metagenome

SEQ ID NO: 20539 - protein, 452 aa, unidentified
  REGION 1..452: note = Human gut metagenome
LLRQGRLIVKEVAYMSTVYVLNKNGKPLMPTTRCGRVRHLLKEQKARVVTSNPFTIQLLYETDDVVQPLYLGIDPGRTNIGVAVVKTDGTAVFTAHLETRNKEIPKLMQGRKKARRARRTNGRRCRRQRRAKANDTISKKCVKQDTAQSGSASKRAKKIGVIKRHLPGCEKGVLCIGIKNKEAKFSNRTRPEGWLTPTANQLLQTHINLVKKIRKFLPISDVVLEINKFAFMQLDNPNIQKWQYQQGPLYQKASLEEAVSEMQEHHCLFCKKPIAHYHHVVPQSENGSDTIGNIIGLCTKHHDLVHKDTAWQKKLAKKKTGLNKKYGALSVLNQIIPALTKGLGSRFQGYFYVTTGKSTYDYREVHGVSKDHWLDAYCIACSVLPNDVCDSDINNRVPYELKQFRRHDRRALHKANINRVYTLNGKSVATNRHKATEQTTDSLEEFRQRQPN

SEQ ID NO: 20540 - protein, 450 aa, unidentified
  REGION 1..450: note = Human gut metagenome
MSVAVISKTGVRLMPTSEYRARKLLDSGKAIIYGYRPFTIQLTERETGDVQPVELCVDTGYIHIGVSVKSEKHEYLGLQVDTLTDEKTKHDDRRMYRRQRRNRKRYRKPRFDNRKRETGWLAPSLEHKKEIHLQIITAVCEVYPIADIALEMGNFDTQVLKAQEEGKPLPQGTDYQHGERYGIATLREAVFTRDGYKCQCCNRGIKEGAILHVHHIQYRSQGGTNRMSNLITLCEKCHTPANHKPGGKLYGWKPKVASFKGATYMTAVRWQLYDKVKEISECGVHITYGAETKERRRSLDIGKSHVNDAFVMGRFHPKHRSTPVLYKKKRRNNRCLEKFYDAKYIDSRNGKKRSGQELFNGRISRNHKKDSEDLHRYRKKKVSRGKRTIRVQRYKIQPHDIVLFDGKKYETTGCHNKGSRAILLPEKKSKSVEKLKIYKYAGGYYPSKFA

SEQ ID NO: 20541 - protein, 424 aa, unidentified
  REGION 1..424: note = Human gut metagenome
MVYVISQKNKPLMPCSSPIARLLLKQGRAKVKKREPFTIKLTYETTNYIQNLTLGVDTGSGTIGTGVSNDNSDIVYMSEVIVRNDITDKMTQRRKYRKNRRGRKTRYRKARWLNRANSTKTDRFTPTMQSKLHSHVKEIEYIKSILPVTTMVFETGQFDTHLMKNPNLANPKVKHWGYQKGVNYGFENTKAMVLNRDNYTCQCCKGKHKDSKLEVHHIIFRSQGGSDEESNLITLCHTCHKDLHSGTINFKLKGKLKGNLKYATQMNSIRKQLFRIYPDAIETFGYVTKANRLVLGIDKEHYYDACTIATQGNIFTVKSNLYKKKCVSDGDFQKTKGIRSEQPIVTDKVCGFRKFDKVRYFGNDYFIKGRMSTGYAILMDIDGNKADFSAMPKGYKTPKMVKLKRIEARTTWMITTVEVTPNIA

SEQ ID NO: 20542 - protein, 460 aa, unidentified
  REGION 1..460: note = Human gut metagenome
ENKPVLQPITIAEDPGRSNIGMAVVSLSGELLSAAVVQTRNKEIVKLMDKRKQHRRASRNGERKARQRLAKKCHTMIKAGFLMRKLPMYGKDKRVKCLVIKNTESRFCNRKREDGWLTPSAEHLVQTHINLIHKMQKFLPITDVAIEINRFAFLSLEDPSISGVDFQKGPLKGYDDLNAAVEDLQDGHCLMCNSPIEHRHHIVPRSMQGSNTIGNIAGLCCKCHEKVHKDSAFEDSLKKKKAGLNKRYAAVSVLNQAIPFICKRLEQEFGKEHVHYCSGRDSSMVRRSLGYHKTKEEQLHEVDAWCIAVLSLQHVPEKAPEFDHVHEILQFRRQDRSRIKAQTSRAYYHEGKKIAKNRKKAEGQREDSLQEWRKRQVERYGEEQTRKMISQLKVKKSIRRYNRLDRLMPGAVFYYQGVRYVMRGQHCEGTYLQAVGMGSKDFPAKKCKIVAQNEGLVFVS

SEQ ID NO: 20543 - protein, 414 aa, unidentified
  REGION 1..414: note = Human gut metagenome
LKVFVLNMRGQPLMPCSPAKARHLLKAGKAVVKRRTPFTIQLRIATGETKQNVTLGVDAGAKHVGLSATTEKEEVFASEVELRQDITGLLAARLSLRRDRRHRKTRYRAPRFLNRVRSKHKGWLAPSVENRIQAHMSRIDAVCRLLPVTKIVIETASFDIQKIKDPSVEGTDYQQGDQLGFWNVREYVLFRDGHVCQHCHGRSKDKILNVHHLESRQTGGDAPNNLITLCETCHKAYHAGKIKLKVKRGQSFRAEAFMGIMRWTLLDRVRKAHPGLPVENTYGYLTKHTRITHGLPKTHCVDAYCIAGNLKAVRRGVYLHQRQMRKHNRQIHKFTVLSKRLEDGTKIGYRKFNQSPYLVHGFRLFDKVRCLGQIGFIFGRRSSGYFDVRRLDGVKLSSGISYRKLTLLEIFNRT

SEQ ID NO: 20544 - protein, 470 aa, Anaerostipes sp.; identical to SEQ ID NO: 2825

SEQ ID NO: 20545 - protein, 424 aa, Kosmotoga sp.; identical to SEQ ID NO: 18166

SEQ ID NO: 20546 - protein, 346 aa, unidentified; identical to SEQ ID NO: 4983
  REGION 1..346: note = Human gut metagenome

SEQ ID NO: 20547 - protein, 418 aa, unidentified; identical to SEQ ID NO: 7032
  REGION 1..418: note = Human gut metagenome

SEQ ID NO: 20548 - protein, 415 aa, unidentified; identical to SEQ ID NO: 10543
  REGION 1..415: note = Human gut metagenome

SEQ ID NO: 20549 - protein, 431 aa, unidentified
  REGION 1..431: note = Human gut metagenome
MPNKVYVINKHGRPLMPCSPAKARHLLDEGKAKIKKRTPFTIQLVYGSSGYTQEVILGVDAGSKTIGMSASTTKEELLSAEVKPRNDVVDLLSTRREFRRARRNRKTRYRKPRFDNRVRSKHKGWLAPSVEVKIQEHITSIKMVCRILPVSKVVIETAEFDLQLLKAIADGKPVPQGEDYQKGEMYGHYNVRQYVLWRDDYTCQCCGAHATKKKEVWLHVHHLESRKVGGDAPDNQVTLCESCHEKLHKGLITEKDFKKRKRRSTRDATFMGIMRKTLMQRLCSELPIPVVETRGYITKATREKLLVLPKSHTNDALAIAQGKHGFNVGYLPGIVQINKIYTIRPVRHHNRQLHKATILKGGIRKSNQTEKYVFGYRLFDKVQFNGQDCFIWGRRTTGIFTIKTINGKMIKDGISFKKLKLAEKSTSYLIA

SEQ ID NO: 20550 - protein, 512 aa, unidentified
  REGION 1..512: note = Human gut metagenome
MSTVYVLNKDGKPLMPTTRGGHVRHLLKEQKARVVRTNPFTIQLLYETDNLVQPLYLGIDPGRTNIGVAVVKTDGTAVFTAHLETRNKEIPKLMQGRKKARRARRTNGRRCRRQRRAKANGTISKKCVKQATAQNGSVSKRANEIGVIKRHLPGCEKEVLCIGIKNKEAKFSNRTRPEGWLTPTANQLLQTHINLVKKIQKFLPISDVVLEINKFAFMRLDNPNVQKWQYQQGPLYQKASLEEAVSEMQEQHCLFCKNTIDHYHHVVPQHKNGSNTIGNIVGLCAKHHDLVHKDTSWQEKLAKKKTGLNKRYGALSVLNQIIPALTKELSSLFPKHFFATNGKSTYDYRAAHGVSKDHWLDAYCIADSVLPNDACDNNINNRVPYELKQFRRHDRRALHKENMSRVYTLNGKKVATNRHKAVEQATDSLEEFCQNHPDDVCKLKVKEHHPEYRNPKRNFPGCVFLVGKHTHVMQGTSGSHNGKADGYYDTNGNSYSSGKCKFVVKNEGIVFT

SEQ ID NO: 20551 - protein, 442 aa, Lactobacillus sp.; identical to SEQ ID NO: 9501

SEQ ID NO: 20552 - protein, 404 aa, unidentified; identical to SEQ ID NO: 18194
  REGION 1..404: note = Clostridiaceae bacterium UBA2240

SEQ ID NO: 20553 - protein, 427 aa, Enterococcus sp.; identical to SEQ ID NO: 2410

SEQ ID NO: 20554 - protein, 324 aa, Lactobacillus sp.; identical to SEQ ID NO: 13123

SEQ ID NO: 20555 - protein, 423 aa, Moorena sp.; identical to SEQ ID NO: 11977

SEQ ID NO: 20556 - protein, 414 aa, unidentified
  REGION 1..414: note = Human gut metagenome
MVYVINKQGQALMPTERFGKVRRLLKNSLAHVVCRIPFTIQLDYDTTDYTQPVSLGVDAGSKHIGISVTTSEKELYAADVELRNDIVDKLSTRREQRRTRRSRLRYRKARFNNRVSSKRKGWLAPSVENKIQTHLTVVEKIHKFLPITNIVVETASFDIQKINNPSISGSEYQQGEQLDFFNVREYVLFRDNHTCQHCKGKSKDKVLNVHHIESRKTGGDSPNNLITLCETCHKAYHRGEFKLNVKRGKSFRDAAFMGIMRWSFYDRLKNIYPNVSMTFGYITKNTRTTNNLPKEHYVDARCISGNPVAKPLGYYFYQKKVRCQNRQIHKANFLKGGRKKLNQAPFLVKGFRLFDLVEYQKELYYIFGRRSNGSFDIRKLDGTKVNKGSINCKHLRLISTRKSILIEKRTQVNL

SEQ ID NO: 20557 - protein, 513 aa, unidentified
  REGION 1..513: note = Human gut metagenome
LKKEAAGHRQGKDCRPVRYGPPYRAGMPDGRRKPERKHMVAVVTSTGKPLMPTSAYRARKLLKKGRAVIFKYRPYFTIQLVDRADGEVQEVEYKSDTGSVHVGISVCTEKKELLSEQRDLLENEPEHHNDRKKNRRTRRNRKRYRKPRFDNRKKKPQEGHEKWLPPTLLHKMEVQVRLFREFCRVVPVTSACFEMGKFDTQALKAVSKGEPVPEGEGYQKGERYGTDTLRAAVFLRDGHTCRFCGRSVKDGAILHVHHVGYWKGDRTNRPANLASACEQCHTPANHGKNGILYGKEPEFKTLKDASYMTSVRWIMLDEIKKAAPGVQVSVTYGVTTKRKRQELHLPKSHVNDAFSMASFHPKKRSDTEYWKKIPRHDRVLQKFYDAVYLDTRDGSEKKGSELSNGRISRNHKKDSENLHQYRGHKVSKGHNSIRRGASSLKPGSIVMYKGEKMTVHGTHTRYVKGKDGKTAKKVNVQFTCPASDGKKSASLEKCTPVSRVYNTGWKRYWPDKK

SEQ ID NO: 20558 - protein, 493 aa, unidentified; identical to SEQ ID NO: 2644
  REGION 1..493: note = Human gut metagenome

SEQ ID NO: 20559 - protein, 339 aa, unidentified
  REGION 1..339: note = Human gut metagenome
LLSARRALRQSRRNRKTRYRAPRFNDRLRTKRKGWLAPSVENRINAHLSRIETIIRLLPVTKITVETTSFDMQLLKNSDIAGKKYQEGEQLGFWNVREYVLFRDGHVCQHCHGRSKDPVLNVHHLESRRTGGNSPGNLITLCETCHKALHRGEIKLKAKRGHSFRAQAFMGIMRWEVLNRLKASHPELEVNNTYGYRTKHVRIRNGIAKSHCADAFCIAGNLGAERLGEFFFQKQTRRNNRQIHKLSILKGGIRKRNQAPFEVKGFRLFDKVAYKGEEGFIFGRRSSGFFDVRKLDGTRISAGISYKKLHLLEKRRTYLTEIRKEEALPPPPEGRGLRA

SEQ ID NO: 20560 - protein, 480 aa, unidentified; identical to SEQ ID NO: 4735
  REGION 1..480: note = Human gut metagenome

SEQ ID NO: 20561 - protein, 292 aa, unidentified
  REGION 1..292: note = Human gut metagenome
MKDDLISGIDYQNGDMFGFWNVREFVLHRDGHKCQNPNCKHKDKKEQILKVHHIRYRSEGGSDRPENLITLCSKCHIPANHKKGKFLYDWCVNGKKVRGFKDATFMSMIRWYLVNELKSKHNNVSITYGYITKNHRIQNGIEKSHLNDAFAIAKGTNQARTKDRFLVIQDRLKNRSLEKFYDSKIIDIRTGKKVSGGDLSCGRSTRNKNLNTENLRKYRGAKISKGQRRIRKQKYFYQPNDLVKYDGKVYTVKGTQNEGKYIALKEIKKVPKVELLIPYVFKKGLNWSYGLC

SEQ ID NO: 20562 - protein, 430 aa, unidentified; identical to SEQ ID NO: 15171
  REGION 1..430: note = Human gut metagenome

SEQ ID NO: 20563 - protein, 480 aa, unidentified; identical to SEQ ID NO: 2726
  REGION 1..480: note = Human gut metagenome

SEQ ID NO: 20564 - protein, 424 aa, Nodularia sp.
MSNFVLVLDTNKKPLTPIHPGDARFLLNQQKAAVFRRFPFTIILKEPKSEVPTQPIELKIDPGSKTTGFALVQNNKVIWGMELQHRGLAIKESLETRKGVRRGRRSRHTRYRQARFLNRTKPQGWLAPSLSHRVLTINTWVKRLCNFAPITDIVEELARFDLQQLENPEISGFEYQQGELQGYEVREYLLNKWNRKCAYCTAENVPLQVEHIKPKAKGGTNRISNLCLACEKCNIKNVLKILRSFSKKPELLKQILSQAKRPLKDASAVNSTRWALFNKLKETGLPITTGSGGLTKFNRTRLGLPKTHWIDAACVGKVETLKILTTKILTVKSTGHSCRRFCRINKFGFPCTEPKKIFTHVSTGDFVKATLHKDRKNITSGKYVSRVKTPTKNGCEIVINGFRVEFSTMKDITKVHCSDGYSYV

SEQ ID NO: 20565 - protein, 429 aa, unidentified
  REGION 1..429: note = Human gut metagenome
LQFYRKEHGIMQYVYVLSKHGEPMMPCSPGKARLLLKQQKACVVRRTPFTIKLLYGSAGYKQPITLGVDAGSKHVGLSASTEKRELYREEFAPRNDVVELLSTRRQNRRSRRNRKTRYRAPRFDNRVHSKHKGWLAPSVEVKIQEHITIIKRICKILPISLVRVETAEFDTQRLKAMLAGKPLPVGTDYQLGEMYDEYNVRQYVLKRDNYTCQCCGAHTTAKKLVKLHVHHLESRKTGGNAPSNLITLCTTCHKNLHKGKVTLDGKERGKPLRDAAFMGIMRKTLMARLKKELPIPVQGTYGYITKMRREQNDIKKSHTNDARCISKHPLAEPCSVCYRTKAIRHHNRQTHKANFSKKGIRKRSQMPYLVEGYRLWDKVLYKEQECFVSGRRSSGSFTLKKLDGTSVSKGVTFKKQRLLEPATNYLIER

SEQ ID NO: 20566 - protein, 308 aa, unidentified; identical to SEQ ID NO: 10888
  REGION 1..308: note = Cyanobacteria bacterium UBA11369

SEQ ID NO: 20567 - protein, 494 aa, unidentified
  REGION 1..494: note = Human gut metagenome
MTMVYVQNKDGKPLMPTTRYCYVRLLLKEKKARVVCTTPFTIQLNYDTPDITQDLILGIDPGRTNIGVAVVKEDGQCVFSAHLETRNKDVPLLMKKRAAFRRNHRTLDRRRKRQRRAKAAGTTIADGSAERLLPGYEKPIVCHYIRNKKARFNNRCRPAGWLTPTANHLLQTHINLIAKVAKFLPITKVVVELNRFAFMAMDNPNIRRWEYQQGPLYGLGSVEDAVYAQQDGHCLFCEKPIDHYHHVVPRHKGGSETLANRCGLCVKHHDLVHKDKAWADKLVTRKEGMNKKYHALSVLNQIIPFLMKYLGDETLYDVYATDGRSTKGFRIAKNVPKEHYTDAYCIACSILDTDIKVSAPVEPFELKQFRRHDRQACIRQMVDRKYILDGKVVATNRNKAFEQESDSLQEFREVYGDAAVSQLTVKPHPPQYKDMTRIMPGAVMDFNGVVDVFQRSEGFHNGKPDYYKSTKGARVLTKRCVLLTQNAGTVFIPA

SEQ ID NO: 20568 - protein, 429 aa, unidentified
  REGION 1..429: note = Human oral metagenome
MLVYVLKQNGQPFMPTKRFGKVRRLLKTKKAKVVRREPFTIKLLYEPETDVVQECYCGVDTGSRHIGVAVVSNDKVLYQSQTELRSDIKRKMDARRMYRRNRRQRKTRYRKPRFLNRKNSIKKDGLLPSVKHKVQAHIDEIEFCKKILPISDSNLVIEVSQFDTALMKDPSLNSEKIKHWGYQQGFNYGYSSRREAILHRDNYTCQCCGKKNCRLEVHHVKFKRDGGTDDEENLLTLCEDCHKGVHAGTVTLNKKPKKSKNLNHATHMSIIRSYLLKRYPNAIETFGFVTSENRNHLNLPKDHYIDACVIASGGLEIKQLDVIFYKRRVSKGNYQLTKGVRGELKIPTGKICGFRKFDKVEYLGNVYFIKGRMSKYGYCFLTDIFGNKIDFSCMTRGTKTPKLSSCKRISARSSCLCIRKKITLNINNI

SEQ ID NO: 20569 - protein, 451 aa, unidentified
  REGION 1..451: note = Human gut metagenome
MPVAVISKTGERLMPTSEHRARKLLKSGKAIKYSYHPFTIQLAERESGDVQPIELCMDTGYIHIGISVKSEKHEYLAEQIDTLTDEKARHDACRMYRRQRRSRKRYRQPRFNNRKRNDRWIAPSLEHKKSIHIQAILRICKVMPVTDITLEMGNFDTQVLKAREEGKSLPQGVDYQHGERYGITTLREAVFSRDGYTCQCCGRTIKDGAILHVHHIVYRSQGGTNRMSNLITVCDKCHTPANHKQGGKLYNWKPKIASFKGATYMTTIRWKLYNEVKALFPDIDIHVTYGAETKERRRALDIDKSHVNDAFVMGQFHPKHRSKPICYKKKRRNNRCLEKFYDAKYIDSRDGKKRSGQELFNGRISRNHKKDSENLHQYRLQKVTPGRRAIRRQHYPIQPHDIIVYNGNKIEVSGCQHKGTRVVFSKTKKSVQISKIKLFKYAGGYSKSVFN

SEQ ID NO: 20570 - protein, 424 aa, Spirulina sp.
MRVFVIDKNKHPLDPCYSARARKLLKAGKAKVFKQNPFTIILVDKEVEESQDYQLKIDPGSKTTGLAILKSNRVIWAAELTHRGQQIRDALTARRQLRRGRRNRKTRYRKPRFLNRTRREGWLPPSLMSRVHNIMTWVNRLQRVCPITQLSQELVRFDTQAIQNPEITGVEYQQGELVGYEVREYLLEKWGRKCAYCGAKDTPLEVEHIQPKSKGGSNRVSNLTLACHACNQAKGNQEVTEFLSGKSNLLTRILKQAKAPLKDAAAVNSTRWALLKAFKATGLPAETGTGGQTKFNRSRQGLPKTHWLDAACVGQSTPEQLVIEVDKPLLIAAKGHGTRQRCRPDRFGFPKAHAPKAKSFQGFQTGDVVRAVIPKGKFAGRYTGRVAIRFRPSFRLAVGTAKPFDVHPKYLRIIHHADGYQYSF

SEQ ID NO: 20571 - protein, 406 aa, unidentified; identical to SEQ ID NO: 15532
  REGION 1..406: note = Human gut metagenome

SEQ ID NO: 20572 - protein, 431 aa, unidentified
  REGION 1..431: note = Human gut metagenome
MPNKVYVINKHGRPLMPCSPAKARHLLDEGKAKIKKRTPFTIQLVYGSSGYTQEVILGVDAGSKTIGMSASTTKEELLSAEVKPRNDVVDLLSARREFRRARRNRKTRYRKPRFDNRVRSKHKGWLAPSVEVKIQEHITSIKRVCRILPVSKVVVETAEFDLQLLKAIADGKPVPQGEDYQQGEMYGHYNVRQYVLWRDNYTCQCCGTHPSKKKEVRLHVHHLESRKVGGDAPDNQVTLCESCHEKLRKGLIAEKDFKKRKRRSTRDATFMGIMRKTLMQRLCSELPIPVVKTRGYITKATREKLLVLPKSHTNDALAIAQGKRGFNVGYLPEIAQIDKIYTIRPVRHHNRQLHKATILKGGIRKSNQTEKYVFGYRLFDKVQFNEQDCFIWGRRTTGIFTIKTINRKMIKDGISFKKLKLVEKSTSYLIA

SEQ ID NO: 20573 - protein, 465 aa, unidentified; identical to SEQ ID NO: 3070
  REGION 1..465: note = Human gut metagenome

SEQ ID NO: 20574 - protein, 423 aa, Phormidium sp.; identical to SEQ ID NO: 20072

SEQ ID NO: 20575 - protein, 442 aa, unidentified; identical to SEQ ID NO: 2903
  REGION 1..442: note = Human gut metagenome

SEQ ID NO: 20576 - protein, 443 aa, Anoxybacillus sp.; identical to SEQ ID NO: 12144

SEQ ID NO: 20577 - protein, 450 aa, Clostridium sp.; identical to SEQ ID NO: 10471

SEQ ID NO: 20578 - protein, 394 aa, unidentified
  REGION 1..394: note = Human gut metagenome
MPTTRHGKVRRLLKAKKATVVNLCPFTIRLLYDTTGYKQEITLGVDAGTKHVGLSATTKSKELYASEVILRSDVVDLLSTRRELRRARRYRLRYRKPRFNNRIKSKKDKWIAPSIRQKIDSYIRIIGFVYSILPVSKLIIEVAQFDTQKIKNPEISGKEYQEGEQLGFWNVREYVLARDGHKCQHCKGKSKDPVLNVHHIESRKTGGDSPSNLITLCETCHKEFHKGKIKLKVKRSASLRDAAVMGIMKWELYDELKSLYPNIKMTFGYITKHDRINHGIEKSHVSDAFVISRNFDSYRLGYYYKQKLVRRHNRQIHKMKILKGGIKKPNQAPFKVFGFRLFDKVRYQDNVYFVYGRRTSGCFNIRDINGNNNKNPTFKKLTYISHGLISVETV

SEQ ID NO: 20579 - protein, 490 aa, unidentified
  REGION 1..490: note = Human gut metagenome
MNYVYVLDKKGKPLMPTTRYGKVRRMLKSGQAKPIQNLPFTIQLTYIPKTTVCQPVIVGFDPGRTNIGISAVREDGTCLNLTHCETRNREIPKLMQKRKEHRQTSRRGERLVRKRLAKRHGTVSSKPLERILPGCEKPLKVKDIINTESRFNNRLRSEGWLTPTATQLLRTHVNLLKRMCQILPATDVVMEVNRFAFMQLDQPNVKKCGIDFQHGPLFGTDGIKEAVSIQQDGRCLLCEKRTIEHYHHIVPRAYRGSDTAENIAGLCAACHKLVHTSREASNKLKHKKDGINKKYGGISVLNQVIPFLFMEFEQMFPGHTYATNGWNTKQFREKYRLAKDHSVDAYCIAASILPEPKVELPEDTHEIVQYRRHDRARIKRQTERTYCLGKKGVCKNRHKRFEQKTDSLEEYVEKYPNFLSNLTVKKSQRSYNDLKRVLPGAVILYQGKRYILSGRSSGGKQYRMLGYGNQNFTASKCTIVQQNTGLVYVS

SEQ ID NO: 20580 - protein, 427 aa, Moorena sp.; identical to SEQ ID NO: 10436

SEQ ID NO: 20581 - protein, 442 aa, unidentified; identical to SEQ ID NO: 2903
  REGION 1..442: note = Human gut metagenome

SEQ ID NO: 20582 - protein, 512 aa, unidentified
  REGION 1..512: note = Human gut metagenome
MSTVYVLNKDGKPLMPTTRGGHVRHLLKEQKARVVRTKPFTIQLLYETDDVVQPLYLGIDPGRTNIGVAVVKADSTAVFTAHLETRNEEIPKLMQGRKKARRARRTNGRRCRRQRRAKANGTISKKCVKQTTAQNGSASKRAKEIGVIKRHIPGCEKDVLCIGIKNKEAKFSNRTRPEGWLTPTANQLLKTHINLVKKIRKFLPISDVVLEINKFAFMRLDNPNIQKWQYQQGPLYQKASLEEAVSEMQEHHCLFCKKSIAHYHHAVPQSENGSNTIGNIVGLCTKHHDFVHKDTAWQKKLAKKKTGLNKKYGALSVLNQIIPALTKELSSLFPKHFYATNGKSTHDYRIAHGVSKDHWLDAYCIACSVLPNDTCDRTINSRVPYELKQFRRHDRRALHKENMSRVYTLNGKSVATNRHKATEQTTDSLEEFRQRQPNDVCKLKVKEHHPTYRNMNRNYPGSVFLIGKQVHVMQGIAGSKDGEATTYKDTNANSIAAGKCKFVAKNSGILFV

SEQ ID NO: 20583 - protein, 436 aa, unidentified
  REGION 1..436: note = Human metagenome
MTKTLTKQTTQACVLDQQGKPLMPTTRLGKIYRLLKTQKAHIVSHEPFTIQLNYEPDTHIIQPMTLGVDSGAIHSGYSVTNENREYYSAEVIARDNISKHLLNRRMYRKNRRSRKTRYRKPRFKNRKNEKKGWLPPSLKQKVTVQLKEIDHLHHHFPIETIIVEVAEFDIQKIKNPNISGIEYQQGTLQGYNIRNYLLEKHGRKCFYCEKTVSKFEVEHMIPKTRGGSNRIDNLTLSCHECNQKKDTLTAEEFIKQILPAKKATAKLKQLPNEKRLFKYMAHMNATRWSLYNTIKEKYANVKMTYGYITKYNRIQAGLPKAHHIDAKCITGFTTVPSIDQTVVKIKMRRHNRQLHQLTFSKGHVRKAASLPTIIFGFQLYDLVLFNNHRYYIKSRRSSGSFDLVSVEGLKDTNRSYKKLTLLAHTNAYLTNRYTNE

SEQ ID NO: 20584 - protein, 391 aa, unidentified
  REGION 1..391: note = Human gut metagenome
VVRRTPFTIQLTIATGESKQPVSLGVDAGYKHVGLSASTEKAELYASEVELRKDITDLLSARRALRQSRRNRKTRYRAPRFDNRIRTKRKGWLAPSVENRINAHLSRIEAVLRLLPITKITVETASFDMQRLKNPDISGKEYQEGEQLGFWNVREYVLFRDGHVCRHCHGRSKDPVLNVHHLESRRTGSDSPDNLITLCVTCHKALHRGEITLKAKRGQSFRAQAFMGIMRREVLNRLKASYPELKVHETYGYLTKHARIANGIVKSHGADAFCIAGNLGAERLGEFFFQKQTRRNNRQIHKLSILKGGIRKRNQAPFEAKGFRLFDKVACQGEEGFIFGRRSSGSFDVRKLDGTRISAGISCKKLRLLEKRRTYLTEIRKEEALPPLPEG

SEQ ID NO: 20585 - protein, 471 aa, Sulfobacillus sp.
MAVLVLDKRKNPLMPCSEKRARLLLERGRARVHRMVPFTIRLVDRRQEDSGLQDIRLKLDPGSQTTGAALVREVDSVEATTGEIRRTDVVLMLLELQHRGHAIRDALTGRRAFRKRRRGNLRYRAPRFNNRARPAGWLAPALQHRVDTTMAWVSRLRRWVPVTALSQERVRFDTQALQNPEISGAEYQPGTLAGYEIREYRLEQWGRACAYCEAENTPLEIDHIHPKSRGDSDHVSNLAIVCHDGNQAKGTRPLEQFLAKDPQRVRTILAQAQAPLCDAAAVNSTRWVLFAKLNETELPVEVGAGNRTKWNRHRLLIPKAHCLDAACVGRVDAVQRWQQPVLQIKATGRGRYQRTRLTRHGFPRGYLTQQKRHFGFQTGDMVKAVVTKGKKIGAYWGRVAIRASGRFDIQTGNGRVQGIHHRFCQFIQRADGYGDSWATIASTQGDAGVGAAGDAALSLPGIKAGVSRAIG

SEQ ID NO: 20586 - protein, 456 aa, unidentified
  REGION 1..456: note = Human gut metagenome
MSTCVCVLSNNGERLMPTFRLGKVRRLLKDGKAKIVKHHPFTIQLLYDSKTNKQPIEICEDVGYNYIGISVKSESHEYVSAQYDTLQDEKEHHDDCRKMRRARRNRLRYRKPRFDNRKRSEGWLAPSLEHKKQLNISLVERYVSVIPITHATVEVGSFDTMLLQAIQKGETKPEGADYQEGPRYNLATLREAVFYRDNYTCQVCGRKITDGAILHMHHMFYWKGRHGYKLDELVTACEKCHTPANHQKGGKLFGFGEDKEFADLSGAAFMNAVRWQIVNALYATYGKEFVTITYGAMTKEKRIALQLEKSHNNDAYAMGDFHPVHRCGFRHYQKRRRNNRVLEKFYDATYIDARTGNKAKGKELFNGRISRDHKKDSENLHKYRSEKVSKGRRSIRKRRYAIQPYDTVRLKGKTYITSGCHNKGTRLLIPVNGKSKSVAISKVRVVCHAGAWIQII

SEQ ID NO: 20587 - protein, 465 aa, unidentified; identical to SEQ ID NO: 3856
  REGION 1..465: note = Human gut metagenome

SEQ ID NO: 20588 - protein, 425 aa, unidentified
  REGION 1..425: note = Human gut metagenome
MVYVLNKNGQSLMPTNRHGKVKHLLKDGKAKVVKRCPFTIKLTYETTNYTQDLTLGVDTGSGTIGTAVSKDSGDIIYMSEIVVRNDITNKMSQRAKYRRNRRNRKTRYRQARWLNRRNSIRKDRFSPTMQSKLHSHVKEIEYIKSILPITTMVFETGQFDMHLMKNPMLANPKVKHWGYQKGTNYGFENTKAMVLNRDNYTCQYCKGKHKDSKLEVHHIIFRSQGGSDEDSNLITLCHTCHKNLHDGKIAPNFKGKAKGTLKYATQMNSIRKQLFRLYPEVIETFGYVTKANRLAIGIEKEHYYDACTIATQGKPFIVKTNLYKKKCISDGDFQKTKGIRSEQPIVTDKIYGFRKFDKVKYFGKEYFIKGRMSTGYAILMDIEGNKADFSTMPKGFKTPKMINLKRLEARSSWMVTIVEGTPNIA

SEQ ID NO: 20589 - protein, 398 aa, Geobacillus sp.; identical to SEQ ID NO: 7037

SEQ ID NO: 20590 - protein, 447 aa, unidentified; identical to SEQ ID NO: 12853
  REGION 1..447: note = Human gut metagenome

SEQ ID NO: 20591 - protein, 470 aa, unidentified
  REGION 1..470: note = Human gut metagenome
MSVFVVGLNGCRLMPTSERKARLLLKEGKASVYRKVPFTIKLNYKTGSTVQPGYLGIDTGSQHIGITAVREDGTVLHKEEIGLRDSMTKRKLLESKASLRRGRRYRKTRYRHPKWRPETKRVYCEKPDRKGRHWKKQKNTFTSKRQAGWLPPSLQSKTDHHIRWIRKILGLLPEGYRLSIELGRFDPARMKDPEIHGELNQKGPQYDYENVRAYVLDRDRYTCQACKKKGGKLQVHHILYKSSGATDNPQYMATVCSNCHTLENHQPGGILYRWKQEQKKFTRGLRDATFMSILRKRLMEAFPDAVFTYGNITKVDREALKLPKSHADDATAIALVRTGITSVKDNEPVIHIQQVRRKKRSLHEENPRKGRKEPNRTASRNSKNTKSVTVNKKLGKIKTQVTAWLFDRVELDGKKGWVSGFTRKSCYVKDRQDKYVCLSKKYDSVSITKLKILHHCGNWVVGAETTLGKC

SEQ ID NO: 20592 - protein, 432 aa, unidentified; identical to SEQ ID NO: 7222
  REGION 1..432: note = Freshwater metagenome

SEQ ID NO: 20593 - protein, 421 aa, unidentified
  REGION 1..421: note = Human oral metagenome
MLVYVISKDGQPLMPISRCGKVRRLLKNKRAKVVRRCPFTIKLLFEPENDFVRECYCGVDTGSKHIGVAVVGNDRVLYQSQTELRNDIKKKIDRRRGFRRLRRSRKTRYRKPRFLNRRNSIKKDRLPPSVKHKVQAHIDEIEFCKKILPISDLILEVSQFDTALMKNPSLISEKIKHWGYQQGFNYGYSSRRSAILHRDGYTCQCCGKKHCRLEVHHIIFRSNGGTDDENNLITLCEDCHKGVHAGTVVLNKKPKKMNLKHATHMSIIRSQLLKIYPQAIETFGFVTSENRNHLGLEKSHYIDACVIASGGLEFEQPDVVYYKRRVSKGDYKLARGSRSEQKLHTGKVHGLRKFDKVKYLNQEYFVESRINTGFAKLMDVFGNQADFSFASRGHKTPKLSNCKRINARRSTLCMWLANTIN

SEQ ID NO: 20594 - protein, 453 aa, unidentified
  REGION 1..453: note = Human gut metagenome
MSVAVISKTGERLMPTSEHRARKLLKSGKAIKYSYHPFTIQLTERESGDVQSIELCVDTGYIHIGISVKSEKHEYLAEQIDTLTDEKARHDACRMYRRQRRSRKRYRQPRFNNRKRKDRWIASSLEHKKSIHIQAILRICKVMPVTDITLEMGNFDTQVLKAREEGKPLPQGVDYQHGERYGITTLREAVFARDGYTCQCCGRAIKDGAILHVHHIVYRSQGGTNRMSNLITVCDKCHTPANHKQGGKLYNWKPKIASFKGATYMTTIRWKLYNEVKALFPDIDIDITYGAETKERRRAFDITKSHVNDAFVMGQFHPKHRSKPVCYKKKRRNNRCLEKFYDAKYIDNRNGKTRTGQELFNGRISRNHKKDSENLHQYRRQKISAGKRTIRKQHYAIQPHDIVIFNGEKFETSGCHNNGTRVILLPQKKSVAIKKLNIYRYAGGYFKSAFNQK

SEQ ID NO: 20595 - protein, 418 aa, unidentified; identical to SEQ ID NO: 15302
  REGION 1..418: note = Human gut metagenome

SEQ ID NO: 20596 - protein, 431 aa, unidentified
  REGION 1..431: note = Human gut metagenome
MPNKVYVINKHGRPLMPCSPAKARHLLDAGKAKVKKRTPFTIQLVYGSSGYTQEVILGVDAGSKTIGMSVSTTKEELLSAEVKPRNDVVDLQSTRREFRRARRNRKTRYRKPRFDNRVRSKHKGWLAPSVEVKIQEHITSIKMVCRILPVSKVVIETAEFDLQLLKAIADGKPVPQGEDYQKGEMYGHYNVRQYVLWRDDYTCQCCGAHATKKKEVRLHVHHLESRKVGGDAPDNQVTLCESCHEKLHKGLITEKDFKKRKRRSTRDATFMGIMRKTLMQRLCSELPIPVVETRGYITKATREKLLVLPKSHTNDALAIAQGKRGFNVGYLPGIIQTDKIYTIRPVRHHNRQLHKAAILKGGIRKSNQVGKYVFGYRLFDKVQFNGQDCFIWGRRTTGIFTIKTINGKMIKDGISFKKLKLVEKSTGYLIA

SEQ ID NO: 20597 - protein, 448 aa, unidentified
  REGION 1..448: note = Bioreactor metagenome
LAKGKLLRKEVHFLLVYVLNKHGRPLMPCKPSKARKLLKQGKAKIVKYEPFTIQLLYGSSGYKQKCVLGIDAGSKNIGLVVTIEDGRVIYKAQATLRQDIRENIETRRRLRRTRRYRKTRYRKPKIFTSKWRNGWLPPSIRARIDAHYNIVKKICSITPIKEIVVEVGQFDVQAIINPDIQGEEYQNGELKGFDSVKEYVKIRDNFQCHYANLRPDIPCSGKLTVDHIIPRSRGGTDNPTNLVCCCEMHNMAKGNMSYKEFTGHEPPSIRDFRPTVFMNALMKHLVPRLQELAPTKYTFGYVTKRRRKEWGLEKSHINDAIAIAGIKPRWQDNVWYYIRQVRKKKRSLHEEIPRKGRNKPNREAKRNNKNVKEIVTKSGKWCLWDKVKITTTGEIGFISGFTGKWVYVQDIDGNYLQLSDKYKQINPSELVLICRNNNYITQQFISTL

SEQ ID NO: 20598 - protein, 422 aa, unidentified
  REGION 1..422: note = metagenome
LNKRGKPLMPCSPAKARLLLKEKKAIVVRRTPFTIQLTIATGESKQPVSLGVDAGYKHVGLSASIEKAELYASEVELRKDITDLLSARRALRQSRRNRKTRYRAPRFDNRIRTKRKGWLAPSVENRINAHLSRIEAVLRLLPITKITVETASFDMQRLKNPDISGKEYQEGEQLGFWNVREYVLFRDGHVCRHCHGRSKDPVLNVHHLESRRTGSDSPDNLITLCETCHKALHRGEITLKAKRGQSFRAQAFMGIMRREVLNRLKASYPELKVHETYGYLTKHARIANGIVKSHGADAFCIAGNLGAERLGEFFFQKQTRRNNRQIHKLSILKGGIRKRNQAPFEAKGFRLFDKVACQGEEGFIFGRRSSGSFDVRKLDGTRISAGISCKKLHLLEKRRTYLTEIRKEEALPPLPEGRGLRA

SEQ ID NO: 20599 - protein, 417 aa, unidentified
  REGION 1..417: note = Hydrocarbon metagenome
LRVFVLNMRGKPLMPSSPRKARTLLKTGKARVVKRTPFTIQLNYPTGEAKQAISFGVDAGSKHIGLSATTDKEILFEAEVELRNDIVELLATRRQHRRNRRYRKTRYRKPRFRNRNKPKGWLAPSIQNKIELHLKAVSMAYKILPITHTIIEVASFDIQKIKNPDISGKEYQEGDQLGFWNIREYVLWRDGHKCHGRKGCKNKILNVHHIESRKTGGDSPKNLITLCEKCHADYHAGRLKLNLKRGQSFKDAAFMGIMRWTVYNRLKTLYPNVSLTYGYITKNTRIRNGLEKTHTVDARCISGNPLAKPDDVCYYFKQVRKQNRQLHKANTLKGGIRKINKAPKYVHGYQLFDKVLYKNKECFIFGRRSSGYFDLRTLDGVKIHVSANYKKLRLLERAKSIKCERREGNSSPTYAIA

SEQ ID NO: 20600 - protein, 393 aa, unidentified; identical to SEQ ID NO: 10946
  REGION 1..393: note = Human gut metagenome

SEQ ID NO: 20601 - protein, 420 aa, unidentified
  REGION 1..420: note = Human gut metagenome
MQYVYVLNKHGEPLMPCSPRKARLLLKQKKAYVIKRTPFTVKLLYGSAGYKQPVTLGVDAGSKHIGISATTEKYELYREEATPRNDVVDLLSARRAFRRSRRNRKTRYRAPRFDNRVHSKHEGWLAPSVEVKIREHITLIKRVCRILPITLVRVETAEFDTQRLKAMLEGKPLPVGTDYQLGEMYDEYNVRQYVLKRDNYTCQCCGAHPTKTKAVKLHVHHIETRRTGGNAPNNLITLCTVCHKALHAEKVTLDGKKRGKPLKDAAFMSIMRKTLMERLRKELKIPVQGTYGYITKYLREKYGILKSHTNDARCISKNPLAIPCDTCYYTKAVRHHNRQLHKATILKGGIRKANQAPYIVKGYRLWDKVAYNGTECFITGRRTSGYFALKELDGTVVSNSISYKKLRLLEAATNYIIERK

SEQ ID NO: 20602 - protein, 414 aa, unidentified
  REGION 1..414: note = Human gut metagenome
MVYVINKQGQALMPTERFGKVRRLLKNSLAHVMCRIPFTIQLDYDTTDYTQPVSLGIDAGSKHIGISVTTSEKELYAADVELRNDIVDKLSTRRELRRTRRSRLRYRKARFNNRVSSKRKGWLAPSVENKIQTHLTVVEKIHKFLPITNIVVETASFDIQKINNPSISGSEYQQGEQLDFFNVREYVLFRDNHTCQHCKGKSKDKVLNVHHIESRKTGGDSPKNLITLCETCHKAYHRGEFELNVKRGRSFRDAAFMGIMRWSFYDRLKNIYPNVSMTFGYITKNTRITNNLPKEHYVDARCISGNPVAKPLGYYFYQKKVRCQNRQIHKANFLKGGKKKLNQAPFLVKGFRLFDLVEYQKELYYIFSRRNSGYFDIRKLDGTKVNKGSINCKHLRLIDTRKSILIEKRTKVNL

SEQ ID NO: 20603 - protein, 423 aa, unidentified; identical to SEQ ID NO: 12430
  REGION 1..423: note = Human gut metagenome

SEQ ID NO: 20604 - protein, 424 aa, unidentified; identical to SEQ ID NO: 5075
  REGION 1..424: note = Human gut metagenome

SEQ ID NO: 20605 - protein, 397 aa, unidentified
  REGION 1..397: note = Human gut metagenome
IVKRRTPFTIQLTIATGESKQPVTLGVDAGYKHVGLSASTEKAELYASEVELRQDVSDLLSARRALRQSRRNRKTRYRAPRFNNRLRTKRKGWLAPSVKNRINAHLSRIEAVLRLLPVTKISVETASFDMQLLKNPDIAGKEYPEGEQLGFWNVREYVLFRDRHVCQHCYGRSKDPVLNVHHLESRRTGGDSPGNLITLCETCHKALHRGDITLKAKRGKSFRAEAFMGIMRWEVHNRLRALHPGIEVSNTYGYRTKHARIANGIAKSHCADAFCIAGNLGAERLCEFFFQKQTRRNHRQIHKLSILKGGIRKRNQAPFEVKGFRLFDKVACQGEEGFIFGRRSSGFFDVRKLDGTRISAGISCKKLHLLEKRRTYLTEIRKEEALPPLPEGRGLRA

SEQ ID NO: 20606 - protein, 415 aa, unidentified; identical to SEQ ID NO: 3582
  REGION 1..415: note = Human gut metagenome

SEQ ID NO: 20607 - protein, 517 aa, unidentified
  REGION 1..517: note = mine drainage metagenome
MLPQSRALEAADADNREGQDETVGGKGAIPKPVANISEGRRFARSALRPQGQCNVRFDEGFVQVFVLDKKKKPLMPCHPARARELLREGRAVVHRIAPFTIRLKDRIGGETQPIRVKLDPGSKTTGLAVVREEETDGEKTAHVLFQAEIHHRGSAIKKRLDQRRAFRRRRRSQLRYRTPRFDNRTRPDGWLPPSLRHRVDTTLAWVERLRRLVPVSELSQELVRFDMQKIENPEISGVEYQQGTLAGYEVREYLLEKWGRTCAYCGASDMPLEIDHIHPRSLGGSDRVSNLTLACRSCNLKKGNRPVGEFLAKTPERLSTILARAKAPLKDAAAVNTTRWALFQALKATGLPVETASGGRTKWNRTRLVLPKTHALDAACVGKVDRIEGWNRPCLSIKSTGRGSYRRTRLDAFGFPRGSLTRTKAHFGFQTGDRVMAIVTKGKKTGTYAGRVAVRSSGSFNIQTGSGVVQGISYKDCRLLQRADGYGYSIHPITEKGEAGEALSLPGMNAGVSRARG

SEQ ID NO: 20608 - protein, 430 aa, unidentified
  REGION 1..430: note = Human gut metagenome
MPKVYVLNRHGRPLMPCTPAKARHLLDAGKAKVRHRTPFTIQLLYGSTGYTQEVILGVDAGSKTIGLSAATETEELFSAEVKPRNDVVELMSARRQFRRARRNRTTRYRKPRFDNRVRSKHKGWLAPSVEVKIQEHMTAIRRACAILPVSKVVVETAEFDLQLLKAVAEGKPVPQGEDYQKGEMYGHYNVRQYVLWRDSYTCRICGVHGSVRKGVPLHVHHLESRRVGGDAPDNLVTLCTACHDKLHKGIIMVADIKKRKRRSTRDTTFMGIMRMTLLRRLREQLPVPVVETRGYITKATRENLLVLPKSHTNDALAIAHGPQGFRAEYLPNIRQADRLYTIRPVRHHNRQLHKATILKGGVRKANQAEKYICGFRLYDKVLYNGIECFVWGRRTSGSFLLRQLNGEKVKDGVSYKHLKLLERSQSYLVA

SEQ ID NO: 20609 - protein, 425 aa, unidentified
  REGION 1..425: note = Human gut metagenome
MENTLKVFVLNMRGQPLMPCSPPKARKLLRAGKAVPVRRTPFVIQLTVPTGETKQPITLGVDAGYKHVGLSATTAKEELLASEVELRQDVTGLLSNRLALRRARRNRKTRYRAPRFDNRVRSKHKGWLAPSVENRIQAHISRIEAVCRVLPITKIVIETASFDIQKIKNPEVEGTDYQQGEQLGFWNVREYVLFRDGHVCQACKGRSKDLILNVHHIESRKTGGDAPGNLITLCEACHKAYHAGKLKQFSPRRGASFRAETFMGIMRWTVLNRLRERHPELPVTNTYGYLTKHKRIVAGLPKTHCADAFCIAGVLDAKRRGEYLFQKQTRRHNRQIHKLTILKGGVRKRHQAPYLVHGFRLFDKVLCKGEVGFIFGRRSSGAFDVRRLDGTKISAGISYKKLSLLEKRKMFLTELRKEGRDSSRV

SEQ ID NO: 20610 - protein, 408 aa, unidentified; identical to SEQ ID NO: 4142
  REGION 1..408: note = Human gut metagenome

SEQ ID NO: 20611 - protein, 434 aa, Anoxybacillus sp.
MVFVLDTNKCPLAPCHEAVARKLLKQGKAAIYKRFPFTIILKKSVDESENETTYRLKIDYGSRHTGLAILRGQEVVWLGQLDHRTDIKERIDKRRAFRRARRNRKTRYRKPRFLNRKRKEGWLPPSLESRVQNIQTWVSRLKKLCPIGHISYENAKFDTQLMRNPEISGIEYQQGTLQGYEVREYLLEKFGRKCCYCGKENVPLEVEHIIPKSRGGTDRIDNLCLACRDCNQRKGNQTAEEFGCPHIQKQVKESLKDTSIINATRWKVYEVLKQARLDVECGTGARTKMNRIRLGLPKTHYFDACCVGESTTNHLYFKTKEVLFIKAKGRGSRSRTNLDRYGFPRGYLARQKFFFGFQTGDMVKAIVPRGKYKGVWFGEVACRKTGNFDIKGKDGKRIAQGISYKYIQVIQRFDGYTYRKEEAELAQGAIPPRA

SEQ ID NO: 20612 - protein, 411 aa, unidentified; identical to SEQ ID NO: 13760
  REGION 1..411: note = Human gut metagenome

SEQ ID NO: 20613 - protein, 335 aa, unidentified
  REGION 1..335: note = Human gut metagenome
LISTRRQNRRSRRNRKIRYRKARFQNRVSDKKDWLAPSIRQKVDTHMTVVSRVCKILPVTKIIVETASFDIQKIKDPDISGTGYQHGEQLDFWNVREYVLFRDGHTCQCCKGKSKDPVLNVHHIESRKTGGDAPNNLITLCETCHKGYHSGAVQLPKAIHRGMRFKDAAFMGIMRWAFYNKLKEVYEPQDIEVSMTFGYLTKNTRIRHYLPKEHYIDARCISGHPEAIPSNEVFYQKKVRCHNRQIHKNTILKGGVRKRNQAGYLVKGFRLFDKVAYKGREYFIFGRRQSGFFDLRNLSGCKVNKGSLSYRKIGFLEPRQYYLCERRVMDTQGCA

SEQ ID NO: 20614 - protein, 494 aa, Moorena sp.
MTMVYVLNKDGKPLMVTTRGGRVRYLLKEKKARVVSSTPFTIQLNYDTPDITQDLILGIDPGRTNIGVAVVKEDGSCVFSAHLETRNKEVPLLMKKRAAFRRNHRTLDRRRKRQRRAKSAGTIVENESIERLLPGYEKPVVCHYIRNKEARFNNRKRPQGWLTPTANHLLQTHINLIAKIAKFLPITKVVVELNRFAFMAMDNPNIRRWEYQQGSLYGLGSVEDAVYAQQNGHCLFCKTPIDHYHHVVPRHKNGSETLANRCGLCAKHHDLVHQDKAWADKLVTRKEGMNKKYHALSVLNQIIPFLMEYLGSETLYDVYATDGRSTKCFRVAKSVPKEHYTDAYCIACSILNTDIEVSAPVEPFELKQFRRHDRQACHQQRIERKYYLDGKQVATNRRKAIEQKSDSLEEFREAYGDAAVSQLTVKPHPPQYKDMTRIMPGAVMDFDGNVGVLQGADGFHNGKPDYYSSTKREKVRARRCTLLARNAGMVFIPV

SEQ ID NO: 20615 - protein, 430 aa, Vibrio sp.; identical to SEQ ID NO: 8414

SEQ ID NO: 20616 - protein, 415 aa, unidentified; identical to SEQ ID NO: 11876
  REGION 1..415: note = Human gut metagenome

SEQ ID NO: 20617 - protein, 494 aa, unidentified; identical to SEQ ID NO: 5675
  REGION 1..494: note = Human gut metagenome

SEQ ID NO: 20618 - protein, 465 aa, unidentified; identical to SEQ ID NO: 8068
  REGION 1..465: note = Human gut metagenome

SEQ ID NO: 20619 - protein, 422 aa, unidentified; identical to SEQ ID NO: 11357
  REGION 1..422: note = Human gut metagenome

SEQ ID NO: 20620 - protein, 396 aa, unidentified; identical to SEQ ID NO: 9891
  REGION 1..396: note = Human gut metagenome

SEQ ID NO: 20621 - protein, 279 aa, unidentified
  REGION 1..279: note = Human gut metagenome
VVVETAEFDLQLLKAIADGKPVPQGEDYQKGEMYGHYNVRQYVLWRDDYTCQCCGAHATKKKEVRLHVHHLESRKVGGDAPDNQVTLCESCHEKLHKGLIAEKDFKKRKRRSTRDATFMGIMRKTLMQRLYSELPIPVIETRGYITKATREKLLVLPKSHTNDALAIAQGKRGFNVGYLPEIAQIDKIYTIRPVRHHNRQLHKAAILKGGIRKSNQAGKYVFGYRLFDKVQFNGQDCFIWGRRTTGIFTIKTINGKMIKDGISFKKLKPVEKSTSYLIA

SEQ ID NO: 20622 - protein, 426 aa, Moorena sp.
MRVFVLDSNKKPLNPCHPGKARKLLNQGKASMFKRYPFTIILKEEKPNHVNNKFELKIDPGSRTTGLAILSANNLIWAALLNHRGLQIKDSLLSRKQIRRSRRNRKTRYRQPRFLNRKKPKGWLAPSLMSRVHNIITWVKRLTKLCPINKIAQELVRFDTQKINNPEISGIEYQQGTLFNYEIREYLLEKWGRRCAYCGIQNVPLEIEHIIPKSKSGTNSVNNLTLACRKCNLAKGNQDIKDFLSNKPSILNRILKQCKQTLKDATAVNSTRWKLFNSLKEFNLEIETGTGGMTKYNRTKQGLEKTHWLDATCVGKSTPEKIKVEVIKPLIITATGRGSRQMVKPDKYGFPRTSPKLRQKQFFGFQTGDIVKAVVTKGKKVGTYVGRVAVRKTGSFNIKTAFSTVQGINYKYCKPIHKADGYSYAT

SEQ ID NO: 20623 - protein, 544 aa, unidentified
  REGION 1..544: note = Human gut metagenome
MKQKKQKVMVYILNKKGKPLMPTTRCGHVRKLLDSKKAVVVNSNPFTIRLKYDTPNGVQDVFAGIDSGRENIGSGVSNEDGDCLYLGELRTSNKSIKMKMTERVGFRRERRKHDRQNKQRKARKDHTEIQNGKDDICRATISCKSVQISYPTAEESVTHKIIRGKEGKFANRHRDGDWITPSARQLVQMHMNDLKSICKILPISHVTLERVAFDFQKLENENIKAWEYGKGKLYGYDSPEEYIHDVQDGKCLVCGKPHIDYLHHIIPRSKGGSDKVSNIAGLCYDCHYGPIGVHNCQDTQDRLPELKNEVNKQYKVSLLNSVMPVLIEEIDKFCKANSIMFSICEGHDTAKVRDMYDLQKDHCLDGFAISLVGRNVKSVDVMPDRIHQKQRYKKKSKNIIQKRNYREYYDDKKLVAINRHKGTDQKADSLEEYMNTYAETHTADECKMHFESLTVKPARRTYTFHKEGRICPLHIGDKVRYEKKNKIKGNTKVDTFICEGIYFSKDENKAKVEHNKTKSKKMKFCRAIESGCIPYIDYIKLALI

SEQ ID NO: 20624 - protein, 490 aa, unidentified
  REGION 1..490: note = Human oral metagenome
MYVVYVLNRQGKPLMPTKRFGHVRRMLKTGKAKAISTKPFVIQLQYESTDFVQPLYGGTDPGRTNIGEAVLNNKGEVVYAAHVITRNKEIPKLMADRATHRRASRRGERLRRKRRAKANGTMTCFPEGRKLPGYKDGVLELKDIFNTESRFNNRKRPAGWLTPTARQCIQTHLNMVQNICKILPVTDWTLEYNRFAFMQLEDGSVRGWGFQNGRLKGYANKEDYIYALQGGVCICCGAPIEHYHHIKPRHKGGSNTPENLVGLCSVCHAEIHTGKRNLDKIGKYKKYAGTSIVNIAIPFIWDGIVKMFGNKAHICEGQETAELRRANNISKEHFTDAVCIAGIGLDITPQYDNNQPFELRQFRCHDRSYIKAQVERTYMDGKTIVAKNRKPRFGQKGDALSDLQSKITEEHGELAARRAVSKLVVKKSYRRYNALERIKPSAVFMFSNKKYLLSGQLTNGMYYRAFGKGTKNFSSINCEVISSGYSLTYM

SEQ ID NO: 20625 - protein, 462 aa, unidentified
  REGION 1..462: note = Human gut metagenome
MSVLVIGRNGRALMPTNPRKARLLLKKKTASVVCRHPFTIQLLYKTGCATQEGCIGIDTGSQHIGVGITCGDRVILKDEHALRSSMEKRSLLATRTVMRRGRRYRKVRYRKPKWRHHTKRMYFEKANRRGQHWRKVKTTTQSPRSKGWLPPSLQSKCDHHFRIIDRYLKYLPDPITRNLVIEAGRFDMARMNDPTIHGEMYQRGPMYDAENLRAYIFARDNYQCACCKAKAGTTRKADGTTVKLVAHHILFRSRGATDNPKYIISVCDHCHTTKAHQPGGILYSWMENNKKVARGLRDATFMNILRKRLFARYPQAAFTYGNITAADRKQLRLPKSHANDAVAISLFGKEASTVKNICQTMHYKQIRKSKRSLHEAIPRKGRKNPNTKAVRNKKNTTQANGFKLWDSVLADGKKLFICSFTGTSAYLIDKNGCYISQPGKTYKQWPLSKLKRLHPNGNWLMA

SEQ ID NO: 20626 - protein, 512 aa, Ruminococcus sp.; identical to SEQ ID NO: 9174
  SITE 512: note = misc_feature - Xaa can be any naturally occurring amino acid

SEQ ID NO: 20627 - protein, 426 aa, unidentified
  REGION 1..426: note = Human gut metagenome
LAKDHYRSIDREETNLRVYVLNKRGEPLMPCSSAKARILLKEKKAVVKRRTPFTIQLTIATGETTQPVTLGVDAGYKHVGLSASTKKAELYASEIELRQDVSELLAGRSALRHARRSRKTRHRAPRFDNRKRDKGWLAPSVENRIGAHVSRVEAVLRILPVTKIIVETASFDVQRLKNPDIQGVEYQQGEQLGFWNVREYVLFRDGHECQHCHGKSKDKVLNVHHIESRRTGGDAPNNLITLCETCHKAFHRGEIELRVKRGRSFQAETFMGVMRWTFFERLRARHSEIEVRNTFGYLTKNTRITHGIEKTHCADAFCIAGNLKAKRLGYYFFQKQTRRHNRQIHKLTILKGGARKRHQTPYEIKGFRLYDKVLFQGKTAFIFGRRSSGYFDIRTLDGERISASVSYKKLRLLEKRRTYLIELRRN

SEQ ID NO: 20628 - protein, 432 aa, unidentified
  REGION 1..432: note = Viral metagenome
MVYVLDITGSPLMPTERHGKVRRMLRDGKAKVVKKNPFTIQLKYETTNYTQPITLGVDSGSKHIGLSASTKKKELYVADVQLRTDIVDKISSRREARKTRRNRKTRYRKVRFQNRIKSKHKGWLAPSVGQKIQCHLKQVEDVHKILPVRKIVIETASFDLQKIQNPDIHGVEYQHGPQFGFWNVREYILFRDNHTCQHCHGKKKDPILNVHHIESRKTGGDSPNNLITLCETCHKKYHSLSSEKQKMWKLKRGRSLKDASFMGVMRRTFYERLKEMYPKIEVQQTFGYITKNNRIRLGLKKEHYNDAYCIAGNFDARPLTSVLFKKKVRRHNRQIHKFNTVKGGKRKLNQTPYLVKGFRLFDKVEYQGQECFISGRRASGSFALKTFDWEKVSDGVTFKKLKLLEKRSGYITARKERAFLQRLKPLVSSPEK

SEQ ID NO: 20629 - protein, 434 aa, unidentified
  REGION 1..434: note = Human gut metagenome
VPYMVYVLDIDGQPLMPTSRHGKVRRLLNSHLAKVVKRCPFTIQLLYQSTKETQPVSLGVDAGSRHIGLSATTEREVVYQEELVPRNDIVKLLSARRALRRSRRNRKTRYRRVRFNNRVHSKHKGWLAPSVEVKIQEHITATKRICQILPIFDIHVETAEFDLQRLKAMEEGRLLPAGTDYQLGEQYDFYNTRQYVLHRDEYTCQCCGTHDNNVKLHVHHVESRQTGGEAPNNLITLCEHCHKSIHAGKMMLPKGKKRGKSYRDAAFMGIMRNTLLERLRKEVNVPVTMTYGYITKYWREKAGLEKSHINDAICISKHPYARPLETYYLTKAVRHHNRQIHKTKFSKGGIRKRNQAPYLVKGFRLFDKVLYQGESYFIFGRRITGYFDIRTLDGTKVNKGSTSYKKLRIQDTAEAYLTEVRAIPHMNEFTCVLA

SEQ ID NO: 20630 - protein, 413 aa, unidentified
  REGION 1..413: note = Human gut metagenome
MTSYAFVLDANGKQLAPTKEQKAWFLIRKKRAALVSKYPMVIQLKKEIQENEICKDEIRCGIDDGGLHVGIALVQKCKTKNKVVFKGTIEQRNDVKHLMEVRRGYRRYHRYHKRYRQARFNNRKSSKREGRIAPSILQKRQATIRVINQLNKWINITNYWLEDVSIDIRVLTDGYKSYRWQYQKSNRLDENIRKSTILRDGGKCMECGKSNCRLEVHHIKPKRRNGSNTLDNLITLCESCHQKTEGQEELYMDRYFSLLKSSDNKNLNYAQHVMIGKMWLRKQLSGLGVLYLTSGGDTANKRIDWNIEKSHANDAVCITDLQPDTYDMKEWTMKPMRRQSKAKTDHVLGIKHRDLVEYTFKNGETHRGYVTALYPEQKAINFQSPTKHCKKVNARKCKLLWKYSKIYWFENAS

SEQ ID NO: 20631 - protein, 420 aa, unidentified
  REGION 1..420: note = Human gut metagenome
TISPVYRGFARYKGLNTGKEKKAIVVRRTPFTIQLTIATGEAKQPVSLGVDAGYKHVGLSASTEKAELYASEIELRQDITDLLSARRELRRARRNRKTRYRAPRFDNRIHTKRKGWLAPSVENRINAHLSRIEAVLRLLPVTKITVETASFDMQLLKNPDISGKEYQEGEQLGFWNVREYVLFRDGHVCQHCHGRSKDPVLNVHHLESRRTGGDSPGNLITLCETCHKALHRGEITLKAKRGQSFRAEAFMGIMRWEVLNRLKASHPELEVNNTYGYRTKHARISNGIAKSHCADAFCIAGYLGAKRLGKFFFQKQTRRNNRQIHKLSILKHGLRKRNQAPFEIKGFRLFDKVASKGEEGFIFGRRSSGYFDVRKLDGTRISAGISYKKLHLLEKRQTYITEIRKEKALPPLPEGRGLRA

SEQ ID NO: 20632 - protein, 414 aa, unidentified
  REGION 1..414: note = Human gut metagenome
MPCSPAKARLLLKEKKAVVVRRTPFTLQLTIATGEAKQAVSLGVDAGYKHVGLSASTKKAELYASEVELRQDITDLLSARRALRRARRNRKTRYRAPRFDNRIRTKRKSWLAPSVENRINAHLSRIEAVLRLLPVTKITVETASFDTQLLKNPDIAGKEYQEGEQLGFWNVREYVLFRDGHVCQHCHGRSKDPVLNVHHLESRRTGGDSPGNLITLCETCHKALHRSEITLKAKRGQSFRAESFMGIMRWEVLNRLKASHSELEVHNTYGYRTKHARIANGIDKSHCADAFCIAGNLGAQRLGEFFFQKQTRRNNRQIHKLSILKHGLRKRNQAPFEIKGFRLFDKVACKGEEGFIFGRRSSGFFDVRKLDGTRISAGISCKKLHLLEKRRTYLTEIRKEEALPALPEGRGLRA

SEQ ID NO: 20633 - protein, 481 aa, unidentified
  REGION 1..481: note = Human gut metagenome
MWTTVLRDEKPYGRSSALPARECVSIAKKRRHRMVAVLSKTGIRLMPTSSYRARKLLAKKKAVICGYCPFTIRLTERETGDVQPVELAVDTGYFHVGNSLKTAKHELAAVEIRTLMDEKQRYDDRRRYRRMRRSRLRYRAPRFDNRRRPEGWLAPSIQGRMEQNLAFLRRVLSVVPVTRIVMEMGQFDTQVLKAVEEGRPLPEGTDYQQGERYGIATLREAVFTRDNYTCQCCEKTVHDGVILHVHHIVYRSQGGTNRMGNLITVCEKCHTPKNHKPGGKLYKWKPTVKSFKGATFMTAVRWIVYRSVKESFPDVDVRITYGAKTKLQRRTLDITKSHVNDAYVMGDFHPKHRASPVILQKKRRNNRILEKFYDAKYIDTRDGSKKTGQQLFNGRTNRNHNTDTENLRPYRGTKLSKGKRAIRTTRYRIQPHDILVYQGQEMEASGCHCKGTRVMTTAKKSLPIGKVRVRRYSGGYYAVAE

SEQ ID NO: 20634 - protein, 408 aa, unidentified; identical to SEQ ID NO: 4810
  REGION 1..408: note = Human gut metagenome

SEQ ID NO: 20635 - protein, 453 aa, Moorena sp.; identical to SEQ ID NO: 6443

SEQ ID NO: 20636 - protein, 442 aa, unidentified; identical to SEQ ID NO: 2903
  REGION 1..442: note = metagenome

SEQ ID NO: 20637 - protein, 423 aa, Arthrospira sp.; identical to SEQ ID NO: 5825
  SITE 22: note = misc_feature - Xaa can be any naturally occurring amino acid
  SITE 29: note = misc_feature - Xaa can be any naturally occurring amino acid
  SITE 151: note = misc_feature - Xaa can be any naturally occurring amino acid
  SITE 153: note = misc_feature - Xaa can be any naturally occurring amino acid
  SITE 178: note = misc_feature - Xaa can be any naturally occurring amino acid
  SITE 210: note = misc_feature - Xaa can be any naturally occurring amino acid

SEQ ID NO: 20638 - protein, 535 aa, unidentified; identical to SEQ ID NO: 6116
  REGION 1..535: note = Human gut metagenome

SEQ ID NO: 20639 - protein, 295 aa, unidentified
  REGION 1..295: note = Clostridia bacterium
LAGAICGGQDPGAYHQYQAGFELLPIGKVVVETAEFDLQLLKSIADGMPVPQGENYQKGEMYGFYNVRQYFFSRDGYPCQCCGAHGKGIKFHTHHLESRKTGGNAPDDLVTVCDKCHKAFHAGLITDAKLKKRRRKSTRDAAFMGIMRKTLLQRLRAELPIPVVETRGYITKATRERLLKLPKSHTNDALAIAMGRHGFGIKEVTYMPQSDRIYQIKPVRHHNRQLHKALPKKGGRRQRSQGPKYVQGFRRFDKVLYRGQECFIWGLRTRGYFQLKLLNGTKVHESAKASELILL

SEQ ID NO: 20640 - protein, 378 aa, unidentified
  REGION 1..378: note = Human gut metagenome
VGSEMCIRDSAGSKTIGLSASTETEELFAAEVTPRNDVVDNLSTRREFRRSRRNRKTRYREPRFNNRVRSKHKGWLAPSVEVKIQEHITAVKRVCALLPVGKIVVETAEFDLQLLKAVEAGLPVPRGEDYQKGEMLGHYNIRQYVLWRDGYTCRCCGTHGKGVKFHVHHLESRKTGGNAPDNLVTLCDGCHKKFHKGIITPDILKKRKCRSTRDAAFMGIMRKTLMERLRAELAIQVVETKGYITKYTRVELLKLDKTHTNDALAIAQGRRGFGVEELTTIPQSDYIYRIRPVRHHNRQLHKATILPGGIRKSNQAPRYVRGFRLFDKVSYLGEDCFIWGRRSSGSFLLKLLDGTKVKDGVGYKRISLLERSASYLIS

SEQ ID NO: 20641 - protein, 372 aa, Aphanizomenon sp.; identical to SEQ ID NO: 5678

SEQ ID NO: 20642 - protein, 421 aa, unidentified
  REGION 1..421: note = hydrothermal vent metagenome
MVFVLSRDKTPLAPTHEAKARKLLKQGKAVVHKIFPFTIRLKEKKESDKQFDIKFDVGASVTGVAIVDAVKCFFFAEIVHRGKVIKKAMDSRRAIRRGRRARKTRYREARFDNRTRPNGWLPPSVKSRADNVINFAKKYVKLIPLKKAIVEKVSFDTSSMTNGKKLYGDEYQNGELKDTKLRDFIFKKYNYKCVYCGGVGEEIEHIIPRSKGGTNSIQNLTLSCRKCNIEKGNLSLKDFGKKVKKDFSHIEPRKTPKNASIIQSARTYTLKELAKNFEVETGEGWETYANRKELKLPKEHYYDAMCIGDNYKYKIVTQRVLEVKAQGRGNRQMCRMDKFGFPRTKAKGSKIIKGFQTGDIVKAVVTKGKKIGTYLGKVAVRASGNFNITTTEATIQGINYRYCTTIQKGDGYAYATRTINQ

SEQ ID NO: 20643 - protein, 460 aa, unidentified
  REGION 1..460: note = Human gut metagenome
MVAVVDLFGKPLMPTNEYRARKLLKQKKAKIFGYRPFTIQLTERKSAEIQPIELCMDTGYIHIGISAKSERHEYLGMQIDTLTDEKLKHDDKRQYRRQRRNRKRYRAPRFDNRRRKEGWIAPSLEHKKEIHIDAIQRICKVMPITDITLEMGNFDTQVLKAVEEGKPLPQGSDYQHGERYGIATLREAVFLRDGYKCQCCEKSVKDGAILHVHHIKYRSQGGTNRMSNLITVCDKCHTQKNHKPGGKLWNWKPKLAEFKGASYMTSIRWMLYNEVTALLPNRSIHITYGAKTKESRRKLDIKKSHVNDAYVMGLFCPKHRTKPVYFKKKRRNNRVLERFYDAKYIDGRDGKKRSGQELFNGRINRNHRKDSENLHLYRKQKVTKGKRSIRNKHYPIQPHDILLYQKKKYENAGCHNNGSRVILLPEKKSVALKQLTMYQYAGGYYRVPYESNKKEERMSS

SEQ ID NO: 20644 - protein, 465 aa, Nocardiopsis sp.; identical to SEQ ID NO: 19742

SEQ ID NO: 20645 - protein, 438 aa, Moorena sp.
MRVCVVNQQGRPLMPTSPRKARLLLQAGKAEIVERTPFTIRLLYGTRGYTQPITLGVDAGYATGGFSAVTEKEELVRGELKLLAGMSERLAERAMYRSGRRRRTRHRKPRFDNRRRPGGWLAPSIQHKLDSHLRLIARLCAALPITHVVIEVASFDIQRLKDPDIEGVGYQQSEQAGFWNLREYILHRDGHTCQNPACPNRAKKILQVHHLGYWRGDGSDRPANLITLCTRCHTPENHQPGGFLWGWQPRLQSFRPETFMTLVRWRLVEALGAEATYGYVTKSRRIELELPKSHSNDAFVIAGGSSQARAEPLLLEQVRRNRRALQVWYDAKYVDARTGEVVKAQVLNNGRRTRNRNLSGENLRRYRGQKVSKGRISIRRQRYPYQPGDLVRYEGQIYRVQGMGGYGRNVKLAGQSKEVRASLVSPVCWRKGICRQVP

SEQ ID NO: 20646 - protein, 536 aa, unidentified
  REGION 1..536: note = Human gut metagenome
VLRPRYQYPTRWYPSREQGSGNGCLSGEENTDLEQEVSGTLSKGDHSHPGEQDFCVPAITIQGGPAMSVFVVGLNGCRLMPTSERKARLLLKHGKASVYRKVPFTIKLNYKTGSTTQSGYLGIDTGSQHIGVSVVREDGTVLHKEEIGLRDSMSKRKLMQSRASSRRGRRHRKTRYRHPKWRPKAKRVYCEIPDRKGRHWKKKEITFASKRAKGWLPPSLQSKTDHHIRWIKKLQDLLPEGYRLSIELGRFDPARLKDPEIHGELYQKGPQYDYENVRAYVLNRDRYTCQVCGKKGGKLHVHHILYRSHGATDDPQYMATVCSDCHNTENHQQGGILYQWMQKQKKFTRGLRDATFMNILRKRLIEAFPGATFTYGNITKADRERLRLPKSHGNDATAIAIVKTGIMTVKDKEPVIYIQQVRRKKRSLHEETPRKGRKEPNRKASRYDKNTKAVTVTKRKNKKKITITGCLFDRVELNGKKGWISGFTDKSCYVKDENDQYIRTSPKYKQVSLSKLKILHHCGNWAIGARQSLGKG

SEQ ID NO: 20647 - protein, 413 aa, unidentified; identical to SEQ ID NO: 11958
  REGION 1..413: note = Human gut metagenome

SEQ ID NO: 20648 - protein, 512 aa, unidentified
  REGION 1..512: note = Human gut metagenome
MSTVYVLNKDGKPLMPTTRGGHVRHLLKEQKARVVRTNPFTIQLLYETDNLVQPLYLGIDPGRTNIGVAVVKTDGTAVFTAHLETRNKEIPKLMKKRKDSRRARRTNGRRCRRQRRAKANGTISKKCVKQTTAQNGSVSKRAKEIGVIKRHLPGCEKEVLCISIKNKEAKFSNRVRPEGWLTPTANQLLQTHINLVKKIQKFLPISDVVLEVNKFAFMQLDNPNVQKWQYQQGPLYQKASLEEAVSEMQEHHCLFCKNTIDHYHHVVPQHKNGSNTIGNIVGLCAKHHDLVHKDTSWQEKLAKKKTGLNKRYGALSVLNQIIPALTKELSSLFPKHFFATNGKSTYDYRAAHGVSKDHWLDAYCIAGSVLPNDVCDNNINNHVPYELKQFRRHDRRALHKENMGRVYTLNGKSVATNRHKAIKQTTDSLEEFRQRQPNDVCKLKVKEHHPEYRNPKRSFPGCVFLVGKQTHVMQGTSGSHNGKADGYYDTNGNSYSSGKCKFVAKNEGIVFA

SEQ ID NO: 20649 - protein, 419 aa, Moorena sp.
MQNYVFIIDTNKRPLNPISPKKARRLLKKGKAAVFRMYPFTIILKTAIDDPTISPCQIKIDPGSKVTGFALVQNGQVIWGMELEHRGGLIKKKLESRRAVRSGRRNRHTRYRKPRFLNRRRPQGWLPPSLEHRILTTQTWVKRLIKFCPVNEIWVERVKFDTQKMQNPEISGVEYQQGELAGYEVREYLLEKWERECTYCGKQNVPLQIEHIHPKSKGGSDCVSNLCLACKKCNQRKGNKPIEDFLKKKPSLLQKIKTKAKQPLKDAAAVNATRKKLVKMLQSVRPVVTGTGAQTKYNRTKLGLPKQHWIDAACVGDIETLTLITSQPLLVTCFGQGGRQKAALNKYGYPIRHNPLKPIKGWVTGDIAKHQKLGIGKVTPRSKGSFGFTPLGMKGYKSCKPQDISAIHRKDGYTYGFYQ

SEQ ID NO: 20650 - protein, 490 aa, unidentified
  REGION 1..490: note = Competibacteraceae bacterium UBA4410
MGEGSEQQCSVTRCVSTFEFWRRNVAVFVLDRHKKPLMPCSEKRARKLLEKGRARVHRLMPFSIRLVDRTVNDSVLQPVTLKLDPGSKATGIAVVRESETIDEETGEIKTTVYVLTLFELQHRGKQISESLTARRQMRRRRRGNLRYRAPRFLNRTKPKGWLAPSLQHRVDTVSAWVQRFQRLAPITGIAQELVRFDLQQMENPEISGVEYQQGTLHGFETKEYLLEKWNRECAYCGTKNIPLQVEHIQPKANGGSHRVSNLTLACQPCNQKKGAQAIEIFLAKAPKRLAKIKAQVKRPLKDASAVNSTRWALFNALKATGLPILTGSGGRTKFNRSTLGIPKDHALDAACVGIMEAIHHWDKPALAIKATGRGSYQRTRLNAFGFPRGYLTRQKRIKGFQTGDMVKAEVPTGKKIGSYRGRVAVRASGSFNIQTATGLIQGISHRYCKVTQRADGYGYSQQLNPKEVALAGDPLSLPALKGGVSRGKSR

SEQ ID NO: 20651 - protein, 427 aa, unidentified; identical to SEQ ID NO: 8384
  REGION 1..427: note = Human gut metagenome

SEQ ID NO: 20652 - protein, 439 aa, unidentified
  REGION 1..439: note = metagenome
MSVFVLDKHGKPLMPCSEKRARLLLSRHRARVHRLVPFVIRLTDIRLQDVSLQPLQVKLDPGSKTTGVAVVRVAEPEGIGRSVSVLFLMELIHRGRQISESLTARRAMRRRRRGQLRYRAPRFNNRTKPKGWLAPSLRHRVETTINWVARLRRWAPVTGLVSELVRFDMQVMENPDISGVEYQQGTLSGYEVREYLLEKWGRSCAYCSKKEVPLQIEHVVPKARGGSNRISNLTLACGPCNTKKGARSIEEFVKDSATLKRILAKLKAPLRDAAAVNSTRWALLNELKKTGLPVESASGGRTKFNRSQLGIPKTHALDAVCVGKIDAVIDWRRPTLTVTCMGRGTYQRAKLNKFGFPRGYSIREKRIKGFQTGDIVLAMVPASSKKAGQYIGRVAIRKTGSFNIQAGGNVIEGISHKYCQLIQRGDGYRYHQSQTKIAN

SEQ ID NO: 20653 - protein, 522 aa, unidentified
  REGION 1..522: note = Human gut metagenome
MATDFIYVLDTDGTPLAPTHRHKHTRMLLKTRQAKVVCYRPYTIQLLYESETPRVVPQLIAGQDPGRTNQGTNVIDRTGKSVYAAHIETRNKEIPTLMKNRSANRRASRNGERARRIRKAKLHHTTFQYGDHNRKLPKCNETVPIHYIINTEAKFCCRTRSDGWLTPTANQLLQTHISEVKQLMKILPITDFVIELNKFDFAKLKDPTLQKWQYGKGSLYQTNLKDLIDEEQDHHCLLCKNPIEHYHHIVHKADNGSDTVENMVGLCKKCHTRVHKNQKVEEKVLSKKEGLEKKFAGTSILNQIFKPYITWLIKTFGEDHVFITDGKTTAKFRNDYNVPKTHELDAYCIACSILENPIINYDCVVFEEKQFRHHNRQLINSTRERKYYHVDRVQTTKTLKNGKQVVKTELKNKTLVATNRKKRMDQKTDSLREYHMKLRQKYDKQTVKKMISELVVVKSTRGYRDQNTIMPGAVFMYHGKHYVLSGTSNQGQYFRAVGQGKTNFPTKDCKIVRKNTGLVYLY

SEQ ID NO: 20654 - protein, 457 aa, unidentified; identical to SEQ ID NO: 19263
  REGION 1..457: note = Human gut metagenome

SEQ ID NO: 20655 - protein, 420 aa, unidentified; identical to SEQ ID NO: 2681
  REGION 1..420: note = Human gut metagenome

SEQ ID NO: 20656 - protein, 414 aa, unidentified; identical to SEQ ID NO: 4264
  REGION 1..414: note = Viral metagenome

SEQ ID NO: 20657 - protein, 430 aa, Moorena sp.
MSNFVFVLDTNKQPLEPVTPGLARRMLNQGKAAVYKRYPFTIILNYSCDKPLTKSHEIKIDPGSKTTGLAVLQGDKIIWAAELVHRGNHITCDLASRSAIRRNRRNRKTRYRQPRFLNRTRTPGWLPPSLASRVSNIVTWVNRLRRYVPVTAISQELVKFDTQAMQFPEISGIEYTQGELAGYEIRQYLLEKWGRKCAYCGIKNTPLEVEHIHPKSKGGSSRVSNLTLACRNCNLAKGNRDITDFLSGKPDILSRVLKFACLPLKDAAAVNSTRRALFEKLQQTGLPVTTGTGGQTQYNRTRMGLPKTHWLDAACVGKVEQLAVLSRQPLLITAKGWGNRQMCTPNKYGFPSKHRTRCKTFFGFQTGDMVKAILPIGKFAGTHVGRLAVRESGVFDLRTAWGKISPVRHKYCKTVHRNDGYMYGFSTLVR

SEQ ID NO: 20658 - protein, 413 aa, unidentified
  REGION 1..413: note = Human gut metagenome
MTSYSFVLDANGKQLAPTKEQKAWFLIRKKRAALVSKYPMVIQLMKEIPENEICQDEIRCGIDDGGLHVGIALVQKCKTKNKVVFKGTMEQRNDVKHLMEVRRGYRRYHRYHKRYRQARFDNRKSSKREGRIAPSILQKRQATMRVINRLNKWINITNYWLEDVSVDIRALTDGYKPYRWQYQKSNRLDENIRKAAILRDGSKCMECGRANCRLEVHHIKPRRRNGSNTLDNLITLCESCHQKTEGQEELYMDRYFSLLKSSDHKNLNYAQHVMIGKKWLRKQLSNLGVLYLTNGGDTANKRIDWNVEKSHANDAICITALQPDTYDMKEWAIKPMRRQSKAKTDNVSGIRHRDLVEYTFKNGETHRGYVTALYPEQKAINFQSPTKHCKKVNARKCKLLWKYSKIYWFENAS

SEQ ID NO: 20659 - protein, 415 aa, unidentified
  REGION 1..415: note = Human gut metagenome
LMPCSPAKARLLLKEKKAIVVRRTPFTIQLTIATGESKQPVSLGVDAGYKHVGLSASTEKAELYASEGELRPDVSDLLSARRTLRQSRRNRKTRYRAPRFDNRIRTKRKGWLAPSVENRINAHLSRIGAILRLLPVTKITVETASFDTQLLKNPDISGKEYQEGEQLGFWNVREYVLFRDGHACQHCHGRSKDPVLNVHHLESRRTGGDSPGNLLTLCETCHKALHRREIKLKTKRGQSFRAEAFMGIMRWEVLNRLKASHPELEVHNTYGYRTKHTRIVNGIDKSHCADAFCIAGNLGAKRLGEFFFQKQTRRNNRQIHKLSILKHGLRKRNQAPFEVKGFRLFDKVVCQGEEGFIFGRRSSGSFDVRKLDGTRISAGISYKKLRLLEKRRTYLKEIRKEEALPPLPEGRSLRA

SEQ ID NO: 20660 - protein, 442 aa, Sutterella sp.; identical to SEQ ID NO: 3791

SEQ ID NO: 20661 - protein, 341 aa, unidentified
  REGION 1..341: note = Human gut metagenome
LFKNVKQKNKVFLKGTIEQRNDVKKLMSERKMYRKYRRKFKRYREERFSNRASAKRKGRIAPSILQKRQATMRVINQLNKWINISGYLLEDVAIDIRAMTDGYKSYGWQYQKSNRLDENIRKAVILRDGCKCMECGKSNCRLEVHHIKPRRNNGSNTMSNMITLCSKCHNKTEGKEGQFMDRYFSMINGYDNKHLNYASHVMIGKTWLREQLSNLAPLHLTTGGDTANKRIDWSIEKSHSNDAICITGLMPDTVNVKDWVLKPIRRKCKGKTDNVNGFKYKDYVQYTYQNGATYRGYVTVLCPKSNAISFQSNYKKCAKVNAHKCKLLWRFNSIYWLSERR

SEQ ID NO: 20662 - protein, 433 aa, Lactobacillus sp.; identical to SEQ ID NO: 6567

SEQ ID NO: 20663 - protein, 413 aa, unidentified; identical to SEQ ID NO: 14960
  REGION 1..413: note = Human gut metagenome

SEQ ID NO: 20664 - protein, 419 aa, unidentified
  REGION 1..419: note = Human oral metagenome
MFVYVLDKNGQPLMPTSRFGKVRRLLRDKKAKVVRSCPFTIRLLYEPETKIVQDVVLGVDTGSKYVGVACVGNNKVLYQSQVELRDDIKRKMDSRRKYRRNRRNRKTRYRTPRFLNRRNSIRKDRYCPTIVSKFHGHEREIEFCKKILPIKDMVLETGKFDTQLMEKPWLQEHKWAYQKGVNYGYTNAREHALVRDKYTCQYCGKKNCRVEAHHIIFKSKGGGDTLENLITLCEDCHKAVHLGKIELKLKGKRKSTLKYATQMSIIRSMLLKKYPDAIETFGYVTKANRENLNIGKEHYLDACVIASGGLEFEQSDVLYRKKCVSKQDRQLCKGIRGEKGLPTGKVFGFKKFDKVQYLEETCFIKGRRSSGSFVLMDINNNSIDFRNRGGKQNPSYKSIKRINARRSILCLAKRIETGE

SEQ ID NO: 20665 - protein, 493 aa, unidentified
  REGION 1..493: note = Human gut metagenome
MAAVYVISASGKPLMPTTRCGHIRGLLNAGKARVVEREPFTIQLKYETPDVTQPLYLGIDPGRTNVGSAVVREDGECVFTAQLTTRNKDVPKLMKARKQFRMAHRRLKRRCKRQRRAKAAETLSQKGEFQRLLPGYEEPILCKGIRNKEARFNNRQRPAGWLTPTANHLLLTHLNMVKKLQKLLPITDVVLEVNRFAFMAMENPSIRRWQYQQGPLYGKGSVEDAVYAQQDGHCLFCGKPIAHYNHVVPQHKNGSETLENRVGLCNEHHDLVHKDRAWDAKMKETKAGLNKKYHALSVLNQIIPALTEQLTAMFPQHAFVTTGKDTADFREDYGIAKEHHLDAYCIACSVLAEPTKVAAPTGKPHRLMQFRRHDRQGCHKENIKRVYLSEGKAVATNRHKAIEQKDDSLEEFRKTHTQQEVSALTVKDHQPVYKDMRRFMPGGVFLFNGKVHTLQRSHGRYKGMPFYYIDTDGSKNHAKGCIFLQQNCGLRWV

SEQ ID NO: 20666 - protein, 489 aa, unidentified; identical to SEQ ID NO: 5672
  REGION 1..489: note = Human gut metagenome

SEQ ID NO: 20667 - protein, 429 aa, unidentified
  REGION 1..429: note = Human gut metagenome
MKGAKHLVVYVTSQSGQALMPTKRFGKVRRLLKEKKAKVIRRCPFTIKLLYETETSIVQDVVLGVDTGSKNIGVSCVGNDKVLYQSQVVIRTDIKKNMDKRRSFRRNRRNRKTRYRPPRFLNRKNSTKLNRLPPSVRHKVQAHIDEIEFCKKMLPIAKIVLEVSQFDTALMKNPTLISEKVRRWGYQKGFNYGYSSRRAAVLHRDKYTCQICGAKHTRLEVHHIIFRSKGGTDDEKNLITLCEDCHAAIHAGKITLTKKPKKMNLKHATHMSIIRSQLLKKYPEAIETFGFVTKENRNNLRLPKNHYIDACVIASAGKSFIPSDEIYYKRRVAKGDYQLCKGSRGEVKLPVGKIQGFRKFDKVGYLGKTYFIKARMSSGYAALMDIFNEKADFSHMPKGYKTPKLKNLKRLAARTSVLCVRENIIADIA

SEQ ID NO: 20668 - protein, 471 aa, Acidiferrobacter sp.; identical to SEQ ID NO: 16644

SEQ ID NO: 20669 - protein, 419 aa, unidentified; identical to SEQ ID NO: 5032
  REGION 1..419: note = Human gut metagenome

SEQ ID NO: 20670 - protein, 413 aa, unidentified; identical to SEQ ID NO: 10655
  REGION 1..413: note = Human gut metagenome

SEQ ID NO: 20671 - protein, 456 aa, unidentified
  REGION 1..456: note = Human gut metagenome
MTNIYILDINGKPLMPCHNGAFVRCRLKNKEAKVVKRKPFTVQLMYEVKNNYKQDIYLGVDAGYKYIGFSASTSNQELFSGELEQDCGMVERNKERRMYRRQRRSRLRYRKARFNNRKAGKPQGWTAPSLQRKRDTHLRFIMMLSSIMPITDINVEIGLFDPALMKATAEGRTIKGADYQHGEAEGFENMKSYIRYRDSYTCQNPNCKCHKMKKEDREKLKLHVHHIGYYKHDRSSRPGNLITLCELSHTPETHQPGNLLYGWKPKMKSLRETAFMNTVRKEIVDTLKAVYPDKTVRYTYGYKTNLTRRDWHVPKSHHDDAFCIAGQYSLKRAETVYFNQQRRNNRSLEIFHDAKYIDSRDGKRKTGKELYCGRNTRNKSFNKENLHQYRSKKVSRGKRNIRKQHYKYQPNDIVVFEGQKYKIRGSHCKGSRVILDTKKSVSVKKIHILKHCSGIC

SEQ ID NO: 20672 - protein, 528 aa, unidentified
  REGION 1..528: note = Human gut metagenome
MATVYVLNKDGKPLMPTTRCGHIRHLLKEKKARVVRTNPFTIKLVYETDDVVQPLYLGIDPGRTNIGVAVVKVDGTAVFTAHLETRNKEIPKLMVKRKEHRQGRRHYRRCKRQRRAAAHGTLSKKCKKQDTAQGGNISKRAQTIGVFERNLPGCENSVLCIGIKNKEARFNNRVRPARWLTPTANQLLLTHVNFVKKICKFLPISDVVLEINKFAFMALDNPNIQKWQYQQGPLYQKGSLENAVSEQQDHHCLFCEKTIEHYHHVILRSENGSDTIANIVGLCAEHHDLIHKDDKLKEELAKKKQGLNKKYGALSVLNQIIPALTYELGSRFQGHFYVTTGKSTCDYRAAHSVSKDHWLDAYCIACSVLPDGCFDNTINSRVPYELKQFRRHDRQVCQQQNVKRKYYLDKKLVATNRHKAIKQETDSLEEYRNNGGTTDKLVVKEHKPTNKRLNRILPGALMAANGKLNVMVASRGLHNGIPDNYVFDNNSKAKPSKCTLINKNKGIVFVSNSVSQPEERSRKAAKRI

SEQ ID NO: 20673 - protein, 458 aa, Lactobacillus sp.; identical to SEQ ID NO: 4474

SEQ ID NO: 20674 - protein, 420 aa, unidentified
  REGION 1..420: note = Human gut metagenome
MQYVYVLSKHGEPLMPCSPGKARLLLKEKKARVVRRTPFTIKLLYRSAGYKQPITLGVDAGSKHVGLSASTEKRELYREEFTPRNDVVKLLSKRKQYRRSRRNRKTRYRAPRFNNRVHSKHKGWLAPSVEVKIQEHITVIKRICRIIPISLVRVETAEFDTQRLKAMLEGKSLPVGTDYQLGEMYDEYNVRQYVLKRDNYTCQCCGAHTTKKKTVKLHVHHLEGRQVGGNAPNNLITLCVDCHKALHAGKVKLDGKKRGKSFKDAAFMGIMRKTLMARLRDELSIPVQGTYGYITKMRREQNDIKKSHVNDARCISKHPLAEPCSVCYRTKAIRHHNRQTHKANFSKGGTRQRSQMPYVVEGYRLWDKVLYKGQECFVSGRRSSGSFTLKKLDGTCISKGVTFKKLRLLEPATNYLIERM

SEQ ID NO: 20675 - protein, 424 aa, Enterococcus sp.; identical to SEQ ID NO: 8320

SEQ ID NO: 20676 - protein, 420 aa, unidentified
  REGION 1..420: note = Human gut metagenome
MQYVYVLNKHGEPLMPCSPGKARILLKQQKACVVKRTPFTIKLLYGSAGYKQPITLGVDAGSKHVGLSASTEKRELYSEEFTPRNDVVELLSTRRQNRRSRRNRKTRYRAPRFNNRIHSKHKGWLAPSVEVKIQEHITVIKRICRILPITLVRVETAEFDTQRLKAMLAGKPLPVGTDYQLGEMYDEYNVRQYVLKRDHYTCQCCGAHNTAKKVVKLHVHHLESRKTGGNAPSNLVTLCTTCHKNLHKGKVTLDGKERDKPLRDAAFMGIMRKTLMARLKEELPIPVQGTYGYITKMRREQNDIKKSHTNDARCISKHPLAEPCSVCYRTKAIRHHNRQTHKANFSKKCIRKRSQMPYLVEGFRLWDKVLYKGQECFVSGRRSSGSFALKKLDGTSISKGVTFKKLRLLEPATNYLIERM

SEQ ID NO: 20677 - protein, 473 aa, unidentified
  REGION 1..473: note = Human gut metagenome
LLRQGRLIVKEVAYMSTVYVLNKDGKPLMPTTRCGHVRHLLKEQKARVVASKPFTIQLLYKTNDVVQPLYLGIDPGRTNIGVAVVKADGTAVFTAHLETRNKEIPKLMKKRKDSRRARRTNGRRCRRQRRAKANGTISKKCVKHDTAQNGSVSKHAKEIGVIKRHLPGCEKDVLCIGIKNKEAKFSNRTRPEGWLTPTANQLLQTHINLVKKIQKFLPISDVVLEINKFAFMRLDNPNVQKWQYQQGPLYQKANLEETVSEMQEHHCLFCKKKIDHYHHVVPQHKNGSNTIDNIIGLCTQHHDLVHKDATWQKRLAKKKTGLNKKYGALSVLNQIIPALTKELSSLFPKHFFVTNGKSTYDYRAAHGVSKDHWLDAYCIACSVLPNDVCDSGINNRVPYELKQFRRHDRRALNNENMSRVYTLNDNVVATNRHKATKQTTDSLEEFRQNHPDDVCKLKVKEHHPTYRNMNRNY

SEQ ID NO: 20678 - protein, 424 aa, Phormidium sp.; identical to SEQ ID NO: 13754

SEQ ID NO: 20679 - protein, 406 aa, unidentified
  REGION 1..406: note = Human gut metagenome
MVYVQDIDGKPLMPTTRHGKVRRLLKSNKAVVVNLCPFTIRLTYISDSYKQEIVLGVDAGTKHVGLSATTKSKELYSSEVILRNDIVDLLSTRRELRRTRRNRLRYRKPRFDNRVKSKRPGWIAPSVKYKVDAHIRVVENVCSILPISRIVIEVAQFDTQKIKNPEISGKEYQEGDQLEFWNTREYVLARDGHKCQYCKGKSKDSILNVHHIESRKTGGDSPSNLITLCETCHKEYHKGNIDLKIRRGKSLRDAAVMGIMKWRLYEELKSRYDRVFMTFGYITKHNRIKYGIEKSHTSDAFVISKNINAKRIERQYLKRLIRRHNRQIHKMKILKGGKKKNNQAPFEVFGFRLFDKVLYNNKIFFVYGRRKSGSFNIRDFNGENSKDVSRKKFKLVRGKRHPIILK

SEQ ID NO: 20680 - protein, 388 aa, unidentified
  REGION 1..388: note = Human gut metagenome
LLKDNKAVVVNTCPFTIKLTYKTSDYKQEIVLGVDSGTKHVGLSATTKSKELYASEVILRSDVVDLLSTRRGLRRTRRSRLRYRKQRFNNRVKSKKDGWIAPSVRHKIDSHIRIISFVYSILPVSKLIVEVAQFDTQKIKNPEISGKEYQEGEQLGFWNVREYVLARDGHKCQHCKGKSKDPILNIHHIESRKIGGDSPSNLITLCETCHKEFHKGNIKLKVSRGKSLRDAAVMGIMKWKLYEELKSRYDNVSMTFGYITKYNRINHGIEKSHVSDAFVISRNFNSCRLGYYYKRKLVRRHNRQIHKMKILKGGIRKRNQAPFKVFGFRLFDKVMFQGEEHFIYARRLSGQFNIRDINGENKKDVSCKKLKYVSHGLVSVKTNLFLSQ

SEQ ID NO: 20681 - protein, 204 aa, unidentified
  REGION 1..204: note = Human gut metagenome
MPNKVYVINKHGRPLMPCSPAKARHLLDAGKAKVKKRTPFTIQLVYGSSGYTQEVILGVDDGSKTIGISASTKKEEVFAADVTPRNDVVNLLSARREFRRARRNRKTRYRKSRFDNRVRSKRKGWLAPSVEVKIQEHITSIKMVCRILPVSKVVIETAEFDLQLLKAIADGKPVPQGEDYQKGEMYGHYNVRQYVLWRDDYTCQ

SEQ ID NO: 20682 - protein, 415 aa, unidentified; identical to SEQ ID NO: 4683
  REGION 1..415: note = Human gut metagenome

SEQ ID NO: 20683 - protein, 254 aa, unidentified; identical to SEQ ID NO: 9597
  REGION 1..254: note = Human gut metagenome

SEQ ID NO: 20684 - protein, 406 aa, unidentified; identical to SEQ ID NO: 9317
  REGION 1..406: note = Human gut metagenome

SEQ ID NO: 20685 - protein, 465 aa, unidentified
  REGION 1..465: note = Human gut metagenome
MSTCVCVLSNSGKRLMPTFRLGKVRHLLKDGKAKIVKHHPFTIQLLYDSKTNTQPIEICEDVGYNYIGISVKSQSHEYVSAQYDTLQDEKACHDSCRKLRRSRRNRLRYRKPRFDNRKRGEGWLAPSLKHKKELNVNVVKMYCAVMPITHATVEVGSFDTMLVKAIQEGKAIPEGADYQKGPRYNLATLREAVFYRDNYVCKVCGRKATEGAILHVHHMFYWKGRHGNSLSELITVCEKCHTPANHQKGGKLYGFGENVKFADLSGAAFMNTVRWQIVNELYAAFGKDFVTVTYGAMTKEKRIALRLEKSHNNDAYAMGEFHPNCRCTFEHYEKVRRNNRTLEKFYDSRYIDIRTGEIATGKELFNGRINRSHKKDSENLHKYRGKRIRKGYRALRRKKVALNPGDLVSLNGEILTVHGTHTKKNGSVNVEFKTPSKSGKKSTSLKKLKIIKTISPMRSAWDKVS

SEQ ID NO: 20686 - protein, 546 aa, unidentified; identical to SEQ ID NO: 12293
  REGION 1..546: note = Human gut metagenome

SEQ ID NO: 20687 - protein, 421 aa, unidentified
  REGION 1..421: note = Human gut metagenome
MVYVLDITGQPLMPTDRHGKVKHLLKDGKVKVVKRCPFTIQLLYTTTTYTQEITLGVDAGSKVIGLSASTPRRELYSSEVTLRNDIVKLLSLRREYRRSRRNRTTRYRAARFNNRVHSKNKGWLAPSIENKINTHIKVVADIHKILPISKIVVETASFDIQKIKNPNISGEEYQQGEQLDFWNVRQYVLFRDNYTCQCCKGKSKDNRLAVHHIESRQTGGNAPNNLITLCITCHKKYHKGKIKLPNTIKRDKIFKDAVFMGIMRWAFYERLKNIYPNIRMTYGYITKNTRIQHNLPKTHYTDALCISGNPLAKPLEVLYIQKAIRTRNRQIHKATISKGGIRKLNQAPKYVFGFQLYDKVLYKGKECFIFGRRSSGSFDIRTLDGTKISPGVSHKKLKLLEKRKTILTERVIKNQEGGKQG

SEQ ID NO: 20688 - protein, 420 aa, unidentified; identical to SEQ ID NO: 6507
  REGION 1..420: note = Human gut metagenome

SEQ ID NO: 20689 - protein, 418 aa, unidentified; identical to SEQ ID NO: 17178
  REGION 1..418: note = Human gut metagenome

SEQ ID NO: 20690 - protein, 426 aa, Hydrocoleum sp.
MSNSTNYVFVLDASKKPLTPCQPGIARSLLKAGKAKVFRRYPFTIILNKLVAEKHQGLLLKIDPGSKQTGLALVSQDGEVIFAMVLVHRGQQIKNALERRRNIRQGRRHRKTRYRQPRFLNRNHKKGWLPPSLMHRVLTVETWVNRLIKLAPIDSIAMELVRFDTQKMINPEVSGVEYQLGVLAGYEVREYLLDKFNRTCAYCDAKNVPLEVEHIQPKSKGGSNRISNLTLACRPCNEAKGNQDIQDFLLGKPNLARRILSQAKAPLKDAAAINATRWKLFETLKAKGLPITTGSGARTKYNRCRLDLPKEHWIDAACVGEVEQLTILTTQPLVVTAMGHGCRKMVQMDKYGFPRKGYQAKKPVGGWKTGDIINFVKGKNIGLKGVRIKTVRSKGNFDIRHGDKILSVSRNHIQPIHRRDGYNYSF

SEQ ID NO: 20691 - protein, 477 aa, Moorena sp.; identical to SEQ ID NO: 2625

SEQ ID NO: 20692 - protein, 477 aa, Blautia sp.; identical to SEQ ID NO: 2707

SEQ ID NO: 20693 - protein, 512 aa, unidentified
  REGION 1..512: note = Human gut metagenome
MSTIYVLNKDGKPLMPTTRGGHVRHLLKEQKARVVRAKPFTIQLLYETNDVVQPLYLGIDPGRTNIGVAVVKANGTAVFTAHLETRNKEIPKLMQDRKKARRARRTNGRRCRRQRRAKANGTISKKCVKQTTAQNGSVSKRAKDIGVIKRRLPGCEKDVLCIGIKNKETKFTNRTRPEGWLTPTANQLLQTHINLVKKIQKFLPISDVVLEVNKFAFMRLDNPNIQKWQYQQGPLYKKESLESAVSEIQEHHCLFCKKPIDHYHHVVPQHKNGSNTIGNIVGLCAKHHDLVHKDSAWEKKLAKKSTGLYKKYGALGVLNQIIPALTNKLSVLFPKHFFVTTGKSTHDYRESHSVSKDHWLDAYCIACSVLPSNVCDSNINNHVPYELKQFRRHDRRALHKENMSRVYTLNGKAVATNRHKAIKQTTDSLEEFRQSHPGDVCKLKVKEHHPAYRNLNRNHPGSVFFVGEQAHVMQSIVASKDGKATRYKDTNVNKIAAGQCRFVAKNEGIVFT

SEQ ID NO: 20694 - protein, 428 aa, unidentified
  REGION 1..428: note = Human oral metagenome
MLVYVLKQNGQPFMPTERFGKVRRLLKEGKAKVVRREPFTIKLLYEPETDVVQECYCGVDTGSKHIGVAVVGNDKVLYQSQIELRNNIKKKMNARRASRRNRRNRKTRYRKQRFLNRRNSIKKDRLPPSVKHEVQSHIDEIEFCKKILPVSDLILEVSQFDTALMKNPSLMNEKVKHWGYQQGFNYGYSSRRSAILHRDNYTCQCCGKKNCRLEVHHIKFRRNGGTDDEENLITLCEECHKSVHAGTVVLNKKLKKSKNLKYATHMSIIRSRLLREYPDAIETFGFVTSENRNHLNLKKTHYIDACVIASGGLEFKQSNVIYYKCRVSKGDYRLTRGIRGEQKLPTGKICGFRKFDKVKYFGEEYFIKGRTSSGTAVLMDIFGSKINFNSMPKGLKTPKMFNFKRISVRRSCLCIRKIMEDRAISVLN

SEQ ID NO: 20695 - protein, 450 aa, Moorena sp.; identical to SEQ ID NO: 2935

SEQ ID NO: 20696 - protein, 452 aa, Lactobacillus sp.; identical to SEQ ID NO: 19050

SEQ ID NO: 20697 - protein, 427 aa, Moorena sp.; identical to SEQ ID NO: 2799

SEQ ID NO: 20698 - protein, 428 aa, Moorena sp.; identical to SEQ ID NO: 4442

SEQ ID NO: 20699 - protein, 431 aa, unidentified
  REGION 1..431: note = Human gut metagenome
MPNKVYVINKHGRPLMPCSPAKARHLLDEGKAKIKKRTPFTIQLVYGSSGYTQEVILGVDAGSKTIGMSASTTKEELLSAEVKPRNDVVDLLSTRREFRRARRNRKTRYRKPRFDNRVRSKHKGWLAPSVEVKIQEHITSIKRVCRILPVSKVVIETAEFDLQLLKAIEEGKPVPQGEDYQQGEMYGHYNVRQYVLWRDGYTCQCCGAHATKKKEVRLHVHHLESRKVGGDAPDNQVTLCESCHEKLHKGLIAEKDFKKRKRRSTRDATFMGIMRKTLMQRLCSELPIPVVKTRGYITKATREKLLVLPKSHTNDALAIAQGKRGFNVGYLPEIAQIDKIYTIRPVRHHNRQLHKAAILKGGIRKSNQAGKYVFGYRLFDKVQFNGQDCFIWGRRTTGIFTIKTINGKMIKDGISFKKLKPVEKSTSYLIA

SEQ ID NO: 20700 - protein, 424 aa, unidentified; identical to SEQ ID NO: 3434
  REGION 1..424: note = Human gut metagenome

SEQ ID NO: 20701 - protein, 433 aa, Moorena sp.; identical to SEQ ID NO: 12596

SEQ ID NO: 20702 - protein, 411 aa, unidentified; identical to SEQ ID NO: 2663
  REGION 1..411: note = Human gut metagenome

SEQ ID NO: 20703 - protein, 200 aa, unidentified
  REGION 1..200: note = Human gut metagenome
MVYVVANDGQPLMPTERHGKVCRMLRSGMAKVIKKCPFTIQLQYESERNVQPVSLGVDAGSKHIGISATTKAKVLYESDVELRDDIVKLLATRRQLRRSRRSRKTRYRPARFDNRKRKEGWLAPSIRQKIGSHLTVVANVCKILPINQIIVETASFDIQKIKNPEIQGIEYQQGEQMDFWNVREYVFFRDGHTCQCCKGR

SEQ ID NO: 20704 - protein, 456 aa, Halomonas sp.; identical to SEQ ID NO: 3067

SEQ ID NO: 20705 - protein, 512 aa, unidentified; identical to SEQ ID NO: 3711
  REGION 1..512: note = Human gut metagenome

SEQ ID NO: 20706 - protein, 447 aa, unidentified; identical to SEQ ID NO: 7023
  REGION 1..447: note = Human gut metagenome

SEQ ID NO: 20707 - protein, 423 aa, Moorena sp.; identical to SEQ ID NO: 8486

SEQ ID NO: 20708 - protein, 431 aa, unidentified
  REGION 1..431: note = Human gut metagenome
MPNKVYVINKHGRPLMPCSPAKARHLLDEGKAKVKKRTPFTIQLVYGSSGYTQEVILGVDAGSKTIGMSASTTKEELLSAEVKPRNDVVDLLSTRREFRRARRNRKTRYRKPRFDNRVRSKHKGWLAPSVEVKIQEHITSIKRVCRILPVSKVVIETAEFDLQLLKAIADGKPVPQGEDYQKGEMYGHYNVRQYVLWRDDYTCQCCGAHATKKKEVRLHVHHLESRKVGGDAPDNQVTLCESCHEKLHKGLITEDDFKKRKRRSTRDATFMGIMRKTLMQRLCSELPIPVIETRGYITKATREKLLVLPKSHTNDALAIAQGKHGFNVGYLPGIEQIDKIYTIRPVRHHNRQLHKATILKRGIRKSNQAEKYVFGYRLFDKVQFNGQDCFIWKRRTSGYFVVKTIDGKIIHNSASFKKLRIAERASNYLIA

SEQ ID NO: 20709 - protein, 411 aa, Vibrio sp.; identical to SEQ ID NO: 15895

SEQ ID NO: 20710 - protein, 474 aa, unidentified
  REGION 1..474: note = Chicken gut metagenome
VVIVLDKYKKPLGVCSEHRARQLMEQRRACVYRYFPFAIILKDKDVREMDDLPSFRIKIDPGSKYTGLAVVRDSDNAVVLFMQIEHRGELVVKNMKTRSGARRNRRQRETRYRRCKYINHYLPKDSKYKVDSDRPEGWLPPSVKSIGDNIISWVRRLGRLLNITSCSFEAVRFDTQLLDNPDIEGIEYQQGTLFGYELREYLLDRYGHQCQYCGGESGDTILEWEHIKPKSKGGSDSVKNATLACHTCNQDKGNLSLDEWATVERGIKGPAARKKLAEARLKGIEQIKAHKAPKVSDRYCAWANSSRRYIEKALFGIFGDVECASGGRTKFNRVRLGLPKDHHYDALCVGTVPDGGYRDLTGDRCLYAKAMGRGTRFRGKINSCGIIVKKLQKVPKRINGFRNGDIVAADVPKGKYKGHHVGRVMTRRSGNFDIRTMDGDFAAANYKYCRLLQYNNGYQYRYVRFTATIPLGNK

SEQ ID NO: 20711 - protein, 476 aa, Blautia sp.; identical to SEQ ID NO: 19906

SEQ ID NO: 20712 - protein, 557 aa, Blautia sp.; identical to SEQ ID NO: 7395

SEQ ID NO: 20713 - protein, 464 aa, unidentified; identical to SEQ ID NO: 6574
  REGION 1..464: note = Human gut metagenome

SEQ ID NO: 20714 - protein, 415 aa, unidentified; identical to SEQ ID NO: 16389
  REGION 1..415: note = Human gut metagenome

SEQ ID NO: 20715 - protein, 420 aa, unidentified
  REGION 1..420: note = Human gut metagenome
MQYVYVLNKHGEPLMPCSPRKARLLLKQKKACVIKRTPFTVKLLHGSAGYKQPVTLGVDAGSKHIGISATTEKHELYREEATPRNDVVDLLSARRAFRRSRRNRKTRYRAPHFNNRVHSKHKGWLAPSVEVKIQEHITLIKHVFRILPVTLVRVETAEFDTQRLKAMLEGKPLPVGTDYQLGEMYDEYNVRQYVLKRDNYTCQCCGAHSTKTKGVKLHVHHIETRRTGGNAPNNLITLCKACHKALHAEKVTLDGKKRGKPLKDAAFMGIMRKTLMERLRKELKIPVQGTYGYITKYLREKNGIPKSHTNDARCISKNPLAIPCDTCYYTKAVRHHNRQLHKATILKGGIRKANQAPYIVKGYRLWDKVAYNGTECFITGRRTSGYFALKELDGTAVSNSISYKKLRLLEAATNYITERK

SEQ ID NO: 20716 - protein, 430 aa, unidentified
  REGION 1..430: note = Human oral metagenome
MLVYVLKQNGQPFMPTARFGKIRRLLKAKKAKVVRREPFTIKLLYEPETDVVQECYCGVDTGSRHIGVAVISNDKVLYQSQTELRSDIKRKMDARRAYRRNRRQRKTRYRKPRFLNRGNSIRSDRLPPLIKHKVHAHIDEIEFCKKILPISDSNLIIEVSQFDTALMKDPSLISEKVKHWGYQQGFNYGYSSRREAILHRDNYTCQCCGKKNCRLEVHHVKFRSNGGTDDEENLLTLCEDCHKGVHAGTVTLNKKPKKSKSLKHATHMSIIRSYLLKKYPNAIETFGFVTSENRNHLKLEKDHYIDACVIASGGLEFKELDVIYYKRRVSKGNYQLTKGFRGEQKIPKGKICGFRRFDKVKYFDNEYFIESRKSSGFATLIDIFGNQIDFSYMPRGMKTPKLSNCKRISARSSCLCISQIRKERAIHVLS

SEQ ID NO: 20717 - protein, 451 aa, unidentified; identical to SEQ ID NO: 10609
  REGION 1..451: note = Human gut metagenome

SEQ ID NO: 20718 - protein, 418 aa, unidentified
  REGION 1..418: note = Human gut metagenome
MVYVLGQDGHPLMPTCRHGKVRRMLKSGMAKVVKRCPFTIQLQYESTIHTQEINLGIDAGSKTIGVSATTEKKVLYESEVILRNDIVGLLSGRRALRSSRRNRKTRYRKPRFDNRKKPDGWLAPSIRQKIETHVTVVGNVIKILPVTKIIVETASFDIQKIKNPEIEGEGYQHGEQLNFWNVREYVLFRDGHTCQCCKGKSKDSILNVHHIESRKTGGNAPNNLITLCETCHKAYHKGIITLPKEIYRGMRFRDAAFMGVMRWAFYDRLKELYNPLGVEVINTYGYITKNTRIEYGLPKEHYVDARCISGNPAAKDLGHYYFQKKVRCHNRQIHKNTILKGGTRKRNQAAYLVKGFRLFDKVKYQDQEYFIFGRRTRGSFDIRTLDGTKVNKGSISCKKLQLVEKSKHYLTEQRKVTA

SEQ ID NO: 20719 - protein, 421 aa, Ktedonobacter sp.
MNVVYVLSPDRVPLMPCSCAIARLLLKQGKAKVVRRTPFTIKMYTQPVDTHTQPLTLGIDTGSAVIGSAVSDECGNILYVSEGEVRNDIAQTMKNRATSRRNRRYRKTRYRPARWLNRRNSLKTGRFSPTMTSKTEAHLREIRFVQSLLPIQSIVLETGTFNPHALKHPAVLQNKWMYQKGINYGLANTKAYVLTRDGYVCQRCKGQSKDRRLEVHHIVFRSQQGSDEEANLLTLCKTCHEGLHAGTVTLKQKGKRKGNLLHATQMNSIRIQLLSRVEAIETWGFVTKEHRLLAGLPKEHIFDAAMIATRGNIPVFQTTEVLLKKCISDGDYQQTKGKHSQQRIPTGKIAGLRKFDKVRYLGVEYFIKGRMSTGYAILMDLSGNKLALKPTPKFDNMKRVSARSSWIINQKAMPSFSSSPT

SEQ ID NO: 20720 - protein, 311 aa, unidentified
  REGION 1..311: note = Human gut metagenome
LRVFVLNKRGKPLMPCSPAKARLLLKEKKAIVKRRTPFTIQLTIATGETKQPVGLGVDAGYKHVGLSASTDKAELYASQVELRQDITDLLSARRALRRARRNRKTRYRAPRFNNRIRTKRKGWLAPSVENRINAHLSRIEAVLRLLPITKITVETASFDMQRLKNPDISGKEYQEGEQLGFWNVREYVLFRDGHVCRHCHGRSKDPVLNVHHLESRRTGSDSPDNLITLCETCHKALHRGEITLKAKRGQSFRAQAFMGIMRREVLNRLKASYPELKVHETYGYLTKHARIANGIVKSHGADAFCIAGNLG

SEQ ID NO: 20721 - protein, 443 aa, unidentified
  REGION 1..443: note = Human gut metagenome
LTKDENRPSGRTTGLRAEQAEPAGIRKGDTLKVFVLNMRGKPLMPCSPAKARHMLKAGKAFVVRRTPFTIKLTIATGETKQDVTLGVDAGARHVGISATTEKEEVFASEVALRQDITGLLADRLAFRRARRNRKTRYRAPRFNNRVRSKHKGWLASSVENRIQAHMSRIDAVCRLLPVTKIVIEAASFDVQKIKNPTIEGTDYQQGDQLGFWNVREYVLFRDGHICQHCRGRSKDPILNVHHLESRKTGGDAPNNLITLCETCHKAYHAGKIKLKVKRGQSFRAEAFMGIMRWTLLDRVRKTHPKLPVENTYGYLTKHKRIALGLPKTHCADAFCIAGNLKALRRGDFLFQQQTRKHNRQIHKCSILKGGVRKLNQAPFLVKGFRLFDKVRIGGQIGFVFGRRVRGTFNIRRLDKTVIGTDINCKKLSLLETRKTFLTELRKE

SEQ ID NO: 20722 - protein, 516 aa, unidentified
  REGION 1..516: note = Human gut metagenome
MTLNERRHRMPEYIYVLGMDGKPQMPTTRRRHVQKLLDTGKARIAERVPFTIQLLYDNDPVLQPVTLAEDPGRTNIGLAVLDLKGELLLSAVVETRNKEIAKLMEKRRQCRRASRNGERKARQRLSKKYGTMIKAGMVMRKLPLYKADKFITCKFIRNTEARFCNRKRKDGWLTPSARHLVQTHINLIHKIRKYLPVTDIAFEVNRFAFMQLENPSVSGVDFQNGPLKGYDDRDAAVYDLQDGKCLMCRHGITQYHHIVPRSRNGSNTIGNIAGLCDTCHDKVHKDADFAKQLKDKKEGLDKKYGALSVLNQAIPFICQKLEAEFGKEHVHYCTGRETSLVRRSIGYHKTKKDQFHEVDAWCIGALALNWIPERAPDFTEVHLVRQFRRQDRSLIKAQTERVYKLDGKTVAKNRKKRTGQKTDSLEDWYNKQVESYGKPKADQLRSRLTVEKSQRRYNDPFRIRPGTVFLYKGKRYVLSGQLTGGRYFRAVGDMKTNYPAAKCRILKQNEGLVFIS

SEQ ID NO: 20723 - protein, 431 aa, unidentified; identical to SEQ ID NO: 7173
  REGION 1..431: note = gut metagenome

SEQ ID NO: 20724 - protein, 424 aa, Mastigocoleus sp.; identical to SEQ ID NO: 6040

SEQ ID NO: 20725 - protein, 415 aa, unidentified; identical to SEQ ID NO: 3548
  REGION 1..415: note = Human gut metagenome

SEQ ID NO: 20726 - protein, 406 aa, unidentified; identical to SEQ ID NO: 6445
  REGION 1..406: note = gut metagenome

SEQ ID NO: 20727 - protein, 466 aa, unidentified; identical to SEQ ID NO: 2459
  REGION 1..466: note = Human gut metagenome

SEQ ID NO: 20728 - protein, 419 aa, unidentified; identical to SEQ ID NO: 3628
  REGION 1..419: note = Human gut metagenome

SEQ ID NO: 20729 - protein, 415 aa, unidentified; identical to SEQ ID NO: 6534
  REGION 1..415: note = Human gut metagenome

SEQ ID NO: 20730 - protein, 518 aa, unidentified; identical to SEQ ID NO: 7468
  REGION 1..518: note = Human gut metagenome

SEQ ID NO: 20731 - protein, 429 aa, unidentified
  REGION 1..429: note = Human gut metagenome
QNKQRKARKDHTEIQNGNADICRTTISCKSVQISYPAAEKSVTHKIIRGKEGKFANRHRDEGWITPSARQLVQMHMNDLKSMCKILPISHVTLERVAFDFQKLENENIKVWEYGKGKLYGYDSPEEYIHDVQNGKCLVCGKPHIDYLHHIIPRSKGGSDKVSNIAGLCYDCHYGPMGVHNCQNTQDRLPELKSEANKQYKVSLLNSVMPVLIEEMDKFCKANSIMFSICEGHDTAKVRDMYDLQKDHCIDGFAISLVDRNVKSVDVMPDRIYQKQRYKKKSKNIIQKRNCREYYDDKKLVAVNRHKGTDQKADSLEEYMNTYAETHTADECKNQFESLTVKPARRTYTFHKEGRICPFHIGDKVRYEKKNKIKGNTKVDTFICEGIRFVKDENKAEVKHNKTKSKKMKFCRVLESGCTPYVDYRKLALM

SEQ ID NO: 20732 - protein, 535 aa, unidentified; identical to SEQ ID NO: 6116
  REGION 1..535: note = Human gut metagenome

SEQ ID NO: 20733 - protein, 442 aa, Sutterella sp.; identical to SEQ ID NO: 7529

SEQ ID NO: 20734 - protein, 512 aa, unidentified; identical to SEQ ID NO: 4216
  REGION 1..512: note = Human gut metagenome

SEQ ID NO: 20735 - protein, 408 aa, unidentified; identical to SEQ ID NO: 17248
  REGION 1..408: note = Human gut metagenome

SEQ ID NO: 20736 - protein, 419 aa, Moorena sp.; identical to SEQ ID NO: 2658

SEQ ID NO: 20737 - protein, 416 aa, Lactobacillus sp.; identical to SEQ ID NO: 7050

SEQ ID NO: 20738 - protein, 465 aa, unidentified; identical to SEQ ID NO: 5478
  REGION 1..465: note = Human gut metagenome

SEQ ID NO: 20739 - protein, 367 aa, unidentified
  REGION 1..367: note = Human gut metagenome
MSTSVFVLDKKHRPLMPCRPARARRLLRAGRARVVKRFPFVIRLVDRTVEQSEVQPVLIKLDPGSRETGAAVVRDDEKKRHHALAFFVIKHRGGAIRDALKARSAFRRRRRSQNFRCRSPRFLNRVKPKGWLPPSLRHRVETTLSFVRRMCRYLPVSGIATELVKFDSQKLQNPEVSGVKYQQGTLFEYEVREYLLEKFGRKCVYCGAEGVPLNIDHVVPRAKGGSNRVSNLVLACVSCNQKKGARSLEDFLKGKPEVLARVRRELKTPLRDAAAVNATRWVLFNELKATGLPVETGSGALTKLNRHAFGVEKEHWLDALCVGRLNGVVTRKGLNVLEIRCMGRGSRQRTRLTKYGFPRGYLMRQKC

SEQ ID NO: 20740 - protein, 406 aa, unidentified
  REGION 1..406: note = Human gut metagenome
LKEKKAIVKRRTPFTIQLTIATGEAKQPVALGVDSGYKHIGLSATTEKAELYASEVELRQDITDLLSARLALRCSRRSRKTRYRAPRFDNRVASKREGWLAPSVENRIAAHMSRVEAVMRVLPVTAITVETAAFDTQLLKNPDIAEAAYQQGEQLGFWNVREYVLFRDGHVCQHCRGKSKDPILNVHHIESRRTGGDAPNNLITLCETCHKAFHRGEIELKVRRGKSFKAETFMGIMRWTLFERLKKAHPELSVRNTYGYLTKHKRISHGIAKSHCADAYCIADNLGAKRLEGFFFQKQTRKHNRQIHKLSILKGGLRKKNQAPYEVKGFRLFDKVICKGEEAFIFGRRTSGSFDVRRLDGTRISAGISCKKLRLLEPRTTYLTEFRKEAALPPLHECSGSRAEFR

SEQ ID NO: 20741 - protein, 477 aa, Blautia sp.; identical to SEQ ID NO: 2707

SEQ ID NO: 20742 - protein, 470 aa, unidentified
  REGION 1..470: note = Human gut metagenome
MSVFVVGLNGCRLMPTSERKARLLLKQGKAFVEQKVPFTIRLNYKTGSTTQLGYLGIDTGSQHIGVSVVREDGTVLHKEEIGLRDSMSKRKLLEAKASLRRGRRYRKTRYRHPKWRPKTKRVYCEVPDRKGRHWQKKKITFTSKRPKGWLPPSLQSKTDHHIRWIKKLQDLLPEGYRLSIELGRFDPARMKNPEIHGDLYQKGPQHDYENVRAYVLDRDRYTCQICKKKGGKLHVHHILYRSHGATDDPQYMVTVCSDCHSAQNHLPGGILYQWMQEQKRFSRGLRDATFMNILRKRLIRAFPEAVFTYGNVTKVDREKLKLPKSHGNDATAIALVKTGITAVKDKESVICIQQVRRKKRSLHEETPRKGRKEPNRTAARNNKNTKAVTVTKRQNKKKVSMTGCLFDRVELNGKKGWISGFTGKSCYVKDADDQYLSTSPKYKQVSLSKLRILHHCGNWIIGAKKTLGKG

SEQ ID NO: 20743 - protein, 416 aa, unidentified
  REGION 1..416: note = Human gut metagenome
MVYVLDKNGQPLMPTDRHRKVRLMLQSGQAKVIKRCPFTIQLNYDSGHQTQEISLGIDAGSKHIGVSATTKIKVLYEADVELRNDIVNLLSSRRELRRGRRNRKTRYRQAKFNNRRRGNGWLAPSIRQKIGTHLTVVKNICKILPISRIMVETASFDIQKIKNPDIQGAEYQQGDQLEFWNVREYVLFRDGHTCQCCKGKSKDKILNVHHIESRKTGGNAPNNLITLCETCHTGYHKGTVQLPKAIKRGMRFKDAAFMGIMRWAFYEALKQQYEPVGTPVHNTYGYITKHTRIAYNLPKEHYVDARCISGNPEASSNGEYYYQKKVRCHNRQIHKLTVLKGGIRKQNQATYLVKGYRLFDKVSYQGKGYFVFGRRQSGFFDIRTLSGEKVNKGSLSCKKLKFIATRTYYLTERRAV

SEQ ID NO: 20744 - protein, 415 aa, unidentified
  REGION 1..415: note = Human gut metagenome
MIYVRSKEGKALMPSERGGRIGYLLRHGKAHVVSRVPFVVQLDYESTTYTQEVSLGIDAGSKHIGVSASSEKRELLAAQVELRSDVVNLLSTRRELRRARRNRKTRYRKVRFDNRKKKDGWLAPSIEQKVESHLKVIRLVHKLLPITKTTIEVAQFDAQKIKNPDIKGDEYQQGEQMGFGNVREYVLARDGHKCVHCKGKSKDPILNVHHLESRKVGGNSPSNLVVLCETCHKAYHRGEFELKIKRGTTLRDAAVMNIMRWSVYERAKAEFGNVYLTYGYITKHTRIENDIEKTHAADAFCIAKNVHARRSRTFFMCRCVPRHTRALHVANPKKSGIRRSCIASHKIGKSRFQRFDMVRWKGKECFIFGSTHGNVVLRKIDGVKVHETQAVSAKTIKFLKRIRNNILMEERASES

SEQ ID NO: 20745 - protein, 425 aa, unidentified
  REGION 1..425: note = Marine sediment metagenome
MRIFVLDAKKRPLDPCHPARARQLLKAGRAAVYRRKPFTIILKDRLLENSIVHSHRVKVDPGAKTTGLAVVQEETARVVWAAELEHRGDVIHKRMLERASLRHSRRSRKTRYRKPRFNNRRRPEGWLPPSLESRVANIITWVKRLTRWCPVSVISLELVKFDTQKLQNPEINGVEYQQGELFGYEVREYLLEKWSRKCAYCGKTNVPLEVEHIIPKSRGGTDRVSNLTLACHKCNQKKGNKTAEEFGFPEIQKRAKQPLKDVAAINTTRWVLYNRLKVIGLSLETGSGGKTKYNRTRLGLPKTHWLDAVCVGDSTPDTLFVEKDAVLHIKAIGHGKRQRCKTDKHGFPIAHAPQQKKYMGFQTGDIVKAVIPKGKYAGIHIGRVAIRFRPSFKLNGFDVHPKYLRLLQRADGYEYEYLAAHSPSQ

SEQ ID NO: 20746 - protein, 406 aa, unidentified; identical to SEQ ID NO: 15432
  REGION 1..406: note = Human gut metagenome

SEQ ID NO: 20747 - protein, 487 aa, unidentified; identical to SEQ ID NO: 17346
  REGION 1..487: note = Human gut metagenome

SEQ ID NO: 20748 - protein, 413 aa, Moorena sp.
MKVYVINKRDRPLMPTTARKARLLLKFGKATIHRREPFTIKLIYGSTGYTQPGNLGIDAGYKSVGFSAVNSTEELIGGEVKLLERISERLAERRQYRRQRRNRLRHRQPRFNNRCRLRGWLAPSIQHKLDSHHKIIKLVKEILPIKKVTVEVASFDLQKIKNPDIEGKGDQQGEQLGFSNLREYILHRDNHKCQNPNCKNKAKQPILQVHHLGFWNQDRSDRPSNLITLCSKCHTPANHKPGKFLHGWKPKLKSFKPETFMTLVWRKLTTDVGYEATYGYITKDVRREYQIEKSHHNDAFVIAGGTNQRRIEPIKYQQVRRNKRSIEQFYDAKYIDLRDGNINSGTELFSGRRTRNKNENTENLRKYRGQKVKQGQRRIKVHRYPYSQHDLVLYEGKVFSVIGMQNKGKGADC

SEQ ID NO: 20749 - protein, 419 aa, unidentified; identical to SEQ ID NO: 4131
  REGION 1..419: note = Human gut metagenome

SEQ ID NO: 20750 - protein, 411 aa, unidentified; identical to SEQ ID NO: 19170
  REGION 1..411: note = Human gut metagenome

SEQ ID NO: 20751 - protein, 545 aa, unidentified
  REGION 1..545: note = Human gut metagenome
VQFAWWLCHPKPSDNIEDVNHETALMLLQIKAGTETFGTAPCGSGPKAEGVSPERKSMNTVAVVTNTNKPLMPTSPYRARKLLSSGKAKIVKHRPFTILLVNRSDGNVQEIEYKSDTGYLHVGISVCSEKREFVREQRDLLPDEKEKHNDRRKYRRTRRNRKRYRKARFDNRIGKIRKKEKNEHVWLPPSLDHKVDAQVQLFLRLYQVMPIKRAVFEIGQFDPALMKALEKGEAAPQGIDYQMGERYQIATRRAAVFTRDRYACVFCGRSIKDHAILHVHHIGFWKQDRSNRLDNLATCCEQCHTSENHRPGGILYGVEPKLKSLASATYMNVVRFELLRRLKEAAPDVEFHISYGAKTSVIRKQRSISKSHTNDAYCLGQYFPKLRAEEIGFQKIRRNDRILQKFYDAEYLDSRDGTTKKGKKLTNGRISRNHMKDHKNLHQYRGKKLSKGRITIRRGRSSLKSGSLVRFNGEVLTVHGTHRSRKKNKAGHIKVSVNVEFECPSKTGRKSAALSKCQIISRSYNTGWKQIQLRKEEQGKITAVV

SEQ ID NO: 20752 - protein, 431 aa, unidentified; identical to SEQ ID NO: 6230
  REGION 1..431: note = Human gut metagenome

SEQ ID NO: 20753 - protein, 418 aa, unidentified
  REGION 1..418: note = Human gut metagenome
MVYVLSKTGQPLMPTENHAKVRVLLKQQKAKIVHRCPFTIQLLYDSTDYTQQVSLGIDAGSRHIGVSATTETKVLYEADVTLRNDIVDLLSTRREARRTRRSRKTRYRKPRFNNRTRKDDWLAPSVKQKMDTHLTTLRKVTEILPVNSITVETASFNIQKIKNPNIASTGYQQGEQLDFWNVREYVLFRDGHKCQCCKGKSKDPVLNVHHIESRKTGGNAPNNLITLCETCHKGYHNGTVSLPKNIRRGMKFNDAAFIGAMRWAFFNRVKETYEPLGIMVNMTYGYITKNTRIEHNLPKDHFIDARCISGHPDATSDGTVFYQKKVRCHNRQIHKQKILKGGIRKRNQAPYLVKGFRLFEKVKYHGKQYFIFGRRSSGFFDLRTLDGTKVNKGSVSYKKIRSLDMPRSYLTEERKAIV

SEQ ID NO: 20754 - protein, 413 aa, unidentified; identical to SEQ ID NO: 3476
  REGION 1..413: note = Human gut metagenome

SEQ ID NO: 20755 - protein, 424 aa, unidentified; identical to SEQ ID NO: 3351
  REGION 1..424: note = Human gut metagenome

SEQ ID NO: 20756 - protein, 431 aa, Ktedonobacter sp.
MSKVFVLDIYEKPLEPVHPGRARILLSQRKAAVFRTFPFTIILKIKGEPLQIEPLRIKLDPGSRTTGIAIVNDRSGEVVFAAELSHRGHKIKESLDSRRAFRRSRRRRKTRYRKARFLNRRHHASWLPPSLESRVANVQTWVNRLARYAPISAMSMELVRFDMQLMENAEISGVEYQQGALAGYEVREYLLEKWNRKCAYCLKQGISLQIEHIVPRAKGGTNRVSNLTLSCEKCNTAKGTLDSAVFLKKKPAVLQRILAQVKKPLKDASAVNTTRWALYERLKATGLPIECGSSGLTKFNRTRKELPKAHWLDAANVGKSTPDVLFVKNIVPLLITATGHGRRQMCVTDSHAIGFPKQHKERHKTFLGYRTGDIVKAVTPKGTIRGRIAIRHRPSFRIGKVDIHPKYMRRLHRADGYEYQVKGVVALPPHS

SEQ ID NO: 20757 - protein, 406 aa, unidentified; identical to SEQ ID NO: 2752
  REGION 1..406: note = Human gut metagenome

SEQ ID NO: 20758 - protein, 420 aa, unidentified; identical to SEQ ID NO: 3685
  REGION 1..420: note = Human gut metagenome

SEQ ID NO: 20759 - protein, 425 aa, Moorena sp.; identical to SEQ ID NO: 16974

SEQ ID NO: 20760 - protein, 424 aa, unidentified; identical to SEQ ID NO: 3434
  REGION 1..424: note = Human gut metagenome

SEQ ID NO: 20761 - protein, 420 aa, unidentified; identical to SEQ ID NO: 8840
  REGION 1..420: note = Human gut metagenome

SEQ ID NO: 20762 - protein, 557 aa, Blautia sp.; identical to SEQ ID NO: 7395

SEQ ID NO: 20763 - protein, 434 aa, Moorena sp.
MQNYVFVIDTNKQPLNPIPPKKARRLLNKGKAAVFRMYPFTIILKTAIRQSRRCANNNPSISPCQIKIDPGSKVTGFALVQNNQVIWGMELEHRGGLIKKKLESRGAVRRGRRNRNTRYRKPIFLNRKRPEGWLPPSLEHRILTIQTWVKRLIKFCPVNEIWVERVKFDTQKMQNPEISGIQYQQGELAGYEVREYLLEKWGRECTYCGKQSVPLQIEHIHPRSLGGSDSALPTLRERVSNLCLACEKCNQRKGNKPIEDFLKKKPSLLQKIKSKAKQPLKDATAVNATRNKLVKVLQLIKVVVTGTGAQTKYNRTRLELPKQHWIDAACVGDIETLVLRTSQPLLVTCKGPGGRQKAALNKYGYPIRHNPLKPIKGWVTGDIAKHQKLGIGKVTPRSKGSFGFTPLGTKGYKSCKPQDISAIYRKDGYTYSFC

SEQ ID NO: 20764 - protein, 426 aa, unidentified; identical to SEQ ID NO: 6604
  REGION 1..426: note = Human gut metagenome

SEQ ID NO: 20765 - protein, 518 aa, unidentified; identical to SEQ ID NO: 19733
  REGION 1..518: note = Human gut metagenome

SEQ ID NO: 20766 - protein, 451 aa, Akkermansia sp.; identical to SEQ ID NO: 18640

SEQ ID NO: 20767 - protein, 560 aa, Streptomyces sp.; identical to SEQ ID NO: 7645

SEQ ID NO: 20768 - protein, 332 aa, Moorena sp.
MAPSLRHRRENQINLFESFCKVMPITSATFEMGKFDTQLLQAIADGKPLPEGKDYQQGSKYLFQTEREAVFSRDHYTCQVCGKSIKDGVILHTHHIGYWKGYRSNRISNLLTVCEHCHTAKNHKPGGALWGLEPKSTNLAAATYMSIVRWAIYRELLLKHPEVDLHIQYGAKTSVTRKSLHLAKTHANDAYCIGSLHPRHRTAELVYQKKRRNNRILAKFYDAKYIDIRDGKKKSGSLLSCGRTNRRESRRSDKNQRIYRGKKCSSGRTSVRKNRYAYQPGDTIVFHSQTFVVNGSHCKGTRVILGTGKSVKATDLTCIKKEGGWRFLPAQA

SEQ ID NO: 20769 - protein, 338 aa, unidentified
  REGION 1..338: note = Human metagenome
TEEIKLESIYFEQTRKTADAGYKHVGLSASTEKAELYASQVELRQDITDLLSARRALRRARRNRKTRYRAPRFDNRIRTKCEGWLAPSVENRINAYLSRIEAVLRLLPITKITVETASFDTQLLKSPDIAGEEYQKGEQLGFWNVREYVLFRDGHVCQHCHGRSKDPVLNVHHLESRRTGGDSPDNLLTLCETCHKALHRGEITLKTKRGQSFRAQAFMGIMRWVVLDRLKASHPKLEVQNTYGYRTKHARISNGIAKSHCADAFCIAGNLGAERLGELFFQKQTRRNNRQIHKLSILKCGIRKRNQAPFEAKGFRLFDKVARKGEEGFIFGRRSSKT

SEQ ID NO: 20770 - protein, 427 aa, Parasutterella sp.; identical to SEQ ID NO: 6379

SEQ ID NO: 20771 - protein, 413 aa, unidentified
  REGION 1..413: note = Human gut metagenome
LKVFVLNMRGKPLMPCSPAKARHMLKAGKAVVVRRTPFTIKLTIATGETKQDVTLGVDAGARHVGISATTEKEEVFASEVALRQDITGLLADRLAFRRARRNRKTRYRAPRFNNRVRSKHKGWLAPSVENRIQAHISRIEAVCRLLPVTKIVIETASFDIQKIRNPEVEGTGYQQGDQLGFWNVREYVLFRDGHICQHCRGRSKDPILNVHHLESRKTGGDAPNNLITLCETCHKAYHAGKIKLKVKRGHSFRAEAFMGIMRWTLLNRMRKAHPSLPVENTYGYLTKHKRIALGLPKTHCADAFCIAGNLKALRRGDFLFQQQTRKHNRQIHKCSILKGGVRKLNQAPFLVKGFRLFDKVRIGGQIGFVFGRRVRGTFNIRRLDKTVIGTDINCKKLSLLETRKTFLTELRKE

SEQ ID NO: 20772 - protein, 393 aa, unidentified
  REGION 1..393: note = Human gut metagenome
LRVFVLNKRGKPLMPCSPAKARLLLKEKKAIVVRRTPFTIQLTIATGESKQPVSLGVDAGYKHVGLSASTEKAELYASEVELRQDITDLLSARRALRQSRRNRKTRYRAPRFDNRIRTKRKGWLAPSVENRINAHLSRIEAVLRLLPVTKITVETASFDLQLLKNPDISGKEYQEGEQLGFWNVREYVLFRDGHVCQHCHGRSKDPVLNVHHLESRRTGGDSPGNLITLCETCHKALHRGEITLKAKRGQSFRAEAFMGIMRWEVLNRLKASHPELEVNNTYGYWTKHARIANGIAKSHCADAFCIAGNLGAERLGEFFFQKQTRRNNRQIHKLSILKGGIRKRNQAPFEAKGFRLFDKVACQGEEGFIFGRRSSGFFDVRKLDGTRISAGIS

SEQ ID NO: 20773 - protein, 428 aa, unidentified; identical to SEQ ID NO: 5055
  REGION 1..428: note = Human gut metagenome

SEQ ID NO: 20774 - protein, 470 aa, unidentified; identical to SEQ ID NO: 2825
  REGION 1..470: note = Human gut metagenome

SEQ ID NO: 20775 - protein, 408 aa, unidentified
  REGION 1..408: note = Human gut metagenome
MVYVQDINGKPLMPTTRHGKVRRLLKDKKAVVVNLCPFTIKLTYVTSDYKQEIVLGVDAGTKHVGLSATTKSKELYSSEVILRNDIVDLLSTRRELRRTRRNRLRYRKSRFDNRIKSRRPGWIAPSVRYKIDAHIRVIDNVCSILPISRIVIEVAQFDTQKIKNPNISGKEYQEGDQLGFWNTREYVLCRDGHKCQYCKGKSKDSILNVHHIESRKTGGDSPSNLITLCETCHKEYHKGNIDLKIRRGKSLRDAAVMGIMKWRLYEKLKSKYGCVSMTFGYVTKYNRIHNNIEKSHVSDAFVISKNFNAIRLGYYYKIRLVRRHNRQIHKQKIQKGGIKRLNQSPFEVFGFRLFDRIMFENSYYFIFGRRKIGRFNIRDIDGKSQRDITYSKLKLSRCKRFMIQKEMN

SEQ ID NO: 20776 - protein, 627 aa, Moorena sp.; identical to SEQ ID NO: 7833

SEQ ID NO: 20777 - protein, 427 aa, Moorena sp.; identical to SEQ ID NO: 3216

SEQ ID NO: 20778 - protein, 371 aa, unidentified
  REGION 1..371: note = IscB polypeptide
MEVYVLNKEGQPLMPTRPVIARLLLKEGKAKCIRRTPFTIKLLVDTTEYKQEVVAGMDTGSKTIGCAAIANGKVVYQSEVQIRQDVSKKMEQRKMYRRNRRGRKTRYRKARWQNRASMREEGRLAPSIKSKVDSHLREKKFVESILPVSTFKVETASFDIHKISNPDVGKWQYQKGQQKDFYNVKAYVLHRDGYQCQKCKTKKGKLHVHHVVFKSNGGTNSPDNLIVLCSDCHDKLHKGEFEIKGTRSKTKHATEVGIVKSQLKKQFGNFEETFGYETKYKREQILGLPKTHYFDAVAICCEESEIVELSDSVHFKKHVAKGDYQQTKGSRSEKKIPTGKLFGLRKFDYIKTPNGIGFVKGKRSTGFFCYI

SEQ ID NO: 20779 - protein, 477 aa, Acidithiobacillus sp.; identical to SEQ ID NO: 3862

SEQ ID NO: 20780 - protein, 417 aa, unidentified; identical to SEQ ID NO: 15591
  REGION 1..417: note = Human gut metagenome

SEQ ID NO: 20781 - protein, 427 aa, unidentified
  REGION 1..427: note = Human gut metagenome
MPCRPARARRLLRAGRARVVKRFPFVIRLVDRTVEQSEVQPALIKLDPGSRETGAAVVRDDGKKRHHALAFFVIEHRGGAIRDALKARSAFRRRRRSQNLRCRSPRFLNRVKPKGWLPPSLRHRVETTLSFVRRMCRYLPVSGIATELVKFDSQKLQNPEVSGVEYQQGTLFEYEVREYLLEKFGRKCVYCGAEGVPLNIDHVVPRAKGGSNRVSNLVLACMSCNQKKGARSLEDFLKGKPKVLARVRRELKTPLRDAAAVNATRWVLFNELKATGLPVETGSGALTKLNRHAFGVEKEHWLDALCVGRLNGVVTRKGLNVLEIRCMGRGSRQRTRLTKYGFPRGYLMRQKCVHGFATGDMVEANVPKGKKAGLWRGRVAVRVSGSFNIQTPKGVIQGVGWKHCRLISHNDGYGYAWLGHAPHSSPA

SEQ ID NO: 20782 - protein, 470 aa, unidentified; identical to SEQ ID NO: 2825
  REGION 1..470: note = Human gut metagenome

SEQ ID NO: 20783 - protein, 388 aa, unidentified
  REGION 1..388: note = gut metagenome
LVYGSSGYTQEVILGVDAGSKTIGMSASTTKEELLSAEVKPRNDVVDLLSTRREFRRVRRNRKTRYRKPRFDNRVRSKHKEWLAPSVEVKIQEHITSIKRVCRILPVSKVVIETAEFDLQLLKAIADGKSVPQGEDYQKGEMYGHYNVRQYVLWRDNYTCQCCGAHATKKKEVRLHVHHLESRKVGGDAPSNLITLCDSCHEKFHKGIITAANLKKRKRRSMRDATFMGIMRKTLIQRLRAELTIPVAETRGYITKTTREKLLVLPKSHTNDALAIALGKHGFNVGYLPEIAQIDKIYTIRPVRHHNRQLHKVTILKGGIRKSNQAEKYVFGYRLFDKVQFNGQDCFIWGRRTTGIFTIKTINGKMIKDGISFKKLKPVEKSTSYLIA

SEQ ID NO: 20784 - protein, 435 aa, unidentified; identical to SEQ ID NO: 4695
  REGION 1..435: note = Human gut metagenome

SEQ ID NO: 20785 - protein, 396 aa, unidentified; identical to SEQ ID NO: 5072
  REGION 1..396: note = Human gut metagenome

SEQ ID NO: 20786 - protein, 423 aa, Arthrospira sp.; identical to SEQ ID NO: 2900

SEQ ID NO: 20787 - protein, 318 aa, Parasutterella sp.; identical to SEQ ID NO: 12461

SEQ ID NO: 20788 - protein, 429 aa, unidentified
  REGION 1..429: note = Human gut metagenome
QNKQRKARKDHTEIQNGKDDICRATISCKSVQISYPTAEESVTHKIIRGKEGKFANRHRDGDWITPSARQLVQMHMNDLKSICKILPISHVTLERVAFDFQKLENENIKAWEYGKGKLYGYDSPEEYIHDVQDGKCLVCGKPHIDYLHHIIPRSKGGSDKVSNIAGLCYDCHYGPIGVHNCQDTQDRLPELKNEVNKQYKVSLLNSVMPVLIEEIDKFCKANSIMFSICEGHDTAKVRDMYDLQKDHCLDGFAISLVGRNVKSVDVMPDRIHQKQRYKKKSKNIIQKRNYREYYDDKKLVAINRHKGTDQKADSLEEYMNTYAETHTADECKMHFESLTVKPARRTYTFHKEGRICPLHIGDKVRYEKKNKIKGNTKVDTFICEGIYFSKDENKAKVEHNKTKSKKMKFCRAIESGCIPYIDYIKLALI

SEQ ID NO: 20789 - protein, 417 aa, unidentified
  REGION 1..417: note = Human gut metagenome
MPCSPAKARLLLKEKKASVKRRTPFTIQLTIATGEAKQPVTLGVDSGYKHIGLSATTEKAELYASQVELRQDITDLLSTRLALRRSRRSRKTRYRAPRFDNRVASKREGWLAPSVENRIAAHMSRVEAVMRVLPVTAITVETAAFDTQLLKNPDITGAAYQQGEQLGFWNVREYVLFRDGHVCQHCRGKSKDPILNVHHIESRRTGGDAPNNLITLCETCHKAFHRGEIELKVKRGKSFKAETFMGIMRWTLFERLKKSHPELSVRNTYGYLTKHKRISHGITKSHCADAYCIADNLGAKRLEGFFFQKQTRKHNRQIHKLSILKGGLRKKNQAPYEVKGFRLFDKVICKGEEAFIFGRRTSGSFDVRRLDGTRISAGINCKKLRLLEPRTTYLTEFRKEAALPPLHECRGFRAEFL

SEQ ID NO: 20790 - protein, 408 aa, unidentified
  REGION 1..408: note = Human gut metagenome
MVYVQDINGKPMMPTTRHGKVRRLLKDKKAVVVNLCPFTIRLTYVTSDYKQEIVLGVDAGTKHVGLSATTKSKELYSSEVILRSDIVDLLSTRRELRKTRRNRLRYRKPRFDNRVKSKRSGWIAPSVKYKVDAHIRVVENVCSILPISRIVIEVAQFDTQKIKNPEISGKEYQEGDQLGFWNVREYVLARDGHKCQYCKGKSKDKILNVHHIESRKTGGDSPYNLITLCETCHKEYHKGNIDLKIRRGKSLRDAAVMGIMKWRLYEELKSKYDNISMTFGYVTKYNRIKHGIEKSHVSDAFVISKNFNAIRLGYYYKVRLVRRHNRQIHKQKIPKGGVKRLNQSPFEVFGFRLFDRVMFENSYYFIFGRRKTGRFNIRDIDGKNQRDITYKKLKLSRCKCFMVQNEMN

SEQ ID NO: 20791 - protein, 422 aa, unidentified
  REGION 1..422: note = Human oral metagenome
MANNIEYCFVIDKDNQPLAPTKANKGWYLIRKSRAKLKSMYPMVIQLNKKVESNENDKSYMACGIDDGSVHVGLAIVQKCPTKNKVVFKGTIEQRQDVKHLMDTRRGYRQYHRYHKRHRPARFNNRSSSKRIGRLVPSIKQKKDAILRVLYQLNKWIYIKEYYLEDVCIDIRSMTDNYKPYKWQYQKSNRLDENLRKAAIIRDNYKCQECGKSNCKLEVHHIRARKYHGADTIGNLITLCSKCHEKTEGKEKDFEDKYFKMINSKPKRFDYAMHVMQGKNYLRNKISKLGLLHLTNGGTTANKRIEWNIEKSHSNDAICITSSIPDFCNIKEWTIKPIRRKSKAKTDNVLGIKHRDLVSYTYKNGETHRFYQQVGKQYSYNKGIAELSEIDQLKLELQRKEAELEILKKYKELERKCRLKQL

SEQ ID NO: 20792 - protein, 419 aa, unidentified
  REGION 1..419: note = Human gut metagenome
MQYVYVLNKHGEPLMPCSPGKARLLLKQQKACVVKRTPFTIKLLFGSAGYKQPITLGVDAGSKHVGLSASTEKRELYSEEFTPRSDVVELLSTRRQNRRSRRNRKTRYRVPRFDNRVHSKHKGWLAPSVEVKIQEHITVIKHICKILPISLVRVETAEFDTQRLKAMLAGKPLPVGTDYQLGEMYDEYNVRQYVLKRDNYTCQCCGAHTTAKKLVKHVHHLESRKTGGNAPSNLVTLCTTCHKNLHKGKVTLDGKERGKPLRDAAFMGIMRKTLMARLKEELPIPVQGTYGYITKMRREQNDIKKSHTNDARCISKHPLAEPCSVCYRTKAIRHHNRQTHKANFSKKGIRKRSQMPYLVEGYRLWDKVLYKEQECFVSGRRSSGSFTLKKLDGTSVSKGVTFKKLRLLEPATNYLIERM

SEQ ID NO: 20793 - protein, 417 aa, unidentified
  REGION 1..417: note = Human gut metagenome
MPCSPAKARLLLKERKAIVKRRTPFTIQLTIATGEAKQPVTLGVDSGYKHIGLSATTEKAELYASEVELRQDITDLLSARLALRRSRRSRKTRYRAPRFDNRVASKRKGRLAPSVENRITAHMSRVEAVMRVLPVTAITVETAAFDTQLLKNPDITGAAYQQGEQLRFWNVREYVLFRDGHVCQHCRGKSKDPILNVHHIESRRTGGDAPNNLITLCETCHKAFHRGEIKLKVKRGKSFKAETFMGIMRWTLFERLKKAHPELSVRHTHGYLTKHKRISHGIAKSHCADAYCIAGNLGAMRLNSYLFQKQTRKHNRQIHKLSILKGGLRKKNQAPYEVKGFRLFDKVICKGEEAFIFGRRTSGSFDVRRLDGTRISAGISYKKLRLLEPRTTYLTEFRKEAALPPLHKCRGFCAEFL

SEQ ID NO: 20794 - protein, 323 aa, unidentified
  REGION 1..323: note = Human gut metagenome
TRYRAPRFDNRIRTKRKGWLAPSVENRINAHLSRIEAVLRLLPVTKITVETASFDLQLLKNPDISGKEYQEGEQLGFWNIREYVLCRDGHVCQHCYGRSKDPVLNVHHLESRRTGGDSPGNLITLCETCHKALHRGEITLKAKRGQSFRAEAFMGIMRWEVLGRLKASHPELEVNNTYGYRTKHARIANDIAKSHCADAFCIAGNLGAERLGEFFFQKQTRRNNRQIHKLSILKGGIRKRNQAPFEVKGFRLFDKVACQGEEGFIFGRRSTGYFDVRKLDGTCISAGISYKKLHLLEKRRTYLTEIRKEEALPPPPEGRGLRA

SEQ ID NO: 20795 - protein, 420 aa, unidentified; identical to SEQ ID NO: 18438
  REGION 1..420: note = Human gut metagenome

SEQ ID NO: 20796 - protein, 447 aa, unidentified; identical to SEQ ID NO: 13565
  REGION 1..447: note = Human gut metagenome

SEQ ID NO: 20797 - protein, 458 aa, unidentified
  REGION 1..458: note = Anaerobic digester metagenome
MEVLNVVYVLSVEGNPLMPTKRHGKVRRLLKQQLAKVVKVKPFTIQLLYETTSYTQNITLGIDSGYNYIGFSAVTEKEELICGEVKLRNDISELLKERRMYRRIRRNRLRYRKPRFDNRISSKKEGWLAPSIKHKLDSHVRFINYLKKILPIANIVVEVANFDTHKLKNPNVVGKGYQQGEQQDFWNVREYVLYRDNYTCQLCGKKNTILEVHHIGYWKQDRTDRPGNLITLCAKCHNSNNHKDGGKLYGMKPVQKPLKDATFMSTIRWKLVNALMCDYTYGYITKSKRVSLGLEKTHYNDAFCIAGGINQQRIEPIYFEQIRRNNRSVEKFYDAKYVDIRDKSIKTGQELFCGRRTRNKNLNEENLHKYRGAKKSKGRRNIRKQRYAYQPKDIVTFESKKYSVQGVQNKGEYIKLMEMSKPVKTDLVKPYMFRKGFSMFYNCNSSPTYRSGSLLAGK

SEQ ID NO: 20798 - protein, 418 aa, unidentified; identical to SEQ ID NO: 4950
  REGION 1..418: note = Human gut metagenome

SEQ ID NO: 20799 - protein, 490 aa, unidentified
  REGION 1..490: note = Human oral metagenome
MYVVYVLNRQGKPLMPTKRFGHVRRMLKTGKAKAISTRPFVIQLQYASTDFVQPLYGGTDPGRTNIGEAVLNNKGEVVYAAHVITRNKEIPKLMADRATHRRASRRGERLRRKRRAKANGTMTCFPEGRKLPGYKDGVLELKDIINTESRFNNRKRPAGWLTPTARQCIQTHLNMVQNICKILPVTDWTLEYNRFAFMQLEDGSVRGWGFQNGRLKGYANKEDYIYALQGGVCICCGAPIEHYHHIKPRHKGGSNTPENLVGLCSVCHAEIHTGKRNLDKIGKYKKYAGTSIVNIAIPFIWDGIVKMFGNKAHICEGQETAELRRANNISKEHFTDAVCIAGIGLDITPQYDNNQPFELRQFRCHDRSYIKAQVERTYMDGKTIVAKNRKPRFGQKGDALSDLQSKITEEHGELAARRAVSKLVVKKSYRRYNALERIKPSAVFMFSNKKYLLSGQLTNGMYYRAFGKGTKNFSSINCEVISSGYSLTYM

SEQ ID NO: 20800 - protein, 470 aa, unidentified; identical to SEQ ID NO: 2825
  REGION 1..470: note = Human gut metagenome

SEQ ID NO: 20801 - protein, 422 aa, unidentified
  REGION 1..422: note = Human gut metagenome
LNKRGKPLMPCSPAKARLLLKEKKAIVKRRTPFTIQLTIATGETKQPVGLGVDAGYKHVGLSASTDKAELYASQVELRQDITDLLSARRALRRARRNRKTRYRAPRFNNRIRTKRKGWLAPSVENRINAHLSRIEAVLRLLPVTKITVETASFDMLLLKNPDIAGKEYQEGEQLGFWNVREYVLFRDGHVCQHCYGRSKDPVLNVHHLESRRTGGDSPGNLITLCETCHEALHRGEIALKTKRGHSFRAEAFMGMMRWEVLNRLKASHSELEVNNTYGYRTKHARIVNGIDKSHCADAFCIAGNLGAERLCEFFFQKQTRRNNRQIHKLSILKGGIRKRNQAPFEIKGFRLFDKVACKGEESFIFGRRSSGYFDVRKLDGTRISAGISCKKLRLLEKRRTYLTEIRKEEALPPLPEGRGLRA

SEQ ID NO: 20802 - protein, 456 aa, unidentified
  REGION 1..456: note = Human gut metagenome
MSTCVCVLSNNGERLMPTFRLGKVRRLLKDGKAKIVKHHPFTIQLLYDSKTNTQPIEICEDVGYNYIGISAKSKSHEYVSAQYDTLQDEKEHHDDCRKMRRTRRNRLRYRKPRFDNRKCDKGWLAPSLEHKKQLNISLIERYVSVIPITHATVEVGSFDTMLLQAIQKGKAKPESADYQKGPHYNLATLREAVFYRDNYTCQVCKRKIADGAILHMHHMFYWKGRHGYQLDELATVCEKCHTPANHQKGGKLFGFGEGKEFADLSGAAFMNTVRWQIVDALYTTYDKEFVTITYGAMTKEKRIALQLEKTHNNDAYAMGDYHPACRGKFRHYQKRRRNNRVLEKFYDATYIDARTGNKAKGKELFNGRINRNHKKDSENLHKYRSKKVSKGRRSIRRRRYAIQSYDTVRLEGKTYITSGCHNKGTRLLIPVNGKSKSVAISKVQVVCHAGAWIQIS

SEQ ID NO: 20803 - protein, 421 aa, unidentified; identical to SEQ ID NO: 17429
  REGION 1..421: note = Bioreactor metagenome

SEQ ID NO: 20804 - protein, 426 aa, Anoxybacillus sp.; identical to SEQ ID NO: 17233

SEQ ID NO: 20805 - protein, 450 aa, Clostridium sp.; identical to SEQ ID NO: 2935

SEQ ID NO: 20806 - protein, 426 aa, unidentified; identical to SEQ ID NO: 14562
  REGION 1..426: note = Human gut metagenome

SEQ ID NO: 20807 - protein, 470 aa, unidentified; identical to SEQ ID NO: 2825
  REGION 1..470: note = Human gut metagenome

SEQ ID NO: 20808 - protein, 425 aa, Tolypothrix sp.; identical to SEQ ID NO: 3714

SEQ ID NO: 20809 - protein, 428 aa, Moorena sp.; identical to SEQ ID NO: 11642

SEQ ID NO: 20810 - protein, 515 aa, unidentified
  REGION 1..515: note = Human gut metagenome
MTFNERRHLMPQIYVLGMDGKPQMPTTRRRHVQKLLDTGKARIAEHVPLTIQLLYDNDPVLQPVTLAEDPGRTNIGLAIMDLKGNLLLSAVVETRNKEIAKLMEKRRQCRRASRNGERKARQRLAKKYGTMIKAGMMMRKLPQYAAEKFITCKIIRNTESRFCNRKRKDGWLTPSARHLVQTHVNLVHKIQKYLPVTDVALEVNRFAFMLLEDPSVCGVDFQNGPLKGYDDRDAVVYDLQDGKCLMCKNEITQYHHIVPRSRNGSNTINNIAGLCDKCHDRVHKDADFAKQLKDKKAGLDKKYGALSVLNQAIPFICQKLEAEFGKEHVHYCTGRETSLVRRSIGYHKTKKNQVHEVDAWCIGALSLKQIPEDVPDFKDVHLIKQFRRQDRSLIKAQTERVYKLDGKTVAKNRKKRTGQETDSLEDWYNRQVETYGKQAADRMRSQLKVTESRRRYNNPDRMMPGAVFLYQGVRYVMRGQHCKGAYLQAVGMGNKDFSAKECKIVTQNTGLVFVS

SEQ ID NO: 20811 - protein, 406 aa, unidentified; identical to SEQ ID NO: 18812
  REGION 1..406: note = Human gut metagenome

SEQ ID NO: 20812 - protein, 420 aa, unidentified; identical to SEQ ID NO: 18320
  REGION 1..420: note = Human gut metagenome

SEQ ID NO: 20813 - protein, 506 aa, unidentified
  REGION 1..506: note = Human gut metagenome
MPYIYVLGMDGKPQMPTTRRRHVQRLLDTGRARIASHVPFTIQLLYKNDPILQPVTLAEDPGRTNIGLAALSLKGDLLFSAKVETRNKEISKLMDKRRQSRRASRNGERKARQRLAKKFGTMLKAGMLMRKLPQYAADKYITCHVIRNTQARFSNRKRPDGWLTPSARHLIQTHINLVHKMMKYLPVTDVVLEVNRFAFMQLEDPSISGVDFQNGPLKGFDDLHAAVRDLQDGKCMLCKNEIQDFHHIVPRSRHGSNTIGNIAGLCTKCHEKVHKDEKAEKRLKDKKKGLDKKYGALSILNQAIPFICKELETEFGKEHVHYCTGRETALVRRSLRYHKTKEEQYHEVDAWCIGALSLDRIPEKAPAFEEVHTIMQFRRQDRASIKAQTSRTYKLDGETVAWNRKKRTDQKNDSLEDWYQKQVQIHGQKEADRMRSRLTVKISQRRYNNLERMLPGAVFLYKGKRYVMKGQHSNGKYLRAVGDGKTNYPVKECRIGKRNQGLVFID

SEQ ID NO: 20814 - protein, 512 aa, unidentified; identical to SEQ ID NO: 8797
  REGION 1..512: note = Human gut metagenome

SEQ ID NO: 20815 - protein, 416 aa, unidentified; identical to SEQ ID NO: 6135
  REGION 1..416: note = Human gut metagenome

SEQ ID NO: 20816 - protein, 450 aa, Clostridium sp.; identical to SEQ ID NO: 17680

SEQ ID NO: 20817 - protein, 470 aa, Rhodanobacter sp.; identical to SEQ ID NO: 3168

SEQ ID NO: 20818 - protein, 457 aa, unidentified; identical to SEQ ID NO: 3236
  REGION 1..457: note = Human gut metagenome

SEQ ID NO: 20819 - protein, 476 aa, unidentified
  REGION 1..476: note = Human gut metagenome
LAASGTEGVSHPGLPGKYKHKGGQLMSVAVISKTGERLMPTSEYRARKLLKSGKAIKHSYHPFTIQLTGRETGDIQPIELCMDTGYIHIGISVKSEKHEYLAEQIDTLTDERGRHDACRMYRRQRRSRKRYRQARFNNRKRDQGWIAPSLEHKKKIHIQAISRINNVMPITDITLEMGNFDTQVLKAKEEGKPLPHGADYQHGGRYGIATLREAVFSRDGYKCQCCGRTIKDGVILHIHHIKYRSQGGTNSMSNLATVCDKCHTPKNHKPGGKLYNWKPKLSSFKGATFMTAIRWQLYNEVKALFPDIDIHITYGAATKERRRKLDIDKSHVNDAFVMGQFHPKHRIKAILCKKKRRNNRCLEKFYDAKYIDSRDGKKRSGQELFNGRINRNHKKNSENLHQYRLQKVTAGKRTVRKQHYKIQPHDIVIYENRKRETAGCHCNGTRMMLLPDKKSASIKKVKIYKYAGGYFKSAFN

SEQ ID NO: 20820 - protein, 431 aa, unidentified
  REGION 1..431: note = Human gut metagenome
MPNKVYVINKHGRPLMPCSPAKARHLLDEGKAKIKKRTPFTIQLVYGSSGYTQEVILGVDAGSKTIGMSASTTKEELLSAEVKPRNDVVDLLSTRREFRRVRRNRKTRYRKPRFDNRVRSKHKEWLAPSVEVKIQEHITSIKRVCRILPVSKVVIETAEFDLQLLKAIADGKPVPQGEDYQKGEMYGHYNVRQYVLWRDDYTCQCCGAHATKKKEVRLHVHHLESRKVGGDAPSNLITLCDSCHEKFHKGIITAANLKKRKRRSMRDATFMGIMRKTLMQRLCSELPIPVVETRGYITKATREKLLVLPKSHTNDALAIAQGKHGFNVGYLPEIAQIDKIYTIRPVRHHNRQLHKVTILKGGIRKSNQAEKYVFGYRLFDKVQFNGQDCFIWGRRTTGIFTIKTINGKMIKDGISFKKLKLVEKSTSYLIA

SEQ ID NO: 20821 - protein, 420 aa, unidentified; identical to SEQ ID NO: 3617
  REGION 1..420: note = Human gut metagenome

SEQ ID NO: 20822 - protein, 344 aa, Desulfobacter sp.
LSVFVLDTNKKPQNPIHPAKARLLLTEGTAAVFRQFPFTIILKEKVLDVASNPLRIKIDPGSRETGIAVINDDYRGQQIKNNLESRRAIRRSRRNRKTRYRKPRFDNRTRAKGCLPPSLKSRVHNIETWVNRLCRFCNIQAISMELVRFDMQKIQKNSSFQGKPGLLKRIQKQSKVPLKDAGAVNTTRWDLFRTLKKTGLPVETGSGGLTKFNRTTRGLHKTHWLDAACVGKSTPEKMFQIDKTVLILKADGHGSRQMCRVNRFGFPRTTAKSTEKKVKGFQTGDIVKAVVTSGKKVGTYTGRVAVRKSGSFNIKTVDKTVQGISWKYCRLLHASDGYSYNTTC

SEQ ID NO: 20823 - protein, 408 aa, unidentified; identical to SEQ ID NO: 11651
  REGION 1..408: note = Human gut metagenome

SEQ ID NO: 20824 - protein, 426 aa, unidentified; identical to SEQ ID NO: 3614
  REGION 1..426: note = Human gut metagenome

SEQ ID NO: 20825 - protein, 423 aa, Microcoleus sp.; identical to SEQ ID NO: 19649

SEQ ID NO: 20826 - protein, 442 aa, unidentified; identical to SEQ ID NO: 2903
  REGION 1..442: note = Human gut metagenome

SEQ ID NO: 20827 - protein, 426 aa, Moorena sp.
MRVFVLDKNKKALDPCHPARARKLLSSGRAKVFRRYPFTIIVQEKEAENCITHPHRLKIDPGAKTTGIAIVQGSRVVWGAELTHRGSQIRESLTSRRQLRRTRRSRKTRYRKPRFLNRTRATGWLAPSLQSRVDNILTWVKKLCRYCPITDISQELVRFDTQAMQNPSINGYEYQLGALAGYEVREFILEKWQRTCAYCGAKNTPLEIDHIKPKSKGGSNRLSNLTLACRPCNEKKGNQVLEQFLAKKPDLLSIILSMAKKPLAEATAVNSTRWKLYENLKATELPVEVGSGGLTKYNRSRHNLPKTHCLDAANVGKSTPEKLILEVNQPLLITAKGHGRRQQCRTDKYGFPKRYCSKQKVHFGFRTGDIVKANVTKGKKIGTYVGRVATRASGSFNISTKNRFVQGISHKYCQIVQGKDGYQYAF

SEQ ID NO: 20828 - protein, 515 aa, unidentified
  REGION 1..515: note = Human gut metagenome
MIPNERRHLMPYIYVIGMNGKPQMPTTRRRHVQKLLDTGKARITERVPFTIQLLYDNDPVLQPVILAEDPGRTNIGVATLDLKGNLLLSAAVETRNKEIAKLMEKRRQCRRASRNGERKARQRLAKKYGTMIQAGMRMRKLPQYAADAFITCKVIRNTQARFCNRRRLDGWLTPSARHLVQTHINLVHKVQKYLPVTDVAIEVNRFAFMQLEAPAICGVDFQTGPLKGYDDRDAAVYDLQDGKCLMCKHEITQYHHIVPRSRNGSNTIGNIAGLCDQCHDRVHKDADFAEQMKEKKEGMDKKYGALSVLNQAIPFICKQLETEFGRGHVHYCTGRETSLVRQSTGYQKTRKNQLHEVDAWCIGALALAEIPENVPDFKEIHLIRQFRRQDRSLVNAQTERVYKLGGKMVAKNRKKRTGQEIDALEDWYNRQVETYGKQEADCMRSRLKVTKSRRRYNNPNRMMPGAVFLYEGVRYVMRGQHSKGAYLQAVGMENRDFPVRKCKILTRNTGLVFVS

SEQ ID NO: 20829 - protein, 512 aa, unidentified
  REGION 1..512: note = metagenome
MSTIYVLNKDGKPLMPTTRGGHVRHLLKEQKARVVQSNPFTIQLLYETDDAVQPLYLGIDPGRTNIGVAVVKTDGTAVFTAHLGTRNKEIPKLMQGRKKARRARRTNGRRCRRQRRAKANGTISKKCVKQDTAQNGSVSKRAKKIGVIKRHLPGCEKEVLCIGIKNKEAKFNNRTRPEGWLTPTANQLLQTHVNLVKKIQKFLPISDVVLEVNKFAFMQLDNPNIQKWQYQQGPLYKKESLESAVSEMQEHHCLFCKKPIDHYHHVVPQHKNGSNTIGNIVGLCTKHHDLVHKDSAWEKKLAKKSTGLYKKYAALGVLNQIIPALTNKLSVLFPKHFFVTTGKSTHDYRESHGVSKDHWLDAYCIACSALPGSVCDSDINNHVPYELKQFRRHDRRALHKENMSRVYTLNGKKVATNRHKAVEQTTDSLEDFRQCQPNDVCKLKVKEHHPTYRNMNRNYPGSVFLVDGQIHVMQGVGGSHNGKADGYYDTNSNAYPYYKCKFVAKNEGIVFA

SEQ ID NO: 20830 - protein, 470 aa, unidentified; identical to SEQ ID NO: 2949
  REGION 1..470: note = Human gut metagenome

SEQ ID NO: 20831 - protein, 406 aa, unidentified; identical to SEQ ID NO: 3567
  REGION 1..406: note = Human gut metagenome

SEQ ID NO: 20832 - protein, 435 aa, Moorena sp.
MSYVFVLDTKKQPLNPVHPGRARWLLTQRKAAVFKRYPFTIILMSAAESPQVQPLRIKLDPGSQTTGIALVDDHSGQVLFAAELAHRGQQIKKALDTRRAVRHHRRARHTRYRKPRCDNRRRPKGWLAPSLLSRVSNVLTWVNRLRRLCPISAISMELVRFDVQAMENPEIEGCQYQQGTLAGYEVREYLLAKWGRTCAYCSKQNVPLQVEHIIPRAKGGTDRVSNLTLACEKCNRAKGSQDIAVFLKEKPDVLTRLLARAQGPLKDAAAVNATRWALYERLKDIGLPVECGSGGLTKFNRSTRNLPKTHWLDAACVGKSTPQTLQVKGIIPLLITSNGHGCRRMCSMDGTGFPRTKPKRKTFTHGFRTGDIVRALVPAHLNHAGIHVGRMSAKEKGGFTITTATGKITDVGKKYCRTLQRADGYGYVQPCAPAG

SEQ ID NO: 20833 - protein, 426 aa, unidentified
  REGION 1..426: note = Human gut metagenome
MFVYVLDMNGQPLMPTQRFGKVRRMLRDKKAKVIKRCPFTIRLLYEPETKIVQEVVLGVDTGSKHVGVACVGNSKVLYQSQVELREDIKKKMDSRRMYRRNRRFRKTRYRKARFLNRGNSIKKDRYCPTIVSKFHGHEREIKFCKKILPIKDIVLETGTFDTQLMEKPWLQEHKWAYQRGVNYGYSNAREHALVRDNYTCQCCGKKNCRLEVHHIVFRRNGGSDSLENLITLCEDCHKAVHLGEIDLKLKGKRRSTLRYATQMSIIRSMLLKKYPDAIETFGFVTKANRENLGIGKDHYLDACVIASGGLEFEPSDALYIKKCVSKQDRQLCKGIRGEKKTPTGKVFGFKKFDKVKYLGETCFIKGRRSSGAFVLMDIDNNAIDFRDRGGKQNPSYKSLKRLNTRKSILCIYKRIEGEVRFIPTLS

SEQ ID NO: 20834 - protein, 529 aa, unidentified; identical to SEQ ID NO: 6786
  REGION 1..529: note = Human gut metagenome

SEQ ID NO: 20835 - protein, 435 aa, unidentified
  REGION 1..435: note = metagenome
MDAWDIIVVLNKRGKPLMPCSPAKARLLLKEKKAIVKRRTPFTIQLTIATGEAKQPVSLGIDAGYKHVGLSASTEKAELYASEVELRQDITDLLSARRALRQSRRNRKTRYRAPRFDNRISTKRKGWLAPSVENRINAHLSRIEAVLRLLPVTKITVETASFDLQLLKNPDISGKEYQEGEQLGFWNIREYVLCRDGHVCQHCYGRSKDPVLNVHHLESRRTGGDSPDNLLTLCETCHKALHRGEITLKAKRGQSFRAEAFMGIMRWEVLDRLKASHPELEVNNTYGYRTKHARIANDIAKSHCADAFCIAGNLGAERLGEFFFQKQTRRNNRQIHKLSILKGGIRKRNQAPYEIKGFRLFDKVACQGEEGFIFGRRSSGFFDVRKLDGTRISAGISCKKLHLLEKRRTYLTEIRKEEALPPLPEGRGSAPKCDE

SEQ ID NO: 20836 - protein, 418 aa, unidentified; identical to SEQ ID NO: 7351
  REGION 1..418: note = metagenome

SEQ ID NO: 20837 - protein, 290 aa, Moorena sp.; identical to SEQ ID NO: 18451

SEQ ID NO: 20838 - protein, 389 aa, unidentified; identical to SEQ ID NO: 11535
  REGION 1..389: note = Human gut metagenome

SEQ ID NO: 20839 - protein, 419 aa, unidentified; identical to SEQ ID NO: 4877
  REGION 1..419: note = Human gut metagenome

SEQ ID NO: 20840 - protein, 427 aa, Alistipes sp.; identical to SEQ ID NO: 18929

SEQ ID NO: 20841 - protein, 423 aa, unidentified
  REGION 1..423: note = Human gut metagenome
MQVVYVLNKDGLPLMPTHKLGKVRHFLKDGKAKIVKRTPFTIQLEYECENHIQPVTLGIDAGSKHIGLSASTEKIELYCSDVEIRNDIVELISTRRETRRTRRNHLRYRPARFNNRKASKPEEWLAPSVKQKVESHLKVVEEVHKILPVSKIVVEVASFDTQLLKAEAEGKTISGIEYQKGELSESWNTREYVLFRDNHTCCHCHGKSGDKVLEVHHLESRKTGGDAPSNLITLCKTCHENYHKGKIKLKQTRAEKYNDATFMGIMRWAFYNELKEIYFDVSLTYGYITKSNRIKYNLAKEHYNDAYCIAQNFKAEPLDKVIYQKKVRCHNRQIHKANFLKGGKKKLNQAPYTVKTFRLFDKVKYQNQECFIFGRRSSGYFDIRMLDGTKVNNSVSYKKLELLEARKNYLKEERSRQFLPPIN

SEQ ID NO: 20842 - protein, 416 aa, unidentified
  REGION 1..416: note = Human gut metagenome
MVYVLDKNGQPLMPTDRHRKVRLMLQSGQAKVIKRCPFTIQLNYDSGHQTQEISLGIDAGSKHIGVSATTKTRVLYEADVELRNDIVDLLSSRRELRRGRRNRKTRYRPARFDNRRREDGWLAPSIRQKIGTHLTVVENICKILPISRITVETASFDIQKIKNPDIQGAEYQQGDQLGFWNNREYVLFRDNHTCQCCKGKSKDKILNVHHIESRKTGGNAPNNLITLCEICHTGYHKGAIQLPKTVKRGMRFKDAAFMGIMRWAFYEALKQQYEPVGTPVHNTYGYITKHTRIAYNLPKEHYVDARCISGNPEASSNGEYYYQKKVRCHNRQIHKLTVLKGGIRKQNQATYLVKGYRLFDKVSYQGKGYFVFGRRQSGFFDIRTLSGEKVNKGSLSCKKLKFIATRTYYLTERRAV

SEQ ID NO: 20843 - protein, 408 aa, unidentified
  REGION 1..408: note = IscB polypeptide
MTQKVFVIDTDGRQLLPTHPARSRKLLQAGRAQVHQVVPFTIQLTRVVEDPVGAFTVGVDDGAKHVGIAMVNEHTKEVVFRGTVRLRQDVKRKMTQRAAYRRTRRSRKLRHRPARFLNRGRKGFLPPTIRQKKDSILRVIRDLGKVLHITKAVVEEGQFDISSLAAGRKLVGAEFQQSEYEGRNFRAKVLWRDRYKCTRCGFTEWLQAHHVKPKSVGGGNSPNNGLTLCRTCHKELHDGLWALTAKPKRFLYPAHLQAGKKYLREGLCSCGLAVSTCCGWMTKLWRDFIGLPKAHDFDAVAMVCRSYMPKIVKGAFTIIPRRTKVWEGNPTKKCHERRGFRHWDLVKASHRTRGIVVGSVRSLKKARLTLRTGWDINFPVSYRKTQLLWRPKGLVYISTLGLPCPRAL

SEQ ID NO: 20844 - protein, 458 aa, Anoxybacillus sp.
MVEENMTCFMQRKGENPMVFVLDTNKRPLAPCHEAVARKLLKQGKAAIYRRFPFTIILKKSVDESEIKATYRLKIDYGSRHTGLAILRGQEVVWLGQLDHRTDIKERIDKRRAFRRARRNRKTRYRKPRFLNRKRKEGWLPSSLESRVQNIQTWVNRLKKLCPIGYISYENAKFDTQLMRNPEINGVEYQQGTLQGYEVREYLLEKFGRKCCYCGKENVPLEVEHIIPKSRGGTDRVDNLCLACHDCNQRKGSKTAEEFGYPHIQKQVKESLKDASAINSTRWKAYEVLKQTGLDVECGTGARTKMNRIRLDLPKTHYFDACCVGESTTNHLYFKTKEVLFIKAKGRGSRSRTNLDRYGFPRGYLARQKFFFGFQTGDMVKAVVPRGKYQGVWFGEVACRKTGSFDIKGKDGKRIAQGINYRYVQVIQRFDGYAYGKGGRNLRKVQFLVVPKGRGFLA

SEQ ID NO: 20845 - protein, 428 aa, unidentified; identical to SEQ ID NO: 4606
  REGION 1..428: note = Human gut metagenome

SEQ ID NO: 20846 - protein, 413 aa, unidentified; identical to SEQ ID NO: 14501
  REGION 1..413: note = Human gut metagenome

SEQ ID NO: 20847 - protein, 373 aa, unidentified
  REGION 1..373: note = Human gut metagenome
DTLQDEKACHDSCRKLRRTRRNRLRYRKPRFDNRKRGEGWLAPSLEHKKQLNIRLIERYVSVIPITHATVEVGSFDTMLLQAIQKGKSKPEGVDYQKGPRYNLATLREAVFYRDNYTCQVCGRKIADGAILHMHHMFYWKGRHGYQLDELVTACEKCHTPANHQKGGKLFGFGEDKEFANLSGAAFMNAVRWQIVDALHATYGKEFVTITYGAMTKEKRIILGIEKTHNNDAYAMGDYHPVHRCVFRHYQKRRRNNRVLEKFYDATYIDTRTGNKAKGKELFNGRISRNHKKNSEDLHKYRSKKVSKGRRSIRRQRYAIQPYDTVRLESKTYITSGCHNKGTRLLIPANGKSKSVAISKVQVVCHAGAWIQII

SEQ ID NO: 20848 - protein, 335 aa, unidentified; identical to SEQ ID NO: 9848
  REGION 1..335: note = Human gut metagenome

SEQ ID NO: 20849 - protein, 533 aa, unidentified
  REGION 1..533: note = Human gut metagenome
MSTVYVLNKDGKPLMPTTRGGHVRHLLKEQKARVVRAKPFTIQLLYETNDVVQPLYLGIDPGRTNIGVAVVKANGTAVFTAHLETRNKGVPKLMQDRKKARRARRTNGRRCRRQRRAKANGTISKKCVKQDTAQSKNPSKRAKEIGIIKRRLPGYKKDVLCIGIKNKEAKYTNRTRPEGWLTPTANQLLQTHINLVRKMQKFLPISDVVLEVNKFAFMRLDNPDIQKWQYQQGPLYQKGSLENAVSEMQEHHCLFCDKPIDHYHHVVPQSENGSNTIANIVGLCAEHHNLVHKDAAWQKKLAEEKVGLNKKYGALSVLNQIIPALTNKLSVLFPKHFFVTAGKSTHDYRAAHGVSKDHWLDAYCIACSVLPSNVCDSNINNHVPYELKQFRRHDRRVLHKANMSRVYTLNGKAVATNRHKAIKQTTDSLEEFRQNYPDDVYKLKVKEHHPAYRNLNRNYPGSVFLVGKQAHVMQGIASSKDGKTTKYNDTNATTITAGKCKFVAKNSGILFVQCKFRKALSDGTTKKLQYPVR

SEQ ID NO: 20850 - protein, 465 aa, unidentified; identical to SEQ ID NO: 10277
  REGION 1..465: note = Human gut metagenome

SEQ ID NO: 20851 - protein, 420 aa, unidentified
  REGION 1..420: note = Human gut metagenome
MQYVYVLNKHGEPLMPCSPGKARILLKQQKACAVKRTPFTIKLLHGSAGYKQPVTLGVDAGSKHVGLSASTEKRELYSEEFTPRNDVVELLSTRRQNRRSRRNRKTRYRAPRFNNRVHSKHKGWLAPSVEVKIQEHITVIKRICRILPVTLVRVETAEFDTQRLKAMLAGKPLPVGTDYQLGEMYDEYNVRQYVLKRDNYTCQCCGAHTTAKKAVKLHVHHLESRKVGGNAPSNLITLCTACHDNLHKGKVTLDGKKRGKTLRDAAFMGIMRNTLLIRLRNELNIPVQNTYGYITKLLREQNDIKKSHINDARCISKHPLAEPCSVCYCTKAIRHHNRQIHKAKILNGGVRKTNQAPYIVKGFRLWDKVLYNGQECFISGRRSSGYFAIKKLDGTTITNSISFKKLRLLEPATNYLIERM

SEQ ID NO: 20852 - protein, 396 aa, unidentified
  REGION 1..396: note = Human gut metagenome
VVRRTPFTIQLTIATGESKQPVSLGVDAGYKHVGLSASTEKAELYASEVELRQDITDLLSARRALRQSRRNRKTRYRAPRFDNRISTKRKGWLAPSVENRINAHLSRIEAVLRLLPITKITVETASFDLQLLKNPDISGKEYQEGEQLGFWNIREYVLCRDGHVCQHCYGRSKDPVLNVHHLESRRTGGDSPGNLITLCETCHKALHRGEITLKPKRGQSFRAEAFMGIMRWEVLGRLKASHPELEVNNTYGYRTKHARIANDIAKSHCADAFCIAGNLGAERLGEFFFQKQTRRNNRQIHKLSILKGGIRKRNQAPYEIKGFRLFDKVACQGEEGFIFGRRSSGFFDVRKVDGTRISAGISYKKLHLLEKRRTYLTEIRKEEVLPPLPEGRGLRA

SEQ ID NO: 20853 - protein, 418 aa, unidentified; identical to SEQ ID NO: 6784
  REGION 1..418: note = Human gut metagenome

SEQ ID NO: 20854 - protein, 268 aa, unidentified
  REGION 1..268: note = Human gut metagenome
MCIRDRYQQGTLFEYEVREYLLEKFGRKCVYCGAEGVPLNIDHVVPRAKGGSNRVSNLVLACVSCNQKKGARSLEDFLKGKPEVLARVRRELKTPLRDAAAVNATRWVLFNELKATGLPVETGSGALTKLNRHAFGVEKEHWLDALCVGRLNGVVTRKGLNVLEIRCMGRGSRQRTRLTKYGFPRGYLMRQKCVHGFATGDMVEANVPKGKKAGLWRGRVAVRVSGSFNIQTPKGVIQGVGWKHCRLISHNDGYGYAWLGHAPHSSPA

SEQ ID NO: 20855 - protein, 264 aa, Moorena sp.
MQKLLVEFENTSGDAPQVHCSVSEALNREETLSVPYKVLANNSSDEDQHSGKSGQVLSVPVINMHGKPLMPTTPRKARVLLQQGKSRVVQRSPFTIQLCYLTGNYTQNIKLGIDAGYSTIGFSAVTEKSELLSGELTLRKRISKLIEQKSNYRKTRRSRLWHRKPRFNNRSIITGWFAPSIQHKLETHLRLIEKLKKILPITKMTVEVASFDQQKLHNPEIKGIEYQQGELQGYEVREYLLEKWKHKCAYCGKRAQSHFLVIDE

SEQ ID NO: 20856 - protein, 440 aa, unidentified
  REGION 1..440: note = Human metagenome
MVLVIDKHKKPCNTVSNAYARVLLFKKQAVIHKRFPFTIRLKNDNAVLKNNSYVVKIDPGSKTTGVAITNDKDSVVMLAEIEHRGHVIKKNLDSRRAVRRKRRNRKTRYREARFDNRTRPEGWLAPSVKSRADNVINFIRKYKKLINIDKVMIESVSFDVAQMTSDDCLIGTGYQQGPLYQKKLRDFIFNKTNGRCSYCGAKATEIDHIIPRANGGTDSTFNLTPACRSCNEKKSNLSLKDFGKIMNKDYSHLEPKKLPKDAAIVQSARNYMAKEITKLVSDTAIYDAWLTKYNRDQLGLPKEHYYDALSVGEIPNKFNFLTNKVLIISAKGRSSRQMCRMDKYGFPRTSPKGSKFVEGFQTGDMVKAIVPNGLKRGEYLGKVAVRSSGQFNIQTKTKTIEGINHKYCHIIQRGDGYLYSYKECDFLSAINNRVSIAKIR

SEQ ID NO: 20857 - protein, 415 aa, unidentified
  REGION 1..415: note = Human gut metagenome
MVYVLANDGQPLMPTERHGKVCRMLKSGIAKVVKKCPFTIQLQYESERNVQPVALGIDAGSKHVGVSATTKAKVLYESDVELRDDIVKLLATRRQLRRRRRSRKTRYRPARFDNRRRKEGWLAPSIRQKIESHLTVVANACKILPINQIIVETASFDIQKIKDPEIQGIEYQQGEQMDFWNIREYVLFRDGHICQCCKGRSKDKILNVHHIESRKTGGNAPNNLITLCETCHKGYHNGTVILPKNIKHGMQFKDAAFMGIMRWTFYNTLKEQYEPDIPVSMTYGYLTKNTRIEHGLPKEHYIDARCISGNPDAVSDGTYYYQKKVRCHNRQIHKQTILKGGIRKSNQAEYLVRGFRLFDKVRYQGREYFIFGRRKSGFFDIRTLSGEKVNKGSISVKKLTFADTRKNYLIERRTV

SEQ ID NO: 20858 - protein, 497 aa, unidentified
  REGION 1..497: note = Human gut metagenome
LRDYMTPKKRKEASRMSEYIYVLGVDGDPQMPTKRKRHVEQLLQTGRARVFRQIPFTIQLTYENKPVLQPVTIAEDPGRSNIGMAVVSLSGELLSAAVVQTRNKEIVKLMDKRKQHRRASRNGERKARQRLAKKCHTMIKTGFLMRKLPMYGKDKRVKCLVIKNTESRFCNRKREDGWLTPSAEHLVQTHINLIHKMQKFLPITDVAIEINRFAFLSLEDPSISGVDFQKGPLKGYDDLNAAVEDLQDGHCLMCNSPIEHRHHIVPRSMQGSNTIGNIAGLCCKCHEKVHKDSAFEDSLKKKKAGLNKRYAAVSVLNQAIPFICKRLEQEFGKEHVHYCSGRDSSMVRRSLGYHKTKEEQLHEVDAWCIAVLSLQHVPEKAPEFDHVHEILQFRRQDRSRIKAQTSRAYYHEGKKIAKNRKKAEGQKDDSLQGWRKRQVERYGEEQTRKMISQLKVKKSIRRYNRLDRLMPGAVFYYQGVRYVMRGQHCEGTYLQAV

SEQ ID NO: 20859 - protein, 430 aa, Microvirga sp.; identical to SEQ ID NO: 7723

SEQ ID NO: 20860 - protein, 442 aa, unidentified; identical to SEQ ID NO: 10720
  REGION 1..442: note = gut metagenome

SEQ ID NO: 20861 - protein, 407 aa, unidentified
  REGION 1..407: note = metagenome
MPCSPAKARLLLKEKKAIVKRRTPFTIQLTIATGEAKQPVALGVDSGYKHIGLSATTEKAELYASEVELRQDITDLLSVRLALRRSRRSRKTRYRAPRFDNRVASKREGWLAPSVENRIAAHMSRVEAVMRVLPVTAITIETAAFDTQLLKNPDIAGAAYQQGEQLGFWNVREYVLFRDGHVCQHCRGKSKDPILNVHHIESRRTGGDAPNNLITLCETCHKAFHRGEIKLKVKRGKSFKAETFMGIMRWTLFERLKKAHPELRVRNTYGYLTKHKRISHGIAKSHCADAYCIADNLGAKRLEGFFFQKQTRKHNRQIHKLSILKGGLRKKNQAPYEVKGFRLFDKVICKGEEAFIFGRRTSGSFDVRRLDGTRISDGISNKKLRLLESRTTYLTEFRKEAALPPRA

SEQ ID NO: 20862 - protein, 475 aa, unidentified; identical to SEQ ID NO: 4985
  REGION 1..475: note = Human gut metagenome

SEQ ID NO: 20863 - protein, 428 aa, unidentified
  REGION 1..428: note = Human gut metagenome
LKVFVLNMRGQPLMPCSPAKARHLLKAGKAVVKRRTPFTIQLRIATGETKQNVTLGVDAGAKHVGLSATTEKEEVFASEVELRQDITGLLAARLSLRRDRRHRKTRYRAPRFLNRVRSKHKGWLAPSVENRIQAHMSRIDAVCRLLPVTKIVIETASFDIQKIKDPSVEGTDYQQGDQLGFWNVREYVLFRDGHVCQHCHGRSKDKILNVHHLESRQTGGDAPNNLITLCETCHKAYHAGKIKLKVKRGQSFRAEAFMGIMRWTLLDRVRKAHPGLPVENTYGYLTKHTRITHGLPKTHCVDAYCIAGNLKAVRRGVYLHQRQMRKHNRQIHKFTVLSKRLEDGTKIGYRKLNQSPYLVHGFRLFDKVRCLGQIGFIFGRRSSGYFDVRRLDGVKLSPSISWRKLTLLEKRSTYLTELRKEDGASSPV

SEQ ID NO: 20864 - protein, 442 aa, unidentified; identical to SEQ ID NO: 4653
  REGION 1..442: note = Human gut metagenome

SEQ ID NO: 20865 - protein, 418 aa, unidentified; identical to SEQ ID NO: 17178
  REGION 1..418: note = Human gut metagenome

SEQ ID NO: 20866 - protein, 415 aa, unidentified
  REGION 1..415: note = Human gut metagenome
VLEITNYVFVLDANGKQLAPTKEQKAWFLIRKKRATLVSKYPMVIQLKKEIPDEQIYKDEICCGIDDGGLHVGISLVQKCKTKNKVVFKGTIEQRKDVKHLMEVRKGYRRYHRFHKRYRQARFNNRKSSKRKERIAPSILQKRQATIRVINQLNKWINITNYWLEDVAIDIRALTDDYKAYRWQYQQSNRLDENIRKAVILRDGCKCMECGKSNCKLEVHHIKPRRSNGSNTLGNLISLCKKCHQKTEGQEELYMNRYFSMFNSSDNKNLNYAQHVMIGKKWLREQLSKLGTLTLTTGGDTANKRIDWNIEKSHSNDAICITGLQPDTCNIKEWTIKPMRRQSKAKADNVLGINHRDLVEYTFRNGETHRGYVTALYPGQNAINFQSSTKHCKKVNAKKCKLIWKYSKIYWLANV

SEQ ID NO: 20867 - protein, 446 aa, Pseudomonas sp.; identical to SEQ ID NO: 12968

SEQ ID NO: 20868 - protein, 393 aa, unidentified; identical to SEQ ID NO: 9754
  REGION 1..393: note = Human gut metagenome

SEQ ID NO: 20869 - protein, 557 aa, Blautia sp.; identical to SEQ ID NO: 7395

SEQ ID NO: 20870 - protein, 431 aa, unidentified; identical to SEQ ID NO: 15634
  REGION 1..431: note = Human gut metagenome

SEQ ID NO: 20871 - protein, 518 aa, unidentified; identical to SEQ ID NO: 18029
  REGION 1..518: note = Human gut metagenome

SEQ ID NO: 20872 - protein, 304 aa, unidentified
  REGION 1..304: note = Human gut metagenome
VLEVNKFAFMQLDNPNIQKWQYQQGPLYQKGSLENAVSEMQEHHCLFCEKPIEHYHHVVPKSENGSNTIANIVGLCTEHHNLVHKDATWQKKLAKEKVGLVKKYSALSVLNQIIPALTKEMNSLFPKHFFVTNGKSTYDYRTAHGVSKDHWLDAYCIACSVLPNDVCDSNINSHVPYELKQFRRHDRRVLHKANMSRVYTLNGKTVATNRHKAIKQTTDSLEEFRQSHPGDVCKLKVKEHHPAYRNLNRNYPGSVFLVDGQVHVMQGVSGSHNGKADGYYNTNGNAYPYYKCKFVVKNEGIVFA

SEQ ID NO: 20873 - protein, 408 aa, unidentified; identical to SEQ ID NO: 11651
  REGION 1..408: note = Human gut metagenome

SEQ ID NO: 20874 - protein, 424 aa, Enterococcus sp.; identical to SEQ ID NO: 4034

SEQ ID NO: 20875 - protein, 406 aa, Geobacillus sp.
MPCSPRKARLLLKQKKAKVVRRTPFTIQLLYGSSGYKQPVSLGVDMGTRHVGISATTKKDVLFEAEAQLRTDIVELLAIRRQFRRSRRNRKTRYREARFLNRRKPEGWLPPSIQHKINSHIKLIDLVHNILPVTSVTIEVAAFDTQKLKNLNIRGVEYQQGEQMGFWNVREYVLYRDNHTCQYCKGKKKDPVLQVHHIESRKTGGDSPDNLVTLCKTCHHEIHEKGLEHIFQRKRPPMRDASQMTAMRWAMFSRIREKYSHANITYGYITKCIRIANGLSKSHMVDARCISGNPLAKPSGTVYLLKFVRKNNRQLHKATILKGGKRKSNKAPRFVKGFQLFDKVVYERKECFIFGRRSSGYFDLRLLDGTKVHASASWKKLKRVEHASTLLIERRKGDSSPTFALA

SEQ ID NO: 20876 - protein, 417 aa, unidentified
  REGION 1..417: note = Human gut metagenome
MPCSPAKARLLLKEKKAIVKRRTPFTIQLTIATGEAKQPVALGVDSGYKHIGLSATTEKAELYASEVELRQDITDLLSARLALRRSRRSRKTRYRAPRFNNRVANKREGWLAPSVENRIAAHMSRVEAVMRVLPVTAITVETAAFDTQLLKNPDIAGEAYQQGEQLGFWNVREYVLFRDGHVCQHCRGKSKDPILNVHHIESRRTGGDAPNNLITLCETCHKAFHRGEIELKVRRGKSFKAATFMGIMRWTLFERLKKAHPELRVRNTYGYLTKHKRISHGIAKSHCADAYCIADNLGAKRLEGFFFQKQTRKHNRQIHKLSILKGGLRKKNQAPYEVKGFRLFDKVICKGEEAFIFGRRTSGSFDVRRLDGTRISAGINYKKLRLLEPRTTYLPEFRMEAALPPLHECRGLRAESL

SEQ ID NO: 20877 - protein, 405 aa, unidentified
  REGION 1..405: note = Human gut metagenome
MSVAVMSKTSMRLMPTSEYRARKLLKSKKATVYGYHPFTIQLTERETGDVQPVELCMDTGYLHIGMSVKSKKHEYLGVQIDTLTDEKQKHDACRMYRRQRRSRKRYRQSRFNNRKRSDGWIAPSLEHKKDIHIQTISRICNAIPITNITLEMGNFDTQVLKALKKNRPLPQGTDYQHGERYGIATLREAVFARDKYTCQCCRRTIADGAILHVHHIIYRSRGGTNRMSNLATVCDRCHTPANHKPGGKLYNWKPKLASFKGATFMTAVRWKMYNEVKSKFSDINIHITYGAETKEQRRAFDITKSHVNDAFVMGQFHPKHRSRPVCYKKKRRNNRCLEKFYDAKYIDSRDGKKRSSQELFNGRINRNHKKDSENLHQYRQQKVSSGRRTIRKQHYSIQPHDIVVF

SEQ ID NO: 20878 - protein, 424 aa, Moorena sp.
MYVFVLNDNGKPLMPTHAAKARKLLRAKKARIVSRNPFTIQLNYHATEYVQPVTVKLDTGFKRGGVALQSNGKILFQGEIVHRRYINQPTRGQVLVVRRERRRARRYRLRYRAPRFDNRRRPEGWLPPTVKAKADVQVNVLKVLAKYAPVTRAIIEVGSFDTHKMQNPDIKPEDYQNGRQKGFKNVKEYVKHRDNRCINCGAEIKEVHHLKQKAKGGTDNPSNLAALCKKCHRLVTLGRLKLDITPGRELKGAAFINAAKDYIVSEVKKFISEVVTQEGWRTKEERERLDLPKSHVNDAIAMDTSGENIYIPNIPVYEIRPRQRAVRQQYLSEPQKGGIFKRYRHPWQNIAGIKRGDLCRDAKTGQLVVVDTLLATGKLNARVLKTGRRLVNIAPVRLQILERARGLMFNPGTQERRLNAALLP

SEQ ID NO: 20879 - protein, 515 aa, unidentified; identical to SEQ ID NO: 3725
  REGION 1..515: note = Human gut metagenome

SEQ ID NO: 20880 - protein, 419 aa, unidentified
  REGION 1..419: note = Human oral metagenome
MLVYVLKQNGQPFMPTERFGKVRRLLKEGKAKVVRREPFTIKLLYEPETDVVQECYCGVDTGSKHVGVAVVGNDKVLYQSQTELRNNIKKKMDRRRGFRRNRRYRKTRYRKCRFSNRRNSIKKDKLPPSVKHKVQAHIDEIEFCKKILPVSDLILEVSQFDTALMKNPSLINEKVRHWGYQQGFNYGYSSRRSAILHRDNYTCQCCGKKNCRLEVHHIKFKSNDGTDDEENLITLCEDCHKGIHAGTVVLNKKPKKSKNLKYATHMSIIRSWLLKRYPDAIETFGFVTAENRNHLKLKKDNYIDACVIASGGLRFEELDVIFYKRRVSKGDYKLVRGIRGEQKLPTRKIYGFRKFDKIEYFGEKYFIRSRTSKGFATLMDIFGNEVDFSSMPRGKKMPKLSNCKRVLARRSCLCVNQKK

SEQ ID NO: 20881 - protein, 427 aa, Enterococcus sp.; identical to SEQ ID NO: 5630

SEQ ID NO: 20882 - protein, 424 aa, unidentified
  REGION 1..424: note = Human gut metagenome
MRVFVFNMRGRPLMPCSQRKARLLLRENKAMIYKYHPFTIQLTYTTGETKQDCHIGIDTGSKYIGAAVRSEDKVFWKGEIELRQDIRSNLDTKRIYRRSRRNRKTRYRKTRFLNRKRRDEWLPPSLQSRINHTFHWIDTLSSLVPNPILHIEVGKFDVAKMINPEIHGVDYQHGQTYGFFDERYFVFARDNYTCQCCGKSKNKILNTHHIIYRSNGGTNRVDNLITVCTDCHTLQNHRKGGIFYQWQEQHKKVKQYKEPPFMNTLRKRIFVAYPDAEITYGSETTPKRKAMKLDKTHYNDAIVISGINEIKENPEEWLLIKQFRKKKRSLHEATARKGRKKPNRNQTRNSKNTPYYKGFYLNDKVSVFGKSGYITGFTSNAAYIKDENNDYITLPNKTYKQVSINKMKLECHNNNWQYIIKNAV

SEQ ID NO: 20883 - protein, 424 aa, Moorena sp.
VPVMVYVIGQNGQPLMPTNRHGKVKHLLKSGKAKVVRRCPFTIKLLYRSTNYAQDLTLGVDTGSGTIGTAVTKDNDDVVYMSKVIVRNDITDKMTQRAKYRRNRRNRKTRYRKPRFLNRRNSIKNDRFSPTMVSKIQSHQREIEFIKSILPITTIVLETGQFDMHLMKNPMLANEKVRHWGYQKGTNYGFENTKAMVLNRDGYKCQCCKGKHKDSKLEVHHIVFRSQGGSNEADNLITLCHTCHKALHDGKISPNFKGKNKGLLKYATQMNSIRKQLLRTYPNAVETFGMVTKANRLNLGIEKDHHLDACVIASGGNPFTFTTNEVFIKRNVSKGDYQKTKGVRSEQPIMTSKIQGFRKFDKVKYFGKEYFIKGRMSSGYAILMDIEGNKIGFSSMPKGMKTPKLCNCIRVTARNSVLVDKVAV

SEQ ID NO: 20884 - protein, 408 aa, unidentified; identical to SEQ ID NO: 5560
  REGION 1..408: note = Human gut metagenome

SEQ ID NO: 20885 - protein, 422 aa, Moorena sp.
MESSIIYVQNTKGEPLMPTRRHNKVWYWLRKGLARVVSREPFTIRLRFETTGYTQKAVVGVDTGSQTVGIAAITNREVVLQAEVHLRTDIKEKLHQRRQYRRNRRSRKTRYRSARFANRRRPDGWLPPSLQSKAEATMKAIRWVMRLLPVQQCNVEVASFDTQKMQNSDIAGMTYQQGELSGYLVREYVLTKWKRQCSYCHTTGVPLQLEHIVPKARGGSDRVSNLCLACQNCNMAKGTQTAAEFGHPQVQAQAKIPLKDAAHVSSIKTRVIHDLQAIFAERQVRITYGYETKYKRTQGLGLPKSHTNDAVAIACEIGEMVKPLETVHHLRCLARGKYQRFNGPHSEHKCWAPHKVHGFKLYERVKAKGVVGYIAGRREKGAFVIKDCISDKRMLDVTPRKLERIARPVQGFLITRQAADVE

SEQ ID NO: 20886 - protein, 417 aa, unidentified; identical to SEQ ID NO: 5046
  REGION 1..417: note = Human gut metagenome

SEQ ID NO: 20887 - protein, 414 aa, unidentified; identical to SEQ ID NO: 14060
  REGION 1..414: note = Human gut metagenome

SEQ ID NO: 20888 - protein, 426 aa, Oscillochloris sp.
MSFVFVLSSDGQPLDPCHPARARQLLDHGKAAVWRRYPFTIRLKERRAAASVTHPHRVKLDPGSKTTGIAVVAETTGRVVWAGELTHRGQAIRDALLSRRAIRRSRRQRKTRYRQPRFLNRRRPEGWLAPSLAHRVDTTRTWVNRLRRFVPVTAISMELVRFDTQLLEHAEISGVEYQQGTLAGYEVRQYLLEKWGRRCAYCGTTGVPLQVEHITPRARGGSDRISNLALACEPCNTRKGTQTAEAFGHPEIQAQARRPLKDAAAVNQTRWALYGRLIATGLPVEVGTGGRTTFNRTRLGLPKAHWHDAACVGASTPEVLDTRGVRPLFIRAMGHGTRQMCRMNAFGFPRTGPKGARVVKGFKTGDMVRATVTTGTKQGMYVGRVAVRTSRSFNITTAAGTIQGLHHRFFRAVQRADGYSYTYEVA

SEQ ID NO: 20889 - protein, 425 aa, Moorena sp.
MSTNYVLVLDTNRKPLNPCKPGMARSLLKAGKAAVFKRYPFTIILNKAVDDAPKPVQLKIDPGSKVTGLALVQDDKVIWGTELYHRGQQIKADLEDRRKLRRGRRNRKTRYRQPRFLNRTRPEGWLAPSMLHRVLTTMTWVRRLTKFVPVTGISLERVRFDTQKMINPEVSGVDYQQGELQGYEVREYLLEKWNRQCAYCQATDTRLEVDHIHPKSKGGSDRVSNLTLACHDCNQAKGNQDIRDFLCGKSDLLNRILSQVKQPLLDAAAVNSTRNKIAEELIATGLPIEFGTGGQTKYNRCRLDLPKTHWLDAACVGVVVHLTLETKQCLTITASGHGNRQMAGVDKYGFPYRHRTRQQVHFGFRSGDIVRAVVPKGKKAGTHVGRVLCRKSGSFDIQTKSGRVTGINHKYCSTIHGRDGYAYVF

SEQ ID NO: 20890 - protein, 447 aa, unidentified; identical to SEQ ID NO: 4640
  REGION 1..447: note = Human gut metagenome

SEQ ID NO: 20891 - protein, 536 aa, Nocardiopsis sp.; identical to SEQ ID NO: 16320

SEQ ID NO: 20892 - protein, 482 aa, unidentified
  REGION 1..482: note = Human gut metagenome
LVWNVQAPWDVYPSPTLCGLCLKVLRGRNGDADKKPIPTLTKDENRPSGRTTGLRAEQAEPAGIRKGDTLKVFVLNMRSKPLMPCSPAKARHMLKAGKAVVVRRTPFTIKLTIATGETKQDVTLGVDAGARHVGISATTEKEEVFASEVALRQDITGLLADRLAFRRARRNRKTRYRAPRFNNRVRSKHKGWLAPSVENRIQAHISRIEAVCRLLPVTKIVIETASFDIQKIRNPEVEGTGYQQGDQLGFWNVREYVLFRDGHVCQHCHGRSRDKILNVHHLESRKTGGDAPNNLITLCETCHKAYHAGKIKLKVKRGQSFRAEAFMGIMRWTLLDRVRKTHPKLPVENTYGYLTKHKRIALGLPKTHCADAFCIAGNLKALRRGDFLFQQQTRKHNRQIHRCSILKGGVRKLNQAPFLVKGFRLFDKVRIGGQIGFVFGRRVRGIFNIRRLDKTVIGTDINCKKLSLLETRKTFLTELRKE

SEQ ID NO: 20893 - protein, 396 aa, unidentified
  REGION 1..396: note = Human gut metagenome
VVRRTPFTIQLTIATGESKQPVSLGVDAGYKHVGLSASTEKAELYASEVELRKDITDLLSARRALRQSRRNRKTRYRAPRFDNRIRTKRKGWLAPSVENRINAHLSRIEAVLRLLPITKITVETASFDMQRLKNPDISGKEYQEGEQLGFWNVREYVLFRDGHVCRHCHGRSKDPVLNVHHLESRRTGSDSPDNLITLCETCHKALHRGEITLKAKRGQSFRAQAFMGIMRREVLNRLKASYPELKVHETYGYLTKHARIANGIVKSHGADAFCIAGNLGAERLGEFFFQKQTRRNNRQIHKLSILKGGIRKRNQAPFEAKGFRLFDKVACQGEEGFIFGRRSSGSFDVRKLDGTRISAGISCKKLRLLEKRRTYLTEIRKGEALPPLPEGRGLRA

SEQ ID NO: 20894 - protein, 555 aa, unidentified; identical to SEQ ID NO: 8017
  REGION 1..555: note = Viral metagenome

SEQ ID NO: 20895 - protein, 413 aa, unidentified; identical to SEQ ID NO: 3587
  REGION 1..413: note = Human gut metagenome

SEQ ID NO: 20896 - protein, 515 aa, unidentified; identical to SEQ ID NO: 5111
  REGION 1..515: note = Human gut metagenome

SEQ ID NO: 20897 - protein, 388 aa, Scytonema sp.; identical to SEQ ID NO: 2683

SEQ ID NO: 20898 - protein, 441 aa, unidentified
  REGION 1..441: note = metagenome
MSVSVFVQDRKHRPLMPCRPARARRLLKSGRARVVRLFPFTIRLTDRLIEDSKLQPVLVKIDPGSRRSGFAVVRVDEKGQHHALFFIELVHRGEYIRDALTGRSAHRRWRRGNLRHRAPRFLNRTKPQGWLPPSLRHRVDTATAWVAKLMKLAPVTEIVEELVKFDTQKLQNPEISGIEYQQGTLFEYEVREYLLEKFGRKCVYCGAENVPLNIEHVVPKARGGSNRISNLVLSCVDCNQKKDAQPVEVFLKNRPEVLDRIKRQIKKPLRDAAAVNATRWSLFNALKAFGLPVETGSGALTKFNRHTFGVPKEHWLDALCAGRVNGVHYPKGMGILQVRCTGRGSYQRTRVDKYGFPRGYLTRQKRVHGFATGDMVEAVIPSGKKAGTYRGRVAVRARGCFVIQTPEGKVDGIGWRHCRLLSFNDGYGYAWLRPAPYSSPV

SEQ ID NO: 20899 - protein, 442 aa, unidentified; identical to SEQ ID NO: 4522
  REGION 1..442: note = Human gut metagenome

SEQ ID NO: 20900 - protein, 487 aa, unidentified
  REGION 1..487: note = metagenome
MHNIGEVDHRTQVLPYSFITIVRKECSVMSNSICVISKNGERLMPTFRPGRVRHLLKDGKAKIVKHQPFTIQLLYDSNNYTQPIEICEDVGYNYIGISVKSTTHEYVSAQYDTLQDEKEHHDSCSKYRRTRRNKLRYRKARFNNRKRKEGWLAPSLEHKKQLNINLIEWYMSVIPITHTTVEVGSFDTMLLQAIQKGEAKPEGTDYQQGPRYNLATLREAVFYRDNYTCAVCGRSSMKDGAILHMHHMLYWKGRHGYQLDELVTVCEKCHTSPNHQKSGVLFGFGENKKFANLSGAAFMNAVRWQIVNALYATYGKDFVTVTYGAMTKERRILLGIEKTHNNDAYAMGDYHPAHRCEFKHYQKRRRNNRVLEKFYDATYIDARTGNKAKGKELFNGRINRNHKKDSENLHKYRARKTAKGRRSIRNKRYTIQSGDTILYAGKKHITSGCFNKGSWLRISVNGTVKSIAISKVKLINHIGAWKEDTSI

SEQ ID NO: 20901 - protein, 406 aa, unidentified
  REGION 1..406: note = Human gut metagenome
MVYVQDINGKPMMPTTRHGKVRRLLKDKKAVVVNLCPFTIKLMYVTSDYKQEIVLGVDAGTKHVGLSATTKSKELYSSEVILRNDIVDLLSTRRELRRTRRNRLRYRKPRFDNRIKSRRPGWVAPSVKYKVDAHIRVVENVCSILPISRIVIEVAQFDTQKIKNPEISGKEYQEGDQLEFWNTREYVLARDGHKCQYCKGKSKDSILNVHHIESRKTGGDSPSNLITLCETCHKEYHKGNIDLKIRRGKSLRDAAVMGIMKWRLYEELKSRYDRVFMTFGYITKHNRIKYGIEKSHTSDAFVISKNINAKRIERQYLKRLIRRHNRQIHKMKILKGGKKKNNQAPFEVFGFRLFDKVLYNNKIFFVYGRRKSGSFNIRDFNGENSKDVSRKKFKLIRGKRHPIILK

SEQ ID NO: 20902 - protein, 515 aa, unidentified; identical to SEQ ID NO: 5111
  REGION 1..515: note = Human gut metagenome

SEQ ID NO: 20903 - protein, 431 aa, Escherichia sp.; identical to SEQ ID NO: 3801

SEQ ID NO: 20904 - protein, 407 aa, unidentified
  REGION 1..407: note = Human gut metagenome
MPNKVYVINKHGRPLMPCSPAKARHLLDAGKAKVKKRTPFTIQLVYGSSGYTQEVILGVDAGSKTIGMSASTTKEELLSAEVKPRNDVVDLLSTRREFRRARRNRKTRYRKPRFDNRVRSKHKGWLAPSVEVKIQEHITSIKRVCRILPVSKVVVETAEFDLQLLKAIADGKPVPQGEDYQKGEMYGHYNVRQYVLWRDGYTCQCCGAHATKKKEVRLHVHHLESRKVGGDAPDNQVTLCESCHEKLHKGLIAEKDFKKRKRRSTRDATFMGIMRKTLMQRLCSELPIPVIETRGYITKATREKLLVLPKSHTNDALAIAQGKQGFNVGYLPGIVQINKIYTIRPVRHHNRQLHKAAILKGGIRKSNQAGKYVFGYCLFDKVQFNGQDCFIWGRTTGIFTIKTINGK

SEQ ID NO: 20905 - protein, 428 aa, unidentified
  REGION 1..428: note = Human gut metagenome
LKVFVLNMRGQPLMPCSPAKARHLLKAGKAVVKRRTPFTIQLRIATGETKQNVTLGVDAGAKHVGLSATTEKEEVFASEVELRQDITGLLAARLLLRRERRQRKTRYRAPRFLNRVRSKHKGWLAPSVENRIQAHMSRIDAICGLLPVTKIVIETASFDIQKIKHPDVEGTDYQQGDQLGFWNVREYVLFRDGHVCQHCHGRSKDKILNVHHLESRQTGGDAPNNLITLCETCHKAYHAGKIKLKVKRGQSFRAEAFMGIMRWTLLDRVRKAHPGLPVENTYGYLTKHTRITHGLPKTHCVDAYCIAGNLKAVRRGVYLHQRQMRKHNRQIHKFTVLSKRLEDGTKIGYRKLNQSPYLVHGFRLFDKVRCLGQIGFIFGRRSSGYFDVRRLDGVKLSPSISWRKLTLLEKRSTYLTELRKQDGASSPV

SEQ ID NO: 20906 - protein, 342 aa, unidentified
  REGION 1..342: note = IscB polypeptide
VSLGVDSGYNHIGFSAITKTKEITSGEISLDDKTSKRLTERRMYRRNRRNRLRYRKPRFNNRKTPEGWLPPSVQRKLDTHINMVNKLKELTPVKKVTVEIGEFDIQKLMNPDIYGKEYQQGDLYGYNNLKAFLFSREHGRCQFCGKNIVKGEKAHTHHIKPRSETGTDSPSNMALLHEDCHDELHKRGLYRKLKAPKEYKAEIFMSIIAARLKKALNCGVTYGYETATKRNLLGIEKSHVNDAFIIAGGINQERCLPYKVEQKRINNRTLQTNRKGFVPSIRTQRYVIQNRDFIWISDKKYLCGGVANRGIMIYYFDDTKKKLIYYKKVNKFYSTGSLTWIN

SEQ ID NO: 20907 - protein, 391 aa, Moorena sp.; identical to SEQ ID NO: 12541

SEQ ID NO: 20908 - protein, 447 aa, unidentified; identical to SEQ ID NO: 8397
  REGION 1..447: note = Human gut metagenome

SEQ ID NO: 20909 - protein, 422 aa, unidentified; identical to SEQ ID NO: 5333
  REGION 1..422: note = Human gut metagenome

SEQ ID NO: 20910 - protein, 427 aa, Enterococcus sp.; identical to SEQ ID NO: 3871

SEQ ID NO: 20911 - protein, 424 aa, unidentified; identical to SEQ ID NO: 5075
  REGION 1..424: note = Human gut metagenome

SEQ ID NO: 20912 - protein, 306 aa, unidentified
  REGION 1..306: note = Human gut metagenome
MVGAFCGGQNPRAYPAIRRVCGILPVSKVVVETAEFDLQLLKAIADGKPVPQGEDYQKGEMYGHYNVRQYVLWRDDYTCQCCGAHATKKKEVRLHVHHLESRKVGGDAPDNQVTLCESCHEKLHKGLIAEKDFKKRKRRSTRDATFMGIMRKTLMQRLCSELPIPVIETRGYITKATREKLLVLPKSHTNDALAIAQGKQGFNVGYLPGIVQINKIYTIRPVRHHNRQLHKATILKGGIRKSNQVGKYVFGYCLFDKVQFNGQDCFIWGRTTGIFTIKTINGKMIKDGISFKKLKPVEKSTSYLIA

SEQ ID NO: 20913 - protein, 447 aa, unidentified; identical to SEQ ID NO: 5316
  REGION 1..447: note = Human gut metagenome

SEQ ID NO: 20914 - protein, 443 aa, Anoxybacillus sp.
MVEENMTCFMQRKGENPMVFVLDTNKRPLAPCHEAVARKLLKQGKAAIYRRFPFTIILKKSVDESEIKATYRLKIDYGSRHTGLAILRGQEVVWLGQLDHRTDIKERLDKRRAFRRARRKRKTRYRKPRFLNRRRKDGWLPPSLESRVQNIQTWVERLRKICPIEHISYENAKFDTQLMRNPEINGVEYQQGTLQGYEVREYLLEKFGRKCCYCGKEGVPLEIEHIIPKSRGGTDRVDNLCLACHDCNQRKGSKTAEEFGYPHIQEMVKKTLKDASVVNATRWKVYEVLKQSGCEVECGTGARTKMNRIRLDLPKTHYFDACCVGESTTNHLYFKTKEVLFIKAKGRGSHSRTNLDRYGFPRGYLARQKFFFGFQTGDMVKAVVPRGKYQGVWFGEVACRKTGSFDIKGKDGKRIAQGINYRYVQVIQRFDGYAYGKGVAELA

SEQ ID NO: 20915 - protein, 406 aa, unidentified; identical to SEQ ID NO: 3980
  REGION 1..406: note = Human gut metagenome

SEQ ID NO: 20916 - protein, 398 aa, unidentified
  REGION 1..398: note = Human gut metagenome
ELCMDTGYIHIGISVKSEKHEYLAEQIDTLTDEKTKHGACRMYRTLRRGRKRYRQPRFNNRKRDKDWIAPSLEHKKDIHVQAISRINKVMPLTDITMEMGNFDTQVLKAKEEGKPLPQGADYQHGERYGIATLREAVFSRDGYKCQCCGRTISDGAILHVHHIKYRSQGGTNSMTNLATVCDKCHTPKNHKPGGKLYNWKPKLPDFKGATFMTTIRWQLYNEVKSLFPDINVHITYGAATKEQRRELNIDKSHVNDAFAMGKFHPKHRTNAALYKKKRRNNRCLEKFYDAKYIDSRDGSKRTGQELFNGRINRNHKKDSENLHRYRLQKITAGKRTVRKRHYNIQPHDIVMYENRKRETSGCQSNGTRVILLSDKKSVAVKKVKIYKYAGGYFKSAFN

SEQ ID NO: 20917 - protein, 426 aa, unidentified; identical to SEQ ID NO: 6377
  REGION 1..426: note = Human gut metagenome

SEQ ID NO: 20918 - protein, 412 aa, unidentified; identical to SEQ ID NO: 5514
  REGION 1..412: note = gut metagenome

SEQ ID NO: 20919 - protein, 524 aa, unidentified; identical to SEQ ID NO: 13289
  REGION 1..524: note = Freshwater metagenome

SEQ ID NO: 20920 - protein, 455 aa, unidentified
  REGION 1..455: note = Fermentation metagenome
MQQFKKKLKNTPKDTPQVLCSVNSQLNKEEILSVESGLKNDKLFLNNPEVDQSESNRKQNMSVSVYVLNMRGNPLMPCSPRKAKVLLKQGKAVVVKRSPFTIQLTTATGETKQEVILGVDTGYSNIGISALTEKKELLSATFKLRTNISDLLKERAMYRRNRRNKLWYREPRWKNRANAKKEGRLMPSVLHKVNTHISIIEKIKKLLPISKVVLETGLFDMQKMKNDNIKKYQYQKGEMFGFENVKSYILSRDNHKCYFKCKDSYKLEVHHIKFRSQGGTDNPNNLITLCEKCHKKVHAGKLELNVKKHKELKSSTVMNIIRKRLLEFYTEAKETFGYETKVKRREINLEKSHSNDAFVIANGTNQIRSREFEVIQKRKNNRCLQLNRKGYKPSIKKERSKIQPLDLFWVRGKNYICKGMFSYGKYICYGSTKLKEYFKTKDVEKYYNQSGLVWN

SEQ ID NO: 20921 - protein, 427 aa, Moorena sp.; identical to SEQ ID NO: 5712

SEQ ID NO: 20922 - protein, 414 aa, unidentified
  REGION 1..414: note = Human gut metagenome
MVYVINKQGQALMPTERFGKVRRLLKNSLAHVVCRIPFTIQLDYDTTDYTQPVSLGVDAGSKHIGISATTSEKELYAADVELRNDIVDKLSTRREQRRTRRSRLRYRKARFNNRVSSKRKGWLAPSVENKIQTHLTVVEKIHKFLPITNIVVEIASFDIQKINNPIISGSEYQQGEQLDFFNVREYVLFRDNHICQHCKGKSKDKVLNVHHIESRKAGGDSPNNLITLCETCHKAYHRGEFELNVKRGKSFRDVAFMGIMRWSFYDRLKNIYPNVSMTFGYITKNTRITNNLPKDHYVDARCISGNPTAKPLGYYFYQKKVRCQNRQIHKANFLKGGRKKLNQAPFLVKGFRLFDLVEYQKELYYIFGRRSSGSFDIRKLDGTKVNKGSINCKYLRLIATRKSILTEKRMQVNL

SEQ ID NO: 20923 - protein, 466 aa, unidentified
  REGION 1..466: note = Human gut metagenome
MSTCACVLGKSGERLMPTIRLGKVRHLLKDGKAKIIKHHPFTIQLLYDSETNIQPIEICEDVGYNYIGISVKSESHEYVSVQYDTLQDEKDCHDSCRKMRRIRRNRLRYRKPRFDNRKRNKDWLAPSLEHKKELNVNVIKMYCEVVPITHVTVEVGSFDTMLVKAIQEGKAIPEGADYQKGPRYNLATLREAVFYRDNYTCKVCGRKAKNDSAILHVHHMFYWKGRHGNSLNELLTVCEKCHTPANHQKGSKLYGFGENIKFANLSGAAFMNTVRWQIVNELYATFGKLFVTFTYGAMTKEKRIALHLEKCHNNDAYAMGNFHPVDRCAFEHYKKVKRNNRILEKFHDSQYIDIRTGKVANGRSLFNGRINRSHKKDSENLHKYRGKRTRKGYRALRRKKVALNPGDLVSLNGEILVVHSTHAGKNGYVGVEFKTPSKSGKKSASLKKLKIVKTSNSMHSAWTKVS

SEQ ID NO: 20924 - protein, 316 aa, Succinimonas sp.; identical to SEQ ID NO: 10313

SEQ ID NO: 20925 - protein, 457 aa, unidentified
  REGION 1..457: note = Human gut metagenome
MDAVAVISASGKPLMPTNPVRARKLIKKGKAVIYKYRPLFTIRLTERTDGDIQTIEYCCDTGYQHIGLSIKSRKHEYVNERRDLLPNETERHNDSRKYRKARRRRKLRHRACRRDNRHDNQICKDGYAPSIRNKRDQHISLYRSYTEILPVERAVFEMGQFDTQVLKAIEKGEPLPQGKDYQHGERYGYATLREAVFARDDYTCICCGKNAFKDKRILCVHHLGFRIGDRTNRLANLATVCTKCHTPKNHQPKGKLYNLKPELKDFKGATFMTMVRWDMLDKLKVVSKDIQVDVTYGAATKEARRDLKIKKSHANDAYCMGSFHPSHRTDLKRYEKCRRNNRVLSKFYDATYIDIRDGKKKKANALGCNRTKRRESRRSEKNERIYRGEKVSKGRIVLRTKRVVIRPGDIVYVGKKKYIVASSKNLGKQLKLADGSLLTTSKVTKIIHCGGWKTVTL

SEQ ID NO: 20926 - protein, 458 aa, Moorena sp.; identical to SEQ ID NO: 4149

SEQ ID NO: 20927 - protein, 387 aa, Moorena sp.
  REGION 320..331: note = misc_feature - Xaa can be any naturally occurring amino acid
MVFVLDRHHKPLMPCHPARARRLLGKGRARIHKLYPFTIRLVDRELKDSTVQPVVLKLDPGSKETGMALVREDETKTHHALYFVNLKHRGSEIKQSLLQRSSFRRSRRSRNLHYRAPRFLNRTRPQGWLAPSLQHRVDTTLSWVERLRKLAPVATLEMELVKFDTQKMQNPEIDGVAYQQGELAGFEVREYLLEKFGRKCIYCGAEGVPLNIDHIVPKSAGGSNRVSNLVLACVDCNQKKNNLPFEVFLKGDKAKINRIRSQLKTPLKDAASVNTTRWQLFEALKLTGQPLTTATGARTKYNRHQFGVPKEHWLDALCVXXXXXXXXXXXXSDFSASELVTWLLQRCLPAKKRALTKEELQSARAAVLPFKLQAGKLMASATGTAVF

SEQ ID NO: 20928 - protein, 419 aa, unidentified; identical to SEQ ID NO: 4209
  REGION 1..419: note = Human gut metagenome

SEQ ID NO: 20929 - protein, 420 aa, unidentified
  REGION 1..420: note = metagenome
MQYVYVLNKHGEPLMPCSPGKARLLLKQQKAHVVKRTPFTIKLLHGSAGYKQPITLGVDAGSKHVGLSASTEKRELYSEEFTPRNDVVELLSTRRQNRRSRRNRKARYRAPRFDNRVHSKHKGWLAPSVEVKIQEHITVIKRICRILPITLVRVETAEFDTQRLKAMLAGKPLPVGTDYQLGEMYDEYNVRQYVLKRDNYTCQCCGAHTTAKKAVKLHVHHLESRKVGGNAPSNLITLCVTCHNNLHKGKITLDGKKRGKTLRDAAFMGIMRNTLLTRLRNELNIPVQNTYGYITKLLREQNDIKKSHVNDARCISKHPLAEPCSVCYRTKAIRHHNRQIHKAKILKGGIRKANQAPYIVKGFHLWDKVLYNGQECFISGRRSSGYFALRKLDGTAITNSISFRKLRLLEPATNYLIERM

SEQ ID NO: 20930 - protein, 406 aa, unidentified; identical to SEQ ID NO: 3415
  REGION 1..406: note = Human gut metagenome

SEQ ID NO: 20931 - protein, 461 aa, unidentified
  REGION 1..461: note = IscB polypeptide
MQKLETRNTYTPLDASQVQGNCDSVVKHGQNVQVLQSLKTVSTNSDVNQQSGKTGQDLRVPVLNMRGKPLMPVTPAKARHLLEQDKAKVVSRKPFTIQLRYATGETKQDIILGIDSGYKHVGVSAVSNKKELFSAEIILRTDIPKKLQEKKMYRRNRRNHLWHRPPRFNNRSKPEGWLAPSIQHKLDSHLRIIEKIRTLLPVTEIIVEVAAFDIQKIKNPDINGERYQQGKQLGFWNIREYVLHRDNHTCQHCYGKKKDKILQVHHINGKAEGATNRPEELLTVCKTCHDEHHAGIDIIPKKKIKNFKSETFMTTVRWKLINAIGCGHTYGYITKHNRIKQGLPKSHVNDAFVITGGTTQERCKAMFSKQVRRNNRKLQINRKGFKPAIRRQRYKLQPNDLVRYNKQEYHVKGVHCKGSKVVLDIKKSVTIRKVELICYGKGLFAPIHLTSNEMDILGGIL

SEQ ID NO: 20932 - protein, 477 aa, unidentified
  REGION 1..477: note = Human gut metagenome
MIIALDKYKRPLGFLTERRCRILMERKRAVLYRVFPTVVILMDVDARTIPDLPSFRIKIDPGSKYTGIAIIRNDTDEFVYAMQIEHRGDAVRAALNKRKNARRNRRSRETGYRRAKWGNRCLSEKDKRSYDSSREDDWLPPSIRSAADNVISWVRRLGRWINLTECSFEAVRFDTQLMEDPDIEGEEYQHGTLFGLEIKEYLMEKFGHTCQYCGGKSGDPVLEWEHMRPKSRGGSDRVKNALLSCSSCNKDKGNRTPEEWLELIKARLPREKEKRKELDEERVELIQKVIDGKPQGGALRYAAWVSSSRRYLEKALFGIFGNVECSSGGRTKYNRTELGYPKEHHYDALCVGTVPEKGYHDRTNGYYLYAKAAGRGTRLRGHLNKCGVIVAKWTDRKKGFFGFQTGDIVVAEVPHKTPKPYKYEGRFVGRVMVRATGSFDIKTTDGKLVTVKEQYCRLLQANSGYQYTMKRAIPLGH

SEQ ID NO: 20933 - protein, 395 aa, unidentified
  REGION 1..395: note = Human gut metagenome
VGYNYIGISVKSESHEYVSAQYDTLQDEKEHHDDCRKYRRTRRNRLRYRKPRFDNRKRSEGWLAPSLEHKKQLNIRLIERYVSVIPITRATVEVGSFDTMLLQAIQKGESKPEGVDYQKGPRYNLATLREAVFYRDNYTCQVCGRKVADGAILHMHHMFYWKGRHGYQLDELVTACEKCHTPANHQKGGKLYGFGKDKKFANLSGAAFMNAVRWQIVDALHATYGKEFVTITYGAMTKEKRIALQLEKTHNNDAYAMGDYHPACRCKFRHYQKRRRNNRVLEKFYDATYIDARTGNKAKGKELFNGRISRNHKKDSENLHKYRSKKVSKGRRSIRRQRYAIQPYDTVRLENKTYITSGCHNKGTRLLIPANGKSKSVAISKVQVVCHAGAWIQII

SEQ ID NO: 20934 - protein, 405 aa, Moorena sp.
MPASPAKARHLLENGQAVVVRRTPFTIQLLYGSSGYKQDITLGVDAGYATVGYSAVTDGRELIAGEVNLRNNIKRLLEKRKAYRRTRRSRKWYRKPRFDNRGRRDGWLAPSIQHKLDSHIKLIEKLKSILPITQTIVEVASFDTQKMQNPEISGVEYQQGELQGYEVREYLLEKWGRKCAYCGKKDVPLEIEHIVPRSRGGSDRVSNLTIACHECNQTKGNQTAEEFGHPQIQAKAEKSLKATAFMNIVRSKMVDLLNCDQTYGYITKHDRIELGMPKSHANDAFVIAGGNGQEHAVHLHIGKQVRRQNRSLFKANFLKGGKLKRNTVKEVKGFRRFDKVKYDDKECFIHGLRSSGYFDLRTITGDRIGASVNSKKLTLLERAKGTIQEVCVIPPRPCGRGLLAR

SEQ ID NO: 20935 - protein, 487 aa, unidentified
  REGION 1..487: note = Human gut metagenome
MPDGRRKPERKHMVAVVTSTGKPLMPTSAYRARKLLKKGRAVIFKYRPYFTIQLVDRADGEVQEVEYKSDTGSVHVGISVCTEKKELLSEQRDLLENEPEHHNDRKKNRRTRRNRKRYRKPRFDNRKKKPQEGHEKWLPPTLLHKMEVQVRLFREFCRVVPVTSACFEMGKFDTQALKAVSKGEPVPEGEGYQKGERYGTDTLRAAVFLRDGHTCRFCGRSVKDGAILHVHHVGYWKGDRTDRLANLASACEQCHTPANHGKNGILYGKEPEFKTLKDASYMTSVRWIMLDEIKKVAPGVQVSVTYGVTTKRKRQELHLPKSHVNDAFSMASFHPKKRSDTEYWKKIPRHDRVLQRFYDAVYLDTRDGSEKKGSELSNGRISRNHKKDSENLHRYRGYKVSKGHNSIRRGASSLKPGSIVMYKGEKMTVHGTHTRYVTDKDGKTVKKVNVQFTRPASDGKKSASLKKCTPVSRVYNTGWKRYWPDKK

SEQ ID NO: 20936 - protein, 557 aa, Blautia sp.; identical to SEQ ID NO: 7395

SEQ ID NO: 20937 - protein, 490 aa, unidentified
  REGION 1..490: note = Human oral metagenome
MYVVYVLDRQGKPLMPTKRFGHVRRMLKTGKAKAISTKPFVIQLQYESTDFVQPLYGGTDPGRTNIGEAVLNNKGEVVYAAYVITRNKEIPKLMADRATHRRASRRGERLRRKRRAKANGTMTCFPEGRKLSGYKDGVLELKGIINTESRFNNRKRPAGWLTPTARQCIQTHLNMVQNICKILPVTDWTLEYNRFAFMQLEDGSVCGWDFQNGRLKGYASKEDYIYALQGGACVCCGASIEHYHHIKPRHKGGSNTPENLVGLCSVCHTELHTGKRNLDKIGKYKKYAGTSIVNIAIPFIWDGIVKMFGDKAHICEGQETAELRKANSIPKEHFADAVCIAGIGSGITPQYDDNQPFKLRQFRCHDRSSINAQVERTYLDGKTIVAKNRKPRFEQKGDALSDLQSKMTKEHGELAARRAVSKLVAKKSYRRYNASERIKPSAVFMFNNKKYLLRGQLTNGKYYRAFGEGTKNFPSRNCEVVSSGYSLTYA

SEQ ID NO: 20938 - protein, 386 aa, unidentified
  REGION 1..386: note = Human gut metagenome
TIQLTYTTGETKQDCHIGIDTGSKYIGAAVRSEDKVFWKGEIELRQDIRSNLDTKRIYRRSRRNRKTRYRKPRFLNRKRRDEWLPPSLQSRINHTFHWIDTLSSLVSNPILHIEVGKFDVAKMINPEIHGVDYQHGQTYGFFDERYFVFARDNYTCQCCGKSKNKILNTHHIIYRSNGGTNRVDNLITVCTDCHTSQNHRKGGIFYQWQEQHKKVKQYKEPPFMNTLRKRIFVAYPDAEITYGSETTPKRKAMKLDKTHYNDAIVISGINEIKENPEEWLLIKQFRKKKRSLHEATARKGRKKPNRNQTRNSKNTPYYKGFYLNDKVSVFGKSGYITGFTSNAAYIKDENNDYITLPNKTYKQVSINKMKLECHNNNWQYIIKNAV

SEQ ID NO: 20939 - protein, 512 aa, unidentified
  REGION 1..512: note = Human gut metagenome
MSTVYVLNKDGKPLMPTTRCGHVRHLLKEQKARVVTSKPFTIQLLYEADDLVQSLYLGIDPGRTNIGVAVVKADGTAVFTAHLETRNKEIPKLMKKRKESRRARRTNGRRCRRQRRAKANGTISKKCVKHDTAQNSSVSKRAKEIGVIKRHLPGCEKDVLCIGIKNKEAKFSNRTRPEGWLTPTANQLLQTHINLVKKIQKFLPISDVVLEINKFAFMRLDNPNVQKWQYQQGPLYQKANLEETVSEMQEHHCLFCKKKIDHYHHVVPQHKNGSNTIDNIVGLCTQHHDLVHKDATWQKRLAKKKTGLNKKYGALSVLNQIIPALTKELSSLFLKHFFVTNGKSTYDYRAAHGVSKDHWLDAYCIACSVLPNDTCDKTINSRVPYELKQFRRHDRRALNNENMSRVYTFNGKMVATNRHKATEQTTDSLEEFRQRQPNDICNLKVKEHHPTYRNMNRNYPGSVFLVGNQVHVMQGIAGSKDGEATTYKDTNANSIAAEKCKFVAKNSGILFV

SEQ ID NO: 20940 - protein, 443 aa, unidentified; identical to SEQ ID NO: 9979
  REGION 1..443: note = Human metagenome

SEQ ID NO: 20941 - protein, 425 aa, unidentified; identical to SEQ ID NO: 2429
  REGION 1..425: note = Human gut metagenome

SEQ ID NO: 20942 - protein, 417 aa, unidentified
  REGION 1..417: note = Human gut metagenome
MPCSPAKARLLLKEKKAIVKRRTPFTIQLTIATGEAKQPVTLGVDSGYKHIGLSATTEKVELYASQVELRQDITDLLSARLALRRSRRSRKTRYRAPRFDNRVASKREGWLAPSVENRIAAHMSRVEAVMQVLPVTAITVETAAFDTQLLKNPDITGAAYQQGEQLGFWNVREYVLFRDGHVCQHCRGKSKDPILNVHHIESRRTGGDAPNNLITLCETCHKAFHRGEIKLKVRRGKSFKAETFMGIMRRTLFERLKKAHPELNVRNTYGYLTKHKRISYGIAKSHCADAYCIADNLGATRLEGFFFQKQTRKHNRQIHKLLILKGGLKKKNQAPYEVKGFRLFDKVICKGEEAFIFGRRTSGSFDVRRLDGTRISAGINYKQLRLLEPRTTYLTEFRKEAALPPLHKCRGFCAEFL

SEQ ID NO: 20943 - protein, 351 aa, Aphanizomenon sp.
MSNYVLIVDTNKKPCNPVHPGTARQLLKLGQAAVWRKYPFTLILKAESQELTRPIQLKIDPGAKTTGIALVQGDKVVFGAEISHRGQSIKASLESRKGIRRGRRKRHTRYRQARFLNRTRAEGWLAPSLQHRVETTSTWVNKLIRFAPITGISQELVRFDLQQIDNPEILGIEYQQGELQGYEVREYLLEKWERKCSYCGVKDVPLQVEHIHPKAKGGSNKISNLCLACDSCNKKKGTLDIEKFLAKKPDVLKKIKLQSKCPLKDASAVNSTRWALFHRLKETGLPVVTGSGGKTKFNRTQLQLPKTHWIDAACVGDIDSLKVLITKPLLIKATGHGGLKTRGFQTTRFFT

SEQ ID NO: 20944 - protein, 431 aa, unidentified
  REGION 1..431: note = Human gut metagenome
MDAWDIIVILNKRGKPLMPCSPAKARLLLKEKKAIVVRRTPFTIQLTIATGEAKQPVSLGVDAGYKHVGLSASTEKAELYASEVELRQDVSDLLSARRALRQSRRSRNTRYRAPRFDNRIRTKRKGWLAPTVENRINVHLSRIETVLRLLPVTKITVETASFDTQLLKNPDIAGKEYQEGEQLGFWNVREYVLFRDGHVCQHCHGRSKDPVLNVHHLESRRTGGDSPGNLITLCETCHKALHRGEIKLKAKRGRSFRAETFMGIMRWGVLNRLKASHPKLEVHNTYGYRTKHARIANGIAKSHCADAFCIAGNFGAKRLGEFFFQKQTRRNNRQIHKLSILKGGIRKRNQAPFEVNGFRLFDKVACKGEEGFIFGRRSSGFFDVRKLDGTCISAGISYKKLHLLEKRRTYLTEIRKEEALPPPPEGRGLRA

SEQ ID NO: 20945 - protein, 279 aa, unidentified
  REGION 1..279: note = Human gut metagenome
VVVETAEFDLQLLKAIADGKPVPQGEDYQKGEMYGHYNVRQYVLWRDNYTCQCCGTHPSKKKEVRLHVHHLESRKVGGDAPDNQVTLCESCHEKLHKGLIAEKDFKKRKRKSTRDATFMGIMRKTLMQRLCSELPIPVIETRGYITKATREKLLVLPKSHTNDALAIAQGKQGFNVGYLPGIVQINKIYTIRPVRHHNRQLHKATILKGGIRKSNQTEKYVFGYRLFDKVQFNGQDCFIWGRRTTGIFTIKTINGKMIKDGISFKKLKLVEKSTSYLIA

SEQ ID NO: 20946 - protein, 354 aa, unidentified
  REGION 1..354: note = Human gut metagenome
IKHRGGAIRDALKARSAFRRRRRSQNLRCRSPRFLNRVKPKGWLPPSLRHRVETTLSFVRRMCRYLPVSGIATELVKFDSQKLQTPEVSGIEYQQGTLFEYEVREYLLEKFGRKCVYCGAEGVPLNIDHVVPRAKGGSNRVSNLVLACVSCNQKKGARSLEDFLKGKPEVLARVRRELKTPLRDAAAVNATRWVLFNELKATGLPVETGSGALTKLNRHAFGVEKEHWLDALCVGRLNGVVTRKGLNVLEIRCMGRGSRQRTRLTKYGFPRGYLMRQKCVHGFATGDMVEANVPKGKKAGLWRGRVAVRVSGSFNIQTPKGVIQGVGWKHCRLISHNDGYGYAWLGHAPHSSPA

SEQ ID NO: 20947 - protein, 413 aa, unidentified
  REGION 1..413: note = Human gut metagenome
LKVFVLNMRGKPLMPCSPAKARHMLKAGKAFVVRRTPFTIKLTIATGETKQDVTLGVDAGARHVGISATTEKEEVFASEVALRQDITGLLADRLAFRRARRNRKTRYRAPRFNNRVRSKHKGWLAPSVENRIQAHMSRIEAVCRLLPVTKIVIETASFDIQKIRNPEVEGTGYQQGDQLGFWNVREYVLFRDGHVCQHCHGRSRDKILNVHHLESRKTGGDAPNNLITLCETCHKAYHAGKIKLKVKRGQSFRAEAFMGIMRWTLLDRVRKTHPKLPVENTYGYLTKHKRIALGLPKTHCADAFCIAGNLKALRRGDFLFQQQTRKHNRQIHRCSILKGGVRKLNQAPFLVKGFRLFDKVRIGGQIGFVFGRRVRGIFNIRRLDKTVIGTDINCKKLSLLETRKTFLTELRKE

SEQ ID NO: 20948 - protein, 442 aa, unidentified; identical to SEQ ID NO: 2903
  REGION 1..442: note = Human gut metagenome

SEQ ID NO: 20949 - protein, 428 aa, Moorena sp.; identical to SEQ ID NO: 4771

SEQ ID NO: 20950 - protein, 514 aa, unidentified
  REGION 1..514: note = Human gut metagenome
MSVLVIGRNGRALMPTNPRKARLLLKKKTASVVCRHPFTIQLLYKTGCATQEGCIGIDTGSQHIGVGITCGDRVILKDEHALRSSMEKRSLLATRTVMRRGRRYRKVRYRKPKWRHHTKRMYFEKANRRGQHWRKVKTTTQSPRLKGWLPPSLQSKCDHHFRIIDRYLKYLPDPITRNLVIEAGRFDMARMNDPTIHGEMYQRGPMYDAENLRAYIFARDNYQCACCKAKAGTTRKADGTTVKLVAHHILFRSRGATDNPKYIISVCDHCHTTKAHQPGGILYSWMENNKKVARGLRDATFMNILRKRLFARYPQAAFTYGNITAADRKQLRLPKNHANDAVAISLFGKEASTVKNICQTMHYKQIRKSKRSLHEAIPRKGRKNPNTKAVRNKKNTTQVNGFKLWDSVLADGKKLFICSFTGTSAYLIDKNGCYISQPGKTYKQCPLSKLKRLHPNVDILPRINPWDSLDYNNITTPYRSGYSMIFQDLATIGVPHLGWYFLPAGQVPVPISLS

SEQ ID NO: 20951 - protein, 435 aa, unidentified; identical to SEQ ID NO: 4695
  REGION 1..435: note = Human gut metagenome

SEQ ID NO: 20952 - protein, 434 aa, Lactobacillus sp.; identical to SEQ ID NO: 13643

SEQ ID NO: 20953 - protein, 451 aa, unidentified; identical to SEQ ID NO: 2424
  REGION 1..451: note = Human gut metagenome

SEQ ID NO: 20954 - protein, 502 aa, unidentified; identical to SEQ ID NO: 6049
  REGION 1..502: note = Human gut metagenome

SEQ ID NO: 20955 - protein, 422 aa, unidentified
  REGION 1..422: note = Human gut metagenome
MQYVYVLNKHGEPLMPCSPRKARLLLKQKKACVIKRTPFTVKLLYGSTGYKQPVTLGVDAGSKHIGISATTEKHELYREEATPRNDVVDLLSARRAFRRSRRNRKTRYRAPRFDNRVHSKHKGWLAPSVEVKIQEHITLVEHVCRILPVTLVRVETAEFDTQRLKAMLEGKPLPVGTDYQLGEMYDEYNVRQYVLKRDNYTCQCCGAHSTKTKGVKLHVHHIETRRTGGNAPNNLITLCTACHKALHAGKVTLDGKKRGKPLKDAAFMGIMRKTLMERLRKELKIPVQGTYGYITKCLREKNGIPKSHTNDARCISKNPLAIPCDTCYYTKAVRHHNRQLHKATILKGGIRKANQAPYIVKGYRLWDKVSCNGTECFITGRRTSGYFALKKLDGTVVSNSISYKKLRLLEAATKEVKGQSFP

SEQ ID NO: 20956 - protein, 416 aa, unidentified
  REGION 1..416: note = Human gut metagenome
MVYVLNKDGQPLMPTNRHGKVRRLLKTKKAKVIKRCPFTIQLLYDTTNHTQNITLGVDAGSKHIGLSAATEDRVLFEADVELRNDISKLLEARHTFRCSRRNRKTRYRKKRFDNRVSSKHKGWLAPSIEHKIQSHFAMVEKVHRILPVTKIVVETASFDTQLLKAQLEGKPIPEGTDYQNGELAGWNIREYIFHRDNYTCQWCKGKSKDPVLVTHHHAYWKGDHTNKPSSLITLCNTCNDSKYHKKEANRLWGWEPKITNSYKHAVFMGVMRWTFYNRLKEIYPNVSMTYGYITKNTRIENNLPKAHYVDARCISGHPEAKSSGEYFYYKKVRCHNRQLHKANTLKGGIRKRNQAEYTVKGFRLFDRVEYQNNEYFIFGRRASGFFDIRTLDGQKVNKGSISFKKLKLKKQQNLFN

SEQ ID NO: 20957 - protein, 393 aa, unidentified
  REGION 1..393: note = Human gut metagenome
MDAVAVFSASGKPLMPTNPVRARKLIKKGKAVIYKYRPLFTIRLTERTDGDIQTIEYCCDTGYQHIGLSIKSRKHEYVNERRDLLPNETERHNDSRKYRKARRRRKLRHRACRRDNRHDNQICKDGYAPSIRNKRDQHISLYRSYTEILPVERAVFEMGQFDTQVLKAIEKGEPLPQGKDYQHGERYGYATLREAVFARDDYTCICCGKNAFKDKRILCVHHLGFRIGDRTNRLANLATVCTKCHTPKNHQPKGKLYNLKPELKDFKGATFMTMVRWDMLDKLKVVSKDIQVDVTYGAATKEARRDLKIKKSHANDAYCMGSFHPSHRTDLKRYEKCRRNNRVLSKFYDATYIDIRDGKKKKANALGCNRTKRRESRRSEKNERIYRGEKVSK

SEQ ID NO: 20958 - protein, 420 aa, unidentified; identical to SEQ ID NO: 6212
  REGION 1..420: note = metagenome

SEQ ID NO: 20959 - protein, 367 aa, unidentified
  REGION 1..367: note = Human gut metagenome
YKHVGLSASTEKAELYASEVELRQDVSDLLSARRALRQSRRSRNTRYRAPRFDNRIRTKRKGWLAPTVENRINVHLSRIETVLRLLPVTKITVETASFDTQLLKNPDIAGKEYQEGEQLGFWNVREYVLFRDGHVCQHCHGRSKDPVLNVHHLESRRTGGDSPGNLITLCETCHKALHRGEIKLRAKRGQSFRAETFMGIMRWGVLNRLKASHPKLEVHNTYGYRTKHARIANGIAKSHCADAFCIAGNFGAKRLGEFFFQKQTRRNNRQIHKLSILKHGLRKRNQAPFEVKGFRLFDKVVCQGEEGFIFGRRSSGSFDVRKLDGTRISAGISCKKLRLLEKRRTYLTEIRKEEALPSLSEGRGLRA

SEQ ID NO: 20960 - protein, 420 aa, unidentified; identical to SEQ ID NO: 3504
  REGION 1..420: note = Human gut metagenome

SEQ ID NO: 20961 - protein, 413 aa, unidentified
  REGION 1..413: note = Human gut metagenome
MTNYAFVLDVNGKQLAPTKEQKAWFLIRKKRATLVSKYPMVIQLKKEISDEQICKDEICCGIDDGGLYVGVALVQKCKTKNKVVFKGTIEQRNDVKHLMEVRKGYRGYHRFHKRYRQARFNNRKSSKRKERIAPSILQKRQATIRVIKQLNKWINIANYLLEDVAIDIRALTDGYKLYRWQYQQSDRLDENIRKAVILRDDCKCMECGKSNCRLEVHHIKPRRLNGSNTLDNLISLCEKCHQRTEGQEELYMDRYFSILNSTDNKNLNYAQHVMIGKKWLREQLSKLGTLILTTGGDTANKRIDWNIEKSHSNDAICITGLQPDTCNVKEWTIKPMRRQTKAKTDNVLGIKHRDLVEYTFRNGETHRGYVTALYPEQNALNFQSPTKHCKRVNAKKCKLIWKYSKIYWLDNVS

SEQ ID NO: 20962 - protein, 458 aa, unidentified
  REGION 1..458: note = Human gut metagenome
LTKDENRPSGRTTGLRAEQAEPAGIRKGDTLKVFVLNMRGKPLMPCSPAKARHMLKAGKAVVVRRTPFTIKLTIATGETKQDVTLGVDAGARHVGISATTEKEEVFASEVALRQDITGLLADRLAFRRARRNRKTRYRAPRFNNRVRSKHKGWLAPSVENRIQAHMSRIDAVCRLLPVTKIVIETASFDIQKIKDPSVEGTDYQQGDQLGFWNVREYVLFRDGHVCQHCHGRSKDKILNVHHLESRQTGGDAPNNLITLCETCHKAYHAGKIKLKVKRGQSFRAEAFMGIMRWTLLDRVRKAHPGLPVENTYGYLTKHTRITHGLPKTHCVDAYCIAGNLKAVRRGVYLHQRQMRKHNRQIHKFTVLSKRLEDGTKIGYRKLNQSPYLVHGFRLFDKVRCLGQIGFIFGRRSSGYFDVRRLDGVKLSPSISWRKLTLLEKRSTYLTELRKQDGASSPV

SEQ ID NO: 20963 - protein, 450 aa, Moorena sp.; identical to SEQ ID NO: 2935

SEQ ID NO: 20964 - protein, 417 aa, unidentified
  REGION 1..417: note = metagenome
MPCSPAKARLLLKERKAIVKRRTPFTIQLTIATGEAKQPVTLGVDSGYKHIGLSATTEKAELYASEVELRQDITDLLSARLALRRSRRSRKTRYRVPRFDNRVASKRKGWLAPSVENRITAHMSRVEAVMRVLPVTAITVETAAFDTQLLKNPDITGAAYQQGEQLRFWNVREYVLFRDGHVCQHCRGKSKDPILNVHHIESRRTGGDAPNNLITLCETCHKAFHRGKIKLKVRRGKSFKAETFMGIMRWTLFERLKKAHPELNVRNTYGYLTKHKRISYGIAKSHCADAYCIADNLGAKRLEGFFFQKQTRKHNRQIHKLSILKGGLRKKNQAPHEVKGFRLFDKVICKGEEAFIFGRRTSGSFDVRRLDGTRISAGISYKKLRRLEPRTTYLTEFRKEAALPPLHKCRGLRAEFL

SEQ ID NO: 20965 - protein, 545 aa, unidentified
  REGION 1..545: note = Human gut metagenome
VQFAWWLCHPKPSDNIEDVNHETALMLLRIKAGTETFGTAPCGSGPKAEGVSPERKAMNTVAVVTNTNKPLMPTSPYRARKLLSSGKAKIVKHRPFTILLVNRSDGNVQEIEYKSDTGYLHVGISVCSEKREFVREQRDLLPDEREKHNDRRKYRRTRRNRKRYRKARFDNRIGKIRKKEKNEHVWLPPSLDHKVDAQVQLFLRLYQVMPIKRAVFEMGQFDPALMKALEKGEAAPQGIDYQMGERYQIATRRAAVFTRDRYACVFCGRSIKDHAILHVHHIGFWKQDRSNRLDNLATCCEQCHTSENHRPGGILYGVEPKLESLASATYMNVVRFELLQRLKEAAPDVEFHISYGAKTSVIRKQRSISKSHTNDAYCLGQYFPKLRAEEIGFQKIRRNDRILQKFYDAEYLDSRDGTTKKGKELTNGRISRNHKKDHENLHQYRGKKLSKGRITIRRGRSSLKPGGLVRFDGEVLTVHGTHRSRKKNKAGHIKVSVNVEFERPSKTGRKSAALSKCQIISRSYNTGWKQIQLRKEEQGRIAAVV

SEQ ID NO: 20966 - protein, 457 aa, unidentified
  REGION 1..457: note = Human gut metagenome
PVLQPITIAEDPGRSNIGMAVVSLSGELFSAAVVQTRNKEIVKLMDKRKQHRRASRNGERKARQRLAKKCHTMIKAGFLMRKLPMYGKDKRVKCLVIKNTESRFCNRKREDGWLTPSAEHLVQTHINLIHKMQKFLPITDVAIEINRFAFLSLEDPSISGVDFQNGPLKGYDDLNAAIEDLQDGHCLMCNSPIEHRHHIVPRSMQGSNTIGNIAGLCCKCHEKVHKSTAFEDSLKKKKAGLNKRYAAISTLNQAIPFICKRLEQEFGKEHVHYCSGRDTSMVRRSFGYHKTKEEQLHEVDAWCIAVLSLQQIPEKAPEFDHMHEILQFRRQDRSRIKAQTSRAYYYKGKKIAKNRKKAEGQREDSLQEWRKRQVERYGEEQTRKMISQLKVKKSIRRYNRLDRLMPGAVFYYQGVRYVMRGQHCEGTYLQAVGMGSKDFPAKKCKILVHNEGLVFVS

SEQ ID NO: 20967 - protein, 413 aa, unidentified; identical to SEQ ID NO: 12039
  REGION 1..413: note = Human gut metagenome

SEQ ID NO: 20968 - protein, 430 aa, Desulfobacter sp.
LSVFVLDTNKKPQNPVHPAKARLLLTEGKASVFRQFPFTIILKENVLDVASNPLRIKIDPGSRETGIAVINDDTGEIVFAMELRHRGQQIKNNLESRRAIRRSRRNRKTRYRKPRFDNRIRAEGWLPPSLKSRVHNIETWVNRLCRFCNIQAISMELVRFDMQKIQNPEISGVAYQQGELMGYEVREYLLEKWDRRCAYCGKTDIPLEIEHIVPKSKGGSNRVSNLTLACTACNRKKGNKPIEQFLSRKPRLLKRIQKQSKVPLKDAGAVNTTRWDLFRTLKKTGLPVETGSGGLTKFNRTTRGLHKTHWLDAACVGKSTPEKMFQIDKAVLIVKADGHGSRQMCRMNKFGFPRTTAKSTEKKVKGFQTGDIVKAVVTSGKKVGTYTGRVAVRKSGSFNIKTVDKTVQGISWKYCRLLHASDGYSYNTTC

SEQ ID NO: 20969 - protein, 416 aa, unidentified
  REGION 1..416: note = Human gut metagenome
MVYVLDKNGQPLMPTDRHRKVRLMLQSGQAKVIKRCPFTIQLTYNTGHQAQEISLGIDAGSKHIGVSTTTKIKVLYEVDVELRNDIVDLLSSRRELRRGRRNRKTRYRQAKFNNRRRGNGWLAPSIRQKIGTHLTVVENICKMLPISRIMVETASFDIQKIKNPDIQGAEYQQGDQLEFWNVREYVLFRDGHTCQCCKGKSKDKILNVHHIESRKTGGNAPNNLITLCETCHTGYHKDTVQLPKAIKRGMRFKDAAFMGIMRWAFYEALKQQYEPVGTPVHNTYGYITKHTRIEHNLPKEHYVDARCISGNPEASSNGEYYYQKKVRCHNRQIHKLTVLKGGIRKQNQATYLVKGYRLFDKVSYQGKGYFVFGRRQSGFFDIRTLSGEKVNKGSLSCKKLKFIATRTYYLTERRAV

SEQ ID NO: 20970 - protein, 371 aa, Moorena sp.
MPDKVYVISRLGHPLMPCSPAKARHLLDDKKAKVVKRMPFTIRLLYGSTKYIQPIILGVDAGSKTIGLSASTAKEEVFAAEVMPRNDVVENLSTRREFRRARRNRTTRYRKPRSDNRVRSNHERWLAPSVKVKIQEHITSIKRVCTILPISKVVIETAEFDLQLLKAIQEGKPIPEGEDYQKGEMYGSYNVCQYVLWRDNYTCICCGVRGTPKNPVRLHVHHFESRKYGGNAPDNHGTLCDDCHKKFHLGIITDVKLKTRRRQSTRDAAFMGIMRKTLMWRLRTELFIPVAETKGYITKATREKLLVLPKSHTRDALAIAQGRHGFGIKEYAYVEPANHIYTVRPVRHHNRQLHKASILKGGIRKRNQASK

SEQ ID NO: 20971 - protein, 416 aa, unidentified; identical to SEQ ID NO: 4039
  REGION 1..416: note = Human gut metagenome

SEQ ID NO: 20972 - protein, 420 aa, Moorena sp.
MIMVYVLNKNGIPLMPTKRHGKVRRMLKNGQAKVVKRCPFTIQLLYDTTNYTQQINLGIDAGSKHIGICAATEKEELYSADIELRKDVVELLSTRRENRRTRRNRKTRYRKARFNNRKKGKGWVAPSIKQKIQCHLQIVKNIHQILPITKIIVETASFDIQKIKSPKIQGKEYQQGEQLDFWNVREYVLFRDNHVCQCCKGESRDNILNVHHIESRKTGGDAPNNLITLCKTCHSGYHKKTIALPETIHRGMSFKDAAFMGIMRWSFYEALKKNYPDVSMTYGYITKNTRISHHLPKYHYIDARCIAGNPDAAPLGYYFYQKKIRCHNRQIHKVNFLKGGKKKRSQASYTIKGFRLFDKVKYKKEIGFIFGRRSSGYFDLRKLNGEVIHRSASYKKIRLLETRKTFLIERRMQDARIATT

SEQ ID NO: 20973 - protein, 428 aa, Enterococcus sp.; identical to SEQ ID NO: 4335

SEQ ID NO: 20974 - protein, 409 aa, Geobacillus sp.; identical to SEQ ID NO: 15350

SEQ ID NO: 20975 - protein, 406 aa, unidentified
  REGION 1..406: note = Human gut metagenome
MVYVQDIDGKPMMPTTRHGKVRRLLKANKATVVNLCPFTIQLTYKSTDHKQPVTLGIDAGAKHIGFSATTEKEELFACETTLRTDIVDLLSTRSQNRRTRRSRLRYRKSRFNNRGSSKKKGWVAPSVKQRIDSHLNEVNEIHKILPITKIVIEVAQFDTQKMKNHDISGADYQNGEQLGFWNVREYVLFRDGHKCSHCKGKSKDPVLNVHHLESRKTGGDSPSNLITLCESCHKAFHKGEIELKKKRGKSLRDAAVMGIMKWKLYEELKSRYDNVSMTFGYITKHNRIKYGIEKNHTSDAFVISKNFNAKRIEYQYLKRLVRRHNRQIHKMKILKGGKKKNNQAPFEVFGFRLFDKVLYNNEINFIYGRRKSGNFNIRDFNGENPKDVSHKKFKLIRGKRHPIILK

SEQ ID NO: 20976 - protein, 453 aa, Moorena sp.; identical to SEQ ID NO: 13375

SEQ ID NO: 20977 - protein, 406 aa, Geobacillus sp.; identical to SEQ ID NO: 20875

SEQ ID NO: 20978 - protein, 466 aa, unidentified; identical to SEQ ID NO: 4047
  REGION 1..466: note = Human gut metagenome

SEQ ID NO: 20979 - protein, 413 aa, unidentified
  REGION 1..413: note = Human gut metagenome
MTSYAFVLDANGKQLAPTKEQKAWFFIRKKRASLVSKYPIVIQLMKEIPEKEICQDEIRCGIDDGGLHVGIALVQKCKTKNKVVFKGTIEQRNDVKHLMEVRRGYRRYHRYYKRYRQARFDNRKSSKRKERIAPSILQKRQATMRVINRLNKWINITNYWLEDVSVDIRALTDGYKPYRWQYQKSNRLDENIRKAAILRDGGKCMECGKSNCRLEVHHIKPRRRNGSNTLDNLITLCESCHQKTEGQEELYMDRYFSLLKSSDNKNLNYAQHVMIGKMWLRKQLSGLGVLYLTSGGDTANKRIDWNIEKSHANDAVCITDLQPDTCDMKEWTMKPMRRQSKAKTDHVLGIHHRDLVEYTFKNGETHRGYVTALYPEQKAINFQSPTKHCKKVNARKCKLLWNYSKIYWFENAS

SEQ ID NO: 20980 - protein, 416 aa, unidentified; identical to SEQ ID NO: 8117
  REGION 1..416: note = Human gut metagenome

SEQ ID NO: 20981 - protein, 448 aa, unidentified
  REGION 1..448: note = Human gut metagenome
MSTGLRAEQAEPAGIRKGDTLKVFVLNMRGKPLMPCSPAKARHMLKAGKAFVVRRTPFTIKLTIATGETKQDVTLGVDAGARHVGISATTEKEEVFASEVALRQDITGLLADRLAFRRARRNRKTRYRAPRFNNRVRSKHKGWLAPSVENRIQAHISRIEAVCRLLPVTKIVIETASFDIQKIRNPEVEGTGYQQGDQLGFWNVREYVLFRDGHICQHCRGRSKDPILNVHHLESRKTGGDAPNNLITLCETCHKAYHAGKIKLKVKRGQSFRAEAFMGIMRWTLLDRVRKTHPKLPVENTYGYLTKNTRIALGLPKTQCADAFCIAGNLKALRRGDFLFQQQTRKHNRQIHKCTVLSKTLKDGTKIGYRKLNQTPHLVKSFRLFDKVRCLGQTGFIFGRRSSGYFDVRRLDGVKFSSGISYRKLTLLEKRSTYLTELRKEDGASSPV

SEQ ID NO: 20982 - protein, 457 aa, unidentified
  REGION 1..457: note = Human gut metagenome
MPVSERKARLLLKGGKASVYRKVPFTIKLNYKTGSTVQPGYLGIDTGSQHIGVSVVQKDGTVLHKEEIGLRDSMSKRKLLESRASSRRGRRYRKTRYRHPKWKPKTKRIYNEKADRKGRHWKKQKNTFTSKRQAGWLPPSLQSKTDHHIQWIRKLLDLLPEGYRLSIELGRFDPARMKDPEIHGELYQKGPQYDYENVRAYVLARDGYTCRVCKKKGGKLHVHHILYRSRGASDNPKYMAAVCSKCHTTENHLPGGILYQWMQDQKKFTRGLRDATFMNILKKRLRKAFPDAVFTYGNITKADREKLELPKSHGNDATAIALVKTEVKSVKDEEPVIHIQQVRRKKRSLHEETPRKGRKEPNRTASRSDKNTKSVTVTKGSGEKKTSMTACLFDRVELDGKKGWITGFTGTSCYVKDKEDNYICTSPKYKQVSISRLRILHHCGNWAIGAEKPLGKG

SEQ ID NO: 20983 - protein, 420 aa, unidentified
  REGION 1..420: note = Human gut metagenome
MVYVLNKNNEPVMPCSERKARLLLKQGRAVIYRKDVFTIKLINGSYGYKQHITLGVDCGSKHIGVSATTDKQELFSANAELRNDVVKLLSDRRMLRRSRRFRKTRYRKPRFDNRRIKEGWLAPSIRQKIDSHVRIVSLIHKLLPVKQVNVEVAAFDMQKIKNPDIKSSGYQMGEQLDSYNVREYVLSRDNHICQHCKGKSKDDVLQVHHIESRKTGGNAPNNLVTLCKTCHEKYHSGEITLNVNRGKSFRDASAMSTMRWFLYEELKSRFSNVNITYGYITKYKRIKLGLSKEHYNDAYCITGNLNTSRLCNHHLIRFIPRHSRILHMQKFSKGGVRRSASASYWLNGGKPSKSGAMFTMFDKVKFNGIVCFISGSSNGYAALRDINWNKVHGCKTTVTVNKLALVSRRRGSMLFGELCG

SEQ ID NO: 20984 - protein, 434 aa, unidentified
  REGION 1..434: note = Human gut metagenome
KAKIIKHHPFTIQLLYDSETNTQPIEICEDVGYNYIGISVKSESHEYVSAQYDTLQDEKDCHDGCRRMRRTRRNRLRYRQARFDNRKRDKGWLAPSLKHKKELNVNVIKMYCEVMPVTHAIVEVGSFDTMLVKAIEEGKATPESADYQKGPRYKLATLREAVFYRNNYTCQVCGRKANEGAILHVHHMFYWKGRHGNSLSELVTVCEKCHTPANHQKGGKLYGFGEDIKFANLSGAAFMNTVRWQIVNELYAAFGKPFVTFTYGAMTKEKRIALHLDKSHSNDAYAMGNFHPVDRCAFEHYEKVKRNNRILEKFYDSRYINIRTGEVASGKELFNGRINRNHKKDSENLHKYRGKRIRKGYRALRRKKVALNPGDLVSLNGEILTVHGTHTKKNGSVNVKFKTPSKSGKKSVSLKKLKIIKTISPMRSAWDKVS

SEQ ID NO: 20985 - protein, 447 aa, unidentified; identical to SEQ ID NO: 5316
  REGION 1..447: note = Human gut metagenome

SEQ ID NO: 20986 - protein, 442 aa, unidentified; identical to SEQ ID NO: 3791
  REGION 1..442: note = Human gut metagenome

SEQ ID NO: 20987 - protein, 496 aa, Streptomyces sp.; identical to SEQ ID NO: 4777

SEQ ID NO: 20988 - protein, 424 aa, Anabaena sp.; identical to SEQ ID NO: 6543

SEQ ID NO: 20989 - protein, 483 aa, Oscillochloris sp.; identical to SEQ ID NO: 6098

SEQ ID NO: 20990 - protein, 427 aa, unidentified
  REGION 1..427: note = Human gut metagenome
LRVFVLNKRGKPLMPCSPAKARLLLKEKKAIVKRRTPFTIQLTITTGETKQPVGLGVDAGYKHVGLSASTDKAELYASQVELRQDITDLLSARRALRRARRNRKTRYRAPRFNNRIRTKRKGWLAPSVENRINAHLSRIEAVLRLLPVTKITVETASFDMLLLKNPDIAGKEYQEGEQLGFWNVREYVLFRDGHVCQHCYGRSKDPVLNVHHLESRRTGGDSPGNLITLCETCHEALHRGEIALKTKRGHSFRAEAFMGMMRWEVLNRLKASHSELEVNNTYGYRTKHARIVNGIDKSHCADAFCIAGNLGAERLCEFFFQKQTRRNNRQIHKLSILKGGIRKRNQAPFEIKGFRLFDKVACKGEESFIFGRRSSGYFDVRKLDGTRISAGISYKKLRLLEKRRTYLTEIRKEEALPPLPEGRGLRA

SEQ ID NO: 20991 - protein, 349 aa, Akkermansia sp.; identical to SEQ ID NO: 5950
  SITE 349: note = misc_feature - Xaa can be any naturally occurring amino acid

SEQ ID NO: 20992 - protein, 415 aa, unidentified; identical to SEQ ID NO: 6044
  REGION 1..415: note = Human gut metagenome

SEQ ID NO: 20993 - protein, 536 aa, unidentified; identical to SEQ ID NO: 4526
  REGION 1..536: note = Human gut metagenome

SEQ ID NO: 20994 - protein, 529 aa, unidentified
  REGION 1..529: note = Human gut metagenome
MSTVYVLNKDGKPLMPTTRGGHVRHLLKEQKARVVQSNPFTIQLLYETDDAVQPLYLGIDPGRTNIGVAVVKADGTAVFTAHLKSRNKEIPKLMQDRKRARRARRTNGRRHRRQRRAKANGTISKKCVKQTTTQNGSVSKRAKEIGIIKRHLPGCEKDVLCIGIKNKEAKYTNRERPEGWLTPTANQLLQTHVNLVKKVQKLLPISDVVLEVNKFAFMRLDNPDIQKWQYQQGPLYKKESLESAVSEMQEHHCLFCKKPIDHYHHVVPKSENGSNTIANIVGLCAEHHNLVHKDVAWQEKLAEKKTGLNKKYGALSVLNQIIPALTNKLSVLFPKHFFVTAGKSTHDYRAAHGVSKDHWLDAYCIACSVLPSNVCDSNINNHVPYELKQFRRHDRRVLHKANMSRVYTLNGKAVATNRHKAIKQTTDSLEEFRQNYPDDVYKLKVKEHHPAYRNLNRNYPGSVFLVGEQAHVMQGIASSKDGKTTKYNDTNATTIIAGKCKFVAKNSGILFVQCKFRKALSDGTTKKLQ

SEQ ID NO: 20995 - protein, 419 aa, unidentified; identical to SEQ ID NO: 4688
  REGION 1..419: note = Human gut metagenome

SEQ ID NO: 20996 - protein, 452 aa, unidentified; identical to SEQ ID NO: 14544
  REGION 1..452: note = IscB polypeptide

SEQ ID NO: 20997 - protein, 428 aa, unidentified; identical to SEQ ID NO: 2743
  REGION 1..428: note = IscB polypeptide

SEQ ID NO: 20998 - protein, 518 aa, unidentified; identical to SEQ ID NO: 2751
  REGION 1..518: note = Human gut metagenome

SEQ ID NO: 20999 - protein, 465 aa, unidentified
  REGION 1..465: note = Human gut metagenome
MSTCVCVHSNSGERLMPTFRLGKVRRLLKDGKAKIVKHHPFTIQLLYDSKTNTQPIEICEDVGYNYIGISVKSQSHEYVSAQYDTLQDEKACHDSCRKLRRTRRNRLRYRKPRFDNRKRGEGWLVPSLKHKKELNVNVVKMYCAVMPITHATVEVGSFDTMLVKAIQEGKAIPEGADYQKGPRYNLATLREAVFYRDNYVCKVCGRKATEGAILHMHHMFYWKGRHGNSLDELLTVCEKCHTPANHQKSGKLYGFGENVKFADLSGAAFMNTVRWQIVNELYTAFGKDFVTVTYGAMTKEKRIALHLEKSHNNDAYAMGEFHPNCRCTFEHYEKVRRNNRILEKFYDSRYIDIHTGEIATGKELFNGRINRNHKKDSENLHKYRGKRLYKGHRALVRKKVNFNPGDLVSLNGEVLVVHGTHTNKKGAVNVEFKTPAKNGRKSANLKKLKIVKAAGSIHPAWEKVS

SEQ ID NO: 21000 - protein, 419 aa, unidentified; identical to SEQ ID NO: 17238
  REGION 1..419: note = Human gut metagenome

SEQ ID NO: 21001 - protein, 408 aa, unidentified
  REGION 1..408: note = Human metagenome
MVYVQDIDGKPMMPTTRHGKVRQLLKDKKAVVINTCPFTIKLMYKTSDYKQEIVLGVDAGTKHVGLSATTKSKELYSSEVILRSDIVDLLSTRRELRRTRRNRLRYRKPRFDNRIKSKRTGWVAPSVRHRIDAHIRVIDNVCSILPISRIIVEVAQFDTQKIKNPNISGNEYQEGNQLSFWNVREYVLTRDGHKCQHCKGKSKDPILNVHHIESRKTGGDSPSNLITLCETCHKEYHKGKIDLRVKRGKSLRDAAVMGIMKWKLYEELRSRYDNVSITFGYITKYNRIKYGIEKSHISDAFVISKNFNALMLEYHYKVRLIRRHNRQIHKQKVLKGGVKKPNQSSFEVFGFRLFDRVMFEGNCYFIFGRRKSGSFNIRDIDGGNQRDITYKKLKLLRCKRFMIQKETN

SEQ ID NO: 21002 - protein, 376 aa, Parasutterella sp.; identical to SEQ ID NO: 11364
  SITE 18: note = misc_feature - Xaa can be any naturally occurring amino acid

SEQ ID NO: 21003 - protein, 427 aa, Moorena sp.; identical to SEQ ID NO: 15906

SEQ ID NO: 21004 - protein, 452 aa, unidentified; identical to SEQ ID NO: 4732
  REGION 1..452: note = Sediment metagenome

SEQ ID NO: 21005 - protein, 506 aa, Halomonas sp.; identical to SEQ ID NO: 8416

SEQ ID NO: 21006 - protein, 439 aa, unidentified; identical to SEQ ID NO: 3280
  REGION 1..439: note = Wastewater metagenome

SEQ ID NO: 21007 - protein, 356 aa, unidentified
  REGION 1..356: note = Human gut metagenome
MENTLKVFVLNMRGQPLMPCSPPKARKLLRAGKAVPVRRTPFVIQLTVPTGETKQPITLGVDAGYKHVGLSATTAKEELLASEVELRQDVTGLLSNRLALRRARRNRKTRCRAPRFDNRVRSKHKGWLAPSVENRIQAHISRIEAVCRVLPITKIVIETASFDIQKIKNPEVEGTDYQQGEQLGFWNVREYVLFRDGHVCQACKGRSKDLILNVHHIESRKTGGDAPGNLITLCEACHKAYHAGKLKQFSPRRGASFRAETFMGIMRWTVLNRLRERHPELPVTNTYGYLTKHKRIVAGLPKTHCADAFCIAGVLDAKRRGEYLFQKQTRRHNRQIHKLTILKGGVRKRHQAPYLV

SEQ ID NO: 21008 - protein, 408 aa, unidentified; identical to SEQ ID NO: 17248
  REGION 1..408: note = Human gut metagenome

SEQ ID NO: 21009 - protein, 428 aa, Enterococcus sp.; identical to SEQ ID NO: 7712

SEQ ID NO: 21010 - protein, 275 aa, unidentified
  REGION 1..275: note = Human gut metagenome
VETASFDMQRLKNPDISGKEYQEGEQLGFWNVREYVLFRDGHVCRHCHGRSKDPVLNVHHLESRRTGSDSPDNLITLCETCHKALHRGEITLKAKRGQSFRAQAFMGIMRREVLNRLKASYPELKVHETYGYLTKHARIANGIVKSHGADAFCIAGNLGAERLGEFFFQKQTRRNNRQIHKLSILKGGIRKRNQAPFEAKGFRLFDKVACQGEEGFIFGRRSSGSFDVRKLDGTRISAGISCKKLRLLEKRRTYLTEIRKEEALPPLPEGRGLRA

SEQ ID NO: 21011 - protein, 512 aa, unidentified; identical to SEQ ID NO: 4446
  REGION 1..512: note = Human gut metagenome

SEQ ID NO: 21012 - protein, 424 aa, unidentified
  REGION 1..424: note = Human gut metagenome
MVYVLSKEGTLLMPTNRHGKVRHLLDAGEAKAVKRCPFTIQLLYQSTTYTQDITLGVDAGSKIIGLSASTEKKELYASETKLRTDITDLLSVRRQFRRTRRNRKTRYRKARFNNRVHAKHKGWLAPGIEAKIGTHFRAVRDVCRILPVTEIIVETASFDIQKIKVLENGEPVPEGTDYQEGDQLGFWNVREYVLWRDGYKCRCCNGKSKDQVLNVHHIESRKTGGDAPNNLATLCGYCHKQYHKGTILLPKSVRRGNSFRDAAFMGIMRWTFYNRLKEQYPRVAMTYGYITKNTRIRNNLPKTHYVDARCIAGHPQAEPLDVYYFQKKVRCHNRQIHKANILKGGKKKRNQAEYLVKGYRLYDRVRYQNREYYVFGRRASGFFDIRALGGNKVNKGSVSCKKLRFLEPRKTMLIERRMQEQEAV

SEQ ID NO: 21013 - protein, 419 aa, unidentified
  REGION 1..419: note = Human gut metagenome
MVYVLDINGQPLMPTTRHGKVRRLLNNHLAKAVKRCPFTIQLLYQSTKETQPVSLGVDAGSKHIGLAAATEKKVVYQEELIPRNDVVKLLSVRRALRYSRRNRKTRYRKSRFNNRVHSKHKGWLAPSVEAKIQEHITAIKRICQILPVSEIHVETAEFDLQRLKAIEEGKPLPVGTDYQLGEQYDFYNTRQYVLHRDGYTCQCCGTHDNNVKLHVHHIESRQTGGNAPNNLITLCEHCHKALHEGKLKLPKGKKRGKSYRDATFMGITRKTLLERLKKEVDVPVTGTYGYITKYWREKAGLEKSHINDAVCISKHPYVEPLDTYYLTKAVRHHNRQIHKVNFSKGGIRKRNQAPHLVKGFRLFDKVLYQGKECFIFGRRVSGRMDIRLLDGIRINASVGYKNLELLELRKAYLTERRTC

SEQ ID NO: 21014 - protein, 419 aa, unidentified
  REGION 1..419: note = Human gut metagenome
MKKRKDSRRARRTNGRRFRRQRRAKANNTISKKCVKQATAQNGSVSKRAKEIGVIKRHLPGCEKEVLCIGIKNKEAKFSNRTRPEGWLTPTANQLLQTHINLVKKVQKFLPISDVVLEINKFAFMQLDNPNIQKWQYQQGPLYQKESLESAVSEMQEHHCMFCKKPIEHYHHIVPQHKNGSNTIDNIVGLCTKHHGLVHKDIAWQERLAKKKAGFDKKYGALSVLNQIIPALTEGLNTLFPKHFFITTGRSIYDYRATHGVSKDHWLDAYCIACSVLPNDAYDKNINSRVPYELKQFRRHDRRALHKENMNRVYTLNGKKVATNRHKAIEQTADSIEEFRQKHPNDICRLKVKEHHPEYRNPKRIFPGCVFLIGKQAHVTQRTSGSHNGKADGYYDTNGNSYPSGKCKFVAKNEGIVFV

SEQ ID NO: 21015 - protein, 438 aa, Methanosarcina sp.
MIFVLNKNKQLLNPCHPAVARKLLGMGKAVIHKKYPFIIRLKELKKSESNAKFRLKIDYGSRHTGLAILNGSKVTWLAQIHHKTNIKKNMDSRRAMRRARRNRKLRYRKPRFLNRKRNDGWIPPSLQSRVDNIKNWVIRLRKLCPLTHISYENVKFDTQLMQNPEISGIEYQQGELQGYEIREYLLKKMGRKCAYCGAENVPLEVEHIIPKIRGGSSRVSNLTLACRYCNQAKGSMTAEEFGHPEVYDLVKKPLKDVAIVNATRWKIYDILVSIGLKIECGTGGRTKFNRIKLNLPKDHHFDAVCVGQSTPNKINFKTNQVLHIKAKGRGSHCRTNLNKYGFPRGYLARQKSFFGFQTGDIVKAIIPKGKYKGTHIGAISCRKTGYFDIKNKEGMKIAQGINHKYCNVLSRTDGYEYTLNGLEVDGIPLTTKVASILP

SEQ ID NO: 21016 - protein, 306 aa, unidentified
  REGION 1..306: note = Human gut metagenome
LAPSVEVKIQEHITSIKRVCRILPVSKVVVETAEFDLQLLKAIADGKPVPQGEDYQKGEMYGHYNVRQYVLWRDNYTCQCCGTHPSKKKEVRLHVHHLESRKVGGDAPDNQVTLCESCHEKLHKGLIAEKDFKKRKRKSTRDATFMGIMRKTLMQRLCSELPIPVIETRGYITKATREKLLVLPKSHTNDALAIAQGKRGFNVGYLPEIAQIDKIYTIRPVRHHNRQLHKATILKGGIRKSNQTEKYVFGYRLFDKVQFNGQDCFIWGRRTTGIFTIKTINGKMIKDGISFKKLKLVEKSTSYLIA

SEQ ID NO: 21017 - protein, 416 aa, unidentified
  REGION 1..416: note = Human gut metagenome
MVYVLDKNGQPLMPTDRHRKVRLRLQSGQAKVIKRCPFTIQLNYDSGHQTQEISLGIDAGSKHIGVSTTTKIKVLYEVDVELRNDIVDLLSSRRELRRGRRNRKTRYRQAKFNNRRRGNGWLAPSIRQKIGTHLTVVENICKMLPISRIMVETASFDIQKIKNPDIQGAEYQQGDQLEFWNVREYVLFRDGHTCQCCKGKSKDKILNVHHIESRKTGGNAPNNLITLCETCHTGYHKGTVQLPKAIKRGMRFKDAAFMGIMRWAFYEALKQQYEPVGTPVHNTYGYITKHTRIAYNLPKEHYVDARCISGNPEASSNGEYYYQKKVRCHNRQIHKLTVLKGGIRKQNQATYLVKGYRLFDKVSYQGKGYFVFGRRQSGFFDIRTLSGEKVNKGSLSCKKLKFIATRTYYLTERRAV

SEQ ID NO: 21018 - protein, 422 aa, unidentified; identical to SEQ ID NO: 5333
  REGION 1..422: note = Human gut metagenome

SEQ ID NO: 21019 - protein, 420 aa, unidentified; identical to SEQ ID NO: 6507
  REGION 1..420: note = Human gut metagenome

SEQ ID NO: 21020 - protein, 439 aa, Moorena sp.
VSFVFLVDTNRQPLSPVHPGRARLLLKAGKAAILKRYPFTLILKAAIEQPQAQPLRLKLDPGSRTTGITIVDDASGQVLFAAELAHRSQQIKKALDDRRAVRHGRRARHTRYRKPRFQNRSRPQGWLAPSLQSRVCNIETWVKRLRKLCSIGAISMELVRFDLHLMQNPEISGIQYQQGTLAGYECREYLLAKWSRACSYCGKQNVPLEIEHIVARANGGTDRISNLCLACEPCNKRKGTQDLAVFLAKEPDLLKKIRAQAKAPLKDATAVNSTRWALFKQLKELGLPIECGSGGMTKYNRELRNLPKTHWLDAACVSASTPPVLQVNQIKPLAITAKGHGSRQMCLMNEFGFPRTKPKARHFSHPFHTGDIVKAVVPAHLKHPGVHTGRVSVRAKGAFTISTNQGTVTDIGKKYCQVLQKADGYAYIQKGEAAFPPVP

SEQ ID NO: 21021 - protein, 426 aa, unidentified
  REGION 1..426: note = Human gut metagenome
LAKDLYRSIDREETNLRVYVLNKRGEPLMPCSAAKARILLKEKKAVVKRRTPFTIQLTIATGETKQSVTLGVDAGYKHIGLSASTEKAELYASEIELRQDVSELLAGRSALRQARRSRKTRHRAPRFDNRKREKGWLAPSVENRIGAHVSRVEAVLRILPVTKIIVKTASFDVQRLKNPDMQGVEYQQGEQLGFWNVREYVLFRDGHECQHCHGKSKDKVLNVHHIESRRTGGDAPNNLITLCETCHKAFHRGEIELKVKRGRSFQAETFMGVMRRTFFERLRASHPEIEVRNTYGYLTKDTRIANKIEKSHCADAFCIAGNLKAKRLGYYFFQKQTRRHNRQIHKLTILKGGVRKRHQTPYEIKGFRLYDKVLYRGKVAFIFSRRSSGYFDIRTLDGERIAASGSYKKLRLLEKRRTFLIELRRN

SEQ ID NO: 21022 - protein, 418 aa, unidentified; identical to SEQ ID NO: 2425
  REGION 1..418: note = Human gut metagenome

SEQ ID NO: 21023 - protein, 411 aa, unidentified; identical to SEQ ID NO: 5226
  REGION 1..411: note = Human gut metagenome

SEQ ID NO: 21024 - protein, 392 aa, unidentified
  REGION 1..392: note = Marine metagenome
MAIFVLDKKKQPLMPCSEKRARLLLARGRAVVHKRYPFTIRLKNRVGGEAQPLRLGIDPGSKTTGLALMHEPDSQQRHVLCLFELIHRGFQIKKALQQRAAFRRRRRSANLRYRAPRFNNRIKPKGWLAPSLQHRVDTVMAWVNRLSKSAPITGISQELVRFDTQKLESPEISGVEYQQGTLLGYEVREYLLEKWGRECAYCGTTDTPLEIEHVVPRSRGGSNRVSNLTLSCHPCNQSKDALSLVDFFATDKGLKKRLKANGHTANARLERVQRQLKQPLRDASAVNATRWALFSALNATGLPVTVASGGRTKYNRQRLNIPKSHALDAACVGAFEKLHDWTVPTLTIKAMGRGSYQRTRLTKYGFPRGFLMRQKQVHGFQTGHGACDSTHR

SEQ ID NO: 21025 - protein, 493 aa, unidentified; identical to SEQ ID NO: 18058
  REGION 1..493: note = Human gut metagenome

SEQ ID NO: 21026 - protein, 442 aa, Lactobacillus sp.; identical to SEQ ID NO: 3826

SEQ ID NO: 21027 - protein, 428 aa, Mastigocladus sp.; identical to SEQ ID NO: 9878

SEQ ID NO: 21028 - protein, 413 aa, unidentified; identical to SEQ ID NO: 3295
  REGION 1..413: note = Human gut metagenome

SEQ ID NO: 21029 - protein, 425 aa, Nodularia sp.; identical to SEQ ID NO: 3113

SEQ ID NO: 21030 - protein, 515 aa, unidentified; identical to SEQ ID NO: 4372
  REGION 1..515: note = Human gut metagenome

SEQ ID NO: 21031 - protein, 437 aa, unidentified
  REGION 1..437: note = Wastewater metagenome
MPCSEKRARLLIARGRACIHRLVPFVIRLTDREQDTCALQPLRIKLDPGSKTTGLALVRDTEHLNTDTGEIQRGVAVLSLIELVHRGRQISEALTARRQMRRRRRGCLRYRAPRFLNRGNKARGWLAPSLQHRINTTTAWVARIRRWSPVTALSAELVRFDMQRLQNPEISGVEYQQGTLAGYEVREYLLAKWSRKCAYCGVENVPLQIDHVHPKAKGGTNRVSNLTLACGPCNARKSAQSVDAFLAKDPKCLTALLAQAKRPLKDAAAVNATRWALVGALKATGLPVETASGGCTKFNRSRLAIPKTHALDAVCVGAVSVVTNWQKPSLTIKCTGRGSYQRTRLDKYGFPRGYLMREKSVKGFKTGDLVRAIVPTGKKAGVHTGRVAIRKTGSFNIQTLAGVVQGIGYRHCRLLQRADGYGYFFNKAACDTAQKRE

SEQ ID NO: 21032 - protein, 420 aa, unidentified
  REGION 1..420: note = Human gut metagenome
MQYVYVLNKHGEPLMPCSPGKARLLLKQQKACVVKRTPFTIKLLFGSAGYKQPITLGVDAGSKHVGLSASMEKRELYSEEFTPRSDVVELLSTRRQNRRSRRNRKTRYRAPRFDNRVHSKHKGWLAPSVEVKIQEHITIIKRICKILPISLVRVETAEFDTQRLKAMLAGKPLPVGTDYQLGEMYDEYNVRQYVLKRDNYTCQCCGAHTTAKKLVKLHVHHLESRKTGGNAPSNLVTLCTTCHKNLHKGRVTLDGKERGKPLRDAAFMGIMRKTLMVRLKEELPIPVQGTYGYITKMRREQNDIKKSHVNDARCISKHPLAEPCSVCYRTKAIRHHNRQTHKANFSKGGIRKRSQMPYVVEGYRLWDKVLYKGQECFVSGRRASGSFTLKKLDGTRISKGVTFKKLRLLEPATNYLIERM

SEQ ID NO: 21033 - protein, 431 aa, unidentified; identical to SEQ ID NO: 2746
  REGION 1..431: note = Human gut metagenome

SEQ ID NO: 21034 - protein, 413 aa, unidentified
  REGION 1..413: note = Human gut metagenome
MTSYAFVLDANGKQLAPAKEQKAWFLIRKKRAALVSKYPMVIQLKKEIPENEICKDEIRCGIDDGGLHVGIALVQKCKTKNKVVFKGTIEQRNDVKHLMEVRRSYRHYHRYHKRYRPARFDNRKSSKRKKRIAPSILQKRQAIIRVIHWLNKWINITNYWLEDVSIDIRALTDGYKPYRWQYQKSNRLDENIRKAAILRDGGKCMECGKLNCRLEVHHIKPRRRNGSDTLDNLITLCKSCHQKTEGQEELYMDRYFSLLKSSDHKNLNYAQHVMIGKEWLRKQLSSLGVLYLTNGGDTANKRIDWNIEKSHANDAVCITNLQPDTYDMKEWTVKPMRRQSKAKTDNVLGIKHRDLVEYTLKNGETHRGYVTALYPDQKAINFQSQTKHCKKVNARKCKLLWKYSKIYWFENAS

SEQ ID NO: 21035 - protein, 416 aa, unidentified
  REGION 1..416: note = Human gut metagenome
MVYVLDKNGQPLMPTDRHRKVRLMLQSGQAKVIKRCPFTIQLNYDSGHQTQEISLGIDAGSKHIGVSATTKTRVLYEADVELRNDIVDLLSSRRELRRGRRNRKTRYRQAKFNNRRRGNGWLAPSIRQKIGTHLTVVENICKMLPISRIMVETASFDIQKIKNPDIQGAEYQQGDQLEFWNVREYVLFRDGHTCQCCKGKSKDKILNVHHIESRKTGGNAPNNLITLCETCHTGYHKGTVQLPKAIKRGMRFKDAAFMGIMRWAFYEALKQQYEPVGTPVHNTYGYITKHTRIEHNLPKEHYVDARCISGNPDAFPNGEYYYQKKVRCHNRQMHKLTILKGGIRKQNQATYLVKGYRLFDKVSYQRKEYFVFGRRKSGFFDIRTLSGKQVNKGSLSCKKLKFIATRMYYLIERRAV

SEQ ID NO: 21036 - protein, 518 aa, unidentified; identical to SEQ ID NO: 8622
  REGION 1..518: note = Human gut metagenome

SEQ ID NO: 21037 - protein, 332 aa, Moorena sp.
LNVFVLDTNKKPQNPVHPAKARFLLSEEKAAVFRQYPFTIILKEEIGVNPQALRVKIDPGSKTSGIAVTDDATGEIVFAMQLEHRGQQIKNDLESRRAIRRSRRNRKTRYRKPRFENRIRPEGWLAPSLKSRVHNIETWVNRLCRFSNIQEISMELVRFDMQKIQNSEISGVEYQQGALSGYEVREYLLEKWGRTCVYCGKTNLPLEIEHILPKSKGGSNRVSNLTLACTECNQKKGNRPIDIFLSKRPELLKRIQARAKAKSRKKKVNGFQTGDIAKAIVTSGKKVGTYIGRVAVRKSGFFNIKTRETTIQGINWTYCHMLHMSDGYSYNI

SEQ ID NO: 21038 - protein, 423 aa, unidentified
  REGION 1..423: note = Human gut metagenome
LVWNKRGKPLMPCSPAKARLLLKEKKAIVVRRTPFTIQLTIATGESKQPVSLGVDAGYKHVGLSASTEKAELYASEVELRQDITDLLSARRALRQSRRNRKTRYRAPRFDNRIRTKRKGWLAPSVENRINAHLSRIETVIRLLPVTKISVETTSFDMQLLKNSDIAGKKYQESEQLGFWNVREYVLFRDGHVCQHCHGRSKDPVLNVHHLESRRTGGDSPGNLITLCETCHKELHRGEITLKAKRGQSFRAETFMGIMRWEVLDRLKASHPKLEVQNTYGYRTKHARIVNGIAKSHCADAFCIAGNLGAERLGEFLFQKQTRRNNRQIHKLSILKGGIRKRNQVPFEVKGFRLFDKVACKGEEGFIFGRRSSGYFDVRKLDGTHISAGISYKKLRLLEKRQTYLTEIRKEALPPLPEGRGLRA

SEQ ID NO: 21039 - protein, 462 aa, unidentified; identical to SEQ ID NO: 5636
  REGION 1..462: note = Human gut metagenome

SEQ ID NO: 21040 - protein, 462 aa, unidentified
  REGION 1..462: note = Human gut metagenome
MSVLVIGRNGRALMPTTSRKARLLLKKKIASVVCRHPFTIQLLYKTGCATQEGCIGIDTGSQHIGVGVTCGDRVILKEEHELRSSMEKRSLLVARAAMRRGRRYRKVRYRKPKWRHHTKRMYFEKPNRRGQHWRKVKTTTQSPRPKGWLPPSLQSKCDHHFRIIDRYLKYLPDSITRNLVIEVGRFDMARMNDPMIHGEMYQRGPMYDAENLKAYIFARDGYQCACCKAKAGTTRKTDGTTVKLVAHHILFRSRGATDNPKYMVSVCDHCHTTKAHQPGGVLYSWMERNKKVTRGLRDAAFMNILRQRLFARYPQAAFTYGNITAADRKQLRLPKSHANDAVAISLFGKEVSAVRDTCQTVHYKQVRKSKRSLHEAIPRKGRKRPNTKAVRNKKNTTQVNGFKLWDSVLANGKKLFICSFTGTSAYLVDKNGCYVSQPGKTYKQWPLSKLKRLHPNGNWLVT

SEQ ID NO: 21041 - protein, 418 aa, unidentified
  REGION 1..418: note = Human oral metagenome
MVYVINKEGQALMPTERFGKVRRLLKNGLAHVVCRIPFTIRLDYETTHFVQPISLGVDAGSKHIGISATTSEKELYAADVELRNDIVEKLSTRREQRRTRRNRLRYRKARFNNRVSSKHKGWLAPSVENKIQTHLTVVEKIHKFLPITKIIVETASFDIQKIKNPSISSKEYQQGEQLDFFNVREYVLFRDNHTCQHCKGKSKDHILNVHHIESRKTGGNSPSNLITLCESCHKAYHNGKIDIKIKRGASFRDATFMGIARWTTYERLKNIYPNVSMTFGYITKNTRITNGLPKEHHVDARCISGNPKSKPLGYYFYQKKVRCQNRQIHKANFLKGGRKKLNQSPFLVKGYRLFDLVEYQKELYYIFGRRDRGFFDIRKLDGTKVNKGSISCKHIRLVDIRRNIITERRNSCSIPPTN

SEQ ID NO: 21042 - protein, 512 aa, unidentified; identical to SEQ ID NO: 6489
  REGION 1..512: note = Human gut metagenome

SEQ ID NO: 21043 - protein, 407 aa, unidentified
  REGION 1..407: note = Human gut metagenome
LMPCSPGKARLLLKHQKACVVKRTPFTIKLLYGSAGYKQPITLGVDAGSKHVGLSASTEKRELYSEEFTPRNDVVELLSTRRQNRRSRRNRKTRYRAPRFNNRVHSKHKGWLAPSVEVKIQEHITVIKRICRILPVTLVRVETAEFDTQRLKAMLAGKPLPVGTDYQLGEMYDEYNVRQYVLKRDNYTCQCCGAHTTAKKAVKLHVHHLESRKVSGNTPSNLITLCVTCHNNLHKGKVTLDGKKRGKTLRDAAFMGIMRSTLLERLRNELRVPVQNTYGYITKLLREQNDIKKSHVNDARCISKHPLAEPCSVCYRTKAIRHHNRQIHKAKILKGGIRKANQAPYIVKGFRLWDKVLYDGQECFISGRRSSGYFTLRKLDGTAITNSISFKKLWLLEPATNYLIERK

SEQ ID NO: 21044 - protein, 424 aa, unidentified; identical to SEQ ID NO: 5018
  REGION 1..424: note = Human gut metagenome

SEQ ID NO: 21045 - protein, 415 aa, Bacillus sp.
MRVFVKNVRGEPLMPCRNRKARLLLKQGKAKIVTYTPFTIQLLYATGETVQSVAIGVDSGAKYIGIAITTADKVLAKGTIQLRQDVKENLILRATLRRGRRQRKTRYRKARFLNRKKKEGWLPPSIQSRVDNQIHWIETFRSLLPSPKVIVEVGKFDAQKLKNPDIQGIEYRQGDAFGFWNTRYYVFARDNYTCQICKKKGGILHTHHIIERCNGGSDMAENLVTVHEECHEKLHQGKIKHRFPKPKQYKESAFMNILRLQIMNRLDCDITYGSYTTPKRKELGLTKTHANDAIAITNPIQLQEYDQSGEFCIKQFRKKKRALHEATARKGRKTKNTRAKRNKKNTSHIDGIYLGDKVEVFGQVGFVTGFTGKMVYVQNIHGQYIKNPSKSYKQVKMSDMERIHHTNNWQFLHIS

SEQ ID NO: 21046 - protein, 439 aa, Moorena sp.
LRVFVKNKRNQSLMPCKPQRARLLLKQGKAKIIDYKPFTIQLLYATGETTQQIKVGIDSGAKYIGFAITSGNKVFGKGTIELRDDVSKLLTARRTYRRSRRNRKTRYRKPRFENRAKPEGWLPPSIQSRIDNTINWINKIANALPAPEITVEVGKFDAAKLKNPDIQGKEYQNGEAFGFWNTRYYIFARDNYTCQICKKKGGILQTHHIIPKRNGGTDKADNLVTAHIGCHADFHKGRVQHTFKKPKQYRETVFMNVLRRRISKQVNCEITYGSYTKIARDTLALDKSHYNDAIAIAGIKTIKSNPNAVLYIKQFRKKKRSLHEAIPRKGRKIPNRTAKRNGKNTKQLKGIFLGDTVSVFGQRGYVSGFTGTNGFYVKTIDNEYIKKPGKTYKQVGYKDITFISHNNNWQLSTKNVPIHPPPNQRFGRGLLGAGVKREM

SEQ ID NO: 21047 - protein, 411 aa, unidentified
  REGION 1..411: note = Mouse gut metagenome
MPCSQRKARLLLKNKKAKIYSYHPFTIQLFYASGETIQMCHIGVDTGSRHIGLAITSENKVLLKGEIDLRQDVKSNLDTRRTYRRNRRNRKTRYRKARFFNRVKSKQKNWLPPSIESKIHHTFHWMNKLENLVADSNLHIEVGKFDMAKMIRPDIQGKEYSQGQCYGYFDTRYFVFARDDYTCQCCKKKNKILKTHHILYRSNGGTDRADNLITVCTDCHTSKNHKKGGILYEWQQRHKKGKPYKEPPFMNIIRKRIYQKYPDAVISYGSQTTPKRKERNLDKTHYNDAIIISGIEDIKENPKEWLRIKQFRKKKRSLHEAAARKGRKEHNRTQKRNRKNTSYDKGWYLNDYVEVFGKKGYISGFTNSGVYIKNTNDDYITMPDKKYKQVSLCNIVRICHNNNWQYEIQKI

SEQ ID NO: 21048 - protein, 430 aa, unidentified
  REGION 1..430: note = Human gut metagenome
MPKVYVLNRHGRPLMPCTPAKARHLLDAGKAKVRHRTPFTIQLLYGSTGYTQEVILGVDAGSKTIGLSAATETEELFSTEVKPRNDVVELMSARRQFRRARRNRTTRYRKPRFDNRVRSKHKGWLAPSVEVKIQEHMTAIRRACAILPVSKVVVETAEFDLQLLKAVAEGKPVPQGEDYQKGEMYGHYNVRQYVLWRDSYTCCICGVHGSVRKGVPLHVHHLESRRVGGDAPDNLVTLCTACHDKLHKGIIMAADIKKRKRRSTRDATFMGIMRMTLLRRLREQLPVPVVETRGYITKATRENLLVLPKSHANDALAIAHGPQGFRAEHLPNIRQADRLYTIRPVRHHNRQLHKATILKGGVRKTNQAEKYICGFRLYDKVLYNGIECFVWGRRTSGSFLLRQLNGEKVKDGVSYKHLKLLERSQSYLVA

SEQ ID NO: 21049 - protein, 416 aa, unidentified; identical to SEQ ID NO: 8117
  REGION 1..416: note = Human gut metagenome

SEQ ID NO: 21050 - protein, 449 aa, Moorena sp.; identical to SEQ ID NO: 13052

SEQ ID NO: 21051 - protein, 242 aa, unidentified
  REGION 1..242: note = metagenome
MPNKVYVINKHGRPLMPCSPAKARHLLDEGKAKVKKRTPFTIQLVYGSSGYTQEVILGVDAGSKSIEISASTKKEEVFAADVTPRNDVVDLLSTRREFRRARRNRKTRYRKPRFNNRVRSKHKGWLAPSVEVKIQEHITSIKMVCRILPVSKVVVETAEFDLQLLKAIEEGKPVPQGEDYQQGEMYGHYNVRQYVLWRDNYTCQCCGAHPTKKKEVRLHVHHLESRKTGGDAPGNLVTLWRC

SEQ ID NO: 21052 - protein, 428 aa, Enterococcus sp.; identical to SEQ ID NO: 4335

SEQ ID NO: 21053 - protein, 451 aa, unidentified; identical to SEQ ID NO: 3061
  REGION 1..451: note = Human gut metagenome

SEQ ID NO: 21054 - protein, 431 aa, unidentified
  REGION 1..431: note = Human gut metagenome
MPNKVYVINKHGRPLMPCSPAKARHLLDEGKAKVKKRTPFTIQLVYGSSGYTQEVILGVDAGSKTIGLSASAETEELLSAEVKPRNDVVDLLSTRREFRRARRNRKTRYRKPRFDNRVRSKHKGWLAPSVEVKIQEHITSIKRVCRILPVSKVVIETAEFDLQLLKAIADGKPVPQGEDYQKGEMYGHYNVRQYVLWRDDYTCQCCGAHATKKKEVRLHVHHLESRKVGGDAPDNQVTLCESCHEKLHKGLIAEKDFKKRKRRSTWDATFMGIMRKTLMQRLCSELPIHVVETRGYITKATREKLLVLPKSHINDALAIAQGKHGFNVGYLPGILQIDMIYTIRPVRHHNRQLHKATILKGGIRKSNQTGKYVFGYRLFDKVQFNGQDCFIWGRRTSGYFVVKTIDGKVIHNSASFKKLNLVERASNYLIA

SEQ ID NO: 21055 - protein, 416 aa, unidentified
  REGION 1..416: note = Human gut metagenome
MVYVLSQNGQPLMPTENHAKVRVFLKQGKAKVVQRCPFTIQLLYESTTHTQKINLGIDAGSKTIGISATTDSKVLYEAEVVLRNDIVELLSGRRALRRSRRNRKTRYRKPRFDNRKKPDGWLAPSIRQKIETHVTVVENITKILPMTKIIVETASFDIQKIKNPEIEGAEYQHGEQLDFWNVREYVLFRDGHTCQCCKGKSKDNILNVHHIESRKTGGNAPNNLITLCETCHKAYHKGIITLPKEIHRGMRFRDAAFMGIMRWAFYDRLKELYNPLGAEVINTYGYITKNTRITYDLPKEHYVDARCISGNPAAKPMDYYYLQKKVRCHNRQIHKCKINKGGTRKRNQAAYEVKGFRLYDQVLWKGQKCFIFARRSTGRMDLRLLDGTHVNASVGYKNLKLLSMRKNYLIEQRKAG

SEQ ID NO: 21056 - protein, 418 aa, unidentified
  REGION 1..418: note = Human gut metagenome
MVYVLGQDGHPLMPTCRHGKVRRMLKSGMAKVVQRCPFTIQLQYESTTHTQKINLGIDAGSKTIGVSATTESKVLYESEVVLRNDIVELLSGRRALRRSRRNRKTKYRKPRFDNRRRPDGWLTPSIRQKIKTHVTVVENVMKILPVTKIIVETASFDIQKIKNPEIEGAEYQYGEQLDFWNVREYVLFRDGHTCQCCKGKSKDNILNVHHIESRKTGGNAPNNLITLCETCHQAYHKGVITLPKEIHRGMRFRDAAFMGIMRWAFYDRLKELYTPFGVEVINTYGYITKNTRIEHGLPKEHYVDARCISGNPAAKPLGHYYFQKKVRCHNRQIHKNTILKGGIRKRNQAAYLVNGYRLFDKVKYQNQEYFIFGRRSSGFFDIRTLDGTKVNKGSISCKKLQLVEKSKHYLTEQRKVAA

SEQ ID NO: 21057 - protein, 425 aa, Nodularia sp.; identical to SEQ ID NO: 3165

SEQ ID NO: 21058 - protein, 412 aa, unidentified; identical to SEQ ID NO: 3155
  REGION 1..412: note = metagenome

SEQ ID NO: 21059 - protein, 424 aa, Anaerostipes sp.; identical to SEQ ID NO: 3434

SEQ ID NO: 21060 - protein, 484 aa, Deinococcus sp.; identical to SEQ ID NO: 17517

SEQ ID NO: 21061 - protein, 515 aa, unidentified; identical to SEQ ID NO: 5111
  REGION 1..515: note = Human gut metagenome

SEQ ID NO: 21062 - protein, 438 aa, unidentified; identical to SEQ ID NO: 8266
  REGION 1..438: note = Human gut metagenome

SEQ ID NO: 21063 - protein, 416 aa, unidentified; identical to SEQ ID NO: 7785
  REGION 1..416: note = Human gut metagenome

SEQ ID NO: 21064 - protein, 356 aa, unidentified
  REGION 1..356: note = metagenome
QEIVLGVDAGTKHVGLSATTKSKELYSSEVILRNDIVDLLSTRRELRKARRNRLRYRKPRFDNRIKSKRPGWVAPSVKYKIDAHIRVIDNVCSILPIFRIVIEVAQFDTQKINNPNISGKEYQEGDQLGFWNTREYVLARDGHKCQYCKGKSKSKILNVHHIESRKTGGDSPSNLITLCETCHKEYHKGNIDLKIRRGKSLRDAAVMGIMKWRLYEELKSRYDRVFMTFGYITKHNRIKYGIEKSHTSDAFVISKNINAKRIERQYLKRLIRRHNRQIHKMKILKGGKKKNNQAPFEVFGFRLFDKVLYNNKIFFVYGRRKSGSFNIRDFNGENSKDVSRKKFKLIRGKRHPIILK

SEQ ID NO: 21065 - protein, 532 aa, unidentified; identical to SEQ ID NO: 3169
  REGION 1..532: note = Human gut metagenome

SEQ ID NO: 21066 - protein, 462 aa, Halothiobacillus sp.
METRYGMAVLVLDKRKQPLMPCSEKRARLLLDRDRAVVVRVHPFTIRLKDRVGGSTQPVRIKIDPGSRATGMAMVRESGDGIQHVLWLGEIAHRGHVIRDQLAQRRAFRRRRRSNLRHRPARFNNRRRSAGWLAPSLQHRVDTTTAWVRRLRRWAPVTAVSQELVRFDTQRMESADISGVAYQRGTLLGTQVREYLLHRHQHQCAYCHGQSGDPVLEVEHVHPKSRGGSNRVGNLVIACRDCNKVKENRDAGEWARDLAPARGRLDVARRHNAALVDAGKRPSLRDASAVNSTRWALFQALKAAGLQVAVGTGGRTKWNRQRLGIPKGHALDAACVGEVEAVSGWNRPVLAIKAAGRGSYQRTRLTRHGFPRGYLMRHKQVRGFQTGDHVQAVVGAGKKAGTHTGRLAVRASGRFNIQTPAGVIQGISHRHCTLTQRADGYGYFVQSKIAATETEEARTEAA

SEQ ID NO: 21067 - protein, 431 aa, unidentified
  REGION 1..431: note = Human gut metagenome
MPNKVYVINKHGRPLMPCSPAKARHLLDEGKAKVKKRTPFTIQLVYGSSGYTQEVILGVDAGSKTIGMSASTTKEELLSAEVKPRNDVVDLLSTRREFRRAQRNRKTRYRKPRFDNRVRSKHKGWLAPSVEVKIQEHITAIRRVCGILPVSKVVIETAEFDLQLLKAIADGKPVPQGEDYQQGEMYGHYNVRQYVLWRDGYTCQCCGAHATKKKEVRLHVHHLESRKVGGDAPDNQVTLCESCHEKLHKGLIAEKDFKKRKRKSTRDATFMGIMRKTLMQRLCSELPIPVIETRGYITKATREKLLVLPKSHTNDALAIAQGKQGFNVGYLPGIVQINKIYTIRPVRHHNRQLHKATILKGGIRKSNQTKKYVFGYRLFDKVQFNEQDCFIWGRRTTGIFTIKTINGKMIKDGISFKKLKLAEKSTSYLIA

SEQ ID NO: 21068 - protein, 423 aa, Moorena sp.
MRVFVLNKNLQPLDPCRPARARILLSTGKAKVYRRYPFTIILVEEISNPVTHEHQLKIDPGAKTTGLAVVQRQRVVWGAELTHRGFQIRDNLTSRRQLRRSRRNRKTRYRKPRFLNRTRAKGWLAPSLVSRIENSLTWVKKIIRFCPITGISQELVRFDTQKLQNPELSGIEYQQGTLHGYEIREYLLEKWNRKCAYCGAKDTRLEVEHIKPKSKGGSNRISNLTLACHSCNQAKSNQDIELFLAKKPDLSKRILSQAKRPLSDAASVNITRWKLYHDLKSITLPVEVGSGGLTKFNRCRQNLPKTHWLDAANVGKVETLIIEVNNPLLITAKGHGTRQLCRTNKYGFPIRYCSRLKFHKGFQTGDIIRAVVTKGKKIGTYVGRVATRKSGSFNISTKSGLVQGISHKYCQFIHRKDGYAYTN

SEQ ID NO: 21069 - protein, 428 aa, unidentified
  REGION 1..428: note = Human gut metagenome
LKVFVLNMRGQPLMPCSPAKARHLLKAGKAVVKRRTSFTIQLRIATGETKQNVTLGVDAGAKHVGLSAATEKEEVFASEVELRQDITGLLAARLSLRRDRRHRKTRYRPPRFLNRVRSKHKGWLAPSVENRIQAHMSRIDAVCRLLPVTKIVIETASFDIQKIKDPSVEGTDYQQGDQLGFWNVREYVLFRDGHVCQHCHGRSKDKILNVHHLESRQTGGDAPNNLITLCETCHKAYHAGKIKLKVKRGQSFRAEAFMGIMRWTLLDRVRKAHPGLPVENTYGYLTKHTRITHGLPKTHCVDAYCIAGNLKAVRRGVYLHQRQMRKHNRQIHKFTVLSKRLEDGTKIGYRKLNQSPYLVHGFRLFDKVRCLGQIGFIFGRRSSGYFDVQRLDGVKLSPSISWRKLTLLEKRSTYLTELRKQDGASSPV

SEQ ID NO: 21070 - protein, 489 aa, unidentified
  REGION 1..489: note = Human gut metagenome
MTMVYVQNKDGKPLMPTTRYCYVRLLLKENKARVVSSTPFTIQLNYDTPDVTQDLILGIDPGRTNIGVAVVKEDGQCVFSAHLETRNKDVPLLMKKRAAFRRNHRTLGRRRKRQRRAKAAGTTVENESIKRLLPGYEKPVICHHIRNRKARFNNRCRPQGWLTPTANHLLQTHINLIAKVEKFLPITTVVVELNRFAFMAMDNPNIRRWECQQGPLYGLGSVEDAVYSQQDGHCLFCKKPIDHYHHVVPRHKGGSETLANRCGLCVKHHDLVHKDKAWADKLVTRKEGMNKKYHALSVLNQIIPHLLEYLGDETHYDVYATDGRSTKGFRIAKSVPKEHYTDAYCIACSILDTDIEVSVPVEPFELKQFRRHDRQACIRQMVDRKYLLDGKVIAVNRHKAIEQKSDSLQEFREAYGDAVVSQLAVKPHLPQYKDMTRIMPGAMMDFNGTIGVMQSSIVGSFYKSTKGHKATPKNCVLLAQNAGMVFIPA

SEQ ID NO: 21071 - protein, 414 aa, unidentified
  REGION 1..414: note = Human gut metagenome
MPCSPAKARLLLKEKKAIVVRRTPFTIQLTIATGESKQPVSLGVDAGYKHVGLSASTEKAELYASEVELRQDITDLLSARRALRQSRRNRKTRYRAPRFDNRIRTKRKGWLAPSVENRINAHLSRIETVIRLLPVTKITVETTSFDMQLLKNSDIAGKKYQEGEQLGFWNVREYVLFRDGHVCQHCHGRSKDPVLNVHHLESRRTGGDSPGNLITLCETCHKELHRGEITLKAKRGQSFRAETFMGIMRWEVLDRLKASHPKLEVQNTYGYRTKHARIVNGIAKSHCADAFCIAGNLGAERLGEFFFQKQTRRNNRQIHKLSILKGGIRKRNQAPYEIKGFRLFDKVACQGEEGFIFGRRSSGYFDVRKLDGTRISAGISYKKLRLLEKRQTYLTEIRKEEALPPLPEGRGLRA

SEQ ID NO: 21072 - protein, 437 aa, unidentified
  REGION 1..437: note = Human gut metagenome
KDGKAKIIKHHPFTIQLLYDSKTNTQPIEICEDVGYNYIGISVKSQSHEYVSAQYDTLQDEKACHDSCRKLRRTRRNRLRYRKPRFDNRKRGEGWLAPSLKHKKELNVNVVKMYCAVMPITHATVEVGSFDTMLVKAIQEGKAIPEGADYQKGPRYNLATLREAVFYRDNYTCQVCGRKVADGAILHMHHMFYWKGRHGNSLSELITVCEKCHTPANHQKSGKLYGFGENVKFADLSGAAFMNTVRWQIVNELYAAFGKDFVTVTYGAMTKEKRIALHLEKSHNNDAYAMGSFHPVNRCAFEHYEKVKRNNRILEKFYDSQYIDTRTGELTNGKSLFNGRISRSHKKDSENLHKYRGKRICKGHRALRRKKLALNPGDLVSLNGEILVVHGTHTKKNGSVNVEFKTPSRSGKKSASLKKLKIVKTSNLMHSAWTKVA

SEQ ID NO: 21073 - protein, 431 aa, unidentified
  REGION 1..431: note = Human gut metagenome
MPNKVYVINKHGRPLMPCSPAKARHLLDAGKAKVKKRTPFTIQLVYGSSGYTQEVILGVDAGSKTIGVSALTKKEELFAANVIPRNDVVDLLSTRREFRRARRNRKTRYRKPRFDNRVRSKHKGWLAPSVEVKIQEHIIAIRRVCGILPVSKVVVETAEFDLQLLKAIADGKPVPQGEDYQKGEMYGHYNVRQYVLWRDNYTCQCCGAHATKKKEVRLHVHHLESRKVGGDAPDNQVTLCESCHEKLHKGLIAEKDFKKRKRRSTRDATFMGIMRKTLMQRLCSELPIPVVKTRGYITKATREKLLVLPKSHTNDALAIAQGKRGFNVGYLPEIAQIDKIYTIRPVRHHNRQLHKATILKGGIRKSNQAGKYVFGYRLFDKVQFNGQDCFIWGRRTSGYFAVKTIDGKVIHNSASFKKLNLVERASNYLIA

SEQ ID NO: 21074 - protein, 470 aa, unidentified; identical to SEQ ID NO: 17072
  REGION 1..470: note = Human gut metagenome

SEQ ID NO: 21075 - protein, 426 aa, unidentified
  REGION 1..426: note = Bioreactor metagenome
MVFVLDTKKRPLAPCHEAVARKLLKQGKAAIYKRYPFTIILKEIVDNFRPKTPYRLKIDYGSKHTGLVIVRGEEVLWLAQLDHRIDIKERLDKRLAFRRARRKRKTRYRKPRFLNRRRKDGWLPPSLESRVQNIQTWVERLRKICPIEHISYENAKFDTQLMRNPEINGVEYQQGTLQGYEVREYLLEKFGRKCCYCGKEGVPLEVEHIIPKSRGGTDRIDNLCLACRDCNQRKGSQAAEEFGYPHIQKQVKESLKDTSAINSTRWKVYEVLKQTGLDVECGTGARTKMNRIRLDLPKTHYFDACCVGESTPNHLYFKTKEVLFIRAKGRGSRSRTNLDRYGFPRGYLARQKFFFGFQTGDMVKVVIPRGKYKGVWFGEVACRKTGSFDIKGKDGKRIAQGINYRYVQVIQRFDGYAYGKVVAELA

SEQ ID NO: 21076 - protein, 408 aa, unidentified; identical to SEQ ID NO: 4709
  REGION 1..408: note = Human gut metagenome

SEQ ID NO: 21077 - protein, 432 aa, Thiorhodovibrio sp.; identical to SEQ ID NO: 5239

SEQ ID NO: 21078 - protein, 420 aa, unidentified
  REGION 1..420: note = Human oral metagenome
LVYVISKTGQPIMPTENHAKVRILLKFGKAKVVRRTPFTIQLTGTSKTFTQEVTLGVDAGSKHVGLSASTVKKELFVAELRPRNDVVNLIASRRELRRSRRSRTTRYRQARFNNRVHSKHKGWLAPSVEVKIWNHIQGIKLVARLLPVKTIRVETAEFDLQRLKALESGEPVPVGTDYQLGEMYGQYSVRQYVLHRDGYSCQCCGAHGTDKKPVKLHVHHLETRKTGGDAPDNLITLCEDCHTGYHAGTVALSTTKRRRKSTRDAAFMGVMRKTLLERLCNMFPETNICSTYGYITKYWREKKNIVKTHTSDAFVIAKNLDAKRLDKSLLIVPKRQHNRQIHKCKINKGGTRKLNQTPKFVFGYQLFDRVMCMKQEGFVFARRSSGGFDVRKLNGEKINPYINYKKLKRLESRKALLISY

SEQ ID NO: 21079 - protein, 474 aa, unidentified
  REGION 1..474: note = Human gut metagenome
MWLNSSEGKEQCCIHGNLGKTLGKDSHSLQRGQFCLSLTVTTTRKETTSMYVYVLNQHGEPLMPCSPRKARIMLRDHKATVVRRTPFTIRLLHRSSEYKQDITLGVDAGSKFIGLSACTESKELFAAEVKPRNDVVELLSTRRELRRSRRNRKTRYRAVRFNNRVHSKHKGWLAPSVEVKIQEHITAIKRTCAILPISVVIVETAEFDVQRLKAMLEGKPLPVGTDYQLGEMYDEYNVRQYVLKRDTYTCQCCGIQSTDKAPVKFAVHHKESRHVGGNAPNNLITLCEKCHRLLHAGVVTLEEGKRKRGKSFRDAAFMGIMRKTLMRRLRNELSIPVKETYGYITKLLRETHAIQKSHVNDARCIARVPDAQPSDTLYRIRAVRHHNRQLHKVNPIKGGIRKRNQAPYEVFGFRLWDKVLFNGQECFITGRRVRGYFALKNFDGKKVHTGAPYTALTIVESSTSYLIERRGETT

SEQ ID NO: 21080 - protein, 423 aa, Moorena sp.
MRVFVLNSNRQPLDPCKPARARILLSTGKAKVYRRYPFTIILTEEIQEPITHGSQFKIDPGAKTSGLAIVQGNRIVWGGELTHRGFQIRDALTSRRQLRCARRNRKTRYRKPRFLNRSRPEGWLAPSLMSRVHNILTWVKKLTRLCPIAGISQELVRFDTQKLQNPEISGIEYQQGTLYGYELREYLLEKWNRKCAYCGTTGTQLEIEHIKPLSKGGSNRVSNLAIACHSCNQSKSDQEIEQFLSGKPDVLKRVLSQAKRPLADAAAVNTTRWKLYHELKSIGLPVEVGSGGLTKFNRCRQNLPKTHWLDAANVGKVDTLIIEGYQPLLIAAKGHGTRKICRTNKYGFPIRYCSRTKIHKGFQTGDIVRAVVTKGKKIGTYVGRVATRKSGSFNISTKSGLVQGISHKYCQFIHRKDGYAYRH

SEQ ID NO: 21081 - protein, 447 aa, unidentified; identical to SEQ ID NO: 5309
  REGION 1..447: note = Human gut metagenome

SEQ ID NO: 21082 - protein, 424 aa, unidentified
  REGION 1..424: note = Human gut metagenome
MASMQYVYVLNKHGEPLMPCSPGKARLLLKQQKACVVKRTPFTIKLLYGSAGYKQPVALGIDAGSKHVGLSASTEKRELYREEFTPRNDVVELLSTRRQNRRSRRNRKTRYRAPRFDNRVHSKHKGWLAPSVEVKIQEHITVIKRICRILPITLVRVETAEFDTQRLKAMLKGKPLPVGTDYQLGEMYDEYNVRQYVLKRDNYTCQCCGAHPTEKKPIRLHVHHIESRHVGGNAPNNLITLCVACHKALHEGKITLDKGKKRGKPLRDAAFMGIMRNMLLARLKDELNIPVKQTYGYITKLLREKNKIPKSHVNDARCIAKAPNAKPCDTMLYTRALRHHNRQIHKAKILKGGIRKKNQAPYLVKGFRLWDKVRYNGEECFITGRRSSGYFALKKYDGTVISNSASYKKLMLLEAATNYITERS

SEQ ID NO: 21083 - protein, 443 aa, Anoxybacillus sp.; identical to SEQ ID NO: 4769

SEQ ID NO: 21084 - protein, 340 aa, unidentified
  REGION 1..340: note = Human gut metagenome
SATAEKEELFACETTLRTDIVDLLSTRLQNRRTRRSRLRYRKPRFNNRGSSKKKGWVAPSVKQRIDSHLNEVNEIHKILPITKIVIEVAQFDTQKMKNHDISGSDYQNGEQLGFWNVREYVLFRDGHKCSHCKGKSKDPVLNVHHLESRKTGGDSPSNLVTLCESCHKAFHKGEIELKKKRGKSLRDAAVMGIMKWKLYEELKSRYDNVSMTFGYITKYNRIKYGIEKSHTSDAFVISRNFNAKRIERQYLKRLVRRHNRQIHKMKILKGGKKKNNQAPFGVFRFRLFDKVLYNNEICFIYGRRKSGNFNIRDFNGENPKDVSYKKLKLIRGKMHPIILK

SEQ ID NO: 21085 - protein, 368 aa, unidentified
  REGION 1..368: note = Human gut metagenome
LFEADVELRNDISRLLEARYTFRRSRRNRKTRYRKKRFDNRVSSKHKGWLAPSIEHKIQSHFAMVEKLHRILPITKIVVETASFDTQLLKAQLEDKPIPQGTDYQNGELAGWNIREYIFHRDNYTCQWCKGKSKDPILVTHHHAYWKGDHTNKPSSLITLCNTCNDSKYHKKEANRLWGWEPKITNSYKHAAFMGVMRWTFYNRLKEIYPNVSMTYGYITKNTRIENNLPKTHYVDARCISGHPEAKSNGEYFYYKKVRCHNRQLHKANTLKGGIRKRNQAEYIVKGFRLFDRVEYQNNEYFIFGRRTSGFFDIRTLDGQKVNKGSISFKKLKLKETSKTYLIERRMADTGVSLAPLTTEVTSLRQTG

SEQ ID NO: 21086 - protein, 394 aa, unidentified; identical to SEQ ID NO: 7301
  REGION 1..394: note = Human gut metagenome

SEQ ID NO: 21087 - protein, 421 aa, unidentified
  REGION 1..421: note = hydrothermal vent metagenome
MVFVLSKDKTPLAPTYEAKARKLLEQGKAIVHKIFPFTIRLKEKKTCTKNFDIKFDVGASVTGVAIVDAVKCFFFAEIVHRGKVIKKAMDSRRAIRRSRRARKTRYREARFDNRTRADGWLPPSVKSRADNVINFANKYAKLIPIKKAIVEKVSFDTSSMTNGKKLYGKEYQNGELKDTKLRDFIFKKHNHKCVYCGGDGEEIEHITPRSKGGTNSVQNLTLSCRKCNIEKGNLSLKDFGKKVKKDFSHLEPRKTPKNASIIQSARTYTLKELAKKFEVETSEGWETYANRKEINLPKEHYFDAMCIGNKYKYKILANKVLEVKAQGRGSRQMCRMDRFGFPRTKAKSSKIVKGFQTGDIVKAVVTKGKKIGTYLGKVAVRASGNFNISTDKATVQGINYKYCTTVQKGDGYAYATRTINQ

SEQ ID NO: 21088 - protein, 419 aa, unidentified; identical to SEQ ID NO: 5677
  REGION 1..419: note = metagenome

SEQ ID NO: 21089 - protein, 427 aa, unidentified; identical to SEQ ID NO: 14799
  REGION 1..427: note = Human gut metagenome

SEQ ID NO: 21090 - protein, 535 aa, Streptomyces sp.; identical to SEQ ID NO: 4636

SEQ ID NO: 21091 - protein, 480 aa, unidentified; identical to SEQ ID NO: 2726
  REGION 1..480: note = Human gut metagenome

SEQ ID NO: 21092 - protein, 427 aa, unidentified; identical to SEQ ID NO: 5062
  REGION 1..427: note = Human gut metagenome

SEQ ID NO: 21093 - protein, 493 aa, unidentified; identical to SEQ ID NO: 2644
  REGION 1..493: note = Human gut metagenome

SEQ ID NO: 21094 - protein, 436 aa, unidentified
  REGION 1..436: note = Human metagenome
MTKTLTTQTTQACVLDRQGKPLMPTTRLGKVYRLLKTQKAHIVSYEPFTIQLDYQPDTQVIQPMTLGVDSGAIHSGYSIANEHREYYSAEVIARNDISNRLSDRRMCRQNRRSRKTRYRKPRFNNRKNKKKGWLPPSLEQKVAVQVNEIDHIHRYFPIETIIVETAEFDIQKIKNPDISGIEYQQGTLQGYNIRNYLLEKHGRKCFYCGKAVSDFEVEHMLPKSKGGSNRIDNLTLSCHDCNEKKGTLTAEEFIQQTLPAKKATAKLKQLPNEKRLFKYMAHMNTTRWALYDAIKERYPNVKMTYGYITKYNRIQAGLPKTHHIDAKCITGFSTVPSMSQTVVKVKMRRHNRQLHRATFSKGHVRKAACLPTTVFGFQLYDLVCFNNHRYYIKGRRSSGAFALVSVEGLKNEERMYKKLTLLAHTNAYLTNRYVNA

SEQ ID NO: 21095 - protein, 429 aa, unidentified
  REGION 1..429: note = Human oral metagenome
MMVYVLDMNGRPLMPTHNGAKVRVLLKQKRAKVISKCPFTIKLLYESTNFTQSLTLGVDTGSKYVGSAVINDVTSEIIYESQTELRDDVKSKMDRRRQFRRVRRNKLRYRPVKFNNRRASKRKNRYTPTLISKFQGHKREIEFIKLILPIKYVILEVGEFDPQLLQDPTLAYRKWGYAKEELYQQENFKQATKARDDYKCQCCGKKNCRLEVHHLLPRSRGGSDKLANLLTLCTDCHSLAHSSEEQLLAFQKKFGKKAKSTLRYATQMNVLRHMLQREYPEAELTYGFHTKEMRRVFGLEKSHMIDACCIASRGVLFKNETSNKYKKKCVPKGNYVRTNTTNGKHVIIPKGKIAGFRRYDKVLYNNKEYFIAGRRSIGKVYLIDIDNNRVQVDRIKRTTGEKYVSKAEIKVSLVKKVASAKTCLCTISK

SEQ ID NO: 21096 - protein, 249 aa, unidentified; identical to SEQ ID NO: 12068
  REGION 1..249: note = Human gut metagenome

SEQ ID NO: 21097 - protein, 450 aa, Moorena sp.; identical to SEQ ID NO: 2935

SEQ ID NO: 21098 - protein, 424 aa, unidentified; identical to SEQ ID NO: 6692
  REGION 1..424: note = Human gut metagenome

SEQ ID NO: 21099 - protein, 430 aa, unidentified
  REGION 1..430: note = Human gut metagenome
MPKVYVLNRHGRPLMPCTPAKARHLLDAGKAKVKHRTPFTIQLLYGSTGYAQEVILGVDAGSKTIGLSASTETEELFSAEVKPRNDVVELMSVRRQFRRARRNRTTRYRKPRFDNRVRSKHKGWLAPSVEVKIQDHITAIRRVCGILPVSKVVVETAEFDLQLLKAIADGKPVPQGEDYQKGEMYGHYNVRQYVLWRDGYTCQCCGAHATQKKEVRLHVHHLESRKVGGDAPDNLVTLCTACHDKLHKGIIMAADIKKRKRRSTRDATFMGIMRMTLLRRLREQLPVPVVETRGYITKATRENLLVLPKSHTNDALAIAHGPQGFRTEYLPNIRQADRLYTIRPVRHHNRQLHKATILKGGVRKANQAEKYICGFRLYDKVLYNGIECFVWGRRTSGSFLLRQLNGEKVKDGVSYKHLKLLERSQSYLVA

SEQ ID NO: 21100 - protein, 442 aa, unidentified; identical to SEQ ID NO: 3234
  REGION 1..442: note = Human gut metagenome

SEQ ID NO: 21101 - protein, 434 aa, unidentified; identical to SEQ ID NO: 5659
  REGION 1..434: note = Clostridiaceae bacterium

SEQ ID NO: 21102 - protein, 270 aa, unidentified
  REGION 1..270: note = Human gut metagenome
LQFYRKEHSIMQYVYVLNKHGEPLMPCSPGKARILLKQQKACVVKRTPFTIKLLYGSAGYKQPITLGVDAGSKHVGLSASTEKRELYSEEFTPRNDVVELLSTRRQNRRSRRNRKTRYRAPRFNNRIHSKHKGWLAPSVEVKIQEHITVIKRICRILPITLVRVETAEFDTQRLKAMLSGKPLPVGTDYQLGEMYDEYNARQYVLRRDNYTCQRCGAHTTKKKTVKLHVHHLESRKTGGNAPSNLITLCVDCHKAFHAGKVKLDGKKRGK

SEQ ID NO: 21103 - protein, 424 aa, unidentified
  REGION 1..424: note = Human metagenome
MVFVLNRSKKPLDMISHAKARILLKNRLAVVHKIYPFTIRLKDNSAVLKDRAYTVKIDPGSRHTGVAITDDKDQVVMLAEVEHRGHLIKKDLDSRRNVRRHRRNRKTRYRPARFLNRTKPKGWIAPSVKSRADNVINFIKKYKKLININKVMIENVSFDVAQMSSDTSLIGTDYQQGPLYDTNLRNFVFSKTNGRCSYCGAKATEIDHIVPRAKGGSNSTFNLTPACRSCNEKKSNLTLKEFGKLVGKDFSKLEPKKLPKDEAIVQSARNYMFQEIAKIIPNTTGYGAWMTKYNRNELGLPKEHYYDALSVGNIQDYKFLTNKVLQISAKGRGSRQMCSMNKYGFPRTSPKGSKSVEGFQSGDMVKAIISNGPKQGVYLGRVAVRANRSFDIRTKSGLVKDIWYKNCRLIQRGDGYLYSYKDRI

SEQ ID NO: 21104 - protein, 396 aa, unidentified
  REGION 1..396: note = Human gut metagenome
VKRRTPFTIQLTIATGETKQPVSLGVDTGYKHVGLSASTEKAELYASEVELRQDITDLLSARRALRQSRRNRKTRYRAPRFDNRIRTKRKGWLAPSVENRINAHLSRIEAVLRLLPITKITVETASFDMQRLKNPDISGKEYQEGEQLGFWNVREYVLFRDGHVCQHCHGRSKDPVLNVHHLESRRTGSDSPDNLITLCETCHKALHRGEITLKAKRGQSFRAQAFMGIMRREVLNRLKASYPELKVHETYGYLTKHARIANGIVKSHGADAFCIAGNLGAERLGEFFFQKQTRRNNRQIHKLSILKGGIRKRNQAPFEAKGFRLFDKVACQGEEGFIFGRRSSGSFDVRKLDGTRISAGISCKKLRLLEKRRTYLTEIRKEEALPPLPEGRGLRA

SEQ ID NO: 21105 - protein, 403 aa, unidentified
  REGION 1..403: note = Human gut metagenome
RCRRQRRAKANGTISKKCVKQTTAQNGSVSKRAKDIGVIKRRLPGCEKDVLCIGIKNKETKFTNRTRPEGWLTPTANQLLQTHVNLVKKIQKFLPISDVVLEVNKFAFMRLDNPNIQKWQYQQGPLYKKESLESAVSEMQEHHCLFCKKPIDHYHHVVPQHKNGSNTIGNIVGLCAKHHDLVHKDSAWEKKLAKKSTGLYKKYGALGVLNQVIPTLTNELSSLFPKHSFVTNGKSTYDYRAAHGVSKDHWLDAYCIACSVLPSNVCDSNINNHMPYELKQFRRHDRRVLNNENMNRVYTLNNKAVAINRHKAKDQKTVSLEEFRKEHPDDVCKLKVKEHHPTYRNMNRNFPGSVFLVGKQIHVMQGIASSKDGKATKYNDTSATAIAAGKCKFVAKNTGILFV

SEQ ID NO: 21106 - protein, 292 aa, Parasutterella sp.; identical to SEQ ID NO: 6038

SEQ ID NO: 21107 - protein, 423 aa, unidentified; identical to SEQ ID NO: 3951
  REGION 1..423: note = Human gut metagenome

SEQ ID NO: 21108 - protein, 442 aa, unidentified
  REGION 1..442: note = Human gut metagenome
MVTVQQSTHHLPFGRVFIRRNLFMVYVISQDGKPLMPCSNSIARLLLKQSKAKVKKREPFTIKLTYETTNYTQDLTLGVDTGSGTIGTAVSKDNGDIVYMSEVVVRNDITDKMTQRAKYRRNRRNRKTRYRKARWLNRASSIKKDRFSPTMQSKLHSHVREIEYIQSILPVTEMVFETGQFDMQLMKNPSLANPKVRPWGYQKGANYGFENTKAMVLNRDNYTCQCCKGKHKDSKLEVHHIVFRSQGGSDEESNLLTLCHTCHKDLHSGKINPKLSGKVKGNLKYATQMNSIRKQLFRFYPNAIETFGYVTKANRLHLGVDKEHYYDACTIATQGNAFNVKSNLYKKKCVSDGDFQKTKGIRSEQPIVTDKICGFRKFDKVRYFGNDYFIKGRMSTGYAILMDIDGNKIDFSTMPRGYKTPKLSNCKRITARSTVMTQVKVV

SEQ ID NO: 21109 - protein, 515 aa, unidentified
  REGION 1..515: note = Human gut metagenome
MQYLDFTLVVDKNNKPCVPILNGRAGYLLRNNKAKIINHDPLVIKRIDDYKSDFENRDIFELKIDSGYLNIGFSVSDNYHEYLAGQVELLKGMSDRLTNRNGYRRTRRSRIRYRKNKNVDYKTVHNPTYKNGNEEGWFAPSIQHKIDSHIRLIDKIASWVPVDKVIVEVAKFDIQMIKALADGKEISGKDYQNGEMKGYENAAAYVRDRDKHTCRLCGANKNVVIEVHHIQPRSKGGTDKPSNLISLCHSCHRKVHSNNNDNKYFEKVKSMKLSDTYKDSTYMNMVRWELFERLSGKYDVKVGYGYQTKINRRNAGLRKFHYTDAVCINDYKDVTLTENIYIVDQKRCNDRSMETFSDAKYIDVRDGKEKSGNTLYKERLPNAPSKRVTQKEYINNMRQFRGKKIKPGKRTFVCNSYCLKCGDLIYINSGKHRGNIAEVESMQKLPNGNFKIRFTYKAQTVKYPSISIKPEEYELLKNNLLDKVKIVRTRRGMIWRKYNRLEYEATHADQEGMAV

SEQ ID NO: 21110 - protein, 426 aa, unidentified; identical to SEQ ID NO: 6377
  REGION 1..426: note = Human gut metagenome

SEQ ID NO: 21111 - protein, 458 aa, unidentified; identical to SEQ ID NO: 3879
  REGION 1..458: note = seawater metagenome

SEQ ID NO: 21112 - protein, 387 aa, Moorena sp.
MAVFFNYPKIFVVDAEGKPLLPCHPARARKLLKSGNAVVERGMPFAIRLKYAVPNPVGSLRAKVDDGSKKVGIALVNEHTGEVVFRSVLVQRGDVVRLLTLRRGYRRNRRYRIVRHRSCRNRNRKQATPFPSIRQKKEAICRVLSDLAKVAPISGVDVEIVSAGVKNPSLPGESTREKVLNRDGACVLCGSAKKLQRHHLVPRSKGGSDTPVNQVALCEECHRKLHAGDAHLDRKGKTFAWVTHAAQGKMYLLALLSRFGEVRTCKGWQTKEWRESLNLPKSHVSNAASLFPPSKPLKFFGPEHLIYPLRRRKWEGNPTKTCEERSGLRHWDIVRAVRAGKVVFGCVRSLKARAVTLRTASDSNFEVSYSKAKLLHRPRGLAYVLVW

SEQ ID NO: 21113 - protein, 320 aa, unidentified
  REGION 1..320: note = Human metagenome
RAPRFDNRIRTKRKGWLAPSVENRINAHLSRIKAVLRLLPVTKITVETASFDLQLLKNPDISGKEYQEGEQLGFWNIREYVLCRDGHVCQHCYGRSKDPVLNVHHLESRRTGGDSPGNLITLCETCHKALHRGEITLKAKRGQSFRAEAFMGIMRWEVHNRLRALHPGIEVSNTYGYRTKHARIANGIAKSHCADAFCIAGNLGAERLCEFFFQKQTRRNHRQIHKLSILKGGIRKRNQAPFEVKGFRLFDKVACQGEEGFIFGRRSSGFFDVRKLDGTRISAGISCKKLHLLEKRRTYLTEIRKEEALPPLPEGRGLRA

SEQ ID NO: 21114 - protein, 411 aa, unidentified; identical to SEQ ID NO: 2867
  REGION 1..411: note = Human gut metagenome

SEQ ID NO: 21115 - protein, 455 aa, unidentified; identical to SEQ ID NO: 12675
  REGION 1..455: note = Human gut metagenome

SEQ ID NO: 21116 - protein, 396 aa, unidentified; identical to SEQ ID NO: 4508
  REGION 1..396: note = Human gut metagenome

SEQ ID NO: 21117 - protein, 266 aa, unidentified
  REGION 1..266: note = Human gut metagenome
MSTVYVLNKDGKPLMPTTRGGHVRHLLKEQKARVVRTKPFTIQLLYETNDVVQPLYLGIDPGRTNIGVAVVKADSTAVFTAHLETRNEEIPKLMQGRKKARRARRTNGRRCRRQRRAKANGTISKKCVKQTTAQNGSASKRAKEIGVIKRHLPGCEKDVLCIGIKNKEAKFSNRTRPEGWLTPTANQLLKTHINLVKKIRKFLPISDVVLEINKFAFMRLDNPNIQKWQYQQGPLYQKASLEEAVSEMQEHHLLQKILAYCLCSVH

SEQ ID NO: 21118 - protein, 442 aa, unidentified
  REGION 1..442: note = Human gut metagenome
MSTSVFVLDKKHRPLMPCRPARARRLLRAGRARVVKRFPFVIRLVDRTVEQSEVQPVLIKLDPGSRETGAAVVRDDGKKRHHALAFFVIEHRGGAIRDALKARSAFRRRRRSQNFRCRSPRFLNRVKPKGWLPPSLRHRVETTLSFVRRMCRYLPVSGIATELVKFDSQKLQNPEVSGVKYQQGTLFEYEVREYLLEKFGRKCVYCGAEGVLLNIDHVVPRAKGGSNRVSNLVLACVSCNQKKGARSLEDFLKGKPKVLARVRRELKTLLRDAAAVNATRWVLFNELKATGLPVETGSGALTKFNRHAFGVEKEHWLDALCVGRLNGVVTRKGLNVLEIRCMGRGSRQRTRLTKYGFPRGYLMRQKCVHGFATGDMVEANVPKGKKAGLWRGRVAVRVSGSFNIQTPKGVIQGVGWKHCRLISHNDGYGYAWLGHAPHSSPA

SEQ ID NO: 21119 - protein, 462 aa, unidentified
  REGION 1..462: note = Human gut metagenome
MSVLVIGRNGRALMPTNPRKARLLLKKKTASVVCRHPFTIQLLYKTGCATQEGCIGIDTGSQHIGVGITCGDRVILKDEHALRSSMEKRSLLATRAVMRRGRRYRKVRYRKPKWRHHTKRMYIEKANRRGRHWRKVKTTTQSPRPKGWLPPSLQSKCDHHFRIIDRYLKYLPDPITRNLVIEAGRFDMARMNDPTIHGEMYQRGPMYDAENLRAYIFARDNYQCACCKAKAGTTRKADGTTVKLVAHYILFRSRGATDNPKYIISVCDHCHTTKAHQPGGILYSWMENNKKVARGLRDAVFMNILRKRLFARYPQSAFTYGNITATDRKQLRLPKSHANDAVAISLFGKEASTVKNICQTMHYKQIRKSKRSLHEAIPRKGRKNPNTKAVRNKKNTTQVNGFKLWDSVLADGKKLFICSFTGTSAYLIDKNGCYISQPGKTYKQWPLSKLKRLHPNGNWLMA

SEQ ID NO: 21120 - protein, 536 aa, unidentified
  REGION 1..536: note = Human gut metagenome
VLRPRYQYPTRWYPSREQGSGNGCLSGEENTDLEQEVSGTLSKGDHSHPGEQDFCVPAITIQGGPAMSVFVVGLNGCRLMPTSERKARLLLKHGKASVYRKVPFTIKLNYKTGSTTQSGYLGIDTGSQHIGVSVVREDGTVLHKEEIGLRDSMSKRKLMQSRASSRRGRRHRKTRYRHPKWRPKAKRVYCEIPDRKGRHWKKKEITFASKRAKGWLPPSLQSKTDHHIWWIKKLQDLLPEGYRLSIELGRFDPARLKDPEIHGELYQKGPQYDYENVRAYVLNRDRYTCQVCGKKGGKLHVHHILYRSHGATDDPQYMATVCSDCHNTENHQQGGILYQWMQKQKKFTRGLRDATFMNILRKRLIEAFPGATFTYGNITKADRERLRLPKSHGNDATAIAIVKTGIMTVKDKEPVIYIQQVRRKKRSLHEETPRKGRKESNRKASRYDKNTKAVTVTKRKNKKKITITGCLFDRVELNGKKGWISGFTDKSCYVKDENDQYIRTSPKYKQVSLSKLKILHHCGNWAIGARQSLGKG

SEQ ID NO: 21121 - protein, 413 aa, unidentified; identical to SEQ ID NO: 5477
  REGION 1..413: note = Human gut metagenome

SEQ ID NO: 21122 - protein, 428 aa, Oscillatoria sp.; identical to SEQ ID NO: 2282

SEQ ID NO: 21123 - protein, 512 aa, unidentified
  REGION 1..512: note = Human gut metagenome
MSTVYVLNKDGKPLMPTTRCGHVRRLLKEQKARVVTSKPFIIQLLYETNDVVQPLYLGIDPGRTNIGVAVVRTDGTAVFTAHLETRNKEIPKLMKKRKDSRRARRTNGRRCRRQRRAKANGTISKKCVKQTTAQNGSVSKRAKEIGVIKRHLPGCEKEVLCIGIKNKEAKFSNRTRPEGWLTPTANQLLQTHINLVKKIRKFLPISDVVLEVNKFAFMQLDNPNIQKWQYQQGPLYQKASLEEAVSEMQEHHCLFCKKPIAHYHHVVPQSENGSNTIGNIVGLCTKHHDLVHKDATWQKKLAKKKTGLNKKYGALSVLNQIIPALTKDLSSLFPKHFFATNGKSTYDYRAAHGVSKDHWLDAYCIACSVLANDVCDSNINSHVPYELKQFRRHDRRALHKENMSRVYTLNGKSVATNRHKAIKQTTDSLEEFRQCQPDDVCKLKVKEHHPEYRNPKRNFPGCVFLVGKHTHVMQGTSGSHNGKADGYYDTNGNSYPSGKCKFVAKNKGIVFA

SEQ ID NO: 21124 - protein, 443 aa, unidentified
  REGION 1..443: note = Human gut metagenome
LTKDENRPSGRTTGLRAEQAEPAGIRKGDTLKVFVLNMRSKPLMPCSPAKARHMLKAGKAVVVRRTPFTIKLTIATGETKQDVTLGVDAGARHVGISATTEKEEVFASEVALRQDITGLLADRLAFRRARRNRKTRYRAPRFNNRVRSKHKGWLAPSVENRIQAHMSRIEAVCRLLPVTKIVIETASFDIQKIRNPEVEGTGYQQGDQLGFWNVREYVLFRDGHICQHCRGRSKDPILNVHHLESRKTGGDAPNNLITLCETCHKAYHAGKIKLKVKRGHSFRAEAFMGIMRWTLLNRMRKAHPSLPVENTYGYLTKHKRIALGLPKTHCADAFCIAGNLKALRRGDFLFQQQTRKHNRQIHKCSILKGGVRKLNQAPFLVKGFRLFDKVRIGGQIGFVFGRRVRGTFNIRRLDKTVIGTDINCKKLSLLETRKTFLTELRKE

SEQ ID NO: 21125 - protein, 421 aa, Moorena sp.
VYLAQYWLITTPLRTNTPARVGQALSVPVINMHGKPLMPTTPGKARILLKHGKATVVQRAPFTIQLCYLNGKYTQDIKLGIDAGYSTIGFSATTDKRELISGELILRKKISKLIDQKRNYRRTRRSRLWHRKPQFNNRSKPKGWLAPSIQHKLETHLRLIKKLKKILPITKITIEVAKFDQQKMNNPEIKNVGYQQGELQGYEVREYLLEKWVRKCVYCGKNNLPLEIEHIIPKIRGGTNRVSNLTLECHRCNQKKGDKTAAEFGYPDIQKKANQTLKSTVFMNIVRKKVVNTLKCAWTYGHITKHDRIKMKLEKSHINDAFVIAGGTTQSRTIPYMTTQTRRNNRSIQTNRKGYKPSIRKQRYKLQPGDLVKYIKSLFRVKGVFSYGKWVRLISLTKANKIINVNIKKVELVKYGKGIQF

SEQ ID NO: 21126 - protein, 421 aa, unidentified; identical to SEQ ID NO: 4757
  REGION 1..421: note = Human gut metagenome

SEQ ID NO: 21127 - protein, 218 aa, unidentified
  REGION 1..218: note = Human gut metagenome
NPVRLHVHHFESRKYGGNAPDNHGTLCDDCHKKFHLGIITDVKLKTRRRQSTRDAAFMGIMRKTLMWRLRTELFIPVAETKGYITKATREKLLVLPKSHTRDALAIAQGRHGFGIKEYAYVEPANHIYTVRPVRHHNRQLHKASILKGGIRKRNQASKYVFGFRLYDKVLYQGKACFVWGRRTRGTFLLRTIDGIKVKDGVSYRNLTLLERSSNYLIA

SEQ ID NO: 21128 - protein, 442 aa, unidentified; identical to SEQ ID NO: 2834
  REGION 1..442: note = Human gut metagenome

SEQ ID NO: 21129 - protein, 451 aa, Moorena sp.
MSVCVVAPDKKPLMPTSEYRARKLLKSGKAVIFKYKPFTIMLTRIVSENMQPIEYCCDTGYKHIGVSIKSEKHEYFDCQFDMLQDEKKRHDDRRKMRRARRNRLRYRKPRFDNRTASKKEGWLAPSLRNIRDQHIRIFERFLEVMPIVSATFEMGSFDVHAMHEFEATGTVLKGDDYQKGPRYGMNTLRKAVFYRDNYTCQVCGETADEGAILRVHHIGFETGDHTNRMSNLLTVCTKCHTSANHKPGGKLYDLKPRTKPFNGAAFMNAVRWQMFRTLKSTHPDLEWHMTYGAATQEARRVLHLEKSHANDAYAMGEFHPRRRTPFMHFQKLRRNNRILEKFFDAKYVDARDGKTKKGAELSCGRTARSESRHSEKNLRVFRERKVSKGRRVIRRSHYALRPGDTVVIGREKHRAKGVHNKGTYVVTDAKKSVPVKKVEKIIHAGGYMPVK

SEQ ID NO: 21130 - protein, 322 aa, unidentified
  REGION 1..322: note = Human gut metagenome
RKPRFDNRVRSKHKGWLAPSVEVKIQEHITSIKRVCRILPVSKVVIETAEFDLQLLKAIEEGKPVPQGEDYQQGEMYGHYNVRQYVLWRDGYTCQCCGAHATKKKEVRLHVHHLESRKVDGDAPDNQVTLCESCHEKLHKGLIAEKDFKKRKRKSTRDATFMGIMRKTLMQRLCSELPIPVIETRGYITKATREKLLVLPKSHTNDALAIAQGKQGFNVGYLPGIVQINKIYTIRPVRHHNRQLHKATILKGGIRKSNQTEKYVFGYCLFDKVQFNGQDCFIWGRRTTGIFTIKTINGKMIKDGISFKKLKPVEKSTGYLIA

SEQ ID NO: 21131 - protein, 418 aa, unidentified; identical to SEQ ID NO: 19622
  REGION 1..418: note = Human gut metagenome

SEQ ID NO: 21132 - protein, 442 aa, unidentified
  REGION 1..442: note = Human gut metagenome
MSTTVFVLDKKHRPLMPCRPARARRLLRAGRARVVKRFPFVIRLVDRTVEQSEVQPVLIKLDPGSRETGAAVVRDDGKKRHHALAFFVIKHRGGAIRDALKARSAFRRRRRSQNFRCRSPRFLNRVKPKGWLPPSLRHRVETTLSFVRRMCRYLPVSGIATELVKFDSQKLQNPEVSGVKYQQGTLFEYEVREYLLEKFGRKCVYCGAEGVPLNIDHVVPRAKGGSNRVSNLVLACVSCNQKKGARSLEDFLKGKPEVLARVRRELKTPLRDAAAVNATRWVLFNELKATGLPVETGSGALTKLNRHAFGVEKEHWLDALCVGRLNGAVTRKGLNVLEIRCMGRGSRQRTRLTKYGFPRGYLMRQKCVHGFATGDMVEANVPKGKKAGLWRGRVAVRVSGSFNIQTPKGVIQGVGWKHCRLISHNDGYGYAWLGHAPHSSPA

SEQ ID NO: 21133 - protein, 432 aa, unidentified
  REGION 1..432: note = Human gut metagenome
MVTVQQSTHHLPFGRVFIRRNLFMVYVISQDGKPLMPCSDPIARLLLKQGKAKVKKREPFTIKLTYETTNHTQGLTLGVDTGSGTIGTAVSKDNGDIVYMSEVVVRNDITDKMTQRAKYRRNRRNRKTRYRKARWLNRASSIKKDRFSPTMQSKLHSHVREIEYIQSILPVTEMVFETGQFDMQLMKNPSLANPKVRPWGYQKGANYGFENTKAMVLNRDNYTCQCCKGKHKDSKLEVHHIVFRSQGGSDEESNLLTLCHTCHKDLHSGKINPKLSGKVKGNLKYATQMNSIRKQLFRFYPNAIETFGYVTKANRLHLGVDKEHYYDACTIATQGNAFNVKSNLYKKKCVSDGDFQKTKGIRSEQPIVTDKICGFRKFDKVRYFGNDYFIKGRMSTGYAILMGSAEHALDVSDTTVLSDFDCSEAGTGTGTQ

SEQ ID NO: 21134 - protein, 408 aa, unidentified
  REGION 1..408: note = Human gut metagenome
MVYVQDIDGKPMMPTTRHGKVRRLLKANKATVVNLCPFTIRLTYATSGYKQEIVLGVDAGTKHVGLSATTKSKEIYSSEVILRSDIVELLSTRRELRRTRRNRLRYRKPRFGNRVKSKHHGWVAPSVRYRIDAHIRVIDNVCSILPISRVIIEIAQFDTQKIKNPDISGNEYQEGDQLGFWNVREYVLARDGHKCQHCKGKSKDPILNVHHIESRKTGGDSPSNLITLCETCHKEYHKGNIDLKVKRGKSLRDSAVMGIMKWKLYEELKSRYPNVSMTFGYITKYNRIKYGIEKYHISDAFVISKNFNALRLEYHYKVRLVRRHNRQIHKQKVLKGGAKKPNQSPFEVFGFRLFDRVMFEGNYYFIFGRRKSGSFNIRDINGGNQRNVTYKKLKLSIGKRFMIQKEMN

SEQ ID NO: 21135 - protein, 450 aa, unidentified
  REGION 1..450: note = IscB polypeptide
MQKLEKRYNNTPTDAPQIRSNCDSVIKHDCMVGQVLQNTKTFSSDSDVDQLSGKREQDLRVPVLNMRGKPLMPTTPAKARHLLEQGKAKVVSRKPFTIQLKYATGETKQPITLGLDSGYKTIGFSAVTSKTELLSGEVNLRTNISKLLEQRRNYRMTRRGRLWHRQPRFNNRSKPKGWLAPSIQHKLDSHIRLVEKIKKLLPVTEVTVEVAGFDIQKIKNPEIEGTDYQQGEQLGFWNVREYVLHRDNHTCQHCHGKKKDPILQVHHINGKADGATDRPEELLTVCKTCHDDHHTGIDPIPKKKIKNFKPKTFMTAVRWKLVNALECKHTYGYITKHNRIKQGLQKSHINDAFVIAGGTIQDRCKPYIVKQVRRNNRSIQTNRKGFKPSIRRQRYKLQPNDLVRYRGKEYRVKGAFSYGKWIRLVDSAKEIINSSTKNVELICYGKGIFG

SEQ ID NO: 21136 - protein, 413 aa, unidentified; identical to SEQ ID NO: 5965
  REGION 1..413: note = Human gut metagenome

SEQ ID NO: 21137 - protein, 410 aa, Tissierella sp.; identical to SEQ ID NO: 12019

SEQ ID NO: 21138 - protein, 431 aa, unidentified; identical to SEQ ID NO: 2977
  REGION 1..431: note = Human gut metagenome

SEQ ID NO: 21139 - protein, 377 aa, unidentified; identical to SEQ ID NO: 6012
  REGION 1..377: note = Marine metagenome

SEQ ID NO: 21140 - protein, 415 aa, unidentified; identical to SEQ ID NO: 6534
  REGION 1..415: note = Human gut metagenome

SEQ ID NO: 21141 - protein, 489 aa, unidentified; identical to SEQ ID NO: 19542
  REGION 1..489: note = Human gut metagenome

SEQ ID NO: 21142 - protein, 428 aa, Symploca sp.
VSKVFVLDTLQQPLNPIHSGRARMLLSQGKAAVFRQYPFTLILKQEVSKPTVEALRIKIDPGAKTTGVALVNDATGEVVWAGELQHRGFQIRDALTSRRQLRRSRRNRKTRYRKPRFLNRTPCQKWLPPSLMSRVHNILTWVARLQKVCNITDISMELVRFDTQKMRNPEINSVEYQQGTLMGYELREYLLEKWNRQCAYCGAKDTSLEIEHMQPRCKGGSNSVTNLTLSCHKCNQKKGSKDVKTFLKAKPGVLKKVLVNAKKLLADTAAVNATRWELKRQLITTGLPVEVGTGGLTKFNRCQQGLEKTHWLDAACVGASTPEQLITSGVKPLLIAAYGHGTRQQCRTDKFGFPSRYCSRSKFHKGFQTGDIVKAVVTCGKKMGTYVGRVATRATGSFNISTTDGLVQGISHKYCTHIHKKDGYSYAT

SEQ ID NO: 21143 - protein, 427 aa, Nostoc sp.; identical to SEQ ID NO: 2670

SEQ ID NO: 21144 - protein, 419 aa, unidentified; identical to SEQ ID NO: 4131
  REGION 1..419: note = Human gut metagenome

SEQ ID NO: 21145 - protein, 414 aa, unidentified
  REGION 1..414: note = Spirochaetales bacterium UBA6840
MVYVHNCFGLPLMPCTEAKAKHLLKAHKAKVVNLTPFTIRLNFVVDDITQPVTLGVDAGYKTIGLSASTENKVLFEGEVKLREDIIALLEGRRSRKTRYRAPRFDNRVRSKNKGWLSPSVENRIGTHLSVIAKVYRLVPVSRIVVEVASFDIQKINNPDIEGEGYQKGEQLGFWNAREYVLWRDGHKCRSCFGKTKDTVLEVHHLVQRKDGGSNRPDNLITLCKTCHDAYHRGEIKLDKPKKGFKGATFMGVMRKTLVKRLRELYGSDMAKVTYGYITKNTRIENNLDKTHYIDARCIANHPTATSSETVYSLLKHRSHNRQIHRLTILKGGVRKNNQCPRKIFGFRLFDTVLYNREICLVHARRASGSFSIRKPNGEKVSGSLSYKKLKLISRSKNIDIWKCNATLTASAKIL

SEQ ID NO: 21146 - protein, 415 aa, unidentified; identical to SEQ ID NO: 6883
  REGION 1..415: note = Human gut metagenome

SEQ ID NO: 21147 - protein, 408 aa, unidentified; identical to SEQ ID NO: 10453
  REGION 1..408: note = Human gut metagenome

SEQ ID NO: 21148 - protein, 443 aa, Moorena sp.; identical to SEQ ID NO: 8700

SEQ ID NO: 21149 - protein, 406 aa, Geobacillus sp.; identical to SEQ ID NO: 3747

SEQ ID NO: 21150 - protein, 462 aa, unidentified
  REGION 1..462: note = Human gut metagenome
MSVLVIGRNGRALMPTNPRKARLLLKKKTASVVCRHPFTIQLLYKTGCATQKGSIGIDTGSQHIGVGITCGDRVILKDEHALRSSMEKRSLLATRAVMRRGRRYRKVRYRKPKWRHHTKRMYFEKANRRGQHWRKVKTTTQSPRSKGWLPPSLQSKCDHHFRIIDRYLKYLPDPITRNLVIETGRFDMARMNDPTIHGEMYQRGPMYDAENLRAYIFARDNYQCACCKAKAGTTRKADGTTVKLVAHHILFRSRGATDNPKYIISVCDHCHTTKAHQPGGILYSWMENNKKVARGLRDATFMNILRKRLFARYPQAAFTYGNITAADRKKLRLPKSHANDAVAISLFGKEASTVKNICQTMHYKQIRKSKRSLHEAIPRKGRKNPNTKAVRNKKNTTQMNGFKLWDSVLANGKKLFICSFTGTSAYLIDKNGCYISQPGKTYKQWPLSKLKRLHPNGNWLMA

SEQ ID NO: 21151 - protein, 518 aa, Anaerostipes sp.; identical to SEQ ID NO: 2751

SEQ ID NO: 21152 - protein, 426 aa, unidentified
  REGION 1..426: note = Human metagenome
MVFVLDKSKKPLNMISHAKARILLKNRLAVVHKIYPFTIRLKDNSCVGRDKTYTVKIDPGSRTTGVAVVDDRDSVVMLAEIEHRGHLIKKDMDSRRATRHKRRIRNTRYRPARFLNRTKPKGWLAPSVKSRADNVINFIKKYKKLLNINKVMIENVNFDTAQMSSDTKLIGIGYQQGPLYDTNLRNFVFSKTNGRCSYCGAKAEEVDHIVPRANGGTNSTYNLTPACKLCNAKKSNLSLKDFGKLVGKDYSHLEPKKLPKDAAIVQIARNYMVKEITKLVSDTTIYDAWLTKYNRGELGLSKQHYYDALSVGETPNSFNFLTNKVLTISAKGRGSRQMCRMNKFGFPRTAPKGSKFVKGFQTGDMVKVVVPSGLKKGGEYLGRVAVRSTGRFDIQTKAKTIEGIGHQYCHIIQRGDGYLYSYSERF

SEQ ID NO: 21153 - protein, 220 aa, unidentified
  REGION 1..220: note = Human gut metagenome
PCQYCGAHTTAKKAVKLHVHHLESRKVGGNAPSNLITLCVTCHNNLHKGKITLDGKKRGKTLRDAAFMGIMRNTLLTRLRNELNIPVQNTYGYITKLLREQNDIKKSHVNDARCISKHPLAEPCSVCYRTKAIRHHNRQIHKAKILKGGIRKANQAPYIVKGFRLWDKVLYDGQECFISGRRSSGYFALRKLDGTAITNSISFKKLWLLEPATNYLIERM

SEQ ID NO: 21154 - protein, 425 aa, unidentified; identical to SEQ ID NO: 10087
  REGION 1..425: note = Anaerobic digester metagenome

SEQ ID NO: 21155 - protein, 464 aa, unidentified
  REGION 1..464: note = Human gut metagenome
MRKQKKRRHHMVAVISSSGIPLMPTSNYKVRKLLRCGRAKIHRYQPFTIQLLDRENGETQPMELCMDTGYLHIGLSVKSEKHEYLAYQIDTLDDEKKNHQDQLMYRRTRRNRKRYRKPRFCNRLKSKDWIAPSLKHKLEIHEVWIKKICAVMPVTSITLEMGNFDTQVLKAMQEGRPLPEGKDYQQGERYGIATLREAVFFRDNYTCQCCKRTIKDHAILHVHHIVYRSQGGTNRMSNLATVCERCHTPANHQPGGRLWNWRPKLPAFQGAAYMNTVRWMFCENVKQIYPEMQVQNTYGACTKERRRDLSITKSHVNDAYVMGKFQPKHRSEPELFKKRHRNNRCLEKFYDAKYTDSRTGKKTAGKELSNGRISRNHKKDSENLHPYRQKKLSIGRRSIRKQHYKIQPGDIVIVDQKKQKSSGCHNKGSRVMVAGKSYSIKEITVFKYCGGYLHEPINRKEAAG

SEQ ID NO: 21156 - protein, 522 aa, Moorena sp.; identical to SEQ ID NO: 16031

SEQ ID NO: 21157 - protein, 444 aa, unidentified
  REGION 1..444: note = Alcaligenaceae bacterium
MAVFVVDRHQAPLMPCSEKRARLLLARGRARVHRLIPFTIRLIDREVAQSELQPLELKIDPGSKTSGLALVRKSESVHAETGEMTATAHVLNLFELIHRGFQISNALSARRQMRRRRRSANLRYRAPRFLNRKNKGKGWLAPSLQHRIDTTLSWVARLRKYAPITGLAQELVRFDMQQLENPEITGVEYQQGELAGYEVREYLLEKWQRKCAYCDASEVPLQIEHIHPKACGGSDRISNLTLACAPCNLRKAAQDASVFLTNDPTRLARTQAQSKRPLRDAAAVNATRWMLFNALKATDLPVRTGSGGLTKFNRARLGMPKTHALDAVCVGQVNHVEQWQKPTLEIKATGRGSYQRTRLTRFGFPRGYLTRQKRIHGFQTGDMIRAIVTKGKKVGEYMGRVAVRASGSFNIQTAEGLVQGISHRYCVLTQRSDGYGYSHRSDSY

SEQ ID NO: 21158 - protein, 604 aa, Streptomyces sp.
LPAKAPSAQHGPLLSAAYTREEVTRSPPARLSSDQPESSRSDGSGRCNPMATFPVGEQTHQAVLPQQPALESVGADTPGSRDETAHGHPATGRDTGREHGRGETGGRGTVARRRHAKSAVPAAQAAETGSGDAPALDQSCRSYAGGTGACRVFVLSRDGQPLMPCHPARARELLGKGRAVVVRQVPFVIRLKDRTLGESEVEGVQLRVDPGSKGTGLVLTDEKKEPHDRSSFVTVRRGLVSIELQHRGDQIRAGMRQRAGYRRRRRRANLRYRAPRSDNRARRSGWLPPSLRHRVDTTFSLADRLCRWAPVTEIHVERVAFDTHSLSAGRLLHGTEHQRGPLAGTTVREHLRATWNAACAYCGVSGVPLNVDHLRPRSRGGSHRISNLVLACAPCNKAKGSKPVGTFLAHRPGRLATVLPQVRAPLDDAAAMNATSWQLTAVPATLGRPVQAWPGRLTKANRLAVGLIKTHTLDALCIGPLDHETGDQIVRFPHYVLTAKATGRGSYARTTPDRYGFRRLLRPRAKQHHGYVTGDLVRAVVTAGKWAGTWTGRVSVRSSGQHRLATASCRFDCSHRNLRLLQRGDGYAYSSRRESAVSTSRKNS

SEQ ID NO: 21159 - protein, 320 aa, unidentified
  REGION 1..320: note = Human gut metagenome
RAPRFDNRIRTKRKGWLAPSVENRINAHLSRIEAVLRLLPITKITVETASFDMQRLKNPDISGKEYQEGEQLGFWNVREYVLFRDGHVCRHCHGRSKDPVLNVHHLESRRTGSDSPDNLITLCETCHKALHRGEITLKAKRGQSFRAQAFMGIMRREVLNRLKASYPELKVHETYGYLTKHARIANGIVKSHGADAFCIAGNLGAERLGEFFFQKQTRRNNRQIHKLSILKGGIRKRNQAPFEAKGFRLFDKVACQGEEGFIFGRRSSGSFDVRKLDGTRISAGISYKKLRLLEKRRTYLKEIRKEEALPPLPEGRSLRA

SEQ ID NO: 21160 - protein, 488 aa, unidentified
  REGION 1..488: note = Human gut metagenome
MNTVAVVTNTNKPLMPTSPYRARKLLSSGKAKIVKHRPFTILLVNRSDGDIQEIEYKSDTGYLHVGISVCSEKREFVREQRDLLPDEREKHNDRRKYRRTRRNRKRYRKARFDNRIGKIRKKEKNEHVWLPPSLEHKVDAQVQLFLRLYQVMPVKRAVFEMGQFDPALMKALEKGESAPQGIDYQIGERYQIATRRAAVFTRDRYACVFCGRGIKDHAILHVHHIGFWKQDRSNRLDNLATCCEQCHTSENHRPGGILYGVEPKLESLASATYMNVVRFELLQRLKEAAPDVEFHISYGAKTSVIRKQRSISKSHTNDAYCLGQYFPKLRAEEIGFQKIRRNDRILQKFYDAEYLDSRDGTTKKGKELTNGRISRNHKKDHENLHQYRGKKLSKGRVTIRRGRSSLKPGSLVRFDGEVLTVHGTHRSRRKNKAGHIKVSVNVEFERPSKTGRKSAALSKCQIISQSYNTGWKKIQLRKEEQGKIAAVG

SEQ ID NO: 21161 - protein, 457 aa, unidentified
  REGION 1..457: note = Human gut metagenome
VWLYQAVYNLGEGFLPSSEERTAFYWLLIYRKEHGIMQYVYVLNKHGEPLMPCSPGKARLLLKQQKACVVKRTPFTIKLLYGSAGYKQPITLGVDAGSKHVGLSASTEKRELYREEFTPRNDVVDLLSTRRQNRRSRRNRKTRYRAPRFDNRVHSKHKGWLAPSVEVKIQEHITVIKRICRILPITLVRVETAEFDTQRLKAMLKGKPLPVGTDYQLGEMYDEYNVRQYVLKRDNYTCQCCGAHPTEKKPVRLHVHHLESRHVGGNAPNNLITLCVACHKALHEGKITLDKGKKRGKPLRDAAFMGIMRNTLLARLKDELNIPVKQTYGYITKLLREKNKIPKSHVNDACCIAKAPNAKPCDTMLYTRALRHHNRQIHKAKILNGGIRKKNQAPYLVKGFRLWDKVRYNGEECFITGRRSSGYFALKKYDGTVISNSASYKKLMLLEAATNYITERS

SEQ ID NO: 21162 - protein, 512 aa, unidentified
  REGION 1..512: note = Human gut metagenome
MSTVYVLNKDGKPLMPTTRCGHIRYLLKEKKARVVASKPFTIQLLYETNDVVQPLYLGIDPGRTNIGVAAVKTDGTAVFTAHLETRNKEIPKLMQGRKKARRARRTNGRRCRRQRRAKANGTISKKCVKQTTAQNGSVSKRAKEIGVIKRHLPGCEKELLCIGIKNKEAKFSNRTRPEGWLTPTANQLLQTHINLVKKIRKFLPISDVVLEINKFAFMQLDNPNIQKWQYQQGPLYQKASLEEAVSEMQERHCLFCKKPIAHYHHVVPQSENGSNTIDNIVGLCTKHHDLVHKDTTWQKKLAKKKTGLNKKYGALSVLNQIIPALTKELSSLFPKHFFATNGKSTYDYRAAHGVSKDHWLDAYCIACSVLPNDVCDSGINNRVPYELKQFRRHDRRALHKANMSRVYTLNDKAVATNRHKAIKQTTDSLEEFRQNHPDDVYKLKVKEHHPEYRNPKRNFPGCVFLVGKHTHVVQGTSGSHNSKADGYYDTNGNSYSSGKCKFVAKNKGIVFA

SEQ ID NO: 21163 - protein, 281 aa, unidentified
  REGION 1..281: note = Human gut metagenome
MVYVLDKNGQPLMPTDRHRKVRLMLQSGQAKVIKRCPFTIQLNYDSGHQTQEISLGIDAGSKHIGVSATTKIKVLYEADVELRNDIVDLLSSRRELRRGRRNRKTRYRQAKFNNRRRGNGWLAPSIRQKIGTHLTVVENICKMLPISRIMVETASFDIQKIKNPDIQGAEYQQGDQLGFWNIREYVLFRDNHTCQCCKGKSKDKILNVHHIESRKTGGNAPNNLITLCEICHTGYHKGAIQLPKTVKRGMRFKDAAFMGIYAMGFLRSTKATVRTCWYPSA

SEQ ID NO: 21164 - protein, 424 aa, unidentified; identical to SEQ ID NO: 19651
  REGION 1..424: note = Human gut metagenome

SEQ ID NO: 21165 - protein, 406 aa, unidentified
  REGION 1..406: note = Human gut metagenome
RLLLKEKKAIVKRRTPFTIQLTIATGETKQPVSLGVDAGYKHVGLSASTEKAELYASEVELRQDITDLLSARRALRQSRRNRKTRYRAPRFDNRISTKRKGWLAPSVENRINAHLSRIEAVLRLLPVTKITVETASFDMQLLKNPDISGKEYQEGEQLGFGNIREYVLCRDGHVCQHCYGRSKDPVLNVHHLESRRTGGDSPDNLLTLCETCHKALHRGEITLKTKRGQSFRAETFMGIMRWEVLNRLKASHSELKVHNTYGYLTKHARIENGIAKSHGADAFCIAGNLGAERLGEFFFQKQTRRNNRQIHKLSILKGGIRKRNQAPFEVKGFRLFDRVACQGEESFIFGRRSSGFFDVRKLDGTRISAGISYKKLHLLEKRQTYLIEIRKEEAFPPLPEGRGLRA

SEQ ID NO: 21166 - protein, 420 aa, unidentified; identical to SEQ ID NO: 7612
  REGION 1..420: note = Human gut metagenome

SEQ ID NO: 21167 - protein, 430 aa, Moorena sp.; identical to SEQ ID NO: 7477

SEQ ID NO: 21168 - protein, 412 aa, Sharpea sp.; identical to SEQ ID NO: 6145

SEQ ID NO: 21169 - protein, 430 aa, unidentified
  REGION 1..430: note = Spirochaetales bacterium UBA4673
MVYVLNIHGQPLMPTTRYGKVRRMLKEKQAKVIKRCPFTIQLLYENPNFVQEVSLGVDAGSKTIGISATTPTSELYAAEVKLRTDVVTNLSSRRECRRSRRNRKTRYRQKRFDNRKVNKQNGWLAPSICNKIVTHLTTVDKITKILPVSEIHVEVASFDIQKIKNPDITGIEYQQGEQLDFWNVREYVLFRDQYTCMCCKGRSKDKILNVHHIESRKTGGDAPNNLITLCETCHNDYHNGTIQLPKTIKRGMSFRDATFMGVMRWAFYNKVKEIYEAKGIPVSLTYGYITKNLRIKNNLPKTHYVDARCISGHSNVEPLGYYFLQKKVRCHNRQIHKLKFMKGHYRKRNKADYEILGFKLFDKVLFQNIECFIFGRRSTGRMDLRKLDGTHINASANYKNLKLLENSKHILTERRTGRFLPAAINRVSTS

SEQ ID NO: 21170 - protein, 413 aa, unidentified
  REGION 1..413: note = Human gut metagenome
LKVFVLNMRGKPLMPCSPAKARHMLKAGKAVVVRRTPFTIKLTIATGETKQDVTLGVDAGARHVGISATTEKEEVFASEVALRQDITGLLADRLAFRRARRNRKTRYRAPRFNNRVRSKHKGWLAPSVENRIQAHISRIEAVCRLLPVTKIVIETASFDIQKIRNPEVEGTGYQQGDQLGFWNVREYVLFRDGHICQHCRGRSKDPILNVHHLESRKTGGDAPNNLITLCETCHKAYHAGKIKLKVKRGQSFRAEAFMGIMRWTLLDRVRKTHPKLPVENTYGYLTKHKRIALGLPKTHCADAFCIAGNLKALRRGDFLFQQQTRKHNRQIHKCSILKGGVRKLNQAPFLVKGFRLFDKVRIGGQIGFVFGRRVRGTFNIRRLDKTVIGTDINCKKLSLLETRKTFLTELRKE

SEQ ID NO: 21171 - protein, 330 aa, unidentified
  REGION 1..330: note = Human gut metagenome
VVFKGTIEQRQDVKHLMDVRRGHRRYHRYHKRYRQARFNNRSSSKRTCRLAPSIKQKKDAILRVLYQLNKWVNIQEYHLEDVCIDIRALTDDYKPYRWQYQKSNRLDENLRKATILRDECRCQECGKSNCVLEVHHIRARKYGGADTIGNLITLCSGCHQKTEGRERDFEDRYFNMIKSKPKRFDYAMHVMQGKTYLREKISELGSLHLTNGGETANKRIEWNMEKSHGNDAICVTDCIPDNCDVKEWIIKPMRRKSKAKTNNLLGIRHRDLVSYTYKNGETHTGYVTALYPEQLVLNFQSKTKHCKKVNARKCRLLWKFNKIYWLEQCV

SEQ ID NO: 21172 - protein, 429 aa, Parasutterella sp.; identical to SEQ ID NO: 4241

SEQ ID NO: 21173 - protein, 466 aa, unidentified
  REGION 1..466: note = Human gut metagenome
LSIKPLINIGEGVIYSSICTGLLLQTYQKRKEVPCMVYVLDINGQPLMPTTRHGKVRRLLNSHLAKVVKRCPFTIQLLYQSTKEIQPVSLGVDAGSKHIGMAATTEKKVVYQEELSPRNDVVKLLSLRRASRSSRRSRKTRYRKPKFNNRVHSKHKGWLAPSVEVKIQEHITAIKRICQILPISEIQVETAEFDIQRLKAMKEWKPLPVGTDYQLGEQYDFYNTRQYVLHRDGYTCQCCGTHDNNIKLHVHHIESRQTGGDAPSNLITLCEHCHKALHKGKLELPKGKKRGKTYRDATFMGIMRKTLLERLRKEVDVPVSGTYGYITKYLREKTDLEKSHINDAICISKYPYAKPLDTYYLTKVVRNHNRQIHKSNFSKGGIRKRNQAPYLIKGFRLFDKVLYQGKEYFIFGRRATGYFDIRTLDGTKVNKGSISYKKLRIQDTAKAYLKEARAIPHMNKFTCVLA

SEQ ID NO: 21174 - protein, 420 aa, unidentified; identical to SEQ ID NO: 5136
  REGION 1..420: note = Human gut metagenome

SEQ ID NO: 21175 - protein, 507 aa, unidentified
  REGION 1..507: note = Human gut metagenome
MSEYIYVIGMDGDPQMPTKRKRHVEKLLQTGRARVFRQVPYTIQLTYKNQPVLQPVTIAEDPGRSNIGMAVVSLSGELLSAAVVQTRNKEIVKLMEKRKQHRRASRNGERKARQRLAKKCHTMIKTGFLMRKLPMYGKDKRVRCNVIKNTEAKFCNRKREDGWLTPSAEHLVRTHINLIHKMQKFLPITDVAIEINRFAFLSLEDPSISGVDFQNGPLKGYDDLNAAVEDLQDGHCLMCNSPIEHRHHIVPRNMQGSNTIGNIAGLCCKCHERVHKDARFEDRLKKKKAGLDKRYAAVSALNQAIPFICKRLEQEFGKEHVHYCSGRDTAMARRSFGYHKTKEEQLHVVDAWCIAVLSLRQIPEKAPEFDHVHEILQFRRQDRSRIKAQTSRAYYHEGKKIAKNHKKAEGQREDSLQEWRKRQAERYGEEQTRKMISQLEVKESIRRYNRLDRLMPGAVFYYQGVRYVMRGQHSNGQYLQAVGMGDKDFPAKKCKIVIHNQGLVFVS

SEQ ID NO: 21176 - protein, 430 aa, unidentified
  REGION 1..430: note = Spirochaetales bacterium UBA1631
MVYVFNIHGQPLMPTTRYGKVRRMLKEKQAKVIKRCPFTIQLLYENPNFVQEVSLGVDAGSKTIGISATTPTSELYAAEVKLRTDVVTNLSSRHECRRSRRNRKTRYRQKRFDNRKVNKQNGWLAPSICNKIVTHLTTVDKITKILPVSEIHVEVASFDIQKIKNPDITGIEYQQGEQLDFWNVREYVLFRDQYTCMCCKGRSKDKILNVHHIESRKTGGDAPNNLITLCETCHNDYHNGTIQLPKTIKRGMSFRDATFMGVMRWAFYNKVKEIYEAKGIPVSLTYGYITKNLRIKNNLPKTHYVDARCISGHSNVEPLGYYFLQKKVRCHNRQIHKLKFMKGHYRKRNKADYEILGFKLFDKVLFQNIECFIFGRRSTGRMDLRKLDGTHINASANYKNLKLLENSKHILTERRTGRFLPVASNRVSTS

SEQ ID NO: 21177 - protein, 424 aa, Moorena sp.; identical to SEQ ID NO: 19896

SEQ ID NO: 21178 - protein, 502 aa, unidentified; identical to SEQ ID NO: 6341
  REGION 1..502: note = Human gut metagenome

SEQ ID NO: 21179 - protein, 386 aa, unidentified; identical to SEQ ID NO: 6902
  REGION 1..386: note = Human gut metagenome

SEQ ID NO: 21180 - protein, 470 aa, unidentified; identical to SEQ ID NO: 2825
  REGION 1..470: note = Human gut metagenome

SEQ ID NO: 21181 - protein, 421 aa, unidentified
  REGION 1..421: note = Human gut metagenome
MRGRPLMPCSPAKARHLLKAGKAVVRRRTPFTIQLRIATGETKQSVTLGVDAGAKHVGLSSATEKEEVFAPEVELRQDITGLLAARLSLRRERRQRKTRYRAPRFLNRVRSKHNGWLPPSVENRIQAHLSRIDAICGLLPVTKIVIETASFDIQKIKHPDVEGTDYQQGDQLGFWNVREYVLFRDGHVCQHCHGHAKDKILNVHHLESRQTGGDAPNNLITLCERCHKACHAGKIKLKVKRGQSFREEAFIGIMRWTLLDRVRKAHPGLPVENTYGYLTKNTRITLGLPKAHCVDAYCIAGNLKAVRRGVYLHQRQVRKHNRQIHKCTVLSKTLKDGTKIGYRKLNQTPHLVKNFRLFDKVRCLGQTGFIFGRRSSGYFDVRRLDGVKLSSGISYRKLTLLEKRSTYLTELRKEDGASSPV

SEQ ID NO: 21182 - protein, 473 aa, unidentified; identical to SEQ ID NO: 9549
  REGION 1..473: note = Synthetic metagenome

SEQ ID NO: 21183 - protein, 512 aa, unidentified; identical to SEQ ID NO: 5811
  REGION 1..512: note = Human gut metagenome

SEQ ID NO: 21184 - protein, 477 aa, Lactobacillus sp.; identical to SEQ ID NO: 15275

SEQ ID NO: 21185 - protein, 421 aa, Moorena sp.; identical to SEQ ID NO: 2610

SEQ ID NO: 21186 - protein, 518 aa, unidentified
  REGION 1..518: note = Human gut metagenome
MKEVANMSTVYVLNKDGKPLMPTTRGGHVRHLLKEQKARVVRTKPFTIQLLYGTDDVVQPLYLGIDPGRTNIGVAVVRTNGTVVFTAHLETRNKEIPKLMKKRKESRRARRTNGRRCRRQRRAKTNGTISKKCVKQDTAQSKNLSKCAKEIGVIKRHLPGCQKEILCIGIKNKEAKFNNRTRPGEWLTPTANQLLQTHINLVKKIQKFLPISDVVLEVNKFAFMQLDNPNIQKWQYQQGPLYQKGSLENAVSEMQEHHCLFCEKPIDHYHHVVPKSENGSNTIDNIVGLCAEHHNLVHKDAAWQKKLAKEKVGLNKKYGALSVLNQIIPALTKKLSVLFPRHFFATTGKSTHDYREAHGVSKDHWLDAYCIACSVLPSKVCDSNINNHVPYELKQFRRHDRRVLHKANMSRVYTLNGKTVATNRHKAIKQTTDSLKEFRQSHPDDVYKLKVKEHHPTYRNMNRNYPGSVFLVDGQVHVMQGVSGSHNGKADGYYDTNSNAYPYYKCKFVAKNEGIIFA

SEQ ID NO: 21187 - protein, 239 aa, unidentified
  REGION 1..239: note = Human gut metagenome
MPNKVYVINKHGRPLMPCSPAKARHLLDAGKAKVKKRTPFTIQLLFGSTGYTQEVILGVDAGSKTIGLSASAETKELFSAEVKPRNDVVDLLSTRREFRRARRNRKTRYRKPRFDNRVRSKRKGWLAPSVEVKIQEHITAIRRVCGILPVSKVVVETAEFDLQLLKAIADGKPVPQGEGYQKGEMYGHYNVRQYVLWRDNYTCQCCGTHPSKKKEVRLHVHHLESRKVGGDAPDNQVTL

SEQ ID NO: 21188 - protein, 426 aa, unidentified
  REGION 1..426: note = Bioreactor metagenome
MVFVLDANKKPLSPCHEAVARKLLKQGKAAIFRRYPFTIILKKAVEDTDNKQEYRLKIDYGSKHTGLAILQNNNVIWLGQIDHRTDIKKKLDARRMYRHNRRNRKTRYRKPRFLNRRKIEGWIPPSLESRINNIKTWVNRLQKLVSLTHISYENVKFDTQLMRNPEISGIEYQQGTLQGYEVKEYLLEKFGRKCCYCGKENTPLEVEHMIPKSRGGTDRIDNLCLACRECNQKKDNMTAEEFGYPEIQRQIKQTLKDTSVVNSTRWKVYNVLMQTGLPVECGTGALTKMNRIKLGLPKEHYFDACCVGQSTPDKLYFKTKNVLYIKAKGRGSHCRTNVDSHGFPRGYLARRKYFFGFQTGDMVKAVIPKGKYKGIWYGEVACRKRGDFDIKNKDGQRVVQSANYKYFSIIQRFNGYSYINFYVESL

SEQ ID NO: 21189 - protein, 279 aa, unidentified; identical to SEQ ID NO: 5082
  REGION 1..279: note = Human gut metagenome

SEQ ID NO: 21190 - protein, 512 aa, unidentified; identical to SEQ ID NO: 11362
  REGION 1..512: note = Human gut metagenome

SEQ ID NO: 21191 - protein, 452 aa, Moorena sp.
MTSLYIIVEVTITGASPEEVFMTTYNSVFVLDTTKKPLTPCQPARARALLRDGKAAVWRTVPFTIILKVAMPDAIVKPISCKIDPGSKQTGLALVDSDGRVVFAAVLEHRGNAIKAVLESRRSIRRGRRARNTRYRQARFLNRIRPEGWLPPSLQHRVETTLTWVNRFRRLCGIVEIAVERVKFDMQLMRNPEISGVEYQQGTLLGFTVREYLLEKWGRKCAYCAVENVPMQIEHIHPKANGGSNAVSNLALACEPCNKKKGTLDIKVFLKNKPELLKKVVAQAKRSLSDAAAMNATRNKLFVELLNTGLPVETGTGAQTKFNRTRLDYPKEHWIDAACVGESGATVTLNPELKPLLIKATGHGTRQMCTTDKFGFPRRAAKGGKAVNSVSTGDYARIVQPKGKYIGSYVGRISSINTTTNFVTMKVFGKTISFNSKLVTIIQKADGYAYVH

SEQ ID NO: 21192 - protein, 408 aa, unidentified
  REGION 1..408: note = Human gut metagenome
ICEDVGYNYIGISVKSQSHEYVSAQYDTLQDEKSCHDACRRMRRTRRNRLRYRQKRFDNRKRDKGWLAPSLKHKKELNVNVIKMYCEVVPITHATVEVGSFDTMLVKAIEEGKATPEGADYQKGPRYNLATLREAVFYRDNYTCQVCGREASEGAILHVHHMFYWKGRHDNSLSELITVCEKCHTPANHQKGGKLYGFGEDIKFANLSGAAFMNTVRWQIVNELYAAFGKPFVTFTYGAMTKEKRIALHLEKSHNNDAYAMGEFHPNCRCTFEHYEKVRRNNRILEKFYDSRYIDIRTGEIATGKELFNGRINRSHKKDSENLHKYRGKRIRKGYRALRRKKVALNPGDLVSLNGEILTVHGTHTKKNGSVNVEFKTPSKSGKKSTSLKKLKIIKTISPMRSAWDKVS

SEQ ID NO: 21193 - protein, 326 aa, unidentified
  REGION 1..326: note = Candidatus Thiomargarita nelsonii
MPCHPARARKFLKKGKAAVYRRYPFTMTRRVGGDLQPIEVKFDPGSRTTGIALVGHFDRGKEVIWAGNLNHRGAQVKKDLNSRRAIRRSRRNRKTRYRQARFLNRLRPKCWLPPSLRSRVDNVKNWMHKLALLAPLTQIAVETVRFDTQKLQKPEIEGIEYQQGELAGYELREYLLEKWDRQCAYCGAKNVPLEVEHIQARSKGGSDRVSNLTLACTPCNQEKGNKDIKDFLKRKKKRLKKIQAQSKAPLKDAAAVNATRYATGNVLKSFGLPITLESGGRTKFNRIKLGYSKDHWIDAACVGESGSHVVIPKAITPLIISAKGRD

SEQ ID NO: 21194 - protein, 493 aa, unidentified; identical to SEQ ID NO: 3781
  REGION 1..493: note = Human gut metagenome

SEQ ID NO: 21195 - protein, 499 aa, unidentified; identical to SEQ ID NO: 3817
  REGION 1..499: note = Human gut metagenome

SEQ ID NO: 21196 - protein, 415 aa, unidentified; identical to SEQ ID NO: 3018
  REGION 1..415: note = Human gut metagenome

SEQ ID NO: 21197 - protein, 473 aa, unidentified
  REGION 1..473: note = Sponge metagenome
VSLEERENYMKRMNDPNNQQTVPVLDNAGRPLMPTKPSRARRWMRDGKADKCWVKGVFCVQILDVHADDPEVEVNGVQLNIDPGAKATGMAVVSDGGQGRKAHALIELRHRGSRVKKKMDRRHAFRRGRRSRLRNRQPRFDNRTRPDGWLPPSMLTRLANTETWIRRLVAIFPINFARVETARFDTQLMQDAEIGGKEYQQGDLLGWQLRSYVFHRDGRKCAYCGDTKAERYETDHIVPRSRGGTNRVSNLVVSCQDCNIAKGNQPVEEFLRHKPARLTKVRGVMRHMLADASQMNIIVPALLRRLEAIDMPVSTHDAYTTSWTRRRLGVPKTHVNDALCIGAPDALGRLPERKTVIRSTGRGDRQMLRPSDRHGNPRGQGYRDYCALPRQRQGYTRCPGHRERRKQLRSIASGDLVRLTHRRHGVLQRYATLDKRKNRVGIQHESRQVSVMATDAVLLARNHGYRVSTESNE

SEQ ID NO: 21198 - protein, 428 aa, unidentified; identical to SEQ ID NO: 8980
  REGION 1..428: note = Human gut metagenome

SEQ ID NO: 21199 - protein, 443 aa, Anoxybacillus sp.; identical to SEQ ID NO: 2800

SEQ ID NO: 21200 - protein, 420 aa, unidentified
  REGION 1..420: note = Human gut metagenome
MQYVYVLSKHGEPMMPCSPGKARLLLKQQKACVVRRTPFTIKLLYGSAGYKQPITLGVDAGSKHVGLSASTEKRELYREEFAPRNDVVELLSTRRQNRRSRRNRKTRYRAPRFDNRVHSKHKGWLAPSVEVKIQEHITIIKRICKILPISLVRVETAEFDTQRLKAMLAGKPLPVGTDYQLGEMYDEYNVRQYVLKRDNYTCQCCGAHTTAKKLVKLHVHHLESRKTGGNAPSNLITLCTTCHKNLHKGKVTLDGKERGKPLRDAAFMGIMRKTLMARLKKELPIPVQGTYGYITKMRREQNDIKKSHTNDARCISKHPLAEPCSVCYRTKAIRHHNRQTHKANFSKKGIRKRSQMPYLVEGYRLWDKVLYKEQEYFVSGRRSSGSFTLKKLDGTSVSKGVTFKKLRLLEPATNYLIERM

SEQ ID NO: 21201 - protein, 470 aa, unidentified; identical to SEQ ID NO: 5320
  REGION 1..470: note = Human gut metagenome

SEQ ID NO: 21202 - protein, 408 aa, unidentified; identical to SEQ ID NO: 11282
  REGION 1..408: note = metagenome

SEQ ID NO: 21203 - protein, 408 aa, unidentified
  REGION 1..408: note = Human gut metagenome
MVYVQDINGKPMMPTTRHGKVRRLLKDKKAVVVNLCPFTIKLMYVTSDYKQEIVLGVDAGTKHVGLSATTKSKELYSSEVILRNDIVDLLSTRRELRRSRRNRLRYRKPRFDNRIKSKRPGWVAPSVKYKVDAHIRVIDNVCSILPISRIVIEVAQFDTQKINNPNISGKEYQEGDQLGFWNVREYVLARDGHKCQHCKGKSKDPVLNVHHIESRKTGGDSPSNLITLCETCHKEYHKGNIDLKIKRGSSLRDAAVMGIMKWRLYEELKSKYDNISMTFGYVTKYNRIKHGIEKSHVFDAFVISKNFDAIRLGYYYKVRLVRRHNRQIHKQKIPKGGIKRPNQSPFEVFGFRLFDRVMFENSYYFIFARRKTGSFNIRDIDGKNQRDITYKKLKLSRCKRFMVQKEMD

SEQ ID NO: 21204 - protein, 427 aa, Desulfobacter sp.
LNVFVLDTNKKPQNPVHPAKARLLLSEEKAAVFRQYPFTIILKEEIGVNPQALRVKIDPGSKTSGIAVTDDATGEIVFAMQLEHRGQQIKNDLESRRAIRRSRRNRKTRYRKPRFENRIRPEGWLAPSLKSRVHNIETWVNRLCRFSNIQAISMELVRFDMQKILNPEISGVEYQQGALSGYEVREYLLEKWGRTCAYCGKTNLPLEIEHILPKSKGGSNRVSNLTLACTECNQKKGNRPIDIFLSKRPELLKRIQARAKAPLKDAAAVNSTRWDLFRTLKETGLPVEIGSGGLTKFNRTIRGLSKTHWLDAACVGKSTPEKLFQTDKAVLIVKANGHGSRQMCRVNTFGFPRTKAKSRKKKVNGFQTGDIAKAIVTSGKKVGTYIGRVAVRKSGFFNIKTRETTIQGINWKYCHMLHMSDGYSYNI

SEQ ID NO: 21205 - protein, 421 aa, unidentified; identical to SEQ ID NO: 2846
  REGION 1..421: note = Human gut metagenome

SEQ ID NO: 21206 - protein, 420 aa, Petrotoga sp.; identical to SEQ ID NO: 11467

SEQ ID NO: 21207 - protein, 470 aa, unidentified
  REGION 1..470: note = Human gut metagenome
MSVFVVGLNGCRLMPTSEREARLLLKHGKASVYRKVPFTIKLNYKTGSTTQPGYLGIDTGSQHIGVSVVREDGTVLHKEEIGLRDSMSKRKLMQSRASSRRGRRHRKTRYRHPKWRLKAKRVYYETPDRKGRHWKKQKITFASKRPQGWLPPSLQSKTDHHIQWIKKLQDLLPDGYRLSIELGRFDPARMKDTEIHGDLYQKGPQYDYENVRAYVLDRDRYTCQVCGKKGGKLHIHHILYRSHGATDNPQYMATICSDCHSTENHQPGGILYQWMQEQKKFTRGLRDATFMNILRKRLMKAFPKATFTYGNITKADREKLKIPKSHGNDATAIAIVKTGIMTVKDNEPVIYIQQVRRKKRSLHEETPRKGRKEPNRKASRYNKNTKAVTVTKRKNKKRISITGCLFDRVELNGKKGWISGFTDKSCYIKDENDQYIRISPKYKQVSLSKLKILHHCGNWVIGARRSLGKG

SEQ ID NO: 21208 - protein, 443 aa, unidentified
  REGION 1..443: note = Human gut metagenome
LTKDENRPSGRTTGLRAEQAEPAGIRKGDTLKVFVLNMRSKPLMPCSPAKARHMLKAGKAVVVRRTPFTIKLTIATGETKQDVTLGVDAGARHVGISATTEKEEVFASEVALRQDITGLLADRLAFRRARRNRKTRYRAPRFNNRVRSKHKGWLAPSVENRIQAHMSRIEAVCRLLPVTKIVIETASFDIQKIRNPEVEGTGYQQGDQLGFWNVREYVLFRDGHVCQHCHGRSRDKILNVHHLESRKTGGDAPNNLITLCETCHKAYHAGKIKLKVKRGQSFRAEAFMGIMRWTLLDRVRKTHPKLPVENTYGYLTKHKRIALGLPKTHCADAFCIAGNLKALRRGDFLFQQQTRKHNRQIHKCSILKGGVRKLNQAPFLVKGFRLFDKVRIGGQIGFVFGRRVRGTFNIRRLDKTVIGTDINCKKLSLLETRKTFLTELRKE

SEQ ID NO: 21209 - protein, 506 aa, unidentified
  REGION 1..506: note = Human gut metagenome
MVAVLSNVGKPMMPTIEYKARKLIEKGRTIPYQYKPMFTIMILDRSGGYTQPIELKEDTGYEHIGISVCSQKHEYERKEVITLLDEPEKHHDALVYRRTRRNRLGYRPPRFDNRKRKNNWIPPSLQHKIDIHLYWFNQYTEVLPITDVVFEIGTFDTQRLNAIEKGEKRPYGDDYQKGEQADFYTLRDAVFTRDDYTCIVCGKDIQDGAVLRTHHIGYRYGDRSNRMSNLVTVCDHCHTTKNHQEGGALYNLKSPTKKKANAAFMNVVRQRIIDGAKKSHPEINISSAFGSETKMSRKNLQIEKSHTNDAYAMGAFHPKHRCKEILYQKIRRNNRILSRFYDAKYIDRRDGSTKTGKQLSSGRTNRNHKLDSENFMVCRGKKIQKGRTATRQQSYEFKTKDIVFYQGKRYVVKGTNNKGQNVQLYLNITADLKDLTIKTKNKRKTADLNCIEIGDKVFTEFHGKKKVFTVKNIDSITNQVSLQVDLSTKPSELKLVKYNNGYKQIK

SEQ ID NO: 21210 - protein, 515 aa, unidentified; identical to SEQ ID NO: 17815
  REGION 1..515: note = Human gut metagenome

SEQ ID NO: 21211 - protein, 411 aa, unidentified; identical to SEQ ID NO: 9890
  REGION 1..411: note = Human gut metagenome

SEQ ID NO: 21212 - protein, 374 aa, unidentified; identical to SEQ ID NO: 12633
  REGION 1..374: note = Human gut metagenome

SEQ ID NO: 21213 - protein, 421 aa, unidentified; identical to SEQ ID NO: 4235
  REGION 1..421: note = Human gut metagenome

SEQ ID NO: 21214 - protein, 406 aa, unidentified
  REGION 1..406: note = Human gut metagenome
LLDAGKAKIKKRTPFTIQLVYGSSGYTQEVILGVDAGSKTIGMSVSTTKEELLSAEVKPRNDVVDLQSTRREFRRARRNRKTRYRKPRFDNRVRSKHKGWLAPSVEVKIQEHITSIKRVCRILPVSEVVIETAEFDLQLLKAIEEGKPVPQGEDYQKGEMCGHYNVRQYVLWRDGYTCQCCGAHATKKKEVWLHVHHLESRKVGGNAPDNQVTLCESCHEKLHKGLITEKDFKKRKRRSTRDATFMGIMRKTLMQRLCSELPIPVIETRGYITKATREKLLVLPKSHINDALAIAQGKQGFNVGYLPGILQIDKIYTICPVRHHNRQLHKATILKGGIRKPNQAEKYVFGYRLFDKVQFNGQDCFIWRRRTTGIFTIKTINGKMIKDGISFKKLKLLEKSTSYLIA

SEQ ID NO: 21215 - protein, 427 aa, Moorena sp.
MSKVFVLDTKKRPLDPIHSAQTRQLLRNKKAAIFRQFPFTIILKKSRPDSPVSSLRLKIDPGAKFTGMALVNDSNGEVVFAAELKHRGFAIRDALTSRRQLRRSRRARKTRYRQPRFLNRTRPEGWLAPSLQSRVENIKTWVERLRKLSPIQAISQELVRFDMQLMVNPDIQGKEYQQGTLAGYETRQFLLEKWGRQCAYCGVKDVPFQVEHIHPRVKGGSNSITNLTLSCEKCNTKKGTKDIKDFLKKDPLRLEKILKQAKRPLADAAAVNTTRTALLKVLKATGLPVETGSGGLTKFNRSEQNLEKTHWIDAACVGQSTPILNIKGVKLLLITANGHGSRQSCRTDKYGFPSRHVPREKIHFGFQTGDIAKAVVTAGKKIGTYVGKVAIRSTGSFNISTKNGLIQGISHKFCKRIHAKDGYSYAV

SEQ ID NO: 21216 - protein, 384 aa, Moorena sp.
MLAYVLNKHGKPLMPCNSRKARLLLKTGNAKVVRIKPFTIRMVHGSSGYTQTVNLGVDAGSKVVGISATTDKKELYSSECKLRTDVTDNLSTRRAFRRARRNRNTRYRPPRFLNRIKSKKKGWLAPTITQKINTHEQLIKQVHNILPARPAGGPISKIIVEVASFDIQKIKNPEISGTEYQQGEQLDFWNVREYVLFRDNHSCQYCKGKSKDKILNVHHIESRKTGGNAPNNLITLCETCHNKHHAKQIKLKVKRGASFRDAAFMTIMRWAFYDRLKEKYSNVSMTYGYLTKNTRISNKLEKSHAIDARCISGNPTAKPSKNAYTQKAIRTKIGNCTRQQSTRAVQENQTRQPSMFLATSFLIMCDTKSRNVLFSAEEQADILI

SEQ ID NO: 21217 - protein, 406 aa, unidentified; identical to SEQ ID NO: 6079
  REGION 1..406: note = Human gut metagenome

SEQ ID NO: 21218 - protein, 315 aa, unidentified
  REGION 1..315: note = Human gut metagenome
LRVFILNKRGKPLMPCSPAKARLLLKEKKAIVVRRTPFTIQLTIATGESKQPVSLGVDAGYKHVGLSASTEKAELYASEVELRQDITDLLSARRALRQSRRNRKTRYRAPRFDNRIRTKRKGWLAPSVENRINAHLSRIETVIRLLPVTKISVETTSFDMQLLKNSDIAGKEYQESEQLGFWNVREYVLFRDGHVCQHCHGRSKDPVLNVHHLESRRTGGDSPGNLITLCETCHKELHRGEITLKAKRGQSFRAETFMGIMRWEVLDRLKASHPKLEVQNTYGYRTKHARIVNGIAKSHCADAFCIAGNLGAERL

SEQ ID NO: 21219 - protein, 447 aa, Moorena sp.
VAGIKTSLNSPDASLTARGHAGQNLRVSVVYVLNKRGKPLMPCSPGKAKVLLKESKAKVAKRTPFTIQLTTATGETRQLITLGVDSGYSSLGLSAVSQDKELYRAQVRLREDLVKLNSERKGYRRARRHRKTWYRSPRFLNRKKPEGWLAPSIQHKLDSHIKLINKVKEILPISKISIEVASFDIQKIKNPDIDGKGYQSGKQAGFWNVREYVFHRDNHKCQHCKGKSKSSVLEIHHLKSRQTGGDRPENLITLCSTCHDKTSRGALELKAKPSKGFKAETFMSTVRWKLINKLRELGNVVTHTYGYITKQKRRELKLPKSHTSDAFVIADGTTQKRTTSEDFIKQVRKCNRKLFKGDRSHIRNTTERFVCGFQRFDKVLCNGVECFIFGRRKTGYFDLRKLDGTNIHSSAKHTKLTLLESAKTLLTERKPAFLPMPEGRGFRAGGF

SEQ ID NO: 21220 - protein, 445 aa, Allochromatium sp.
MFECEYMSVFVLNKQKRPLMPCSEKRARLLLERGRAVVVRLVPFTIRLKDRIGGVLQPLRLKLDPGSKTTGIALVREVVRRDESVVWLAELTHRGYQISEALRARSAMRRRRRSANLRYRAPRFLNRTKPKGWLAPSLRHRVETTINWVKRLRRLAPITEITQELVRFDLQAMQHPEISGIEYQQGELAGYEVREYLLEKWQRTCAYCGAQQVPLQIEHIRPKSAGGSNRLSNLTLACAPCNHKKGAQSIEAFLKHKLELLKQIQAQAQAPLKDAAAVNTTRWALFNALKATGLQVKTGSGGQTKYNRQRLGIPKTHALDAACVGKLDALHNWQIPTLAIKAMGRGSYQRTRLNRFGFPRGHLMRHKRIHGFQTGDRVIAHIPSGKKAGVHVGRVAVRTSGSFNIQTATGVIQGIAHRHCSVLQRADGYGYSFNLTQPEEARLAA

SEQ ID NO: 21221 - protein, 419 aa, unidentified
  REGION 1..419: note = Human gut metagenome
MVYVISQDSKPLMPCSNVIARLLLKQGKAKVKRRESFTIKLTCETTNYTQDLTLGVDTGSGTIGTAVSKNNGDIVYMAEVVVRNDITDKMTQRAKYRRNRRNRKTRYRKARWLNRANSIRNDRFSPTMQSKLHSHIKEIEYIKSILPVTEMVFETGQFDTHLMKNPSLINPKVKHWGYQKGTNYGFENTKAFVLNRDNYTCQYCKGKHKDSKLEIHHIVFRSQGGSDEESNLITLCHTCHKDLHSGKINTKLSGKIKGNLKYATQMNSIRKQLFRLYPNAIETFGYVTKANRLHLGVDKEHYYDACTIATQGNAFNVKSNLYKKKCVSDGDFQQTKGIRSEQPIVTDKICGFRKYDKVKYFGREYFIKGRMSTGYAILMNINGEKADFSYLPRGFKTPKLSNCKRITARTSQMVQAVAI

SEQ ID NO: 21222 - protein, 466 aa, unidentified; identical to SEQ ID NO: 2459
  REGION 1..466: note = Human gut metagenome

SEQ ID NO: 21223 - protein, 464 aa, unidentified; identical to SEQ ID NO: 6330
  REGION 1..464: note = Human gut metagenome

SEQ ID NO: 21224 - protein, 416 aa, unidentified
  REGION 1..416: note = Human gut metagenome
MVYVLDKNGQTLMPTDRHRKVRLMLQSGQAKVIKRCPFTIQLNYDSGHQTQEISLGIDAGSKHIGVSTTTKIKVLYEVDVELRNDIVDLLSSRRELRRGRRNRKTRYRQAKFNNRRRGNGWLAPSIRQKIGTHLTVVENICKMLPISRIMVETASFDIQKIKNPDIQGAEYQQGDQLEFWNVREYVLFRDGHTCQCCKGKSKDKILNVHHIESRKTGGNAPNNLITLCETCHTGYHKGTVQLPKAIKRGMRFKDAAFMGIMRWAFYEALKQQYEPVGTPVHNTYGYITKHTRIAYNLPKEHYVDARCISGNPEASSNGEYYYQKKVRCHNRQIHKLTVLKGGIRKQNQATYLVKGYRLFDKVSYQGKGYFVFGRRQSGFFDIRTLSGEKVNKGSLSCKKLKFIATRTYYLTERRAV

SEQ ID NO: 21225 - protein, 459 aa, unidentified; identical to SEQ ID NO: 3944
  REGION 1..459: note = Human gut metagenome

SEQ ID NO: 21226 - protein, 440 aa, unidentified; identical to SEQ ID NO: 9130
  REGION 1..440: note = Human gut metagenome

SEQ ID NO: 21227 - protein, 442 aa, unidentified; identical to SEQ ID NO: 4522
  REGION 1..442: note = Human gut metagenome

SEQ ID NO: 21228 - protein, 431 aa, unidentified; identical to SEQ ID NO: 4306
  REGION 1..431: note = Human gut metagenome

SEQ ID NO: 21229 - protein, 419 aa, unidentified
  REGION 1..419: note = Human gut metagenome
MVYVISQDGKPLMPCSNPIARLLLKQGKAKAKCREPFTIKLIYETTDYTQDLTLGIDTGSGTIGTAVSKNNGDIVYMSEVVVRNDITDKMAQRAKYRRNRRNRKTRYRKARWLNRSNSIKKDRFSPTMQSKLHSHVREIEYIQSILPITEMVFETGQFDMHLMKNPSLANPKVRHWGYHKGTNYGFENTKAMVLNRDNYTCQCCKGKHKDSKLEVHHVIFRSQGGSNEESNLITLCHTCHKNLHSGKVNLKLKGKMKGNLKYATQMNSICKQLFRLYPNAIETFGYVTKANRLHLGVDKEHYYDACTIATQGNAFNIKSNLYKKKCVSDGDFQKTKGIRSEQSIVTDKIWGFRKFDKVCYFGNDYFIKGRMSTGYAILMDIDGNKIDFSTMPRGYKTPKLSNCKRITARSTVMMQVEVV

SEQ ID NO: 21230 - protein, 456 aa, unidentified; identical to SEQ ID NO: 17536
  REGION 1..456: note = Human gut metagenome

SEQ ID NO: 21231 - protein, 518 aa, Anaerostipes sp.; identical to SEQ ID NO: 4915

SEQ ID NO: 21232 - protein, 455 aa, unidentified
  REGION 1..455: note = metagenome
VWLSKPLATLGKDFDSSLEENSFFLVVNLLGKERDIMYVYVINKHGEPLMPCSSRKARTLLNNKKACVVKRTPFTIKLLHGSAGYKQPITLGVDAGSKHIGLSVSTETHEIYREEFAPRNDVVDLLSTRREFRRARRNRKTRHRAPRFNNRVHSKHKGWLAPSVEVKIQEHITVIKHVCQIMPISLVRVETAEFDTQRLKAMIAGKPLPVGTDYQLGEMYDEYNVRQYVLKRDNYTCQCCGAHATKTKQVKLHVHHLESRKVGGNAPNNLITLCPICHKAIHEGKKALGKKKRGKPLRDAAFMGIMRKTLLARLREELSIPVQQTYGYVTKMLREKNNLLKSHMNDALCIAKHPKAAPCENCYRSKAVRHHNRQIHKATILKGGIRKNNQAPYIVKGFRLWDKVLYNRQECFISGRRATGYFALKKLDGTVVTTGASYKKLRLLETTKNYLRERM

SEQ ID NO: 21233 - protein, 412 aa, Oribacterium sp.; identical to SEQ ID NO: 9063

SEQ ID NO: 21234 - protein, 395 aa, Moorena sp.; identical to SEQ ID NO: 14042

SEQ ID NO: 21235 - protein, 493 aa, unidentified; identical to SEQ ID NO: 2644
  REGION 1..493: note = Human gut metagenome

SEQ ID NO: 21236 - protein, 432 aa, Moorena sp.
MLNKNSVFVLNNNKVPCDPIHPAKARKLLSEGKAAVFRNYPFTIILKSESKPTKNYRIKVDPGAKFTGLALLSNSNIIWCAELEHRGFQISESLIKRRQVRRFRRNRKTRYRQPRFLNRTRPNGWLPPSLISRVQNIKSWVDKLIKLVPVSAISMELVKFDTQKIVNPEIQGTEYQKGELFSYEVREYLLEKFNRTCVYCGTKEAVFNLDHFHPKSRGGSDKVSNLVLSCFQCNQNKRARLPTEFLSDRPKLLALINKQRKLPLADAAAVNATRWKLKLVLESTGLEIETGSGGLTKYNRKRNGISKSHWTDAACVGTSTPDSLNISNYQPLIIKAMGRGNRQMVKPDKYGFPKRKPKLRQKSFYGFQTGDIVKAVVTKGKKIGTYVGRVAVRKTGNFNIKTQTETVQGISYKYCKIIHKSDGYIYSFGEER

SEQ ID NO: 21237 - protein, 512 aa, unidentified; identical to SEQ ID NO: 5811
  REGION 1..512: note = Human gut metagenome

SEQ ID NO: 21238 - protein, 199 aa, unidentified
  REGION 1..199: note = Human gut metagenome
PDNHGTLCDDCHKKFHLGIITDVKLKTRRRQSTRDAAFMGIMRKTLMWRLRTELFIPVAETKGYITKATREKLLVLPKSHTRDALAIAQGRHGFGIKEYAYVEPANHIYTVRPVRHHNRQLHKASILKGGIRKRNQASKYVFGFRLYDKVLYQGKACFVWGRRTRGTFLLRTIDGIKVKDGVSYRNLTLLERSSNYLIA

SEQ ID NO: 21239 - protein, 512 aa, unidentified
  REGION 1..512: note = Human gut metagenome
MSTVYVLNKDGKPLMPTTRGGHVRHLLKEQKARVVRTKPFTIQLLYETDDVVQPLYLGIDPGRTNIGVAVVKTDGTAVFTAHLETRNKEIPKLMQGRKKARRARRTNGRRCRRQRRAKANGTISKKCVKQTTAQNGSVSKRAKEIGVIKRHLPGCEKEVLCIGIKNKEAKFSNRVRPEGWLTPTANQLLQTHINLVKKIQKFLPISDVVLEVNKFAFMQLDNPNIQKWQYQQGPLYQKASFEEAVSEMQEHHCLFCKNTIDHYHHVVPQSENGSNTIGNIVGLCTKHHDLVHKDTTWQKKLAKKKTGLNKKYGALSVLNQIIPALTKELSSLFSKHFFATNGKSTYDYRAAHGVSKDHWLDAYCIACSVLPNDVCDSDINNRVPYELKQFRRHDRRALHKENMSRVYTLNGKSVATNRHKAIKQTTDSLEEFRQCQPDDVCKLKVKEHHPEYRNPKRNFPGCVFLVGKHTHVIQGTSGSHNGKADGYYDTNGNSYSSGKCKFVAKNEGIVFT

SEQ ID NO: 21240 - protein, 545 aa, unidentified
  REGION 1..545: note = Human gut metagenome
LSRTIPLTANTQPRETQPPVSAGETYSKRRVAYMPTVYVLNKDGKPLMPTTRCMHVRHLLKNGKARVVKSKPFTIQLLYETDDVVQPLYLGIDPGRTNIGVAVVKADGAAVFTAHLETRNKEVPKLMKKRKESRCARRTNGRRCRRQRRAKTNGTISKKCVKQTTAQNGSVSKRAKEIGVIKRHLPGCEKDVLCIGIKNKEAKFTNRARPEGWLTPTANQLLQTHINLVKKIQKFLPISDVVLEVNKFAFMQLDNPNIQKWQYQQGPLYQKGSLENAVSEMQEHHCLFCEKPIEHYHHVVPKSENGSNTIANIVGLCTEHHNLVHKDATWQKKLVKEKVGLVKKYSALSVLNQIIPALTKEMNSLFPKHFFVTNGKSTYDYRTAHGVSKDHWLDAYCIACSVLPNDVCDSNINSHVPYELKQFRRHDRRVLHKANMSRVYTLNGKTVATNRHKAIKQTTDSLEEFRQSHPGDVCKLKVKEHHPAYRNLNRNYPGSVFLVDGQVHVMQGVSGSHNGKADGYYNTNGNAYPYYKCKFVVKNEGIVFA

SEQ ID NO: 21241 - protein, 455 aa, unidentified
  REGION 1..455: note = Human gut metagenome
LYQAVYNLGEGFLPSSEERTAFYWLLIYRKEHGIMQYVYVLNKHGEPLMPCSPGKARLLLKQQKACVVKRTPFTIKLLYGSAGYKQPITLGVDAGSKHVGLSASTEKRELYREEFTPRNDVVDLLSTRRQNRRSRRNRKTRYRAPRFDNRVHSKRKGWLAPSVEVKIQEHITVIKRICRILPITLVRVETAEFDTQRLKAMLKGKPLPVGTDYQLGEMYDEYNVRQYVLKRDNYTCQCCGAHPTEKKPVRLHVHHLESRHVGGNAPNNLITLCVACHKALHEGKITLDKGKKRGKPLRDAAFMGIMRNTLLARLKDELNIPVKQTYGYITKLLREKNKIPKSHVNDARCIAKAPNAKPCDTMLYTRALRHHNRQIHKAKILNGGIRKKNQAPYLVKGFRLWDKVRYNGEECFITGRRSSGYFALKKYDGTVISNSASYKKLMLLEAATNYITERS

SEQ ID NO: 21242 - protein, 493 aa, unidentified; identical to SEQ ID NO: 2644
  REGION 1..493: note = Human gut metagenome

SEQ ID NO: 21243 - protein, 279 aa, unidentified
  REGION 1..279: note = Human gut metagenome
VVVETAEFDLQLLKAIADGKPVPQGEDYQQGEMYGHYNVRQYVLWRDGYTCQCCGAHATKKKEVRLHVHHLESRKVGGDAPDNQVTLCESCHEKLHKGLIAEKDFKKRKRRSTRDATFMGIMRKTLMQRLCSELPIPVIETRGYITKATREKLLVLPKSHTNDALAIAQGKQGFNVGYLPGIVQINKIYTIRPVRHHNRQLHKATILKGGIRKSNQTEKYVFGYCLFDKVQFNGQDCFIWGRRTTGIFTIKTINGKMIKDGISFKKLKPVEKSTGYLIA

SEQ ID NO: 21244 - protein, 470 aa, unidentified; identical to SEQ ID NO: 2825
  REGION 1..470: note = Human gut metagenome

SEQ ID NO: 21245 - protein, 512 aa, unidentified; identical to SEQ ID NO: 16896
  REGION 1..512: note = Human gut metagenome

SEQ ID NO: 21246 - protein, 404 aa, unidentified
  REGION 1..404: note = Human gut metagenome
LKVFVLNMRGKPLMPCSPAKARHMLKAGKAVVVRRTPFTIKLTIATGETKQDVTLGVDAGARHVGISATTEKEEVFASEVKLRQDITGLLADRLAFRRARRNRKTRYRSPRFNNRVRSKHKGWLAPSVENRIQAHMSRIDAVCRLLPVTKIVIETASFDIQKIRNPEVEGTGYQQGDQLGFWNVREYVLFRDSHVCQHCHGRSRDKILNVHHLESRKTGGDAPNNLITLCETCHKAYHAGKIKLKVKRGQSFRAEAFMGIMRWTLLDRVRKTHPKLPVENTYGYLTKHKRIALGLPKTHCADAFCIAGNLKALRRGDFLFQQQTRKHNRQIHKCSILKGGVRTLNQAPFLVKGFRLFDKVRIGGQIGFVFGRRVGEALQKPSRLESFCLLRRPNYCTNDCSGYF

SEQ ID NO: 21247 - protein, 450 aa, Moorena sp.; identical to SEQ ID NO: 5194

SEQ ID NO: 21248 - protein, 376 aa, unidentified
  REGION 1..376: note = Human gut metagenome
MVYVVANDGQPLMPTERHGKVCRMLRSGMAKVIKKCPFTIQLQYESERNVQPVSLGVDAGSKHIGISATTKAKVLYESDVELRDDIVKLLATRRQLRRSRRSRKTRYRPARFDNRKRKEGWLAPSIRQKIGSHLTVVANVCKILPINQIIVETASFDIQKIKNPEIQGIEYQQGEQMDFWNVREYVFFRDGHTCQCCKGRSKDKILNVHHIESRKTGGNAPNNLITLCETCHKGYHNGTVILPKNIKRGMQFKDAAFMGIMRWAFYNALKEQYEPAVPVSMTYGYLTKNTRIEHGLLKEHYIDARCISGNPDAVSDGTYYYQKKVRCHNRQIHKQTILKGGIRKSNQAEYLVKGYRLFDKVRYQGRKNYLIERRTV

SEQ ID NO: 21249 - protein, 446 aa, Pseudomonas sp.; identical to SEQ ID NO: 10661

SEQ ID NO: 21250 - protein, 430 aa, Desulfobacter sp.
LNVFVLDTNKKPQNPVHPAKARLLLTEGKAAVFRQFPFTIILKETVLDVASNPLRIKIDPGSRDTGIAVINDDTGEIVFAMELRHRGQQIKNNLESRRAIRRSRRNRKTRYRKPRFDNRTRAEGWLPPSLKSRIHNIETWVNRLCRFCNIQAISMELVRFDMQKIQNPEISGVAYQQGELMGYEVREYLLEKWDRTCAYCGKTDIPLEIEHIVPKSKGGSNRVSNLTLACTACNRKKGNKPLEHFLSRKPRLLKRIQKQSKVPLKDAGAVNTTRWDLFRTLKKTGLPVETGSGGLTKFNRTTRGLHKTHWLDAACVGKSTPEKMFQIDKAVLIVKADGHGSRQMCRVNKFGFPRTTAKSTEKKVKGFQTGDIVKAVVTSGKKVGTYIGRVAVRKSGSFNIKTVDKTVQGISWKYCRLLHASDGYSYNTTC

SEQ ID NO: 21251 - protein, 456 aa, unidentified
  REGION 1..456: note = Human gut metagenome
MSTCVCVLTNNGERLMPTFRLGKVRHLLKDGKAKIVKHHPFTIQLLYDSKTNTQPIETCEDVGYNYIGISVKSESHEYVSAQYDTLQDEKEHHDDCRKYRRTRRNRLRYRKSRFDNRKRDKGWLAPSLEHKKHLNISLIERYVSVIPITHVTVEVGSFDTMLLQSIQKGEAKPEGADYQKGPRYNLATLREAVFYRDNYTCQVCKRKIANGAILHMHHMFYWKGRHGYQLDELVTVCEKCHTPANHQKGGKLYGFGKDKKFANLSGAAFMNAVRWQIVNALYATYGKEFVTITYGAMTKEKRIALQLEKTHNNDAYAMGDYHPARRCKFRHYQKRRRNNRVLEKFYDATYVDTRTGNKAKGKELFNGRISRNHKKDCKNLHKYRSKKVSKGRRSIRRQHYAIQPYDTVRLEGKTYITSGCHNKGTRLLIPVNGKSKSVAISKVQVVCHAGAWIQII

SEQ ID NO: 21252 - protein, 423 aa, unidentified
  REGION 1..423: note = IscB polypeptide
MLVYILDKDNKPLMPCSPRVAKLLLRDGKAIVAQRTPFTIKLVFGSSGYKQDVTLGVDAGSKTIGLSATLVPPSNGRTETDKKEVFSAEVQLRTDIVDLLSIRRQNRRTRRSHKTRYRKARFQNRKKDKSWLAPSIRHKIDTHLTMVDKIHKILPITKIIVEVAQFDIQKIKNPDISGIEYQQGVQLDFFNAREYVLYCDDHKCQLCNGKSKDKILNVHHIESRKTGGNAPNNLITLCETCHKKHHEGDVTLKIKRGHIFKDASFMGVMRWAFYNTLKEKYPNVKMTYGYITKNTRITNKLSKDHRTDALCITGNPTVIGLDTWYYCKKVRCQNRQIHKNTINKGGARKINQSPFIVLGFRLFDKVKYDNQECFVFGRRLSGSFDIRLLDGTKVNAGVGYKKVKVLEQRKTILIERRGNSSNG

SEQ ID NO: 21253 - protein, 424 aa, unidentified; identical to SEQ ID NO: 8578
  REGION 1..424: note = Human gut metagenome

SEQ ID NO: 21254 - protein, 465 aa, unidentified
  REGION 1..465: note = Human gut metagenome
MSTCVCVLSNSGERLMPTFRLGKVRRLLKDGKAKIVKHHPFTIQLLYDSKANTQPIEICEDVGYNYIGISVKSQSHEYVSAQYDTLQDEKEHHDDCRKYRRTRRNRLRYRKPRFDNRKRGEGWLAPSLRHKKKLNVNVVKMYCAVMPITHATIEVGSFDTMLLKAVQEGKAIPEGADYQKGPRYNLATLREAVFYRDNYVCKVCGRKATEGAILHMHHMFYWKGRHGNSLDELLTVCEKCHTSANHQKGGKLYGFGEDIKFTDLSGAAFMNTVRWQIVNELYTAFGKPFVTITYGTMTKEKRIALHLEKSHNNDAYAMGEFHPNHRCTFEHYEKVRRNNRTLEKFYDSRYIDIRTGEIATGKELFNGRINRNHKKDSENLHRYRGKRTYAGHRALTRKKVNLNPGDLVSLNGEVLVVHGTHTNKKGAVNVEFKAPAKNGQKSASLKKLKIVKAADSIHPAWEKVS

SEQ ID NO: 21255 - protein, 259 aa, unidentified
  REGION 1..259: note = Human gut metagenome
PVPQGEDYQKGEMYGHYNVRQYVLWRDGYTCQCCGAHATKKKEVRLHVHHLESRKVGGNAPGNLVTLCDRCHEKLHKGLITEKDLKKRKHRSTRDATFMGIMRKTLMQRLCSELPIPVAETRGYITKATREKLLVLPKSHTNDALAIAQGKQGFNVGYLPGILQIDKIYTIRPVRHHNRQLHKAAILKGGIRKSNQAGKYVFGYRLFDKVQFNGQDCFIWGRRTSGYFVVKTIDGKVIHNSASFKKLRLVERASNYLIA

SEQ ID NO: 21256 - protein, 386 aa, Anabaena sp.
MSKAFVLDTKKRPLDPIHSAQARQLLRSKKAAIYRQFPFTIILKESRSDSPISPLRLKIDPGAKFTGMALVNDANGEVVFAAELKHRGFAIRDALTSRRQLRRSRRARKTRYRQPRFLNRTRPERWLAPSLQSRIENIKTWVERLRKLAPIEAISQELVRFNMQLMTNPDIQGKEYQRGSNSITNLTLSCEKCNTKKGTKDIKYFLKKDPLKLEKILKQAKRPLADAAAVNTTRTALLEVLKATGLPVETGSGGLTKFNRSEQNLEKTHWIDAACVGKSTPILNIKGVKPLLITANGHGSRQSCRTDKYGFPSRHVPREKIHFGFQTGDIAKAVVTTGKKIGTYVGKVAIRSTGSFNIYTKNGLIQGISHKFCKRIHAKDGYSYAQ

SEQ ID NO: 21257 - protein, 408 aa, unidentified; identical to SEQ ID NO: 4810
  REGION 1..408: note = Human gut metagenome

SEQ ID NO: 21258 - protein, 518 aa, unidentified; identical to SEQ ID NO: 11015
  REGION 1..518: note = Human gut metagenome

SEQ ID NO: 21259 - protein, 349 aa, unidentified
  REGION 1..349: note = Human gut metagenome
IKNKETKFTNRTRPEGWLTPTANQLLQTHINLVKKIQKFLPISDVVLEINKFAFMRLDNPNVQKWQYQQGPLYQKANLEETVSEMQEHHCLFCKKKIDHYHHVVPQHKNGSNTIDNIIGLCTQHHDLVHKDATWQKRLAKKKTGLNKKYGALSVLNQIIPALTKELSSLFPKHFFVTNGKSTYDYRAAHGVSKDHWLDAYCIACSVLPNDTCDKTINSRVPYELKQFRRHDRRALNNENMSRVYTFNGKMVATNRHKATEQTTDSLEEFRQRQPNDVCNLKVKEHHPTYRNMNRNYPGSVFLVGNQVHVMQGIAGSKDGEATTYKDTNANSIAAGKCKFVAKNSGILFV

SEQ ID NO: 21260 - protein, 470 aa, Blautia sp.; identical to SEQ ID NO: 2925

SEQ ID NO: 21261 - protein, 512 aa, Bacteroides sp.
MSTVYVLNKDGKPLMPTTRGGHVRHLLKEQKARVVRTKPFTIQLLYETDDVVQPLYLGIDPGRTNIGVAVVKTDGTAVFTAHLETRNKEIPKLMKKRKDSRRARRTNGRRCRRQRRAKANGTISKKCVKQATAQNGSVSKRANEIGVIKRHLPGCEKEVLCIGIKNKEAKFSNRTRPEGWLTPTANQLLQTHINLVKKIQKFLPISDVVLEINKFAFMRLDNPNVQKWQYQQGPLYQKASLEEAVSEMQEHHCLFCKNTIDHYHHVVPQSENGSNTIGNIVGLCTKHHDLVHKDTSWQKKLAKKKTGLNKRYGALSVLNQIIPALTKELSSLFPKHFFATNGKSTYDYRAAHGVSKDHWLDAYCIAGSVLPNDACDNNINNHVPYELKQFRRHDRRALHKENMGRVYTLNGKSVATNRHKAIKQTTDSLEEFRQRQPNDVCKLKVKEHHPEYRNPKRNFPGCVFLVGKHTHVMQGTSGSHNGKADGYYDTNGNSYSSGKCKFVVKNEGIVFT

SEQ ID NO: 21262 - protein, 416 aa, Anoxybacillus sp.
VLSTSQALPTWGKRKNTPRKEVHALFVYVINKHGNPLMPCSPRKARILLKNKKAKVVKRTPFTIQLLYGSSGYKQPISLGVDTGTKHVGLSATTKNQVLLEAEVQLRTDIQELLATRRQFRRSRRNRNTRYRKARFLNRKKPNGWLAPSTQHKVDSHIKLVKWVHSLLPITHITVEVAQFDTQKIKNPDIQGAAYQQGEQLGFWNVREYVLYRDGHTCQWCKGKSKDPVLNVHHIESRKTGGDSPSNLMTLCKTCHDMIHREGLEHEIQRRFSSLKDASHMTVMRWFIWNGLKKVYPHANITYGYITKCIRIANGLPKSHMVDARCISGNPLAKPSGTVYLLKFVRKNNRQLHKATILKGGKRKSNKAPRFVKGFQLFDKVVYEGKECFIFGRRSSGYFDLRLLDGTKVHASASWK

SEQ ID NO: 21263 - protein, 431 aa, unidentified; identical to SEQ ID NO: 10863
  REGION 1..431: note = Human gut metagenome

SEQ ID NO: 21264 - protein, 413 aa, Blautia sp.; identical to SEQ ID NO: 9603

SEQ ID NO: 21265 - protein, 382 aa, unidentified
  REGION 1..382: note = Human gut metagenome
DTLQDEKACHDSCRKLRRSRRNRLRYRKPRFDNRKRDDGWLAPSLRHKKELNVNVVKMYCAVMPITHATIEVGSFDTMLVKAIQEGKAIPEGADYQKGPRYNLATLREAVFYRDNYVCKVCGRKATEGAILHMHHMFYWKGRHGDSLDELLTVCEKCHTPANHQKSGKLYGFGENVKFADLSGAAFMNTVRWQIVNELYAAFGKGFVTITYGAMTKEKRIALQLEKTHSNDAYAMGEFHPNHRCTFEHYEKVRRNNRTIEKFYDSRYIDIRTGEIATGKELFNGRINRNHKKDSENLHRYRGKRTYAGHRALLRKKVNLNPGDLVSLNGEVLVVHGTHTNKKGAVNVEFKVPAKNGQKSASLKKLKIVKTTDSMHSAWEKIS

SEQ ID NO: 21266 - protein, 199 aa, unidentified; identical to SEQ ID NO: 21238
  REGION 1..199: note = Human gut metagenome

SEQ ID NO: 21267 - protein, 419 aa, unidentified; identical to SEQ ID NO: 8452
  REGION 1..419: note = Human gut metagenome

SEQ ID NO: 21268 - protein, 423 aa, unidentified; identical to SEQ ID NO: 10848
  REGION 1..423: note = Microbial mat metagenome

SEQ ID NO: 21269 - protein, 421 aa, unidentified; identical to SEQ ID NO: 4235
  REGION 1..421: note = Human gut metagenome

SEQ ID NO: 21270 - protein, 439 aa, unidentified
  REGION 1..439: note = Human metagenome
MVLVVDKHKKPCNTISEAYARRLLFKKQAVIHKRFPFTIRLKNDNAVSKDRAYTVKVDPGSKHTGIAITDNKDSVVMLAEIEHRGHVIKKNLGKRRAVRNSRRQRKTRYRPARFLNRTRPKGWLAPSVKSRADNVINFIKKYKKLINISKVMIENVSFDVSQMTAGTKLCGSGYQQGPLYQKELRSFIFSRSGGKCVYCGTKATEIDHIVPRANGGTNSTYNLVASCRNCNQIKSNLTLKAFGKKMNKNYSHLEPKKLPKDAAIVQTARNYMVREISNLVPNTTTYDAWLTKYNRNKLGLSKQHYYDALSVGDVANYKFLTDKVLQISAQGRGSRQMCSMNKFGFPRTSAKASKSVKGFQTGDIVKAIVTKGLKKGEYLGKVAVRSSGDFDITTNKERIQGIRYKYCHLIQRGDGYLYSYKECDSFSDINNRVSIAKIQ

SEQ ID NO: 21271 - protein, 535 aa, unidentified
  REGION 1..535: note = Human gut metagenome
MYRLTTEAGIPLIPERLHDTKKRKEASRMSEYIYVIGVDGDPQMPTKRKRHVEQLLQTGRARIFRQVPFTIQLTYENEPVLQPVTIAEDPGRSNIGMAVVSLSGELLSAAVVQTRNKEIAKLMEKRKQHRRASRNGERRARQRLAKKYHTMITAGFLMRKLPMYGKDKRVRCNVIKNTESRFCNRKRENGWLTPSAEHLVRTHINLIHKMQKFLPITDVAIEINRFAFLSLEDPSISGVDFQNGPLKGYDDLNAAVEDLQDGHCLMCNSPIEHRHHIVPRSMQGSNTIGNIAGLCCKCHERVHKDTRFEDRLKKKKAGLDKRYAAVSVLNQAIPFICKRLEQEFEKEHVHYCSGRDTGMVRRPFGYHKTKEEQLHEVDAWCIAVLALQHVPEKAPEFDHVHEILQFRRQDRSRIKAQTSRAYYHEGKKIAKNRKKAEGQRDDSLQEWRKRQVERYGKEQTRKMISQLEVKESIRRYNRLDRLMPGAVFYYQGVRYVMRGQHSNGQYLQAVGMGSKDFPAKKCKIVANNEGLVFVS

SEQ ID NO: 21272 - protein, 363 aa, unidentified
  REGION 1..363: note = Human gut metagenome
MTNYVFVLDANGKHLSPTKEQKAWFFIRKKRATLVSKYPMVIQLNKEIPDDKICKDEIRCGIDDGGLHTGIALVQKCQTKNKVLFKGVIEQRNDVKHLMDVRRGYRRYHRYHKRYRPARFNNRSSSKKEGKIAPSILQKRQATIRAVAQLNKWINITDYWLEDVAIDIRALTDGFKPYKWQYQKSNRLDENIRKAVILRDGCQCVECGRTNCKLEVHHIKPRRSNGSNALSNLITLCERCHQNTEGREELFMDKYFALLNSSDNKYLNYAQHVMIGKKWLREQLSSLGILHLTNGGDTANKRIDWNIEKFHSNDAICITNLQPDTCDVKEWTIKPMRRQSKAKADNVLGIKHRDLVEYTFKSG

SEQ ID NO: 21273 - protein, 427 aa, unidentified; identical to SEQ ID NO: 4946
  REGION 1..427: note = Human gut metagenome

SEQ ID NO: 21274 - protein, 475 aa, Sutterella sp.
MPVCSTLARGIAPPARAEHVTGISPKNRKVHFFMSTTVFVLDKKHRPLMPCRPARARRLLRAGRARVVKRFPFVIRLVDRTVEQSEVQPVLIKLDPGSRETGAAVVRDDGKKRHHALAFFVIEHRGGAIRDALKARSAFRRRRRSQNLRCRSPRFLNRVKPKGWLPPSLRHRVETTLSFVRRMCRYLPVSGIATELVKFDSQKLQNPEVSGVEYQQGTLFEYEVREYLLEKFGRKCVYCGAEGVPLNIDHVVPRAKGGSNRVSNLVLACMSCNQKKGARSLEDFLKGKPKVLARVRRELKTPLRDAAAVNATRWVLFNELKATGLPVETGSGALTKLNRHAFGVEKEHWLDALCVGRLNGVVTRKGLNVLEIRCMGRGSRQRTRLTKYGFPRGYLMRQKCVHGFATGDMVEANVPKGKKAGLWRGRVAVRVSGSFNIQTPKGVIQGVGWKHCRLISHNDGYGYAWLGHAPHSSPA

SEQ ID NO: 21275 - protein, 442 aa, unidentified
  REGION 1..442: note = Human gut metagenome
MVTVQQSTHHLPFGRVFIRRNLFMVYVISQDGKPLMPCSDPIARLLLKQGKAKVKKREPFTIKLTYETTNHTQGLTLGVDTGSGTIGTAVSKDNGDIVYMSEVVVRNDITDKMTQRAKYRRNRRNRKTRYRKARWLNRASSIKKDRFSPTMQSKLHSHVREIEYIQSILPVTEMVFETGQFDMQLMKNPSLANPKVRPWGYQKGANYGFENTKAMVLNRDNYTCQCCKGKHKDSKLEVHHIVFRSQGGSDEESNLLTLCHTCHKDLLSGKINPKLSGKVKGNLKYATQMNSIRKQLFRFYPNAIETFGYVTKANRLHLGVDKEHYYDACTIATQGNAFNVKSNLYKKKCVSDGDFQKTKGIRSEQPIVTDKICGFRKFDKVRYFGNDYFIKGRMSTGYAILMDIDGNKIDFSTMPRGYKTPKLSNCKRITARSTVMTQVKVV

SEQ ID NO: 21276 - protein, 419 aa, unidentified; identical to SEQ ID NO: 5677
  REGION 1..419: note = Human gut metagenome

SEQ ID NO: 21277 - protein, 422 aa, unidentified; identical to SEQ ID NO: 13660
  REGION 1..422: note = Human gut metagenome

SEQ ID NO: 21278 - protein, 413 aa, unidentified
  REGION 1..413: note = Human gut metagenome
MTNYSFVLDADGKRLAPTKEQKAWFLIRKKRAVLVSKYPMVIQLNKTVPEPEICRDEIRCGIDDGGLHTGFALVQKCKTKNKVLFKGTIEQRNDVKHLMEVRRDYRRYHRYHKRHRPARFDNRGSSKRTDRVAPSILQKRQATMRVIRWLNKWIRITSFWLEDVAIDIRALTDGFKSYSWQYQNSNRLDENIRKAVILRDGGKCMECGRSGCRLEVHHIKPRRSNGSNTLGNLISLCESCHQKTEGKEELYMQHFFTMLNSFDNKNLNYASHVMIGKKWLREQLSQLGSLYLTTGGDTANKRIDWNIVKTHSNDAICITDLRPDTCDIKDWTIKPMRRQNKAKTDQVLGISHRDLVSYTYKNGETYTGYVTALYSELNALNFQSPTKHCKKVNAKKCRLLWKFSKIYWLDNVG

SEQ ID NO: 21279 - protein, 265 aa, unidentified
  REGION 1..265: note = Human gut metagenome
AVAEGKPVPQGEDYQKGEMYGHYNVRQYVLWRDGYTCRVCGAHGSVKKGVPLHVHHLESRKVGGDAPDNLVTLCTACHDKLHKGIITAADLKKRKRRSTRDATFMGIMRMTLLRRLREQLPVPVVETRGYITKATREKLLVLPKSHTNDALAIAHGPQGFRAGYLPNIRQADRLYTIRPVRHHNRQLHKATILKSGVRKANQAETYICGFRLYDKVLYNGIECFVWGRRTSGSFLLRQLNGEKVKDGVSHKHLKLLERSQSYLVA

SEQ ID NO: 21280 - protein, 518 aa, unidentified; identical to SEQ ID NO: 2751
  REGION 1..518: note = Human gut metagenome

SEQ ID NO: 21281 - protein, 411 aa, Virgibacillus sp.; identical to SEQ ID NO: 14618

SEQ ID NO: 21282 - protein, 415 aa, unidentified; identical to SEQ ID NO: 4916
  REGION 1..415: note = gut metagenome

SEQ ID NO: 21283 - protein, 462 aa, unidentified
  REGION 1..462: note = Human gut metagenome
MSVLVIGRNGRALMPTNPRKARLLLKKKTASVVCRHPFTIQLLYKTGCATQEGSIGIDTGSQHIGVGITCGDKVILKDEHALRSSMEKRSLLATRAVMRRGRRYRKVRYRKPKWRHHTKRMYFEKANRRGQHWRKVKTTTQSPRSKGWLPPSLQSKCDHHFRIIDRYLKYLPDPITRNLVIEAGRFDMARMNDPTIHGEMYQRGPMYDAENLRAYIFARDNYQCACCKAKAGTTRKADGTTVKLVAHHILFRSRGATDNPKYIISVCDHCHTTKAHQPGGILYSWMENNKKVARGLRDATFMNILRKRLFARYPQAAFTYGNITAADRKKLRLPKSHANDAVAISLFGKEASTVKNICQTMHYKQIRKSKRSLHEAIPRKGRKNPNTKAVRNKKNTTQVNGFKLWDSVLADGKKLFICSFTGTSAYLIDKNGCYISQPGKTYKQWPLSKLKRLHPNGNWLMA

SEQ ID NO: 21284 - protein, 430 aa, unidentified; identical to SEQ ID NO: 10265
  REGION 1..430: note = Human gut metagenome

SEQ ID NO: 21285 - protein, 423 aa, Moorena sp.; identical to SEQ ID NO: 6814

SEQ ID NO: 21286 - protein, 456 aa, Idiomarina sp.; identical to SEQ ID NO: 15257

SEQ ID NO: 21287 - protein, 431 aa, unidentified
  REGION 1..431: note = Human gut metagenome
MPNKVYVINKHGRPLMPCSPAKARHLLDAGKAKVKKRTPFTIQLLFGSTGYTQEVILGVDAGSKTIGMSTSTKKEEVFAADVTPRNDVVDLMSTRREFRRARRNRKTRYRKPRFDNRVRSKHKGWLAPSEEVKIQEHITAIKMVCRILPVSKVVIETAEFDLQLLKAIEEGKPVPQGEDYQKGEMYSHYNVRQYVLWRDNYTCQCCGAHATKKKEVRLHVHHLESRKVGGDAPDNQVTLCESCHEKLHKGLIAEKDFKKRKRRSTRDATFMGIMRKTLMQRLYSELPIPVIETRGYITKATREKLLVLPKSHTNDALAIAQGKQGFNVGYLPGILQIDKIYTIRPVRHHNRQLHKAAILKGGIRKSNQAEKYVFGYRLFDKVQFNGQDCFIWGRRTTGIFTIKTINGKMIKDGISFKKLKPVEKSTSYLIA

SEQ ID NO: 21288 - protein, 415 aa, unidentified; identical to SEQ ID NO: 6436
  REGION 1..415: note = Human gut metagenome

SEQ ID NO: 21289 - protein, 416 aa, unidentified
  REGION 1..416: note = Human gut metagenome
MVYVLDKNGQTLMPTDRHRKVRLMLQSGQAKVIKRCPFTIQLNYDSGHQTQEISLGIDAGSKHIGVSATTKIKVLYEADVELRNDIVDLLSSRRELRRGRRNRKTRYRQAKFNNRRRGNGWLAPSIRQKIGTHLTVVENICKILPISRIMVETASFDIQKIKNPDIQGAEYQQGDQLGFWNVREYVLFRDGHTCQCCKGKSKDKILNVHHIESRKTGGNAPNNLITLCETCHTGYHKDTVQLPKAIKRGMRFKDAAFMGIMRWAFYEALKQQYEPVGTPVHNTYGYITKHTRIEHNLPKEHYVDARCISGNPEASSNGEYYYQKKVRCHNRQIHKLTVLKGGIRKQNQATYLVKGYRLFDKVSYQGKGYFVFGRRQSGFFDIRTLSGEKVNKGSLSCKKLKFIATRTYYLTERRAV

SEQ ID NO: 21290 - protein, 332 aa, unidentified
  REGION 1..332: note = Human metagenome
GKPLMPCSPAKARLLLKERNAIVVRRTPFTIQLTIATGETKQPVSLGVDAGYKHVGLSASTEKAELYASEIELRQDTTDLLSARRELRRARRNRKTRYRGPRFDNHIRTKRKEWFAPSVENRINAHLSRIEKVLRLLPVTTITVETASFDTQLLKNPDISGKEYQEGEQLGFWNIREYVLCRDGHVCQHCYGRSKDPVLNVHHLESRRTGGDSPGNLITLCETCHKALHRGEITLKAKRGQSFRAEAFMGIMRWEVLDRLKASHPELEVQNTYGYRTKHVRIANGIAKSHCADAFCIGGNLGAERLGEFFFQKQTRRNNRQIHKLSILKGAL

SEQ ID NO: 21291 - protein, 268 aa, unidentified
  REGION 1..268: note = Human gut metagenome
VETAEFDTQRLKAMLKGKSLPVGTDYQLGEMYDEYNVRQYVLKRDNYTCQCCGAHPTEKKPVRLHVHHLESRHVGGNAPNNLITLCVACHKALHEGKITLDKGKKRGKPLRDAAFMGIMRNTLLARLKDELNIPVKQTYGYITKLLREKNKIPKSHVNDARCIAKAPNAKPCDTMLYTRALRHHNRQIHKAKILNGGIRKKNQAPYLVKGFRLWDKVRYNGEECFITGRRSSGYFALKKYDGTVISNSASYKELMLLEAATNYITERS

SEQ ID NO: 21292 - protein, 424 aa, unidentified
  REGION 1..424: note = Human metagenome
MVLVVDKHKKPCNTISNAYARMLLFKKQAVIHKRFPFTIRLKNDNAVLKDRAYTVKIDPGSRHTGIAIVDDKDQVVMLAEIEHRGHIIKKDLASRRMVRRNRRNRKTRYRPARFLNRTRPKGWLAPSVKSRADNVINFIKKYKKLINIDKVMIENVSFDTAQMSSNTKLWGNTYQQGPLYQNKLRSFIFSRSNNKCVYCGAKATDIDHVIPRANGGTNSVHNLVASCRACNQMKSNKTLKEFGKIMDRDFSHLEPKKLPKDAAIVQSARNYMVKEITKLVADTTLHDAWLTKYNRDQLGLPKEHYYDALSVGNVENYKFLTDKILTISARGRGSRQMCSMDKYGFPRTKPKGSKLVEGFQTGDMVKAIVPKGPKQGEYLGRVAVKSSGYFDIKTKNGLAQSIGYKYCRLIQKNDGYSYNYKERI

SEQ ID NO: 21293 - protein, 406 aa, unidentified; identical to SEQ ID NO: 3795
  REGION 1..406: note = Human gut metagenome

SEQ ID NO: 21294 - protein, 426 aa, unidentified
  REGION 1..426: note = Human gut metagenome
MVYVQNHLGQPLMPTQDHRKVRLLLKAGAAVVVRRMPFTIRLTTRTKTYVQPVILGVDAGSKTVGMSAATHEEEVFAAELTPRNDVVKNLADRREFRLSRRGRTTRYRQPRFNNRVHSKHKGWLAPSVEVKIQEHITSIKRACELLPIGKVVVETAEFDLQLLKSIADGMPVPQGEDYQKGEMYGFYNVRQYVFFRDGYTCQCCGAHGKGIKFHTHHLESRKTGGNAPDDLVTVCDKCHKAFHAGLITDAKLKKRRRKSTRDAAFMGIMRKTLLQRLRAELPIPVVETRGYITKATRERLLKLPKSHTNDALAIAMGRHGFGIEEVTYMPQSDRIYQIKPVRHHNRQLHKALPKKGGRRQRSQGPKYVQGFRRFDKVLYRGQECFIWGLRTRGYFQLKLLNGTKVHESAKASELILLEHSSGYLIA

SEQ ID NO: 21295 - protein, 522 aa, unidentified
  REGION 1..522: note = Human gut metagenome
MNYIDFVFVTDKDNLPCNPINEGYAGKLLRTGKAKIVNHDPLVIKRLDDYSSKNENRHTITLKVDTGFGNIGFSASDNKHEYIAGQVELLSGISDRLVTRKGYRTQRRSRLRYRRNKNIDYKTVNNPTYKNGNEDGWLAPSVIHKIESHVRVIDKIALWIPIDKVIIETANFDIQQIKATLNGIVINGIDYQKGEMYGFENAKQYVRERDNYTCQICKEKLTDKRHVVIEVHHIIPRSKGGSNKPDNMISLCHCCHKKVHENNNDNKLFRELQQRKIINTYKDATFMNTMRWELYNRLKENYDVSISFGYITRMNRKNAGLKKYHYTDAVCISEYHKITLTRNVYLVEQKRCNDRCMESFFDAKYIDSRDGKVKKGSELCKLRVATASSKRSTKKEDIDNKRIYRQEKVSKGKRRYENHSYCLKPGDLIYINYGNHKGNIAEVTTMQKNPNGTYKIVFSYANPKCKIPSINIKEKEYEELTHNQCEKVKIVRTRRGMIWRKVNRLEFEENTAEQIDKKVKNK

SEQ ID NO: 21296 - protein, 361 aa, unidentified
  REGION 1..361: note = Human gut metagenome
VTLGVDAGARHVGISATTEKEEVFASEVALRQDITGLLADRLAFRRARRNRKTRYRAPRFNNRVRSKHKGWLAPSVENRIQAHMSRIEAVCRLLPVTKIVIETASFDIQKIRNPEVEGTGYQQGDQLGFWNVREYVLFRDGHICQHCRGRSKDPILNVHHLESRKTGGDAPNNLITLCETCHKAYHAGKIKLKVKRGQSFRAEAFMGIMRWTLLDRVRKTHPELPVENTYGYLTKHKRIALGLPKTHCADAFCIAGNLKALRRGDFLFQQQTRKHNRQIHKCSILKGGVRKLNQAPFLVKGFRLFDKVRIGGQIGFVFGRRVRGIFNIRRLDKTVIGTDINCKKLSLLETRKTFLTELRKE

SEQ ID NO: 21297 - protein, 413 aa, unidentified
  REGION 1..413: note = Human gut metagenome
MVYVLNENGQPLMPTENHAKVRVLLKQGKAKVVNNCPFTIQLLYSSTNYTQPVTLGVDAGSKHIGLSATTEDKELYAADVELRNDIVKLLAVRRTSRRSRRNRKTRYRKPRFNNRRRDKGWLAPSIRHKINTHLKVVDDTCKLLPVSKIIVETASFDIQKIKNPDVKGADYQQGEQLGFWNVREYVLFRDGHKCQCCKGKSKDKILNVHHIESRQTGGNAPNNLITLCETCHTGYHKGTVKLPAKIKRGMKFKDATFMGIMRWAFYGELKKRYPDVSLTYGYITKNTRIENGLPKEHYVDARCISGHPLAKPLGTVFYIKKVRCHNRQIHKFKILKKGVRKRNQAEYEVYGFRLYDRVSWKGQTCFVFGRRSTGRMDLRLLDGTHINASVGYKNIKLLRMRSNYLIEVRNAIG

SEQ ID NO: 21298 - protein, 512 aa, unidentified; identical to SEQ ID NO: 10377
  REGION 1..512: note = Human gut metagenome

SEQ ID NO: 21299 - protein, 464 aa, unidentified; identical to SEQ ID NO: 3745
  REGION 1..464: note = metagenome

SEQ ID NO: 21300 - protein, 465 aa, unidentified
  REGION 1..465: note = Human gut metagenome
MSTCVCVLSNSGERLMPTFRLGRVRHFLKDGKAKIIKRHPFTIQLLYDSKTNTQPIEICEDVGYNYIGISVKSESHEYVSAQYDTLQDEKEHHDDCRKYRRTRRNRPRYRKPRFDNRKRGEGWLAPSLRHKKELNVNVVKMYCAVMPITHATVEVGSFDTMLVKAIQEGKAIPEGADYQKGPRYNLATLREAVFYRDNYICKVCGHKATEGAILHMHHMFYWKGRHGNSLDELLTVCEKCHTPANHQKGGKLYGFGENVKFADLSGAAFMNAVRWQIVNELYAAFDKPFVTITYGAMTKEKRIALRLEKSHNNDAYAMGEFHPNCRCTFEHYEKVRRNNRTLEKFYDSRYIDIRTGEIATGKELFNGRINRNHKKDSENLHKYRGKRTYAGHRALLRKKVNLNPGDLVSLNGEVLIVHGTHTNKKGAVNVEFKVPAKNGQKSANLKKLKIVKAAGSIHPAWEKVS

SEQ ID NO: 21301 - protein, 407 aa, unidentified; identical to SEQ ID NO: 3417
  REGION 1..407: note = Human gut metagenome

SEQ ID NO: 21302 - protein, 438 aa, unidentified
  REGION 1..438: note = Human metagenome
MVFVLDRSKKPLDMISHAKARILLKNRLAVIHKVYPFTIRLKDNSAVSKDRAYTIKLDPGSRTTGVAVIDDKDAVVMLAEIEHRGHIIKKNLDSRRAIRRSRRQRKTRYRPARFLNRTKPEGWLAPSVKSRADNVINFIKKYKKLLNINKVMIENVSFDVAQMSSDDCLIGSGYQQGNLYQKELRSFIFSRSGGKCVYCGAKATEIDHIIPRAKGGTNSTYNLVASCRSCNRKKSNLSLKAFGKKMNKDYSHLKPKKLPKDASIVQIARNYMVKGITKLVSDTTTHPSWLTKYNRDNLGLPKQHYYDALSVGNIENYKFLTDKILIISAKGRGSRQMCRVDRYGFPRTSAKASKTVKGFQTGDIIKAIVTEGLKTGEYLGRVAVRSRGYFNIQTKTQVVQGIGFEYCHIIQRSDGYSYNYKESDFLSAIHNRVPIAKI

SEQ ID NO: 21303 - protein, 432 aa, Lactobacillus sp.; identical to SEQ ID NO: 6011

SEQ ID NO: 21304 - protein, 499 aa, unidentified
  REGION 1..499: note = Human gut metagenome
MRYIYVLDMNGEPLMPTCRYGKVRRMLKSGQAKAVDTLPFTIQLLKPTKTRILQPVIAGQDPGRTNIGMAAVRSDGTELYRAHIETRNKEIVSLMNDRRSFRQASRRGERLARKRLAKKLHTTARHLNGRILPGCKEPLAVKDIINTEARFNNRLRPEGWLTPTATQLLRTHLEAFRKLSGILPVTEVVLEVNRFAFMQLDNPDMEKRDIDFCRGPLYGTGGVKAAVSLQQDGLCLLCREWEIEHYHHIVPRSRRGSNTISNIAGLCKKCHERVHKDQAAAERLQSKKDGLSKKYGGTSVLNQIILSLAEELGIRYPGHAHVTNGWNTKEFRKKHELEKDHDIDAYCIAASILEDVQPVMQTEPYEIKQFRRHNRARIHHQTERTYRYDRKIIAKNRKKRMDQKMDSLKDWVTDMTEQYGRDTASRMLSKATVQKSTRHYNTKGRMMPGTVFICRGKRFVMTGQLTGGAYYRAYGQDKKNFPAKAVQVIQKNKGLVYVA

SEQ ID NO: 21305 - protein, 431 aa, unidentified
  REGION 1..431: note = Human gut metagenome
MPNKVYVINKHGRPLMPCSPAKARHLLDAGKAKVKKRTPFTIQLVYGSSGYTQEVILGVDAGSKTIGMSASTTKEELLSAEVKPRNDVVDLLSTRREFRRVRRNRKTRYRKPRFDNRVRSKHKEWLAPSVEVKIQEHITSIKRVCRILPVSKVVIETAEFDLQLLKAIEKGKPVPQGEDYQQGEMYGHYNVRQYVLWRDDYTCQCCGAHTTKKKEVRLHVHHLESRKTGGDAPSNLITLCDSCHEKLHKGLIAEKDFKKRKRRSTWDATFMGIMRKTLMQRLCSELPIHVVETRGYITKATREKLLVLPKSHINDALAIAQGKHGFNVGYLPGILQIDMIYTIRPVRHHNRQLHKATILKGGIRKSNQAEKYVFGYRLFDKVQFNGQDCFIWGRRTTGIFTIKTINGKMIKDGISFKKLKLVEKSTSYLIA

SEQ ID NO: 21306 - protein, 420 aa, unidentified; identical to SEQ ID NO: 19328
  REGION 1..420: note = Human gut metagenome

SEQ ID NO: 21307 - protein, 406 aa, unidentified
  REGION 1..406: note = Human gut metagenome
MVYVQDIDGKPMMPTTRHGKVRQLLKDKKAVVINTCPFTIKLMYKTSDYKQEIVLGVDAGTKHVGLSATTKSKELYSGEVILRSDIVELLSTRRESRRTRRNRLRYRKPRFNNRIKSKRLGWVAPSVRHRIDAHIRVIDNICSILPVSRVIVEVAQFDTQKIKNPDISGDEYQEGDQLGFWNVREYVLARDGHKCQHCKGKSKDPILNVHHIESRKTGGDSPSNLITLCETCHKEYHKGNIDLKVKRGKSLRDAAVMGIMKWKLYEELKSRYPNVSMTFGYITKYNRIKYGIEKSHTSDAFVISRNFNAKRIERQYLKRLIRRHNRQIHKMKILKGGKKKNNQAPFEIFRFRLFDKVLYNNEILFVYGRRKSGNFNIRDFNGENPKDVSHKKLKLIRGKRHLIILK

SEQ ID NO: 21308 - protein, 417 aa, unidentified
  REGION 1..417: note = Human gut metagenome
MPCSPAKARLLLKEKKAIVKRRTPFTIQLTIATGEAKQPVTLGVDSGYKHIGLSATTEKAELYASQVELRQDITDLLSARLALRRSRRSRKTRYRAPRFNNRVASKRKGWLAPSVENRITAHMSRVEAVMRVLPVTAITVETAAFDTHLLKNPDIAGEAYQQGEQLGFWNVREYVLFRDGHVCQHCRGKSKDPILNVHHIESRRTGGDAPNNLITLCETCHKAFHRGEIELKVKRGKSFKAATFMGIMRWTLFERLKKAHPELRVRNTYGYLTKHKRISHGIAKSHCADAYCIADNLGAKRLEGFFFQKQTRKHNRQIHKLSILKGGLRKKNQAPYEVKGFRLFDKVICKGEEAFIFGRRTSGSFDVRRLDGTRISAGINYKKLRLLEPRTAYLTEFRMEAALPPLHKCRGFRAEFL

SEQ ID NO: 21309 - protein, 570 aa, Streptomyces sp.; identical to SEQ ID NO: 15590

SEQ ID NO: 21310 - protein, 424 aa, unidentified; identical to SEQ ID NO: 3434
  REGION 1..424: note = Human gut metagenome

SEQ ID NO: 21311 - protein, 415 aa, unidentified; identical to SEQ ID NO: 6044
  REGION 1..415: note = Human gut metagenome

SEQ ID NO: 21312 - protein, 410 aa, Moorena sp.
MSKAFVLSLDGKPLMPMQYNKAWVFIRQGKARLVTFEPLTVQLTYRTATEATQPVRVGIDDGARTAGVAVVVEREQRGPEVVCAGEIRLRGDTKALLAARRQRRRRRRRQKRHRQPRSRRSKGKGWLPPSVRVRKENILRVVADLVWRAPISRIVWEEGQFDTHRLVEPEVEGARYQQGPGYGWENRRHAVLFRDGYRCQYCGEELVAAGKIAEVDHVIPRSRGGTDTFENLVCACRECNQRKGEQTAAEFSHPEVGGRTFAYPAYLQSGKRYLREGLEQLSSVEVVFSWQTKRWRKEMGLEESHVNDAVAIAVQGAETESPQGWMQIVARRRRRNFKRLKWKEKWGLRHWDLVCYTKRGGRKVVGTVRGFVESREEVKVRHAGCMNDPLKAKRVQLLQRQVAIAYAPWQ

SEQ ID NO: 21313 - protein, 512 aa, unidentified
  REGION 1..512: note = Human gut metagenome
MSTVYVLNKDGKPLMPTTRGGHVRYLLKEKKARVVTSKPFTIQLLYETDDVVQPLYLGIDPGRTNIGVAVVKTDGTAVFTAHLETRNKEIPKLMQGRKKARRARRTNGRRCRRQRRAKANGTISKKCVKQTTAQNGSVSKRAKKIGVIKRHLPGCEKKVLCIGIKNKEAKFSNRTRPEGWLTPTANQLLQTHINLIKKIRKFLPVNDVVLEINKFAFMQLDNPNIQKWQYQQGPLYQKASLEEAVSEMQEHHCLFCKKSIVHYHHVVPQSENGSDTIGNIVGLCIKHHDLVHKDTAWQKKLAKKKTGLNKKYGALSILNQIIPALTKELSSLFPKHFFATNGKSTHDYRAAHDVSKDHWLDAYCIACSILPNDTCDKNINGRVPYKLKQFRRHDRRALHKENMSRVYTLDGKKVATNRHKAIKQTTDSLEEFRQRQPNDVCKLKVKEHHPEYRNPERNFPGCVFLVGKHTHVMQGTSGSHNGKADGYYDTNGNSYPSGKCKFVAKNKGIVFA

SEQ ID NO: 21314 - protein, 417 aa, unidentified
  REGION 1..417: note = metagenome
MPCSPAKARLLLKEKKAIVKRRTPFTIQLTIATGEAKQPVALGVDSGYKHIGLSATTEKAELYASEVELRQDITDLLSARLALRRSRRSRKTRYRAPRFDNRVANKREGRLAPSVENRIAAHMSRVEAVMQVLPVTAITVETAAFDTQLLKNPDITGAAYQQGEQLGFWNVREYVLFRDGHVCQHCRGKSKDPILNVHHIESRRTGGDAPNNLITLCETCHKAFHRGEIKLKVRRGKSFKAETFMGIMRRTLFERLEKAHPELNVRNTYGYLTKHKRISHGIAKSHCADAYCIADNLGAKRLEGFFFQKQTRKHNRQIHKLSILKGGLRKKNQAPYEVKGFRLFDKVICKGEEAFIFGRRTSGSFDVRRLDGTRISAGINYKKLRLLEPRTTYLTEFRKEAALPPLHECRGFRAEFL

SEQ ID NO: 21315 - protein, 442 aa, unidentified; identical to SEQ ID NO: 11618
  REGION 1..442: note = gut metagenome

SEQ ID NO: 21316 - protein, 459 aa, unidentified; identical to SEQ ID NO: 11427
  REGION 1..459: note = Cyanobacteria bacterium UBA11367

SEQ ID NO: 21317 - protein, 465 aa, unidentified; identical to SEQ ID NO: 4783
  REGION 1..465: note = Human gut metagenome

SEQ ID NO: 21318 - protein, 465 aa, unidentified
  REGION 1..465: note = Human gut metagenome
MSTCACVLSKNGERLMPTIRLGKVCHLLKDGKAKIIKHHPFTIQLLYDSETNIQPIEICEDVGYNYIGISVKSQSHEYVSAQYDTLQDEKSCHDACRRMRRTRRNRLRYRQKRFDNRKRDKGWLAPSLKHKKELNVNVIKMYCEVVPITHATVEVGSFDTMLVKAIEEGKATPEGADYQKGPRYNLATLREAVFYRDNYTCQVCGREASEGAILHVHHMFYWKGRHDNSLSELITVCEKCHTPANHQKGGKLYGFGEDIKFANLSGAAFMNTVRWQIVNELYAAFGKPFVTFTYGAMTKEKRIALHLEKSHNNDAYAMGEFHPNCRCTFEHYEKVRRNNRILEKFYDSRYIDIRTGEIATGKELFNGRINRSHKKDSENLHKYRGKRIRKGYRALRRKKVALNPGDLVSLNGEILTVHGTHTKKNGSVNVEFKTPSKSGKKSTSLKKLKIIKTISPMRSAWDKVS

SEQ ID NO: 21319 - protein, 323 aa, unidentified
  REGION 1..323: note = metagenome
TRYRAPRFDNRIRTKRKGWLAPSVENRINAHLSRIETVIRLLPVTKISVETTSFDMQLLKNSDIAGKEYQESEQLGFWNVREYVLFRDGHVCQHCHGRSKDPVLNVHHLESRRTGGDSPGNLITLCETCHKELHRGEITLKAKRGQSFRAETFMGIMRWEVLDRLKASHPKLEVQNTYGYRTKHARIVNGIAKSHCADAFCIAGNLGAERLGEFLFQKQTRRNNRQIHKLSILKGGIRKRNQVPFEVKGFRLFDKVACKGEEGFIFGRRSSGYFDVRKLDGTRISAGISYKKLRLLEKRQTYLTEIRKEEALPPLPEGRGLRA

SEQ ID NO: 21320 - protein, 425 aa, Nodularia sp.; identical to SEQ ID NO: 3165

SEQ ID NO: 21321 - protein, 447 aa, unidentified; identical to SEQ ID NO: 3915
  REGION 1..447: note = Human gut metagenome

SEQ ID NO: 21322 - protein, 393 aa, unidentified
  REGION 1..393: note = Human gut metagenome
VVCGNPFTIRLMYGVDPCTQGFILGIDPGRTNIGVTVAAADGTCVFSAKAETNNKDVPKRMKERKAHRQASRQGERKRRQRRARKNGTCFGERKRILPGCKEPITNHYITNTEARFMNRARTKGWLTPTANQLLQSTISLVRKVCKFLPVTDVVLELNEFAFMAMDDPGIQRWEYQKGPLYGYGSVEAAVYTQQDGHCIFCEQAIAHCHHVIPASEGGSDTLENRAGLCGGHHDLVHKEQSWTDKLAELKAGMNKRYAALSVVNQIIPRLADELGKMFPGHAFATNGWSTKQFRDAHGIPKDHNTDADCIACSILENPTIKLPEKVYELRKSGGTTELRYPVWRTATTTCPEQTRKPASPKRSWPPRTGINAPSKRPTAWRNSGQLIPMMWGG

SEQ ID NO: 21323 - protein, 442 aa, unidentified; identical to SEQ ID NO: 2903
  REGION 1..442: note = Human gut metagenome

SEQ ID NO: 21324 - protein, 304 aa, unidentified
  REGION 1..304: note = Human gut metagenome
LAPSVENRINAHLSRIEAVLRLLPVTKITVETASFDLQLLKNPDISGKEYQEGEQLGFWNIREYVLCRDGHVCQHCYGRSKDPVLNVHHLESRRTGGDSPGNLITLCETCHKALHRGEITLKAKRGQSFRAEAFMGIMRSEVLNRLKASHPELEVNNTYGYRTKHARIANDIAKSHCADAFCIAGNLGAERLGEFFFQKQTRRNNRQIHKLSILKGGIRKRNQAPFEVNGFRLFDKVACKGEEGFIFGRRSSGFFDVRKLDGTRISAGISYKKLHLLEKRRTYLTEIRKEEALPPLPEGRGLRA

SEQ ID NO: 21325 - protein, 440 aa, unidentified; identical to SEQ ID NO: 16550
  REGION 1..440: note = metagenome

SEQ ID NO: 21326 - protein, 465 aa, unidentified; identical to SEQ ID NO: 8068
  REGION 1..465: note = Human gut metagenome

SEQ ID NO: 21327 - protein, 277 aa, unidentified; identical to SEQ ID NO: 16282
  REGION 1..277: note = Human gut metagenome

SEQ ID NO: 21328 - protein, 518 aa, unidentified
  REGION 1..518: note = Human gut metagenome
MTPKKRKEASRMSEYIYVLGMDGDPQMPTKRKRHVEKLLQAGRARVFRQIPFTIQLTYENKPVLQPVTIAEDPGRSNIGMAVVSLSGELLSAAVVQTRNKEIVKLMEKRKQHRRASRNGERKARQRLAKKCHTMIKTGFLMRKLPMYGKDKRVRCNVIKNTEAKFCNRKREDGWLTPSAEHLVRTHINLIHKMQKFLPITDVAIEINRFAFLSLEDPSISGVDFQNGPLKGYDDLNVAIEDLQDGHCLMCNSPIEHRHHIVPRSMQGSNTIGNIAGLCCKCHERVHKDARFEDRLKKKKAGLNKRYAAVSVLNQAIPFICKRLEQEFGKEHVHYCSGRDTSMVRRSLGYHKTKEEQLHEVDAWCIAVLSLQHVPEKAPEFDHVHEILQFRRQDRSRIKAQTSRAYYHEGKKIAKNRKKAEGQKDDSLQGWRKRQVERYGEEQTRKMISQLKVKKSIRRYNRLDRLMPGAVFYYQGVRYVMRGQHSNGQYLQAVGMRDKDFPAKKCKIVVHNQGLVFVS

SEQ ID NO: 21329 - protein, 430 aa, Microcoleus sp.
MQNYTFVLDTNKRPLDPVHPAMARKLLSNGEAAVFRRYPFTIILKRGVDTPTQSMAPCPASYEIKLDPGSKTTGIALLKGEKLIFVAELNHRGQAIKASLDSRRAIRRGRRARHTRYRQARFLNRARPKGWLAPSLKHRVDTTLTWVNKFIRFAPINSIAMELIQFDLQQLENPEISGIEYQQGELLGYEIREYLLNKWDRKCTYCKAENSPLQVEHIHPKARGGSNRISNLCLACEKCNLKKGTQDIKDFLSKKPNLLKQIMIQVKRPLKDATAVNSTRWALFNQLKLTGLPVTTGSGGQTKYNRTRLELPKTHYFDAACVGKVHKLIVSTTQPLSIKANGHGTRQMCRTDKFGFPSRYLPRNKFVKGFQTGDIVKAVVTSGNKIGEYVGRVAVRSSGSFNISGKKLVEGVNHKYCQIIQRKDGYSYQL

SEQ ID NO: 21330 - protein, 465 aa, unidentified
  REGION 1..465: note = Human gut metagenome
MSTCVCVLSNSGERLMPTIRLGKVRRLLKDGKAKIIKHHPFTIQLLYDSKANTQPIEICEDVGYNYIGISVKSESHEYVSAQYDTLQDEKEHHDDCRKYRRTRRNRLRYRKPRFDNRKRDDGWLAPSLEHKKQLNIRLIERYVSVIPITHATVEVGSFDTMLVKAIEEGKATPESADYQKGPRYNLATLREAVFYRDNYICKVCGRKATEGAILHMHHMFYWKGRHGNSLSELITVCEKCHTPANHQKSGKLYGFGENVKFADLSGAAFMNTVRWQIVNELYAAFGKDFVTVTYGAMTKEKRIALHLDKSHNNDAYAMGSFHPADRCAFERYEKVKRNNRILEKFYDSQYIDTRTGELTNGKSLFNGRISRSHKKDSENLHKYRGKRICKGHRALRRKKLALNPGDLVSLNGEILVVHGTHTKKNGSVNVEFKTPSRGGKKSTSLKKLKIVKTSNLMHSAWTKVS

SEQ ID NO: 21331 - protein, 477 aa, unidentified; identical to SEQ ID NO: 14065
  REGION 1..477: note = Human gut metagenome

SEQ ID NO: 21332 - protein, 447 aa, unidentified; identical to SEQ ID NO: 5937
  REGION 1..447: note = Human gut metagenome

SEQ ID NO: 21333 - protein, 480 aa, unidentified
  REGION 1..480: note = Human gut metagenome
VDHRPSGREAVRAKLCFAGTGMRKHNKKRRHRMVAVLSKTGIRLMPTSSYRARKLLAKKKAVICGYRPFTIRLTERETGGVQPVELAVDTGYFHVGNSLKTAKHELAAVEIRTLMDEKQRYDDRRQYRRMRRSRLRYRAPRFDNRRRPEGWLAPSIQGRMEQNLVFLRRVLSVVPVTRIVMEMGQFDTQVLKAVEEGRPLPEGADYQQGERYGIATLREAVFTRDNYTCQCCEKTIHDGVTLHVHHIVYRSQGGTNRMGNLITVCEKCHTPKNHKPGGKLYKWKPTVKSFKGATFMTAVRWIVYRSVKECFPDVDVRITYGAKTKLQRRALDITKSHVNDAYAMGDFHPKHRTRLVILQKKRRNNRILEKFYDAKYIDTRDGSKKTGQQLFNGRTNRNHNTDTENLRPYRGTKLSKGKRAIRTTRYRIQPHDILVYQGQEMEASGCHCKGTRVMTTAKKSLPIGKVRVRRYSGGYYAVAE

SEQ ID NO: 21334 - protein, 407 aa, unidentified
  REGION 1..407: note = Human gut metagenome
MVYVQDINGNPLMPTTRHGKVRRLLKNNKAVVVNLCPFTIRLTYETTNYKQEITLGVDTGTKHVGLSATTKSKELYSSEVILRSDIVDLLSTRREQRRTRRNRLRYRKPRFYNRVGANKSNWIAPSIQQRIDSHIKIVSDVYKILPVSKLIIEVAQFDTQKIKNPDITNIEYQQGDQLGFWNVREYVLTRDNHKCQHCKGKSKDKILNVHHIESRKTGGDSPSNLITLCETCHNEFHKGNIDLKVKREKSLRDAAVMGIMKWRLYEIPKSTLPNVSMTFGYITKYNRIHNDIEKSHVSDAFVISKNFNAKRLNFSYKIKLVRRHNRQIHKMKIPKGGTKRPNQSPFEIFGFRLFDRVRFDSKFYFIYGRRKTGSFNIRDINGENKKDVIYKKLKLSRCKRFMIQIEM

SEQ ID NO: 21335 - protein, 365 aa, unidentified
  REGION 1..365: note = Human gut metagenome
MPDKVYVISRLGHPLMPCSPAKARHLLDDKKAKVVKRMPFTIRLLYGSTKYIQPIILGVDAGSKTIGLSASTAKEEVFAAEVMPRNDVVENLSTRREFHRARRNRTTRYRKPRSDNRVRSNHERWLAPSVKVKIQEHITSIKRVCTILPISKVVIETAEFDLQLLKAIQEGKPIPEGEDYQKGEMYGSYNVCQYVLWRDNYTCICCGVRGTPKNPVRLHSVDKYYRLARGYNWFEDEQPSDEIKEKVERVLSERDWKIDVVLSHTCPLRYEPAEVFLSMIDQSSVDKSTEQWLGTIESRLHYERWFCGHYHTDKEIDKIRFMFQDYTMLPHQISLSAEKEMIRRMQRQAEIVEALGLMDEAQEEK

SEQ ID NO: 21336 - protein, 427 aa, Microcoleus sp.; identical to SEQ ID NO: 13117

SEQ ID NO: 21337 - protein, 425 aa, unidentified; identical to SEQ ID NO: 14294
  REGION 1..425: note = Human gut metagenome

SEQ ID NO: 21338 - protein, 512 aa, unidentified
  REGION 1..512: note = Human gut metagenome
MATVHVLNKDGKPLMPTTRGGHVRHLLKEQKARVVRTKPFTIQLLYETDDVVQHLYLGIDPGRTNIGVAVVKTDGTAVFTAHLETRNKEIPKLMKKRKDSRRARRTNGRRCRRQRRAKANGTISKKCVKQTTAQNGSVSKRAKEIGVIKRHLPGCEKEVLCIGIKNKEAKFSNRVKPEGWLTPTANQLLQTHINLVKKIQKFLPISDVVLEVNKFAFMQLDNPNIQKWQYQQGPLYQKASLEEAVSEMQEHHCLFCKKPIDHYHHVVPQHKNGSNTIGNIVGLCAKHHDLVHKDTTWQKKLAKKKTGLNKKYGALSVLNQIIPTLTKELSSLFLKHFFVTNGKSTYDYRAAHGVSKDHWLDAYCIACSVLPNDTCDKTINSRVPYEFKQFRRHDRRALNNENMSRVYTFNGKMVATNRHKATEQTTDSLEEFRQRQPNDVCNLKVKEHHPTYRNMNRNYPGSVFLIGKQVHVMQGIAGSKDGEATTYKDTNANSIAAGKCKFVAKNSGILFV

SEQ ID NO: 21339 - protein, 453 aa, unidentified
  REGION 1..453: note = Human gut metagenome
MLMAVAVVSRTGVPLMPTSPYRARKLLASGKAEKYGYDPFTIRLTERETGDTQPVELCMDTGYIHIGVSVKSEKHEYLALQIDTLTDEKKKHEKCREKRRNRRSRKRYRKPRFDNRKRDKGWLAPSLEHKKEIHVRAAERICRVVPVTDITMEMGNFDTQVLKAKEEGRPLPQGTDYQQGERYGTATLREAVFSRDNYTCLCCGRTMKDGAYFHVHHIRYRSQGGTDRMANLATVCEKCHTPANHQPGGKLYNWKPEIKSFKGATFMTAVRWQMYREIKEKIPDVSVHLTYGAATKERRRALDIEKSHVNDAFVMGRFHPGHRARPELYIKKRRNNRVLESFYDARYIDSRDGKRKPGKELFNGRISRNHKKDSENLHKYRLRKVSKGKRCIRKKHYLIQPHDILVYCGRKYETAGCHNLGTGAILLPERRSIAVSKLKIYRYSGDYYKAAFN

SEQ ID NO: 21340 - protein, 415 aa, unidentified
  REGION 1..415: note = Human gut metagenome
MVYVLDKDGHPLIPTNRHGKVRRMLKSGQVKVVKKCPFTIQLMYESEHNVQPVSLGIDAGSKRIGVSATTKTTVLYEADVELRDDIVKLLATRRQMRSFRRSRKTRYRPKRFDNRRRGKGWFAPSIRQKMNTHLVTVARVCEILPVTQIIVETASFDIQKIKNPKIQGVEYQRGEQTDFWNVREYVLFRDGHVCQCCKGKKKDPILNVHHIESRKSGGDAPNNLITLCETCHKGYHNGTIKLPKRIKRGMKFKDAAFMGIMRWTFYNTLKEKYEPDIPVSMTYGYLTKNTRIQHNLPKEHYIDARCISGNPDAKSDGVYYYQKKIRCHNRQIHKFNTLRKGVRKLNQSEYLVKGYRIFDKVRYQGKEYFVFGRRKTGFFDIRTLSGEKANNGSLSIKKIAFVDTRKNYITERRTV

SEQ ID NO: 21341 - protein, 419 aa, unidentified; identical to SEQ ID NO: 5677
  REGION 1..419: note = Human gut metagenome

SEQ ID NO: 21342 - protein, 512 aa, unidentified; identical to SEQ ID NO: 5549
  REGION 1..512: note = Human gut metagenome

SEQ ID NO: 21343 - protein, 518 aa, unidentified; identical to SEQ ID NO: 5766
  REGION 1..518: note = Human gut metagenome

SEQ ID NO: 21344 - protein, 438 aa, unidentified
  REGION 1..438: note = Human gut metagenome
LKENKASVVCRHPFTIHLWYKTGCATQEGSIGIDTGSQHIGVGVTCGDKVILKDEHELRSSMEKRSLMETRATMRRGRRYRKVRYRKPKWRHHTKRMYFEKANRKGQHWRKVKTTTQSPRPERWLPPSLQSKCDHHFRIIDRYLKYLPDSITKNLVIEVGRFDMAHMNDPTIHGEMYQRGPMYDTENLRAYIFARDGYKCACCKAKAGSIRKKDGTSVKLVAHHIQFRSRGATDNPKYMISVCDHCHTTKAHQLGGILYSWMETNKKVTRGLRDATFMNILRRRLFDGYPQAAFTYGNITAVDRKRLLLPKSHANDAVAISLFGKDVSVINATCQTLRYKQVRKSKRSLHEATPRKGRKEPNTKAIRNKKNTTHVNGFKLWDSVLVNGQKLFICGFTGSSAYLVDQDGHYVSPPGKTYKQWTLSKLSRLHPNGNWLMA

SEQ ID NO: 21345 - protein, 420 aa, unidentified
  REGION 1..420: note = Human gut metagenome
MQYVYVLSKHGEPMMPCSPGKARLLLKEKKARVVRRTPFTIKLLYGSAGYKQPITLGVDAGSKHVGLSASTEKRELYREEFTPRNDVIKLLSKRKQYRRSRRNRKTRYRAPRFNNRVHSKHKGWLAPSVEVKIQEHITVIKRICRILPISLVRVETAEFDTQRLKAILEGKSLPVGTDYQLGEMYDEYNVRQYVLKRDNYTCQCCGAHTTKKKTVKLHVHHLEGRQVGGNAPNNLITLCVDCHKALHAGKVKLDGKKRGKSFKDAAFMGIMRKTLMARLSKELPIPVQGTYGYITKMLREQNDIKKSHVNDARCISKHPLAEPCSACYRTKAIRHHNRQTHKANFSKKGIRERSQTPYVVEGYRLWDKVLYKGQECFISGRRTSGSFALKRLDGTSISESVTFKKLRLLEPATNYLIERM

SEQ ID NO: 21346 - protein, 408 aa, unidentified; identical to SEQ ID NO: 6795
  REGION 1..408: note = Human gut metagenome

SEQ ID NO: 21347 - protein, 434 aa, unidentified; identical to SEQ ID NO: 7534
  REGION 1..434: note = Human gut metagenome

SEQ ID NO: 21348 - protein, 421 aa, unidentified; identical to SEQ ID NO: 14103
  REGION 1..421: note = Human gut metagenome

SEQ ID NO: 21349 - protein, 447 aa, Moorena sp.; identical to SEQ ID NO: 5316

SEQ ID NO: 21350 - protein, 406 aa, unidentified; identical to SEQ ID NO: 2752
  REGION 1..406: note = Human gut metagenome

SEQ ID NO: 21351 - protein, 416 aa, Chamaesiphon sp.; identical to SEQ ID NO: 18515

SEQ ID NO: 21352 - protein, 408 aa, unidentified
  REGION 1..408: note = Human gut metagenome
MVYVQDIDGKPMMPTTRHGKVRRLLKANKATVVNLCPFTIRLTYATSGYKQEIVLGVDAGTKHVGLSATTKSKELYSSEVILRSDIVELLSTRRELRRTRRNRLRYRKPRFGNRVKSKHHGWVAPSVRHKVDAHIRVIDNICSTLPISRIIVEIAQFDTQKIKNPDISGNEYQEGDQLGFWNVREYVLARDGHKCQHCKGKSKDPILNIHHIESRKTGGDSPSNLITLCETCHKEYHKGNIDLKVKRGKSLRDAAVMGIMKWKLYEELKSRYPNVSMTFGYITKYNRIKYGIEKYHISDAFVISKNFNALRLEYHYKVRLVRRHNRQIHKQKVLKGGAKKPNQSPFEVFGFRLFDRVMFEGNYYFIFGRRKSGSFNIRDINGGNQRNVTYKKLKLSIGKRFMIQKEMN

SEQ ID NO: 21353 - protein, 423 aa, Arthrospira sp.; identical to SEQ ID NO: 9953

SEQ ID NO: 21354 - protein, 432 aa, Moorena sp.; identical to SEQ ID NO: 3304

SEQ ID NO: 21355 - protein, 388 aa, unidentified
  REGION 1..388: note = Human gut metagenome
LRDSMSKRKLMQSRASSRRGRRHRKTRYRHPKWRPKAKRVYCEIPDRKGRHWKKKDITFTSKRPKGWLPPSLQSKTDHHIRWIKKLQELLPEGYRLSIELGRFDPARLKDPEIHGELYQKGPQYDYENVRAYVLDRDRYTCQVCGKKGGKLHVHHILYRSHGATDDPQYMTTVCSGCHNTENHQQGGILYQWMQKQKKFTRGLRDATFMNILRKRLIEAFPGATFTYGNITKADRERLILPKSHGNDATAIAIVKTGIMTVKDKEPVIYIQQVRRKKRSLHEETPRKGRKEPNRKASRYDKNTKAVTVTKRKNKKKITITGCLFDRVELNGKKGWISGFTDKSCYVKDENDQYIRTSPKYKQVSLSKLKILHHCGNWAIGAKRSLGKG

SEQ ID NO: 21356 - protein, 470 aa, unidentified; identical to SEQ ID NO: 2949
  REGION 1..470: note = Human gut metagenome

SEQ ID NO: 21357 - protein, 387 aa, unidentified
  REGION 1..387: note = Human metagenome
LIRKGRAKLKSKYPMVIQLEKEVKSDEDDESHMVCGIDDGSTHVGLAIVQKCLTKNKVVFKGTIEQRQDVKHLMDVRRGYRRYHRYHKRYRQARFNNRSSSKRTCRLAPSIKQKKDAILRVLYQLNSWIDIQEYYLEDVCIDIRAMTDDYKPYRWQYQKSNRLDENLRKATILRDGCRCQECGKSNCILEVHHIRARRYGGANTIGNLITLCKKCHDKTESREKDFEERYFNMIKSKPKRFDYAMHVMQGKTYLREKISELGILHLTNGGETANKRIEWNIVKSHSNDAICIADGIPDTCDIKEWIIKPMRRKSKAKTDNVLGIKHRDLVSYTYKSGETHTGYVTALYPEQLALNFQSKTKHCKKVNARKCRLLWKFNKIYWLEQCV

SEQ ID NO: 21358 - protein, 431 aa, Calothrix sp.
MEGLMSKIFVLDTNKKPLDQIHPAQARQLLRNKKAAVFRRFPFTIILKNSCPDVSVSPLRLKIDPGAKFTGIALVNGSTGEVVFAAELKHRGFAIREALTSRRQLRRSRRARKTRYRKTRFLNRTRPDGWLAPSLQSRIENIKTWVERLRKLAPIAAISQELVRFDMQLMRNPDIQGKEYQQGTLAGYETREYLLEKWNRQCAYCGVKDVPFQVEHIHPRAKGGSNSITNLTLSCEECNTKKGTKDIKEFLKKDASKLEKILKQARRPLADAAAVNTTRWALFRALKETGLPVETGSGGLTKFNRSQQKLAKTHWIDAACVGESTPLLNIKGIRPLLIIANGHGTRQMCGTDKFGFPSRHRTNKQIHFGFQTGDIVKAVVTKGKKIGKYVGRVLCRATGSFDIATKTGRISGISHKYFLATHKKDGYSYSI

SEQ ID NO: 21359 - protein, 427 aa, Nostoc sp.; identical to SEQ ID NO: 2670

SEQ ID NO: 21360 - protein, 422 aa, Moorena sp.
MVVYVISKSGNQLMPTTPARARKKLESGRAKCIRREPFTIKLTYESGEAAQPLCLGVDTGSDKLGSAVVDEDNNVYYMSEVQVRNDIAEKMKQRSKYRRNRRNRKTRYRKPRWNNRKNSIRKDRFSPTMRSKIESHVKEVNFVKSILPIAEVIVETGTFDPHALKNPDVLKNKWLYQRGTNYGYANTRAFVLHRDEHVCQHCKGKSKDNRLEVHHIQFKSEQGSDDVENLITLCKNCHNEVHKLVIKLNVKGKVKGMLKHATQMNSIRVQLLRIVNCRKTFGYITKEHVWAMELTKEHYNDAIAIACLNNIERDGSVDLAFKTDRVIYKKCVPYRDMQKNKGVRNEQHIPTGKIQGFRKFDKVLYNSKDYFIKGRMSTGYAILMDITGKEVKLKPIPKFTKMKRLEARTSWIIQVRTILKTA

SEQ ID NO: 21361 - protein, 408 aa, unidentified; identical to SEQ ID NO: 8232
  REGION 1..408: note = Human gut metagenome

SEQ ID NO: 21362 - protein, 512 aa, unidentified; identical to SEQ ID NO: 14939
  REGION 1..512: note = Human gut metagenome

SEQ ID NO: 21363 - protein, 406 aa, unidentified
  REGION 1..406: note = Human metagenome
MVYVQDINGKPMMPTTRHGKVRRLLKENKAVVVNLCPFTIKLMYVTSDYKQEIVLGVDAGTKHVGLSATTKSKELYSSEVILRNDIVDLLSTRRESRRTRRNRLRYRKPRFDNRVKNKRQGWIAPSVRYKVDAHIRVIDNVCSILPISRIVVEVAQFDTQKINNPEISGKEYQEGDQLGFWNVREYVLARDGHKCQYCKGKSKDAILNVHHIESRKTGGDSPSNLITLCETCHKEYHKGNIDLKIRRGKSLRDAAVMGIMKWKLYEELRSRYDRVSMTFGYITKHNRIKYGIEKSHTSDAFVISKNINAKRIGCQYLKRLIRRHNRQIHKMKILKGGKKKNNQAPFEVFGFRLFDKVLYNNKICFVYGRRKSGSFNIRDFNGENSKDVSRKKFKLIRGKRHPIILK

SEQ ID NO: 21364 - protein, 401 aa, Moorena sp.
MEKVYVQDKNGKPLDPTNQARARKLLDKDRAEVVQREPFTIKIVDRKKENSYTRDVTLGIDAGYKKVGFSAVNEDEELINGVLELRTDISKKLEQRASYRRNRRHRNTRYRQPRFDNRKKEKGWLAPSIKHKMNSHIRLIDKLKEILPITKIIIEVAKFDQQKIQNPEISGVEYQKGTLQGYNIRNYLLEKYDYQCVYCGKKDTPLEIEHIVPKSRGGSNRVSNLAISCVDCNQRKDNQTAEEFGFPKIQEQAKEPLKSTAFMNIVRWKLVNELNCGYTFGHITKKNRIEQSLEKTHYNDAFIIAGGKDQKKCRPINTIINRRNNRSVQTNRKRYGVSIRRHKYPLSPGDLVKYKGGSFKVKGMFNYGKWVRMENVDGDTVNSNVKKTELMKYGKGLCFAC

SEQ ID NO: 21365 - protein, 432 aa, Moorena sp.; identical to SEQ ID NO: 17529

SEQ ID NO: 21366 - protein, 421 aa, unidentified
  REGION 1..421: note = Bioreactor metagenome
MLVFVKNKHGENLMPCKPSKARKLLKQKKAKIISYKPFTIQLLYGSSGYKQPVTLGVDLGSKHIGIAVTSEDKVLIKGEIELRDDIKENLDIRRQYRRSRRYRKTRYRKPRFNNRKRPEDWLPPSIQSRIDNTFRWIDNFINLLPSPKLCIEVGKFDVQKMMNSDIEGVEYQQGETYGYHDVRYYVFARDNYTCQVCKKKGKILQTHHIVYKSKGGTDRPSNLITVCTDCHTHKNHQEGGIFYKWMMEKKKMPSYKETPLMNIMRRRVFEKYPEANIVYGSYTTIRRKELGLEKTHYNDAIAITGIESIKHNPDNYFKIKQFRKKKRSLHEAMPRKGRKEPNRTQKRNSKNTKYRNGFYLNDKVKVFGKVGFITGFTNGGAYIQDIEGNYITIPNKSYKQVSFKYIEFINHNNNWQFISHL

SEQ ID NO: 21367 - protein, 431 aa, unidentified; identical to SEQ ID NO: 4463
  REGION 1..431: note = Human gut metagenome

SEQ ID NO: 21368 - protein, 396 aa, unidentified
  REGION 1..396: note = Human gut metagenome
VVRRTPFTIQLTIATGESKQPVSLGVDAGYKHVGLSASTEKAELYASEVELRKDITDLLSARRALRQSRRNRKTRYRAPRFDNRIRTKRKGWLAPSVENRINAHLSRIEAVLRLLPVTKITVETASFDMQLLKNPEISGKEYQEGEQLGFWNVREYVLFRDGHVCQHCYGRSKDPVLNVHHLESRRTGGDSPGNLITLCETCHEALHRGEIALKTKRGHSFRAEAFMGMMRWEVLNRLKASHSELEVNNTYGYRTKHARIVNGIDKSHCADAFCIAGNLGAERLCEFFFQKQTRRNNRQIHKLSILKGGIRKRNQAPFEVKGFRLFDKVACQGEEGFIFGRRSSGSFDVRKLDGTRISAGISCKKLRLLEKRRTYLTEIRKEEALPPLPEGRGLRA

SEQ ID NO: 21369 - protein, 408 aa, unidentified; identical to SEQ ID NO: 3192
  REGION 1..408: note = Human gut metagenome

SEQ ID NO: 21370 - protein, 408 aa, Moorena sp.
MKVYVRNQDGAPLMPCTPAKARKLLRAGKARVAARSPFTIQLGWQCEGQVQDVVVGIDKGSSVTGISCVGNGTVLLAAEIHHRRDVKEKLDTRRAHRRSRRNRKWYRPRRFLNRASSTRSGRLPPSIKTNVEEVIRVVRQLPLPISKIVVEDVQVDIARLNDPTLAGSRYQDPTRLDENLRIACLMRDGYTCRHCGKRNCRLEAHHVVYREHGGKGTLANLLTLCEACHEKVHAGTITLQVTGASGRLDQIAQRSMQGKTYLYASLGASAPFVTVFGYETSAFRKRRGLAKTHTIDALCVATLGSGEIVTPECPNTYRIAFRPRQTRRQYHDLPRKGQGRVRYQVNEELAGFRKGDIVRVKGRWVKQINSIYSNGYVAFKRVPGEPTTARPRDCRLLERGRTVVWSHQ

SEQ ID NO: 21371 - protein, 493 aa, unidentified; identical to SEQ ID NO: 2644
  REGION 1..493: note = Human gut metagenome

SEQ ID NO: 21372 - protein, 395 aa, unidentified
  REGION 1..395: note = Human gut metagenome
VKSESHEYVSAQYDTLQDEKEHHDDCRMHRRTRRNRLRYRKRRFDNRKRDKGWLAPSLGHKKQLNISLLEQYVSVIPITHATVEVGSFDTMLLQAIQKGEAKPEGVDYQKGPRYNLATLREAVFYRDDYTCQVCGRKITDGAILHMHHMFYWKGRHGNSLSELITVCEKCHTPANHQKGGKLYGFGEDIKFANLSGAAFMNTVRWQIVNVLYAAFGKPFVTFTYGAMTKEKRIALHLEKSHNNDAYAMGSFHPVNRCAFEHYEKVKRNNRILEKFYDSQYIDTRTGELTNGKSLFNGRISRSHKKDSENLHKYRGKRICKGHRALRRKKVALNPGDLVSLNGEILVVYGTHTKKNGSVNVEFKTPSRDGKKSASLKKLKIVKTSNLMHSAWTKVS

SEQ ID NO: 21373 - protein, 536 aa, unidentified; identical to SEQ ID NO: 2718
  REGION 1..536: note = Human gut metagenome

SEQ ID NO: 21374 - protein, 423 aa, Arthrospira sp.; identical to SEQ ID NO: 3735

SEQ ID NO: 21375 - protein, 472 aa, Solobacterium sp.
VVGNRLLSIKPLINIGEGVIYSSICTGLSLQTYQKRKEVPCMVYVLDINGQPLMPTTRHGKVRRLLNSHLAKVVKRCPFTIQLLYQSTKEIQPVSLGVDAGSKHIGMAATTEKKVVYQEELSARNDVVKLLSARRTLRRTRRNRKTRYRKPRFNNRVHSKHKGWLAPSVEVKIQEHITTIKRICQILPISEIQVETAEFDLQRLKAMEEGRTPPVGTDYQLGEQYDFYNTRQYVLHRDGYTCQCCGTHDNNIKLHVHHIESRQTGGDAPNNLIILCEHCHKALHEGKLELPKGKKRGKSYRDATFMGVMRKTLLERLKKEIDVPVEGTYGYITKYWRERAGLEKSHIHDAVCISQYPYAKPLDIYYLTKTVRHHNRQIHKSNFSKGGIRKRNQAPYLVKGFRLFDKVLYQGKEYFIFGRRATGYFDIRTLDGTKVNKGSISYKKLRIQDTAKAYLKEARAIPHMDKFTCVLA

SEQ ID NO: 21376 - protein, 448 aa, unidentified
  REGION 1..448: note = Human gut metagenome
ILKTCFAAFNLAKVVVLMDAWDIIVILNKRGKPLMPCSPAKARLLLKEKKAVVVRRTPFTIQLTIATGETKQPVSLGVDAGYEHVGLSASTEKAELYASEVELRQDVSDLLSARRALRQSRRNRKTRYRAPRFDNRIRTKRKGWLAPSVENRINAHLSRIETVLRLLPVTKITVETASFDMQLLKNPDIAEKEYQEGEQLGFWNVREYVLFRDGHVCQYCHGRSKDPVLNVHHLESRRTGGDSPGNLITLCETCHKALHRGEIKLRAKRGQSFRAETFMGIMRWEVLNRLKASHSKLEVNNTYGYLTKHARIKSGITKSHCSDAFCIAGNLGAKRLGEFLFQKQTRRNNRQIHKLSILKGGIRKRNQAPFEIKGFRLFDKVACKGEEGFIFGRRSSGSFDVRRLDGTRISAGISYKKLRLLQKRQTYLTEIRKEEALPPLPEGRDLRA

SEQ ID NO: 21377 - protein, 428 aa, unidentified; identical to SEQ ID NO: 5055
  REGION 1..428: note = Human gut metagenome

SEQ ID NO: 21378 - protein, 411 aa, unidentified
  REGION 1..411: note = Human gut metagenome
MVYVQDIDGKPMMPTTRHGKVRRLLKDNKAVVVNTCPFTIKLTYKTSDYKQEIVLGVDAGTKHVGLSATTKSKELYASEVILRSDVVDLLSTRRGLRRTRRSRLRYRKQRFNNRVKSKKDGWIAPSVRHKIDSHIRIISFVYSILPVSKLIIEVAQFDTQKIKNPEISGKEYQEGEQLGFWNVREYVLARDGHKCQHCKGKSKDPILNIHHIESRKIGGDSPSNLITLCETCHKEFHKGNIKLKVSRGKSLRDAAVMGIMKWKLYEELKSKYDNVSMTFGYITKYNRINHGIEKSHVSDAFVISRNFDSERLGYYYKLKLVRRHNRQIHKMKIPKGGKKRMNQSPFKVFGFRLFDKVMFQGEERFIYARRLSGQFKIKDIDGNNERNISYKKLRYVSHGLISIKTNLFLSQ

SEQ ID NO: 21379 - protein, 416 aa, unidentified
  REGION 1..416: note = Fermentation metagenome
MTNNINNNQYSFVIDSKNNKLSPCKINKAWYLIRKGKAIQINKYPMTIQLKKEIKDKQDNSEFICGIDDGSSHVGIAIVQKCESKNKVFFKGTIEQRKDVKHLMDVRRGYRRYKRNHKRYREARFNNRSASTRKGRIAPSILQKKQSILRVINRLNKYINITEYHLEDVAIDIRALTEGHKLYKWQYQKSNRLDENIRKAVILRDNCKCMECGKSNCILEVHHITPKRLHGDNNLNNLITLCSNCHQKTEEKEELFIDRYYKMINGKNIRFDYAQHVMQGKTYLRKELSKLGKLFLTTGGDTANKRIDWDIIKSHSNDAIVITDLKVDADDCNIKDWIIKPMRRQSKANIDELQGFKHRDLIKYTKRNGENYIGYITSLMPETRTLSFTTLNNKILKRYGIKSCKLIWRFNKIYWL

SEQ ID NO: 21380 - protein, 509 aa, unidentified
  REGION 1..509: note = Human gut metagenome
VYVLNKDGKPLMPTTRCGHVRYLLKEKKARVVKTKPFTIQLLYETNDVVQPLYLGIDPGRTNIGVAVVKADGTAVFTAHLETRNKEIPKLMKKRKDSRCARRTNGRRCRRQRRAKANGTISKKCVKQATAQNGSASKRAKKIGVIKRHLPGCEKEVLCIGIKNKEAKFNNRTRPAGWLTPTANQLLQTHINLIKKIQKLLPISDVVLEINKFAFMQLDNPNIQKWQYQQGPLYQKANLEEAVSEMQEHHCLFCKKKIDHYHHVVPQHKNGSNTIDNIVGLCTKHHDLVHKDTAWHEKLTKKKTGLNKKYGALSVLNQIIPALTKELSSIFPKHFFVTTGKSTYDYRAAHGVSKDHWLDAYCIACSVLPNDVCDSSINNRVPYELKQFRRHDRRALHKENMSRVYTLNGKKVATNRHKATEQTADSLEEFRQNHPDDVCKLKVKENHSEYRNPKRNFPGCVFLVGKRTHVMQGTSGSHNGKADGYYDTNGNSYSSGKCKFVAKNEGIIFA

SEQ ID NO: 21381 - protein, 412 aa, unidentified; identical to SEQ ID NO: 4932
  REGION 1..412: note = Human gut metagenome

SEQ ID NO: 21382 - protein, 428 aa, unidentified
  REGION 1..428: note = Human gut metagenome
KVYVINKHGRPLMPCSPAKARHLLDAGKAKVKKRTPFTIQLVYGSSGYTQEVILGVDAGSKTIGVSALTKKEELFAANVIPRNDVVDLLSTRREFRRARRNCKTRYRKPRFDNRVRSKHKGWLAPSVEVKIQGHITAIRRVCGILPVSKVVVETAEFDLQLLKAIEKGKPVPQGEDYQQGEMYGHYNVRQYVLWRDDYTCQCCGAHTTKKKEVRLHVHHLESRKTGGDAPSNLITLCDSCHEKFHKGLIAEKDFKKRKRRSTWDATFMGIMRKTLMQRLCSELPIHVVETRGYITKATREKLLVLPKSHINDALAIAQGKHGFNVGYLPGILQIDMIYTIRPVRHHNRQLHKATILKGGIRKSNQTEKYVFGYRLFDKVQFNGQDCFIWGRRTTGIFTIKTINGKMIKDGISFKKLKPVEKSTSYLIA

SEQ ID NO: 21383 - protein, 411 aa, unidentified; identical to SEQ ID NO: 3917
  REGION 1..411: note = Human gut metagenome

SEQ ID NO: 21384 - protein, 414 aa, unidentified
  REGION 1..414: note = Mouse gut metagenome
MPCSPAKARLLLKEKKAIVKRRTPFTIQLTIATGETKQPVSLGVDAGYKHVGLSASTEKAELYASEVELRQDITDLLSARRALRQSRRNRKTRYRAPRFDNRISTKRKGWLAPSVENRINAHLSRIEAVLRLLPVTKITVETASFDMQLLKDPDISGKEYQEGEQLGFWNIRDYVLFRDGHVCQHCHGRSKDPVLNVHHLESRRTGGDSPGNLITLCETCHKALHHGEITLKTKRGQSFRAEAFMGIMRWEVHNRLRALHPGIEVSNTYGYRTKHARIANGIAKSHCADAFCIAGNLGAERLGEFFFQKQTRRNNRQIHKLSILKGGIRKRNQAPFEINGFRLFDKVACKGEEGFIFGRRSSGSFDVRKLDGTRISAGISYKKLRLLQKRQTYLTEIRKEEALLALPEGRSLRT

SEQ ID NO: 21385 - protein, 421 aa, unidentified; identical to SEQ ID NO: 4235
  REGION 1..421: note = Human gut metagenome

SEQ ID NO: 21386 - protein, 457 aa, unidentified; identical to SEQ ID NO: 10736
  REGION 1..457: note = Human gut metagenome

SEQ ID NO: 21387 - protein, 408 aa, unidentified; identical to SEQ ID NO: 5694
  REGION 1..408: note = Human gut metagenome

SEQ ID NO: 21388 - protein, 431 aa, unidentified
  REGION 1..431: note = Human gut metagenome
MPNKVYVINKHGRPLMPCSPAKARHLLDAGKAKVKKRTPFTIQLVYGSSGYTQEVILGVDAGSKTIGMSASTTKEELLSAEVKPRNDVVDLLSTRREFRRARRNRKTRYRKPRFDNRVRSKHKGWLAPSVEVKIQEHITAIRRVCGILPVSKVVVETAEFDLQLLKAIADGKPVPQGEDYQKGEMYGHYNVRQYVLWRDNYTCQCCGTHPSKKKEVRLHVHHLESRKVGGDAPDNQVTLCESCHEKLHKGLIAEKDFKKRKRKSTRDATFMGIMRKTLMQRLCSELPIPVVKTRGYITKATREKLLVLPKSHTNDALAIAQGKRGFNVGYLPEIAQIDKIYTIRPVRHHNRQLHKATILKGGIRKSNQTEKYVFGYCLFDKVQFNGQDCFIWGRRTTGIFTIKTINGKMIKDGISFKKLKPVEKSTGYLIA

SEQ ID NO: 21389 - protein, 446 aa, Pseudomonas sp.; identical to SEQ ID NO: 10661

SEQ ID NO: 21390 - protein, 462 aa, unidentified; identical to SEQ ID NO: 8743
  REGION 1..462: note = Human gut metagenome

SEQ ID NO: 21391 - protein, 450 aa, Moorena sp.; identical to SEQ ID NO: 4205

SEQ ID NO: 21392 - protein, 424 aa, unidentified; identical to SEQ ID NO: 12629
  REGION 1..424: note = Human gut metagenome

SEQ ID NO: 21393 - protein, 456 aa, unidentified
  REGION 1..456: note = Human gut metagenome
MSTCVCVLSNSGERLMPTFRLGKVRRLLKDGKAKIVKHHPFTIQLLYDSKANTQPIEICEDVGYNYIGISVKSESHEYVSAQYDTLQDEKEHHDDCRKYRRTRRNRLRYRKLRFDNRKCSEGWLAPSLEHKKQLNIRLIERYVSVIPITRATVEVGSFDTMLLQAIQKGESKPEGVDYQKGPRYNLATLREAVFYRDNYTCQVCGRKIADGAILHMHHMFYWKGRHGYQLDELVTACEKCHTPANHQKGGKLFGFGEDKEFANLSGAAFMNAVRWQIVNALYATYGKEFVTITYGAMTKEKRIALQLEKTHSNDAYAMGDYYPAHRCVFRHYQKRRRNNRVLEKFYDATYIDTRTGNKAKGKELFNGRISRNHKKDSEDLHKYRSKMVSKGRRSIRRQRYAIQPYDTVRLEGKTYITSGCHNKGTRLLIPANGKSKSVAISKVQVVCHAGAWIQII

SEQ ID NO: 21394 - protein, 451 aa, unidentified
  REGION 1..451: note = Human gut metagenome
VLYTGNLRPHWRRNHNGRYPGLQQSSTKVKRKECLYMVYVLDKNGHPLMPTSRHGKVHRMLKSGQAKVVRKCPFTIQLLYESEHNVQAVSLGIDAGSKHIGVSATTKTTVLYEADVELRDDIVKLLAIRRQMRSSRRSRKTRYRPKRFDNRRRGEGWLAPSIRQKINTHLVTVAHVCEILPVSQIIVETASFDIQKIKNPEIQGIEYQQGEQMDFWNTREYVLFRDGHVCQCCKGKKKDPILNVHHIESRKTGGNAPNNLITLCETCHKGYHNGTIKLPKKIKRGMKFKDAAFMGIMRWAFYNTLKEKYEPDIPVSMTYGYLTKNTRIRHNLPKEHYIDARCISGNPDAVSDGVYYYQKKVRCHNRQIHKFNTLRKGVRKLNQSEYLVKGYRIFDKVRYQGREYFVFGRRKTGFFDIRTLSGEKANKGSISIKKIAFVDTRKNYITERRTV

SEQ ID NO: 21395 - protein, 366 aa, unidentified; identical to SEQ ID NO: 10799
  REGION 1..366: note = Human gut metagenome

SEQ ID NO: 21396 - protein, 427 aa, unidentified
  REGION 1..427: note = Selenomonadaceae bacterium UBA7260
MERGENIMVYIQSKNGRPLMPTENHAKVRRLLKAGKARVVKLVPFTIRLLGTSHCYQQPVAAGIDAGSKHVGLSASTAKKELFSAELRPRNDVVGLMSDRREFRRRRRNGLRYRKPRFDNRVHSKHKGWLAPSVEVKIWNHIQGIRLMADILPITTIVVEDAEFDLQRIRAMEDGKPLPEGRDYQQGEQLGHYNVRQYVLWRDGYTCQCCGAHGTDRKPVKLHVHHIESRKTGGDAPDNLVTLCEACHKAYHGKKIDLPIKKRRRKPTRDMVFMGIMRKTLFSRLRAMFPEVEIKETYGYVTKYWREKLGFAKTHTTDAFVIAGNFDAGRIEEQMLIIPKRQHNRKIHKVTVGKGGMRKLNQTPKYVHGFQLFDRVLCNGEEGFIFGRRASGGFDIRKLDGTRINANISYKKLRLLEKRKPLLVAYA

SEQ ID NO: 21397 - protein, 462 aa, Scytonema sp.; identical to SEQ ID NO: 10343

SEQ ID NO: 21398 - protein, 470 aa, unidentified; identical to SEQ ID NO: 2825
  REGION 1..470: note = Human gut metagenome

SEQ ID NO: 21399 - protein, 257 aa, unidentified
  REGION 1..257: note = Human gut metagenome
PQGEDYQKGEMYGHYNVRQYVLWRDNYTCQCCGAHATKKKEVRLHVHHLESRKSGGDAPGNLVTLCDSCHEKLHKGLITEDDFKKRKRKSTRDATFMGIMRKTLIQRLRAELTIPVAETRGYITKATREKLLVLPKSHTNDAQAIAQGKQGFNVGYLPGILQIDKIYTIRPVRHHNRQLHKATILKGGIRKSNQTEKYVFGYRLFDKVQFNGQDCFIWGRRTTGIFTIKTINGKMIKDGISFKKLKPVEKSTSYLIA

SEQ ID NO: 21400 - protein, 453 aa, unidentified
  REGION 1..453: note = Human gut metagenome
MPVAVISKTGERLMPTSEHRARKLLKSGKAIKYSYHPFTIQLTERESGDVQPIELCVDTGYIHIGISVKSEKHEYLAEQIDTLTDEKARHDACRMYRRQRRSRKRYRQPRFNNRKRNDRWIAPSLEHKKSIHIQAILRICKVMPVTDITLEMGNFDTQVLKAREEGKPLPQGVDYQHGERYGITTLREAVFARDGYTCQCCGRAIKDGAILHVHHIVYRSQGGTNRMSNLITVCDKCHTPANHKQGGKLYNWKPKIASFKGATYMTTIRWKLYNEVKALFPDIDIDIHITYGAETKERRRALDIDKSHVNDAFVMGQFHPKHRSKPICYKKKRRNNRCLEKFYDATYIDSRDGKKRSGQELFNGRISRNHKKDSENLHQYRLQKVTPGRRAIRRQHYPIQPHDIIVYNGNKIEVSGCQHKGTRVVFSKTKKSVQISKIKLFKYAGGYSKSVFN

SEQ ID NO: 21401 - protein, 413 aa, unidentified; identical to SEQ ID NO: 7120
  REGION 1..413: note = Human gut metagenome

SEQ ID NO: 21402 - protein, 420 aa, unidentified
  REGION 1..420: note = Human gut metagenome
MPNKVYVINKHGRPLMPCSPAKARHLLDAGKAKVKKRTPFTIQLVYGSSGYTQEVILGVDAGSKTIGMSASTTKEELLSAEVKPRNDVVDLLSTRREFRRARRNRKTRYRKPRFDNRVRSKHKGWLAPSVEVKIQEHITAIRRVCGILPVSKVVIETAEFDLQLLKAIADGKPVPQGEDYQQGEMYGHYNVRQYVLWRDNYTCQCCGTHPSKKKEVRLHVHHLESRKVGGDAPDNQVTLCESCHEKLHKGLIAEKDFKKRKRRSTRDATFMGIMRKTLMQRLCSELPIPVVKTRGYITKATREKLLVLPKSHTNDALAIAQGKQGFNVGYLPGIVQINKIYTIRPVRHHNRQLHKATILKGGIRKSNQTEKYVFGYCLFDKVQFNRQDCFIWGRRTTGIFTIKTINGKMIKDGISFKKLK

SEQ ID NO: 21403 - protein, 451 aa, unidentified; identical to SEQ ID NO: 5203
  REGION 1..451: note = Human gut metagenome

SEQ ID NO: 21404 - protein, 423 aa, Moorena sp.; identical to SEQ ID NO: 2845

SEQ ID NO: 21405 - protein, 504 aa, unidentified; identical to SEQ ID NO: 3854
  REGION 1..504: note = Human gut metagenome

SEQ ID NO: 21406 - protein, 431 aa, Escherichia sp.; identical to SEQ ID NO: 3801

SEQ ID NO: 21407 - protein, 476 aa, unidentified; identical to SEQ ID NO: 15014
  REGION 1..476: note = Human gut metagenome

SEQ ID NO: 21408 - protein, 430 aa, unidentified; identical to SEQ ID NO: 4817
  REGION 1..430: note = Human gut metagenome

SEQ ID NO: 21409 - protein, 447 aa, unidentified
  REGION 1..447: note = Human gut metagenome
VPAYRIKHITKKEAPYMVYVLVIDGQPLMPTSRHRKVRKLLNSHLAKVVKRCPFTIQLLYQSTKETQPVSLGVDAGSRHIGLAATTEQKVVYQEELVPRNDVVKLLSARRALRSSRRSRKTRYRKPRFNNRVHSKHKGWLAPSVEVKIQEHITAIKRICQILPISDIHVETAEFDLQRLKAMEEGRPLPVGTDYQLGEQYDFYNTRQYVLHRDEYTCQCCGTHDNNVKLHVHHIESRQTGGDAPNNLITLCEHCHKLLHAGKTILPKGKKRGKSYRDATFMGVMRKTLLERLKKEVDVPVTGTYGYITKYWREKAGLEKSHINDAICISKYPYAKPLDTYYLVKTVRHHNRQIHKSNFSKGGIRKRNQAPYLVKGFRLFDKVLYQGKSYFIFGRRATGFFDIRTLNGAKVNKGSISYKKLRIQDTANAYLKEIKAIPHMNKFTCVLA

SEQ ID NO: 21410 - protein, 419 aa, unidentified; identical to SEQ ID NO: 3670
  REGION 1..419: note = Human gut metagenome

SEQ ID NO: 21411 - protein, 191 aa, unidentified
  REGION 1..191: note = Human gut metagenome
MVAVVDLFGKPLMPTNEYRARRLLKQKKAKIFGYRPFTIQLTERKSTEIQPIELCMDTGYIHIGISAKSERHEYLGMQIDTLTDEKLKRDDKRQYRRQRRNRKRYRAPRFDNRRRKEGWIAPSLEHKKEIHIDAIQRICKVMPITDITLEMGNFDTHVLKAVEEGKPLPQGSDYQYGERYGIATLREAFIA

SEQ ID NO: 21412 - protein, 415 aa, unidentified; identical to SEQ ID NO: 5047
  REGION 1..415: note = Human gut metagenome

SEQ ID NO: 21413 - protein, 689 aa, Acrocarpospora sp.; identical to SEQ ID NO: 12145

SEQ ID NO: 21414 - protein, 424 aa, unidentified; identical to SEQ ID NO: 3434
  REGION 1..424: note = Human gut metagenome

SEQ ID NO: 21415 - protein, 451 aa, unidentified
  REGION 1..451: note = Human gut metagenome
MSVAVISKTGERLMPTSEHRARKLLKSGKAIKYSYHPFTIQLTERESGDVQSIELCVDTGYIHIGISVKSEKHEYLAEQIDTLTDEKARHDACRMYRRQRRSRKRYRQPRFNNRKRNDRWIASSLEHKKSIHIQAILRICKVMPVTDITLEMGNFDTQVLKAREEGKPLPQGVDYQHGERYGITTLREAVFARDGYTCQCCGRAIKDGAILHVHHIVYRSQGGTNRMSNLITVCDKCHTPANHKQGGKLYNWKPKIASFKGATYMTTIRWKLYNEVKALFPDIDIDITYGAETKERRRALDIDKSHVNDAFVMGQFHPKHRSKPICYKKKRRNNRCLEKFYDAKYIDSRDGKKRSGQELFNGRISRNHKKDSENLHQYRLQKVTPGRRAIRRQHYPIQPHDIIVYNGNKIEVSGCQHKGTRVVFSKTKKSVQVSKIKLFKYAGGYSKSVFN

SEQ ID NO: 21416 - protein, 426 aa, Scytonema sp.; identical to SEQ ID NO: 2766

SEQ ID NO: 21417 - protein, 518 aa, unidentified; identical to SEQ ID NO: 20338
  REGION 1..518: note = Human gut metagenome

SEQ ID NO: 21418 - protein, 425 aa, unidentified
  REGION 1..425: note = Human gut metagenome
MLVYVVTKDKQPLMPCTPVIARLLLKQEKAKVKRRDPFTIQLLYETTEYRQDLELGVDTGSGKFATAVRTEQNEIVYLSEVAVRNDITSKMTERRTKRRSRRHRKTRYRKPRFDNRRNSKRKDRFSPTMQSKIHSHVKEIEYIQSILPITRIILETGQFDPHRMKNPALADPNVRHWGYQKGPNYGYENTRAMVLDRDNHQCQCCHGKRKDRHLEVHHIVFRSQGGSDDAKNLITLCHTCHQALHKGKIHLDLEGMGKGTLKYATQMNSIRKQLLRRYSEAVETYGYITKANRLAMDLPKEHYIDACVIATEGRQFTINSLLYRKKCVSAGDFQQYHGERSEIRQTTGKIMGFRKYDKVRYFRKYYFIKGRMSTGYAVLMDVNGDTVKFSDMPWGFKTPKLERMERIQARSTWMVMGEKVTPNIV

SEQ ID NO: 21419 - protein, 308 aa, unidentified
  REGION 1..308: note = Human gut metagenome
VDSGYKHIGLSATTEKDELYASQVELRQDITDLLSARLALRRSRRSRKTRYRAPRFDNRVASKRKGWLAPSVENRIAAHMSRVEAVMRVLPVTAITVETAAFDTQLLKNPDIAERRTNKANSSDFGTCGNTYCSETDTFASTAAGSTKIRYSMFTTLRADGPEAMRRTISSRCARPVTRLSIEGRSNSKSSEGSRSKQKPSWASCVGRLFERLKKAHPELRVRNTYGYLTKHKRISHGIAKSHCADAYCIADNLGAKRLEGFFFQKANPKAQPADSQAVDPERRIEKEEPGSLRSQRLSSFRQSDLQR

SEQ ID NO: 21420 - protein, 543 aa, unidentified
  REGION 1..543: note = Human gut metagenome
LTFVSIYVQRVYGRTRRFFQSAALHSGRQARGNIYPAGQTAGVLQKEVRTMAAVYVISASGKPLMPTTRCGHIRGLLNAGKARVVEREPFTIQLKYETPDVTQPLYLGIDPGRTNVGSAVVREDGECVFTAQLTTRNKDVPKLMKARKQFRMAHRRLKRRCKRQRRAKAAETLSQKGEFQRLLPGYEEPILCKGIRNKEARFNNRQRPAGWLTPTANHLLLTHLNMVKKLQKLLPITDVVLEVNRFAFMAMENPSIRRWQYQQGPLYGKGSVEDAVYAQQDGHCLFCGKPIAHYHHVVPQHKNGSETLENRVGLCNEHHDLVHKDRAWDAKMKETKAGLNKKYHALSVLNQIIPALTEQLTAMFPQHAFVTTGKDTADFREDYGIAKEHHLDAYCIACSVLAEPTKVAAPTGKPHRLMQFRRHDRQVCHKENIKRVYLSEGNAVATNRHKAIEQKDDSLEEFRKTHTQQEVSALTVKDHQPVYKDMRRFMPGGVFLFNGKVHTLQRSHGRYKGMPFYYIDTDGSKNHAKGCIFLQQNCGLRWV

SEQ ID NO: 21421 - protein, 548 aa, unidentified
  REGION 1..548: note = Human gut metagenome
NLLLRQERFIVKEVANMSTVYVLNKDGKPLMPTTRGGHVRHLLKEQKARVVQSNPFTIQLLYKTNDAVQPLYLGIDPGRTNIGVAVVKADGTAVFTAHLKSRNKEIPKLMQDRKRARRARRTNGRRHRRQRRAKANGTISKKCVKQTTTQNGSVSKRAKEIGIIKRHLPGCEKDVLCIGIKNKEAKYTNRERPEGWLTPTANQLLQTHVNLVKKVQKLLPISDVVLEVNKFAFMRLDNPDIQKWQYQQGPLYKKESLESAVSEMQEHHCLFCKKPIDHYHHVVPKSENGSNTIANIVGLCAEHHNLVHKDVAWQEKLAEEKTGLNKKYGALSVLNQIIPALTNKLSVLFPKHFFVTAGKSTHDYRAAHGVSKDHWLDAYCIACSVLPSNVCDSNINNHVPYELKQFRRHDRRVLHKANMSRVYTLNGKAVATNRHKAIKQTTDSLEEFRQNYPDDVYKLKVKEHHPAYRNLNRNYPGSVFLVGKQAHVMQGIASSKDGKTTKYNDTNATTITAGKCKFVAKNSGILFVQCKFRKALSDGTTKKLQYPV

SEQ ID NO: 21422 - protein, 443 aa, unidentified
  REGION 1..443: note = Human gut metagenome
VVKANGTAVFTAHLETRNKEVPKLMQDRKKARRARRTNGRRCRRQRRAKANGTISKKCVKQDTAQSKNPSKRAKEIGIIKRRLPGYKKDVLCIGIKNKEAKYTNRTRPEGWLTPTANQLLQTHINLVRKIQKFLPISDVVLEVNKFAFMRLDNPDIQKWQYQQGPLYQKGSLENAVSEMQEHHCLFCDKPIDHYHHVVPQSENGSNTIANIVGLCAEHHNLVHKDAAWQKKLAEEKVGLNKKYGALSVLNQIIPALTNKLSVLFPKHFFVTAGKSTHDYRATHGVSKDHWLDAYCIACSVLPSDVCDSNINNHMPYVLKQFRRHDRRVLNNENMNRVYTLNNKAVAINRHKAKDQKTVSLEEFRKEHPDDVCKLKVKEHHPTYRNMNRNFPGSVFLVGKQIHVMQGIASSKDGKATKYNDTSATAIAARKCKFVAKNTGILFV

SEQ ID NO: 21423 - protein, 465 aa, unidentified
  REGION 1..465: note = Human gut metagenome
MSTCVCVLSNSGERLMPTFRLGKVRRLLKDGKAKIIKHHPFTIQLLYDSKTNTQPIEICEDVGYNYIGISVKSESHEYVSAQYDTLQDEKKHHDDCRKYRRTRRNRLRYRKPRFDNRKRSEGWLAPSLEHKKQLNIRLIERYVSVIPITRATVEVGSFDTMLLQAIQKGESKPEGTDYQKGPRYNLATLREAVFYRDNYTCQVCGRKIADGAILHMHHMFYWKGRHGYQLDELVTACEKCHTPANHQKGGKLFGFGEDKEFANLSGAAFMNTVRWQIVNALYATYGKEFVTITYGAMTKEKRIALQLEKTHNNDAYAMGDYHPACRCKFRHYQKRRRNNRVLEKFYDATYIDARTGNKAKGKELFNGRISRNHKKDSENLHKYRGKRICKGHRALRRKKLALNPGDLVSLNGEILVVHGTHTKKNGSVNVEFKTPSRGGKKSASLKKLKIVKTSNLMHSAWTKVS

SEQ ID NO: 21424 - protein, 438 aa, Streptomyces sp.; identical to SEQ ID NO: 15096

SEQ ID NO: 21425 - protein, 415 aa, unidentified; identical to SEQ ID NO: 17971
  REGION 1..415: note = Human gut metagenome

SEQ ID NO: 21426 - protein, 464 aa, Moorena sp.; identical to SEQ ID NO: 5436

SEQ ID NO: 21427 - protein, 427 aa, Anabaena sp.; identical to SEQ ID NO: 11988

SEQ ID NO: 21428 - protein, 502 aa, unidentified; identical to SEQ ID NO: 16429
  REGION 1..502: note = Human gut metagenome

SEQ ID NO: 21429 - protein, 408 aa, unidentified; identical to SEQ ID NO: 17248
  REGION 1..408: note = Human gut metagenome

SEQ ID NO: 21430 - protein, 442 aa, unidentified
  REGION 1..442: note = Human gut metagenome
MSTSVFVLDKKHRPLMPCRPARARRLLRAGRARVVKRFPFVIRLVDRTVEQSEVQPVLIKLDPGSRETGAAVVRDDGKKRHHALAFFVIEHRGGAIRDALKARSAFRRRRRSQNFRCRSPRFLNRVKPKGWLPPSLRHRVETTLSFVRRMCRYLPVSGIATELVKFDSQKLQTPEVSGIEYQQGTLFEYEVREYLLEKFGRKCVYCGAEGVPLNIDHVVPRAKGGSNRVSNLVLACVSCNQKKGARSLEDFLKGKPEVLARVRRELKTPLRDAAAVNATRWVLFNELKATGLPVETGSGALTKLNRHAFGVEKEHWLDALCVGRLNGVVTRKGLNVLEIRCMGRGSRQRTRLTKYGFPRGYLMRQKCVHGFATGDMVEANVPKGKKAGLWRGRVAVRVSGSFNIQTPKGVIQGVGWKHCRLISHNDGYGYAWLGHAPHSSPA

SEQ ID NO: 21431 - protein, 465 aa, unidentified
  REGION 1..465: note = Human gut metagenome
MSTCVCVLSNSGERLMPTFRLGKVRRLLKDGKAKIVKHHPFTIQLLYDSKTNTQPIEICEDVGYNYIGISVKSQSHEYVSAQYDTLQDEKACHDSCRKLRRTRRNRLRYRKPRFDNRKRDDGWLAPSLRHKKELNVNVVKMYCAVMPITHATIEVGSFDTMLVKAIQEGKAIPEGADYQKGPRYNLATLREAVFYRDNYVCKVCGRKATEGAILHVHHMFYWKGRHGNSLSELITVCEKCHTPANHQKGGKLYGFGEDIKFANLSGAAFMNTVRWQIVNVLNAAFGKPFVTFTYGAMTKEKRIALHLEKSHNNDAYAMGSFHPVNRCAFEHYEKVKRNNRILEKFYDSQYIDTRTGELTNGKSLFNGRISRSHKKDSENLHKYRGKRICKGHYALRRKKLALNPGDLVSLNGEILVVHGTHTKKNGSVNVEFKTPSRGGKKSASLKKLKIVKTSNLMHSAWTKVA

SEQ ID NO: 21432 - protein, 582 aa, unidentified; identical to SEQ ID NO: 8788
  REGION 1..582: note = Human gut metagenome

SEQ ID NO: 21433 - protein, 448 aa, unidentified
  REGION 1..448: note = Human gut metagenome
LGKDFYPLRRREQFLFSCQFIERSMASMQYVYVLNKHGEPLMPCSPGKARLLLKQQKACVVKRTPFTIKLLYGSAGYKQPVALGIDAGSKHVGLSASTEKRELYREEFTPRNDVVELLSTRRQNRRSRRNRKTRYRAPRFDNRVHSKHKGWLAPSVEVKIQEHITVIKRICRILPITLVRVETAEFDTQRLKAMLKGKPLPVGTDYQLGEMYDEYNVRQYVLKRDNYTCQCCGAHPTEKKPIRLHVHHIESRHVGGNAPNNLITLCVACHKALHEGKITLDKGKKRGKPLRDAAFMGIMRNTLLARLKDELNIPVKQTYGYITKLLREKNKIPKSHVNDARCIAKAPNAKPCDTMLYTRALRHHNRQIHKAKILKGGIRKKNQAPYLVKGFRLWDKVRYNGEECFITGRRSSGYFALKKYDGTVISNSASYKKLMLLEAATNYITERS

SEQ ID NO: 21434 - protein, 451 aa, unidentified; identical to SEQ ID NO: 18460
  REGION 1..451: note = Human gut metagenome

SEQ ID NO: 21435 - protein, 413 aa, unidentified
  REGION 1..413: note = Human gut metagenome
MTDYAFVLDANGKQLAPTKEQKAWFLIRRKRATLVSKYPLVIQLKKKIPDKKICKDEVRCGIDDGGLHVGVALVQKCQTRNKVVFKGVIEQRNDVKHLMDVRRGYRSYHRYHKRYRPARFNNRSSSKREERIAPSILQKRQATIRVINQLNRWINITNYWLEDVAIDIRALTDGYKPYRWQYQKSNRLDENIRKAVILRDGCRCMECGKSNCRLEVHHIKPRRLKGSSTLGNLITLCTKCHQKTEGVEELYMDRYFALLNSSDNRNLNYAQHVMIGKQWLREQLSNLGMLYLTNGGDTANKRIDWDITKSHSNDAICITDLRPDTCEIKEWVIKPMRRQSKAKTDNVLGIKHRDLVEYTFRNGETHRGYVTALYPEQNAINFQSPAKHCKKVNAGKCKVLWKYSKIYWLDNVS

SEQ ID NO: 21436 - protein, 442 aa, unidentified; identical to SEQ ID NO: 2834
  REGION 1..442: note = Human gut metagenome

SEQ ID NO: 21437 - protein, 424 aa, unidentified; identical to SEQ ID NO: 3434
  REGION 1..424: note = Human gut metagenome

SEQ ID NO: 21438 - protein, 436 aa, unidentified
  REGION 1..436: note = Human oral metagenome
MSTVLKSRTYHQRKERSVMLVYVLKQNGQPFMPTERFGKVRRLLKEGKAKVVRREPFTIRLLYESETDVVQECYCGVDTGSKHIGVAVVSDDKVLYQSQTELRDDIKQKMDNRRMYRHNRRSRKTRYRKQRFLNRRNSIREDRLPPSVRHKVQAHIDEIEFCKKIPPVSDLILEVSQFDTALMKNPSLMNEKIRHWGYQQGFNYGYSSRREAVLHRDNYTCQCCGKKNCRLEVHHIKFKSNGGTDDEENLITLCKECHDRVHAGTVVLDKKPKKMRLKHATHMSIIRSWLLKIYPDAIETFGFVTSENRNHLNLSKDHYIDACVIASGGLEFKPLDVVFYKRRMSKGNYRLTRKSFGKEIICKGKILGFKSFDKVEYFGVECFIGSRRNSGIATLVDIFRNTLDFSHLQKGFKLPKMRLLKRISSRKTTAISIINV

SEQ ID NO: 21439 - protein, 428 aa, unidentified
  REGION 1..428: note = Human oral metagenome
MLVYVLKENGQPFMPTTRFGKIRRLLKTKKAKVVRREPFTIKLLYEPETDVVQECYCGVDTGSRHIGVAVVSNDKVLYQSQTELRSDIKRKIDARRAYRRNRRQRKTRYRKPRFLNRSNSTKSDRLPPSVKHKVQAHIDEIEFCKKILPVSDLIVEVSQFDTALMKDPSLISEKIKHWGYQQGFNYGYSSRREAILHRDNYTCQCCGKKNCRLEVHHVKFKSNGGTDDEENLLTLCEDCHKGVHAGTVTLDKKPKKNKNLKYATHMSIIRSYLLKKYPDAIETFGFVTSENRNHLKLKKDHHIDACIIASGGLGFKELDVICYKRRVSKGDYKLARGIRGEQKLPTGKICGFKKFDKVKYLGNEYFIKGRISSGLTILMDIFGNKIDFSDMPRGTKTPKLSKCKRISARSSCLCISQIRKERAIHVLS

SEQ ID NO: 21440 - protein, 393 aa, unidentified
  REGION 1..393: note = Human gut metagenome
NKAKVKRRTPFTIQLSIATGETKQDVILGVDSGSKHIGLSATTDKVEVFASEVELRQDISGLLADRLAFRRGRRHRKTRYRAPRFNNRVHSKHKGWLAPSIENRIQAHISRIDAVCKLLPVTKIVIETASFDIQKIKNPDVEGEGYQQGDQLGFWNVREYVLWRDGHVCQHCRGRSKDKILNVHHLESRKTGGDAPNNLITLCETCHKAFHAGKIKLKVKRGKSFKAETFMGIMRWTLLERVRLTHPHLPVENTFGYLTKHKRIALGLPKTHCADAFCIAGNLKAQRSGVYLYQKQTRKHNRQIHKCSILKGGVRKLNQSPYLVEGFRLFDKVKCLGQVGFIFGKRSSGYFDVRTLGGKKLSPAIHAKKLTLLEKRKTFLTELRKENGASSPV

SEQ ID NO: 21441 - protein, 466 aa, unidentified; identical to SEQ ID NO: 8215
  REGION 1..466: note = Human gut metagenome

SEQ ID NO: 21442 - protein, 536 aa, unidentified; identical to SEQ ID NO: 2718
  REGION 1..536: note = Human gut metagenome

SEQ ID NO: 21443 - protein, 423 aa, unidentified; identical to SEQ ID NO: 3951
  REGION 1..423: note = Human gut metagenome

SEQ ID NO: 21444 - protein, 414 aa, unidentified
  REGION 1..414: note = Human gut metagenome
MVYVLNMDGQPLMPTNRHGKVRHLLKDGMAEVVKRCPFTIKLLYRSTNHTQPVALGVDAGSKHIGLSATTENKELFASDVELRNDIVDLISTRRQNRRGRRSRKTRYRKPRFLNRTGNRKAGWVAPSIQNKIQTHLTVVDKVCRMLPVSKIVVETASFDIQKIKNPDICGTEYQQGEQLNFWNVREYVLFRDGHKCQCCKGKSKDKILNVHHIESRKTGGDAPNNLITLCETCHTGYHKGTVKLPKTIHRGMVFRDAAFMGIMRWAFYNELKRRYPNVSHTYGYITKNIRIENNLPKYHYIDARCISGHPLAVPSGEVFYQKKVRCHNRQIHKNTIGKGGYRKRNQAEYIVKGFRLFDKVSYKGQECFIFGRRSSGSFDIRLLDGTKISAGVTYKKLRLLETRGSFLIERRLVG

SEQ ID NO: 21445 - protein, 406 aa, unidentified; identical to SEQ ID NO: 13750
  REGION 1..406: note = Human gut metagenome

SEQ ID NO: 21446 - protein, 270 aa, unidentified
  REGION 1..270: note = Human gut metagenome
LQLLKAIADGKPVPQGEDYQKGEMYGHYNVRQYVLWRDNYTCQCCGTHPSKKKEVRLHVHHLESRKVGGDAPDNQVTLCESCHEKLHKGLIAEKDFKKRKRRSTRDATFMGIMRKTLMQRLCSELPIPVVKTRGYITKATREKLLVLPKSHTNDALAIAQGKQGFNVGYLPGIVQINKIYTIRPVRHHNRQLHKAAILTGGIRKSNQAGKYVFGYCLFDKVQFNGQDCFIWGRRTTGIFTIKTINGKMIKDGISFKKLKLVEKSTSYLIA

SEQ ID NO: 21447 - protein, 437 aa, Moorena sp.; identical to SEQ ID NO: 16004

SEQ ID NO: 21448 - protein, 419 aa, unidentified
  REGION 1..419: note = Human gut metagenome
MVYVLDINGQPLMPTARHGKVRRLLNSHLAKVIKRCPFTIQLLYQSTKETQSVSLGIDAGSKHIGLAATTEQKVVYQEELIPRNDVVKLLSARRLLRRSRRNRKTRYRKLRFNNRVRSKHKGWLAPSVEVKIQEHITAIKRICQILPISEIHVETAEFDLQRLKAMEEGSPLPVGTDYQLGEQYDFYNTRQYVLHRDRYTCQCCGAHGNNVKLHVHHIESRQTGGNAPNNLITLCEHCHKALHEGKLELSKGKKRGKSYRDAAFMGVMRKTLLERLKKEVDVPVTETYGYITKYWREKAGLEKSHINDAICISKHPYAKPLNTYYLAKAVRHHNRQIHKAKISKGGIRKRNQAPYLVKRFRLFDKVLYQGKECFIFGRRVSGRMDVRLLDGTRINASVGYKNLKLLELRKAYLTERRTC

SEQ ID NO: 21449 - protein, 439 aa, Ktedonobacter sp.; identical to SEQ ID NO: 9125

SEQ ID NO: 21450 - protein, 429 aa, unidentified
  REGION 1..429: note = Human oral metagenome
MVVYVVDKNGQPLMPTYNGAKVRVLLKQKRAKVVSKCPFTIKLLYESTTFKQPLTLGVDTGSKYVGSAVINDITSDVVYESQIELRDDIKSKMDRRRAFRRSRRNRLRYRPSRFNNRKSSKHKDNYNPTLTSKLQGHMREIEFIKSILPIKDVILEVGEFDTQLLQDYTLAYHKWDYAKGELYQQENFKQAAKARDGYKCQCCGKKNCRLEVHHLLPRSRGGSDKLANLITLCSDCHYLAHSSEEQLLAFQKKFGKKAKGTLRYATQMNVLRSMLQKEYPDAELTYGFITKEMRRVFGLEKSHTIDACCIASRGSEFYNENSNKYKKKYVAKGDYVRTSTSYRKFVVLPKGKIAGFNRYDKVLYNNKEYFVVGRISTGLVYLIDIDNNRVQTERTKRGTGEKYLSKAQIKVSCVKKVASTKGCVCVRML

SEQ ID NO: 21451 - protein, 346 aa, unidentified
  REGION 1..346: note = Human gut metagenome
MVYVQDINGKPLMPTTRHGKVRRLLKDKKAVVVNLCPFTIKLMYVTSDYKQEIVLGVDAGTKHVGLSATTKSKELYSSEVILRNDIVDLLSTRRELRKARRNRLRYRKPRFDNRVKSKRPGWIAPSVKYKVDAHIRVVENVCSILPISRIVIEVAQFDTQKIKNPEILGKEYQEGDQLEFWNTREYVLARDGHKCQYCKGKSKDSILNVHHIESRKTGGDSPSNLITLCETCHKEYHKGNIDLKIRRGKSLRDAAVMGIMKWRLYEELKSRYDRVFMTFGYITKHNRIKYGIEKSHTSDAFVISKNINAKRIERQYLKRLIRRHNRQIHKMKILRGGEEEKQSSSF

SEQ ID NO: 21452 - protein, 416 aa, unidentified
  REGION 1..416: note = Human gut metagenome
MVYVLSQHGQPLMPTENHAKVRALLKHGKAKVIQRCPFTIQLLYESTTHTQKINLGIDAGSKTIGVSATTDSKVLYESEVVLRNDIVELLSGRRALRNSRRSRKTRYRKPRFDNRKKPDGWLAPSIRQKIETHVTVVGNVMKILPVTKIIVETASFDIQKIKNPEIEGEGYQHGEQLDFWNVREYVLFRDGHTGQCCKGKSKDNILNVHHIESRKTGGNAPNNLITLCETCHKAYHKGIITLPKEIHRGMRFRDAAFMGIMRWAFYDRLKELYNPLGAEVINTYGYITKNTRIEHGLPKEHYVDARCISDNPAAKPLDHYYFQKKVRCHNRQIHKNTILKGGIRKRNQASYEVKGFRLYDQVLWKGQKCFIFGRRSTGRMDLRLLDGTHINASVGHKNLKLLSMRKNYLIEQRKAG

SEQ ID NO: 21453 - protein, 470 aa, Moorena sp.; identical to SEQ ID NO: 4092

SEQ ID NO: 21454 - protein, 475 aa, unidentified; identical to SEQ ID NO: 4985
  REGION 1..475: note = Human gut metagenome

SEQ ID NO: 21455 - protein, 353 aa, Arthrospira sp.; identical to SEQ ID NO: 3451

SEQ ID NO: 21456 - protein, 460 aa, unidentified
  REGION 1..460: note = Human gut metagenome
MVAVVDLFGKPLMPTNEYRARKLLKRKKAKIFCYRPFTIQLTERKDTEIQPIELCMDTGYIHIGISAKSERHEYLGMQIDTLTDEKLKHDDKRQYRRQRRNRKRYRAPRFDNRRRKEGWIAPSLEHKKEIHIDAIQRICKVMPITDITLEMGNFDTQVLKAVEEGKPLPQGSDYQYGERYGIATLREAVFLRDGYKCQCCEKSVKDGAILHVHHIKYRSQGGTNRMSNLITVCDKCHTPQNHKPGGKLWNWKPKLAEFKGASYMTSIRWMLYNEVTALLPNSSVHITYGAKTKESRRKLDIKKSHVNDAYVMGLFCPKHRTKPVYFKKKRRNNRVLEKFYDAKYIDSRDGKKQSGQELFNGRINRNHRKDSENLHLYRKQKVTKGKRSIRNKHYPIQPHDILLYQKKKYETAGCHNNGSRAILLPEKKSVALKQLTIYQYAGGYYRVPYESNKKEERTGS

SEQ ID NO: 21457 - protein, 451 aa, unidentified; identical to SEQ ID NO: 3061
  REGION 1..451: note = Human gut metagenome

SEQ ID NO: 21458 - protein, 431 aa, unidentified
  REGION 1..431: note = Human gut metagenome
MPNKVYVINKHGRPLMPCSPAKARHLLDAGKAKVKKRTPFTIQLVYGSSGYTQEVILGVDDGSKTIGISASTKKEEVFAADVTPRNDVVNLLSARREFRRARRNRKTRYRKSRFDNRVRSKRKGWLAPSVEVKIQEHITSIKRVCRILPVSKVVIETAEFDLQLLKAIADGKPVPQGEDYQKGEMYGHYNVRQYVLWRDDYTCQCCGAHATKKKEVWLHVHHLESRKVGGDAPDNQVTLCESCHEKLHKGLITEGDFKKRKRRSTRDATFMGIMRKTLMQRLCSELPIPVVETRGYITKATREKLLVLPKSHTNDALAIAQGKRGFNVGYLPGIIQTDKIYTIRPVRHHNRQLHKAAILKGGIRKSNQAGKYVFGYRLFDKVQFNGQDCFIWGRRTTGIFTIKTINGKMIKDGISFKKLKLVEKSTSYLIA

SEQ ID NO: 21459 - protein, 493 aa, unidentified
  REGION 1..493: note = Human gut metagenome
MAAVYVISASGKPLMPTTRCGHIRGLLNAGKARVVEREPFTIQLKYETPDVTQPLYLGIDPGRTNVGSAVVREDGECVFTAQLTTRNKDVPKLMKARKQFRMAHRRLKRRCKRQRRAKAAETFSQKGEVQRLLPGYEEPILCKGIRNKEARFNNRQRPAGWLTPTANHLLLTHLNMVKKLQKLLPITDVVLEVNRFAFMAMENPSIRRWQYQQGPLYGKGSVEDAVYAQQDGHCLFCGKPIAHYNHVVPQHKNGSETLENRVGLCNEHHDLVHKDRAWDAKMKETKAGLNKKYHALSVLNQIIPALTEQLTAMFPQHAFVTTGKDTADFREDYGIAKEHHLDAYCIACSVLAEPTKVAAPTGKPHRLMQFRRHDRQVCHKENIKRVYLSEGKAVATNRHKAIEQKDDSLEEFRKTHTQQEVSALTVKDHQPVYKDMRRFMPGGVFLFNGKVHTLQRSHGRYKGMPFYYIDTDGSKNHAKGCIFLQQNCGLRWV

SEQ ID NO: 21460 - protein, 512 aa, unidentified
  REGION 1..512: note = Human gut metagenome
MSTVYVLNKDGKPLMPTTRCGHVRHLLKEQKARVVTSKPFTIQLLYETNDVVQPLYLGIDPGRTNIGVAAVKTDGTAVFTAHLETRNKEIPKLMQGRKKARRARRTNGRRCRRQRRAKANGTISKKCVKQTTAQNGSVSKRAKEIGVIKRHLPGCEKELLCIGIKNKEAKFSNRTRPEGWLTPTANQLLQTHINLVKKIQKFLPISDVVLEINKFAFMQLDNPNIQKWQYQQGPLYQKASLEEAVSEMQEHHCLFCKQSIVHYHHVVPQSENGSDTIGNIVGLCTKHHDLVHKDTAWQKKLAKKKTGLNKKYGALSILNQIIPALTKELSSLFPKHFFATNGKSTHDYRAAHDVSKDHWLDAYCIACSILPNDTCDKNINGRVPYKLKQFRRHDRRALHKENMSRVYTLDGKKVATNRHKAIKQTTDSLEEFRQRQPNDVCKLKVKEHHPEYRNPERNFPGCVFLVGKHTHVMQGTSGSHNGKADGYYDTNGNSYPSGKCKFVAKNKGIVFA

SEQ ID NO: 21461 - protein, 416 aa, unidentified
  REGION 1..416: note = metagenome
LRVFVLNKRGKPLMPCSPAKARLLLKEKKAIVVRRTPFTIQLTIATGESKQPVSLGVDAGYKHVGLSASTEKAELYASEVELRKDITDLLSARRALRQSRRNRKTRYRAPRFDNRIRTKRKGWLAPSVENRINAHLSRIEAVLRLLPITKITVETASFDMQRLKNPDISGKEYQEGEQLGFWNVREYVLFRDGHVCRHCHGRSKDPVLNVHHLESRRPGSDSPDNLITLCVTCHKALHRGEITLKAKRGQSFRAQAFMGIMRREVLNRLKASYPELKVHETYGYLTKHARIANGIVKSHGADAFCIAGNLGAKRLGEFFFQKQTRRNNRQIHKLSILKGGIRKRNQAPFEAKGFRLFDKVACQGEEGFIFGRRSSGFFDVRKLDGTRISAGISCKKLHLLEKRRTYLTEIRKEEAL

SEQ ID NO: 21462 - protein, 424 aa, Microcoleus sp.; identical to SEQ ID NO: 7309

SEQ ID NO: 21463 - protein, 396 aa, unidentified
  REGION 1..396: note = metagenome
MKVFVINMHGEPLMPCSPRKARILLKEKRAKVVQREPFTIQLLYGSSGYKQDITIGIDTGHDEVGVSVTTETKELFSSVFKMRNDISKKMTTRRMYRRNKRSRLRYRKPRFDNRAASTRKGRLAPSVEWKVETHKRIISFYQNRLPKCKVILETGIFDMQKMQNPEIKNEMYQKGIQYGYANTKAYVLTRDRHTCQAGKSGCTKRLEVHHIKFKSQGGSDNPKNLITLCSKHHKELHEGKLILNIKKHKSLRSATTMNIIRKRLLGYYPNAIETFGYVTKQNRQNLGLEKSHSNDAFVIAGGNNQQRAETMDYKFKQANNRAIGIHRKGYAPTARKVRYLIQSGDIIKYEGRTYTSKGNKNKGKSILLEIEGKKKTVNSKKVELIYNRKNIQCIYA

SEQ ID NO: 21464 - protein, 426 aa, unidentified
  REGION 1..426: note = Cyanobacteria bacterium UBA11371
MSNFVLVLDTNRKPLNPCTPGVARSLLKSGKAKVFRRFPFTIVLNKAVDDNPQPMELKLDPGAKTTGIALLQGEKVVFGAELIHRGQQIKDALESRRALRRGRRNRKTRYRKPRFLNRTRQSGWLAPSLGHRVETILTWVNRLRRSAPIAGISQELVRFDLQQMDNPEISGIEYQKGTLFGYEVREYLLNNKKWERKCAYCGTENVPIQIDHIHPKSQGGTNRVSNLCLACEPCNIKKGTQSIEVFLKKKPVVLKQILAQVKRPLKDAAAVNITRWTLFKRLKQTGLSVETGSGGQTKYNRCRLELPKQHYIDAACVGKVEQLTILTQQPLLIKATGHGTRQMCGTNKYGFPFRHRSRTQIHKEFQTGDIVKAIVTSGKKVGTYIGRILCRATGSFDIVTKSVRVAGISYKYCKSIHRKDGYSYAF

SEQ ID NO: 21465 - protein, 431 aa, unidentified
  REGION 1..431: note = Human gut metagenome
MPNKVYVINKHGRPLMPCSPAKARHLLDEGKAKVKKRTPFTIQLIYGSSGYTQEVILGVDAGSKTIGMSVSTTKEELLSAEVKPRNDVVDLLSTRREFRRARRNRKTRYRKPRFDNRVRSKHRGWLAPSVEVKIQEHITSIKRVCRILPVSKVVVETAEFDLQLLKAIADGKPVPQGEDYQKGEMYGHYNVRQYVLWRDGYTCKCCGAHTTKKKEVRLHVHHLESRKVGGDAPDNQVTLCESCHEKLHKGLIAEKDFKKRKRRSTRDATFMGIMRKTLMQRLCSELPIPVIETRGYITKATREKLLVLPKSHTNDALAIAQGKRGFNVGYLPEIAQIDKIYTIRPVRHHNRQLHKATILKGGIRKSNQTEKYVFGYRLFDKVQFNGQDCFIWGRRTTGIFTIKTINGKMIKDGISFKKLKLVEKSTSYLIA

SEQ ID NO: 21466 - protein, 459 aa, Moorella mulderi
VVFVLDQHKRPIMPCSERQARKLLKEGRAVVHRLVPFVIRLKDRIVEQSVLQPLKLKIDPGYEATGISVVRVAEGKEAAVFFAEVHHRTDIPEKLLSRRQARWSRRSRRTRYRKPRFDNRRRPEGWLPPSAEARINWALSTVKKLLRWLPIREIIVESAKFDTQKLQNPEIFGVEYQRDELTGCEVREYLLEKWGRKCAYCGKENVPLEVDHVVPKSRGGTDRVSNLTFTCREGNQTKGNKLLQEWLEELKRSERAVDRKRADNVPKVLSQLGEPLKGAAFMNAARHALVERLGSLGLPVFTATTARTKYDRTRLSLPKTHYFDARCVGEVPDKLEVAAEYVQVFRAVGRGRRQMANFDRHGFPRAHRLRKNVHFGFATGDLVVAEVPAGKYAGRHVGFVAVRASGYFDLKNFLGDRVCQGVSWKRFRLLQRFDGWRYEKFKSAALSSPGLKARASSAA

SEQ ID NO: 21467 - protein, 422 aa, unidentified
  REGION 1..422: note = metagenome
LNKRGKPLMPCSPAKARLLLKEKKAIVVRRTPFTIQLTIATGESKQPVSLGVDAGYKHVGLSASTEKAELYASEVELRKDITDLLSARRALRQSRRNRKTRYRAPRFDNRIRTKRKGWLAPSVENRINAHLSRIEAVLRLLPITKITVETASFDMQRLKNPDISGKEYQEGEQLGFWNVREYVLFRDGHVCRHCHGRSKDPVLNVHHLESRRTGSDSPDNLITLCETCHKALHRGEITLKAKRGQSFRAQAFMGIMRREVLNRLKASYPELKVHETYGYLTKHARIANGIVKSHGADAFCIAGNLGAERLGEFFFQKQTRRNNRQIRKLSILKGGIRKRNQAPFEAKGFRLFDKVACQGEEGFIFGRRSSGSFDVRKLDGTRISAGISCKKLRLLERRRTYLTEIRKEEALPPLPEGGGLRA

SEQ ID NO: 21468 - protein, 428 aa, unidentified
  REGION 1..428: note = metagenome
MLVYVLDKNEQPLMPTHNGAKVRVLLKQKRAKVVSKCPFTIKLLYESTNFTQPLTLGVDTGSKYVGSAVINDATSEVVYESQTELRDDIKSKMDRRRQFRRARRNKLRYRPVRFNNRKSSKRKDRYNPTLTSKFQGHTREIEFVKSILPISDIVLEVGEFDPQLLQAPTLAYRKWGYQKGELYQQENFKQATKARDDYKCQCCGKQNCGLEVHHLIPRSSGSDKLANLITLCTDCHHLAHSSEEQLLAFQKKFGKKTKGTLRYATQMNVLRHMLQREYPNAEVTYGFITKEMRRVFGLEKSHMIDACCIASRGSEFHNENSNRYKKKCVAKGDYTRTGVSGGKFGILPKGKIVGFRRYDKVFYNSKEYFIAGRMSIGKVYLIDIDNNRLQVERTRRGTGEKYTSKAMIKVSLVRKVTSAKTCLCTINK

SEQ ID NO: 21469 - protein, 513 aa, unidentified
  REGION 1..513: note = Human gut metagenome
LKKEAAGHQQGKDCRPVRYGPPYRAGMPDGRRKPERKHMVAVVTSTGKPLMPTSAYRARKLLKKGRAVIFKYRPYFTIQLVDRADGEVQEVEYKSDTGSVHVGISVCTEKKELLSEQRDLLENEPEHHNDRKKNRRTRRNRKRYRKPRFDNRKKKPQVGHEKWLPPTLLHKMEVQVRLYREFCRVVPVTSACFEMGKFDTQALKAVLKGDPVPEGEGYQKGERYGTDTLRAAVFLRDGHTCRFCGRSVKDGAVLHVHHVGYWKGDRTNRPANLASACEQCHTPANHGKNGLLYGKEPEFKTLKDASYMTSVRWIMLDEIKKAAPGVRVSVTYGVTTKKKRQELRLPKSHVNDAFSMASFHPKKRADTEYWKKIPRHDRVLQKFYDAVYLDTRDGSKKKGSEMSNGRISRNHKKDNENLHQYRGLKVLKGHDSIRRGASSLKPGSIVMYKGEKMTVHGTHTRYVTDKEGKTVKKVNVQFTCPASDGRKSASMNKCTPVSRVYNTGWKRYWPDKK

SEQ ID NO: 21470 - protein, 470 aa, unidentified; identical to SEQ ID NO: 2825
  REGION 1..470: note = Human gut metagenome

SEQ ID NO: 21471 - protein, 340 aa, unidentified
  REGION 1..340: note = Human gut metagenome
MILRLGQVDQSSQRYATRRQLRRSRRSRKTRYRPARFDNRKRKEGWLAPSIRQKIGSHLTVVANVCKILPINQIIVETASFDIQKIKNPDIQGTEYQQGEQMDFWNVREYVFFRDGHTCQCCKGRSKDKILNVHHIESRKIGGNAPNNLITLCETCHKGYHNGTVILPKNIKRGMQFKDAAFMGIMRWAFYNALKEQYEPAIPVSMTYGYLTKNTRIEHGLLKEHYIDARCISGNPDAVSDGTYYYQKKVRCHNRQIHKQTILKGGIRKSNQAEYLVKGYRLFDKVRYHGREYFIFGRRKTGFFDIRTLSGEKVNKGSISVKKLTFADTRKNYLTERRTA

SEQ ID NO: 21472 - protein, 518 aa, unidentified; identical to SEQ ID NO: 7468
  REGION 1..518: note = Human gut metagenome

SEQ ID NO: 21473 - protein, 512 aa, unidentified
  REGION 1..512: note = Human gut metagenome
LLKISEGRRRANIIPKGKTVQQHWRCGPRGASPDLSIHYYLTKGVPCMSTCVCVLSNNGERLMPTIRLGKVRHLLKDGKAKIIKHHPFTIQLLYDSKTNTQPIEICEDVGYNYIGISVKSESHEYVSAQYDTLQDEKEHHDDCRKYRRTRRNRLRYRKPRFDNRKRDDGWLAPSLEHKKELNVNVIKMYCEVMPITHAIVEVGSFDTMLVKAIEEGKATPESADYQKGPRYKLATLREAVFYRDNYTCQVCGRKANEGAILHVHHMFYWKGRHGNSLSELITVCEKCHTPANHQKGGKLYGFGEDIKFANLSGAAFMNTVRWQIVNVLNAAFGKPFVTFTYGAMTKEKRIALHLEKSHNNDAYAMGSFHPVNRCAFEHYEKVKRNNRILEKFYDSQYIDIRTGEIATGKELFNGRISRSHKKDSENLHKYRGKRICKGHRALRRKKVALNPGDLVSLNGEILVVHGTHTKKNGSVNVEFKTPSRGGKKSASLKKLKIVKTSNLMHSAWTKVA

SEQ ID NO: 21474 - protein, 418 aa, Anoxybacillus sp.
KRPLAPCHEAVARKLLKQGKAAIYRRFPFTIILKKSVDESEIKATYRLKIDYGSRHTGLAILRGQEVVWLGQLDHRTDIKERIDKRRAFRRARRNRKTRYRKPRFLNRKRKEGWLPSSLESRVQNIQTWVNRLKKLCPIGYISYENAKFDTQLMRNPEINGVEYQQGTLQGYEVREYLLEKFGRKCCYCGKENVPLEVEHIIPKSRGGTDRVDNLCLACHDCNQRKGSKTAEEFGYPHIQKQVKESLKDASAINSTRWKAYEVLKQTGLDVECGTGARTKMNRIRLDLPKTHYFDACCVGESTTNHLYFKTKEVLFIKAKGRGSHSRTNLDRYGFPRGYLARQKFFFGFQTGDMVKAVVPRGKYQGVWFGEVACRKTGSFDIKGKDGKRIAQGINYRYVQVIQRFDGYAYGKGVAELA

SEQ ID NO: 21475 - protein, 465 aa, unidentified
  REGION 1..465: note = Human gut metagenome
MSTCACVLSKNGERLMPTIRLGKVRHLLKDGKAKIVKLHQFTIQLLYDSKTNTQPIEICEDVGYNYIGISVKSESHEYVSAQYDTLQDEKDCHDSCRRMRRARRNRLRYRKPRFDNRKRDKGWLAPSLEHKKELNVNVIKMYCEVMPITHATVEVGSFDTMLVKAIQEGKAAPEGADYQKGPRYNLATLREAVFYRDKYTCQVCGRKANEGAILHVHHMFYWKGRHGNSLSELLTVCEKCHTPANHQKGGKLYGFGENIKFANLSGAAFMNTVRWQIVNELYAAFGKPFVTFTYGAMTKEKRIALHLEKSHNNDAYAMGNFHPTDRCAFEHYEKEKRNNRILERFYDSRYIDIRTGEVANGKELFNGRISRSYKKDSENLHKYRGRRICKGHRALRRKNVALNPGDLVSLNGEILIVYGTHTKKNGSVNVEFKTPSKSGKKSADLKKLKIINATNLVCSAWKKVS

SEQ ID NO: 21476 - protein, 446 aa, unidentified
  REGION 1..446: note = Human gut metagenome
MEILRIDWKDICPTGRSGLPQKELFMRPVYVLDMNGKPLMPTCRFGKVRRMLKSGEAKVVDTLPFTIQLDRPTKTHVVQSVTLGCDPGRTNIGLAAVRSDGTDLYRSHCETRNKEIVDLMDTRRAARRASRRGERLARKRLAAKHETATTFPGGRKLPGYEKPIMLKDIINTEARFNNRVCPAGWLTPTATQLLRTHLNLIKRISRILPVSDIALEINKFAFMQLDEPDKNKWNIDFQHGPLYGTGGLKAAVRQLQNNTCLLCQENVIEHFHHLIPRSKRGDNTINNIAGLCQRCHEAVHKSADTAEKLSTLKKGQTKRYGGTSVLNQIISKLVEELGKTYHEHLHLTYGWQTKEFRTKHKLEKTHDTDAYCIAAGTMQTVKPNIRTDVYEIKQFRRHNRANIHHQTERTYKLNGQTVARNRRKRTDQKTDSLAEWFENTVKQYGQ

SEQ ID NO: 21477 - protein, 440 aa, unidentified
  REGION 1..440: note = Human gut metagenome
LILGIDPGRTNIGVAVVKEDGQCVFSAHLETRNKDVPLLMKKRAGFRKQHRTLDRRRKRQRRAKATGNTVKNETIERLLPCYQRPIVCHYIRNKEARFNNRSRPAGWLTPTANHLLQTHINLIAKVAKFLPITKVVVELNRFAFMAMDNPNIRRWEYQQGPLYGLGSVEDAVYAQQDGHCLFCDKPIDHYHHVVPRHKGGSETLANRCGLCAEHHDLVHKDKAWAEKLVTRKDGMNKKYHALSVLNQIISFLMEYLGRETPYDVYATDGKSTKGFRIAKNVPKEHYTDAYCIACSILDANTKVSTPAEPFELKQFRRHDRQSCIRQMVDRKYILDSKVVATNRHKAIEQKSDSLQEFREVYGDAAVSQLTVRPHSPQYKDMTRIMPGAVMDFNGTIGVMQCSGGRNNGKVEFFKSTKGNKTPPKKCVLLAQNTGMVFIPA

SEQ ID NO: 21478 - protein, 423 aa, unidentified
  REGION 1..423: note = metagenome
MVYVLNIDGQPLMPTDRHGKVRHLLKDGRAEVVKCCPFTIRLLYDSTHYTQDIVLGVDAGSKHIGLSATTETKELYASDVELRNDIVDLISTRRQNRRFRRNRKTRYRKARFLNRLSDKKDWLAPSIRQKVDTHMTVVSRVCKILPVTKIIVETASFDIQKIKDPDISGTGYQHGEQLDFWNVREYVLFRDGHTCQCCKGKSKDPVLNVHHIESRKTGGDAPNNLITLCETCHKGYHSGAVQLPKAIHRGMRFKDAAFMDIMRWAFYNKLKEVYEPQDIEIRMTFGYLTKNTRIRHHLPKEHYIDARCISGHPEAIPNNEVFYQKKVRCHNRQIHKNTILKGGIRKRNQTGYLVKGFRLFDKVAYKGREYFIFGRRQSGFFDLRNLSGCKVNKGSLSYRKIGFLEPRQYYLCERRVMDTQGCA

SEQ ID NO: 21479 - protein, 431 aa, unidentified; identical to SEQ ID NO: 4463
  REGION 1..431: note = Human gut metagenome

SEQ ID NO: 21480 - protein, 424 aa, Moorena sp.
MSNFVFVLDTQKRPLNPVQPGMARKLLTSGKAAVFRQYPFTIILKVEVTAIPDPITLKIDPGSKTTGIALVQGEKVVFGAELTHRGQAIKASLESRRSLRRSRRNRHTRYRQARFLNRTRHQGWLAPSLQHRVETTLTWVNKLIKFVPIKGIYQELVRFDLQQLENPEISGVEYQQGELAGYEVREYLLNKWERKCAYCGIENLPLQVEHIQPKAKRGSNRISNLCLACEKCNLKKGTQDIEKFLAKKPDVLKRILSQAKRQLQDATAVNSTRWTLFNRLKETGLPVSTSSGGLTKFNRTRLNLSKTHWLDAACVGQVNCLQVLTNQPLLIKAIGHGTRQMCRTDKFGFPSRYVPRLKFVKGFQTGDIVKAVVTSGKKIGTYIGRVAVRTTGSFNISAASGLIQGIGNKYCSLIHRKDGYLYAT

SEQ ID NO: 21481 - protein, 439 aa, unidentified; identical to SEQ ID NO: 3280
  REGION 1..439: note = Wastewater metagenome

SEQ ID NO: 21482 - protein, 515 aa, unidentified
  REGION 1..515: note = Human gut metagenome
MTALEERLSKTEYIYVLGFDGKPQMPTRRKRHVLKLLKTGRARIAEDIPFTIRLTYRNAPVLQPVTLAEDPGRTNIGAAVLSPLGGLLFAAVIETRNKEIKKLMADRKKSRQASRRGERKARQRLAKRYGSMVKSGMVMRKLPMYAADKFVICKFIRNTQARFCNRKRCPDWITPTVQHLVQTHLNIIRKISRYLPVTDIAFEVNRFAFMHMENPKAMGVDFQNGPLKGYDDVKEAIRTQQHGKCLMCKKPISHFHHIVPRSRGGSDTIQNLAGLCPECHTKVHTDTTFRKDFDRKKSGQLKKYGALSALNQAVPFICKKLLEEYGEEHVHFCGGLDTSLIRTALGFEKTKKNQMHEVDAYCIGLAALEVNEVETPAFDHTFQIRQFRRQDRSIIHHQTGRSYYQGKEKVAQNRKPGFEQKTTALSQWYEEQVRIHGEKEAEKLRSQLRVEKSCRHYNDVDRFLPGAVFLYEGKRYVLSGRITNGKYLRACGQGMKNFPAAECTFIRHNAGLVFI

SEQ ID NO: 21483 - protein, 424 aa, Nodularia sp.; identical to SEQ ID NO: 20564

SEQ ID NO: 21484 - protein, 421 aa, unidentified; identical to SEQ ID NO: 5657
  REGION 1..421: note = Human gut metagenome

SEQ ID NO: 21485 - protein, 512 aa, unidentified; identical to SEQ ID NO: 5549
  REGION 1..512: note = Human gut metagenome

SEQ ID NO: 21486 - protein, 442 aa, Moorena sp.
MGEGLQPIERSRRQNLRVFVLNKRGQPLMPCSPAKARLLLKEKKAVVRHRTPFTIQLTQATGETVQPVTLGVDAGSKFIGLSASTEKAEHYASEVELRKDVVDLLSSRRELRCARRNRKTRYRAPRFDNRGRSKNKGWSAPSVENKISAHLSRVAAVQKVLPVTKIAVETAAFDIQKIKNPDIEGTDYQQGDQLGFWNVREYVLCRDDHQCCHCHGKSKDPILNVHHLESRKTGGDAPNNLITLCETCHKAYHAGKITLKRKRGQTFRDAAFMGIMRWTFFNRLKSQYPELEVRNTYGYLTKNTRIRHGLEKTHHTDAFCIAGNLEAKRLGEYFFQKQTRKHNRQIHKMSILKGGVRKLQQAPYEVKGFRLFDKVRYDGREAFIFGRRSSGYFDIRLLTGEKVSAGVSYKKLVLLEKRKTFLIQLIKENAIPPATEVAGFLA

SEQ ID NO: 21487 - protein, 431 aa, Citrobacter sp.; identical to SEQ ID NO: 14739
  SITE 431: note = misc_feature - Xaa can be any naturally occurring amino acid

SEQ ID NO: 21488 - protein, 420 aa, unidentified; identical to SEQ ID NO: 15421
  REGION 1..420: note = Human gut metagenome

SEQ ID NO: 21489 - protein, 420 aa, unidentified
  REGION 1..420: note = Human gut metagenome
MQYVYVLSKHGEPMMPCSPGKARLLLKQQKACVVRRTPFTIKLLYGSAGYKQPITLGVDAGSKHVGLSASTEKRELYREEFTPRNDVVELLSTRRQNRRSRRNRKTRYRAPRFDNRVHSKHKGWLAPSVEVKIQEHITIIKRICKILPISLVRVETAEFDTQRLKAMLAGKPLPVGTDYQLGEMYDEYNVRQYVLKRDNYTCQCCGAHTTAKKLVKLHVHHLESRKTGGNAPSNLVTLCTTCHKNLHKGKVTLDGKERGKPFRDAAFMGIMRKTLMARLKEELPIPAQGTYGYITKMRREQNDIEKSHTNDARCISKHPLAEPCSVCYRTKAIRHHNRQTHKANFSKKGIRKRSQMPYLVEGYRLWDKVLYKEQECFVSGRRSSGSFTLKKLDGTSVSKGVTFKKLRLLEPATNYLIERM

SEQ ID NO: 21490 - protein, 424 aa, unidentified; identical to SEQ ID NO: 4955
  REGION 1..424: note = Human gut metagenome

SEQ ID NO: 21491 - protein, 374 aa, unidentified
  REGION 1..374: note = Clostridiaceae bacterium UBA2240
LYDSPEYTQPITLGVDAGSKVVGLSATTEKKELFVSEITLRDDIPELLSTRRQNRRARRNHLRYRMARFLNRTASKKEGWLAPSVKHKVDSHLKVIGNVHRILPISKIVIETASFDIQKIRNPEISGREYQQGEQLGFWNTREYVLWRDNHECQHCHGKSKDRVLNVHHKESRKTGGDSPGNLVTLCETCHKSHHAGRIKLKLTPNKSYRHSSFMGIMRWYVYNSLQELYSEVSMTYGYITKNNRINNNIEKTHSADAYCISGNLNAKRIDEIYNQAFKRKHNRQIHKANFLKGGKKKLNQSAYEVKGFRLFDHVRYRDEECFIFGRRTSGYFDLRKLDGSVVHRSASFKEIKLLKRQNTILIERKGCNGVLLS

SEQ ID NO: 21492 - protein, 442 aa, unidentified; identical to SEQ ID NO: 2807
  REGION 1..442: note = Human gut metagenome

SEQ ID NO: 21493 - protein, 397 aa, unidentified
  REGION 1..397: note = Human gut metagenome
RAKANGTISKKCVKQATAQNGSVSKRANEIGVIKRHLPGCEKEVLCIGIKNKEAKFSNRTRPEGWLTPTANQLLQTHINLVKKIQKFLPISDVVLEINKFAFMRLDNPNVQKWQYQQGPLYQKASLEEAVSEMQEHHCLFCKNTIDHYHHVVPQHKNGSNTIGNIVGLCAKHHDLVHKDTSWQEKLAKKKTGLNKRYGALSVLNQIIPALTKELSSLFPKHFFATNGKSTYDYRAAHGVSKDHWLDAYCIAGSVLPNDACDNNINNRVPYELKQFRRHDRRALHKENMSRVYTLNGKKVATNRHKAVEQATDSLEEFCQNHPDDVCKLKVKEHHPEYRNPKRNFPGCVFLVGKHTHVMQGTSGSHNGKADGYYDTNGNSYSSGKCKFVVKNEGIVFT

SEQ ID NO: 21494 - protein, 428 aa, unidentified; identical to SEQ ID NO: 7211
  REGION 1..428: note = Human gut metagenome

SEQ ID NO: 21495 - protein, 410 aa, unidentified
  REGION 1..410: note = Bioreactor metagenome
MRGKPLMPCKPRKARLLLKQGKAKVVKRDPFTIQLTIATGEAKQDISLGVDSGSKYIGISATTKKHVLFEAEVELRNDIVKLLADRRQYRRSRRYRKTRYRQARFLNRKKPEGWLAPSIQHKINSHIKIIDMLTKLLPITDITIEVASFDIQKIKNPDIQDKEYQQGDQLGFYNVREYVLWRDNYQCQGRKGCKNKILNVHHIESRKTGGNSPNNLITLCETCHNDYHAGKLKLNLKRGQMFKDATFMGVMRWATYNALKELYPNVKLTYGYITKHKRIKYGLEKSHRMDARCISGNPLVKPLDTYYYFKCVRKQNRQLHKATPSKGGVRKNNKAPRYLHGFQLFDKVSYQNQECFIFGRRTSGYFDLRKLDGTKVTASASVKKLKLIERANTLLCERREGNSSPAYTIF

SEQ ID NO: 21496 - protein, 293 aa, unidentified
  REGION 1..293: note = Human gut metagenome
MPDKVYVISRLGHPLMPCSPANARHLLDDKKAKVVKRMPFTIRLLYGSTKYIQPIILGVDAGSKTIGLSASTAKEEVFAAEVMPRNDVVENLSTRREFRRARRNRTTRYRKPRSDNRVRSNHERWLAPSVKVKIQEHITSIKRVYTILPISKVVIETAEFDLQLLKAIQEGKPIPEGEDYQKGEMYGSYNVCQYVLWRDNYTCICCGVRGTPKNPVRLHVHHFESRKYGGNAPDNHGTLCDDCHKKFHLGIITDVKLKTRRRQSTRDAAFMGIMRKTLMWRLRTELFIPVAET

SEQ ID NO: 21497 - protein, 451 aa, Moorena sp.; identical to SEQ ID NO: 3199

SEQ ID NO: 21498 - protein, 451 aa, unidentified
  REGION 1..451: note = Human gut metagenome
VLHARNLSITLAKVSYGLYDAGLPQKIIQKERSTYMVYVLSQNGQPLMPTIRHGKGRRLLKEGKANVVKKCPFTIRLTYPSGDQTQEISLGIDSGSKYIGISATTQKKVLYEAEVELRNDISKLLAARRQNRRSRRSRKTRYRKPRFDNRKRKEGWLAPSVQQKVDCHLKVVEDVCKLLPVTRIIAEVASFDIQKIKDPKIHGTDYQQGDQLGFWNVREYVLFRDGHTCQCCKGKSKDKILNVHHIESRQTGGNAPNNLITLCETCHKGYHKGQVKLPKKIKRGMTFKDAAFMGIMRWAFYDRLKEIYLPLGIDVSLTYGYLTKNTRIAHQLPKTHYLDARCISGHPDAISDGIYYHQKKIRCHNRQLHKANTLKGGIRKRNQAEYLVHGFRLFDKVRYQGKDYFIFGRRKSGYFDIRDLNGEKVNKGSISYKKLRLVETRRSYLTERRLA

SEQ ID NO: 21499 - protein, 412 aa, unidentified
  REGION 1..412: note = Human gut metagenome
LRVFVLNKRGKPLMPCSPAKARHLLKEKKAIVVRRTPFTIQLTIATGESKQPVSLGVDAGYKYVGLSASTEKAELYASEVELRQGITDLLSARRALRRARRNRKTRYRAPRFDNRIRTKRKGWLAPSVENRINAHLSRIEAVLRLLPVTKITVETASFDMQLLKNPDIAGKEYQEGEQLGFWNVREYVLFRDGHVCQHCYGRSKDPVLNVHHLESRRTGGDSPGNLITLCETCHKALHRGDITLKAKRGKSFRAEAFMGIMRWEVHNRLRALHPGIEVSNTYGYRTKHARIANGIAKSHCADAFCIAGNLGAERLCEFFFQKQTRRNNRQIHKLSILKGGIRKRNQAPFEVKGFRLFDKVACQGEESFIFGRRSSGFFDVRKLDGTRISAGISCKKLHLLEKRRTYLTEIRK

SEQ ID NO: 21500 - protein, 512 aa, unidentified
  REGION 1..512: note = Human gut metagenome
MSTVYVLNKDGKPLMPTTRCGHVRHLLKEQKARVVTSKPFTIQLLYEADDVVQSLYLGIDPGRTNIGVAVVKANGTAVFTAHLETRNKEIPKLMKKRKESRRARRTNGRRCRRQRRAKANGTISKKCVKHDTAQNGSVSKRAKEIGVIKRHLPGCEKDVLCIGIKNKEAKFSNRTRPEGWLTPTANQLLQTHINLVKKIQKFLPISDVVLEINKFAFMRLDNPNVQKWQYQQGPLYQKANLEETVSEMQEHHCLFCKKKIDHYHHVVPQHKNGSNTIDNIIGLCTQHHDLVHKDATWQKRLAKKKTGLNKKYGALSVLNQIIPALTKELSSLFPKHFFVTNGKSTYDYRAAHGVSKDHWLDAYCIACSVLPNDTCDKTINSRVPYELKQFRRHDRRALNNENMSRVYTFNGKMVATNRHKATEQTTDSLEEFRQRQPNDVCNLKVKEHHPTYRNMNRNYPGSVFLVGNQVHVMQGIAGSKDGEATTYKDTNANSIAAGKCKFVAKNSGILFV

SEQ ID NO: 21501 - protein, 431 aa, unidentified
  REGION 1..431: note = Human gut metagenome
MPNKVYVINKHGRPLMPCSPAKARHLLDAGKAKVKKRTPFTIQLVYGSSGYTQEVILGVDAGSKTIGVSALTKKEELFAANVIPRNDVVDLLSTRREFRRARRNRKTRYRKPRFDNRVRSKHKGWLAPSVEVKIQEHITAIRRVCGILPVSKVVVETAEFDLQLLKAIADGKPVPQGEDYQKGEMYGHYNVRQYVLWRDDYTCQCCGAHATKKKEVRLHVHHLESRKTGGDASGNLVTLCESCHEKLHKGLITEDDFKKRKRKSTRDATFMGIMRATLLQRLRSELPIPVVETRGYITKATREKLLVLPKSHTNDALAIAQGKHGFNVGYLPGIAQIDKIYTIRPVRHHNRQLHKATILKGGIRKSNQAEKYVFGYRLFDKVQFNGQDCFIWGRRTTGIFTIKTINGKMIKDGISFKKLKPVEKSTGYLIA

SEQ ID NO: 21502 - protein, 427 aa, Moorena sp.; identical to SEQ ID NO: 7675

SEQ ID NO: 21503 - protein, 447 aa, unidentified
  REGION 1..447: note = Human gut metagenome
VPAYRIKHITKKEAPYMVYVLDIDGQPLMPTSRHRKVRKLLNSHLAKVVKRCPFTIQLLYQSTKETQPVSLGVDAGSRHIGLAATTEQKVVYQEELVPRNDVVKLLSARRALRSSRRSRKTRYRKPRFNNRVHSKHKGWLAPSVEVKIQEHITAIKRICQILPISEIHVETAEFDLQRLKAMDEGSPLPVGIDYQLGEQYDFYNTIQYVLHRDEYTCQCCGTHDNNVKLHVHHIESRQTGGDAPNNLITLCEHCHKLLHAGKTILPKGKKRGKSYRDATFMGIMRKTLLERLKKEIDVPVEGTYGYITKYWRERAGLEKSHINDAICISKHPYARPLETYYLTKAVRHHNRQIHKTKFSKGGIRKRNQAPYLVKGFRLFDKVLYQGESYFIFGRRITGYFDIRTLDGTKVNKGSTSYKKLRIQDTAEAYLTEVRAIPHMNEFTCVLA

SEQ ID NO: 21504 - protein, 515 aa, unidentified
  REGION 1..515: note = Human gut metagenome
LLRQGRLIVKKVTYMSTVYVLNKDGKPLMPTTRGGHVRHLLKEQKARVVRTNPFTIQLLYETDNLVQPLYLGIDPGRTNIGVAVVKTDGTAVFTAHLETRNKEIPKLMQGRKKARRARRTNGRRCRRQRRAKANGTISKKCVKQATAQNGSVSKRANEIGVIKRHLPGCEKEVLCIGIKNKEAKFSNRTRPEGWLTPTANQLLQTHINLVKKIQKFLPISDVVLEINKFAFMRLDNPNVQKWQYQQGPLYQKASLEEAVSEMQEHHCLFCKNTIDHYHHVVPQSENGSNTIGNIVGLCTKHHDLVHKDTSWQEKLAKKKTGLNKRYGALSVLNQIIPALTKELSSLFPKHFFATNGKSTYDYRAAHGVSKDHWLDAYCIAGSVLPNDACDNNINNHVPYELKQFRRHDRRALHKENMGRVYTLNGKSVATNRHKAIKQTTDSLEEFRQRQPNDVCKLKVKEHHPEYRNPKRNFPGCVFLVGKHTHVMQGTSGSHNGKADGYYDTNGNSYSSGKCK

SEQ ID NO: 21505 - protein, 532 aa, unidentified
  REGION 1..532: note = Human gut metagenome
MSTVYVLNKDGKPLMPTTRCGHVRHLLKEQKARVVTSKPFTIQLLYEADDVVQSLYLGIDPGRTNIGVAAVKADGTAVFTAHLETRNKEIPKLMKKRKESRRARRTNGRRCRRQRRAKANGTISKKCVKNDTAQNGSVSKRAKEIGVIKRHLPGCEKDVLCIGIKNKEAKYTNRERPEGWLTPTANQLLQTHVNLVKKVQKLLPISDVVLEVNKFAFMRLDNPDIQKWQYQQGPLYKKESLESAVSEMQEHHCLFCKKPIDHYHHVVPKSENGSNTIANIVGLCAEHHNLVHKDVAWQEKLAEEKTGLNKKYGALSVLNQIIPALTNKLSVLFPKHFFVTAGKSTHDYRAAHGVSKDHWLDAYCIACSVLPSNVCDSNINNHVPYELKQFRRHDRRVLHKANMSRVYTLNGKAVATNRHKAIKQTTDSLEEFRQKYPDDVYKLKVKEHHPAYRNLNRNYPGSVFLVGKQAHVMQGIASSKDGKTTKYNDTNATTITAGKCKFVAKNSGILFVQCKFRKALSDGTTKKLQYPV

SEQ ID NO: 21506 - protein, 442 aa, unidentified; identical to SEQ ID NO: 2903
  REGION 1..442: note = Human gut metagenome

SEQ ID NO: 21507 - protein, 424 aa, unidentified; identical to SEQ ID NO: 3434
  REGION 1..424: note = Human gut metagenome

SEQ ID NO: 21508 - protein, 406 aa, Geobacillus sp.; identical to SEQ ID NO: 11768

SEQ ID NO: 21509 - protein, 431 aa, Escherichia sp.; identical to SEQ ID NO: 3801

SEQ ID NO: 21510 - protein, 460 aa, unidentified
  REGION 1..460: note = Human gut metagenome
VQLRQSDAGQSHVLCCLSDKKKGRHNHMYVYVINKHGQPVMPCRPRMARVLLQEGKAAVVKQVPFTIRLLYGSSGYKQPVSLGMDAGSRHIGIAVTTEKKVLYAEELSPRNDVVKLLSVRRQRRRARRSRKTRYRQARFDNRVSSKPKGWIAPSVEVKIQEHISAVMRIQKMLPVSEIHVETAEFDTQRLKALEEGRPVPVGTDYQKGEMYDQYNVRQYVLFRDGYKCKCCGKHGDGVKLHVHHIESRQTGGNAPNNLITLCEDCHKALHAGTIQLPDGRAKRGRSHRDAAFMGIMRKAMVSQLRDIVDIPVTETYGYITKYYRELHHVKKSHISDAIMISRNFKAEPDDTYYASKAVRHHNRQLHKNTILKGGVRKRNQAPRVVKGFRLFDLVRYENSVYYVFGRRKSGFMDIRTLDGRKINKGSISSKKLKFVSTSKGTLVERRKAIPLADKSASFLA

SEQ ID NO: 21511 - protein, 458 aa, Scytonema sp.; identical to SEQ ID NO: 15012

SEQ ID NO: 21512 - protein, 434 aa, unidentified
  REGION 1..434: note = Human gut metagenome
VLSAWNPFQHWRRITTGRKTEETNLRVLVWNKRGKPLMPCSPAKARLLLKEKKAIVVRRTPFTIQLTIATGETKQPVSLGVDAGYKHVGLSASTEKAELYASEIELRQDITDLLSARRELRRARRNRKTRYRAPRFDNRIRTKRKGWLAPSVENRINAHLSRIEAVLRLLPVTKITVETASFDMQLLKNPDISGKEYQEGEQLGFWNVREYVLFRDGHVCQHCHGGSKDPVLNVHHLESRRTGGDSPGNLITLCETCHKALHRGEITLKAKRGQSFRAEAFMGIMRWEVLNRLKASHPELEVNNTYGYRTKHARISNGIAKSHCADAFCIAGNLGAKRLGEFFFQKQTRRNNRQIHKLSILKHGLRKRNQAPFEIKGFRLFDKVACKGEEGFIFGRRSSGYFDVRKLDGTRISAGISYKKLHLLEKRQTYITCL

SEQ ID NO: 21513 - protein, 502 aa, Flavonifractor sp.; identical to SEQ ID NO: 2616

SEQ ID NO: 21514 - protein, 414 aa, unidentified; identical to SEQ ID NO: 4015
  REGION 1..414: note = Human gut metagenome

SEQ ID NO: 21515 - protein, 493 aa, unidentified; identical to SEQ ID NO: 3154
  REGION 1..493: note = Human gut metagenome

SEQ ID NO: 21516 - protein, 426 aa, unidentified
  REGION 1..426: note = Human gut metagenome
MPKVYVLNRHGRPLMPCTPAKARHLLDAGKAKVRHRTPFTIQLLYGSTGYTQEVILGVDAGSKTIGLSAATETEELFSAEVKPRNDVVELMSARRQFRRARRNRTTRYRKPRFDNRVRSKHKGWLAPSVEVKIQEHMTAILRACAILPVSKVVVETAEFDLQLLKAVAEGKPVPQGEDYQKGEMYGHYNVRQYVLWRDSYTCCICGVHGSVRKGVPLHVHHLESRRVGGDAPDNLVTLCTACHDKLHKGIIMAADIKKRKRRSTRDATFMGIMRMTLLRRLREQLPVPVVETRGYITKATRENLLVLPKSHANDALAIAHGPQGFRAEHLPNIRQADRLYTIRPVRHHNRQLHKATILKGGVRKTNQAEKYICGFRLYDKVLYNGIECFVWGRRTSGSFLLRQLNGEKVKDGVSYKHLKLLERSQS

SEQ ID NO: 21517 - protein, 443 aa, Anoxybacillus sp.; identical to SEQ ID NO: 6339

SEQ ID NO: 21518 - protein, 427 aa, Parasutterella sp.; identical to SEQ ID NO: 4733

SEQ ID NO: 21519 - protein, 431 aa, unidentified
  REGION 1..431: note = Human gut metagenome
MPNKVYVINKHGRPLMPCSPAKARHLLDAGKAKVKKRTPFTIQLVYGSSGYTQEVILGVDAGSKTIGMSASTTKEELLSAEVKPRNDVVDLLSTRREFRRARRNRKTRYRKPRFDNRVRSKHKGWLAPSVEVKIQEHITSIKRVCRILPVSKVVIETAEFDLQLLKAIADGKPVPQGEDYQKGEMYGHYNVRQYVLWRDNYTCQCCGAHATKKKEVRLHVHHLESRKVGGDAPDNQVTLCESCHEKLHKGLITAKDFKKRKRKSTRDATFMGIMRKTLMQRLCSELPIPVVKTRGYITKATREKLLVLPKSHTNDALAIAQGKHGFNVGYLPGILQIDKIYTIRPVRHHNRQLHKAAILKGGIRKSNQTEKYVFGYRLFDKVQFNGQDCFIWGRRTTGIFTIKTINGKMIKDGISFKKLKPVEKSTSYLIA

SEQ ID NO: 21520 - protein, 410 aa, Geobacillus sp.; identical to SEQ ID NO: 4122

SEQ ID NO: 21521 - protein, 426 aa, unidentified; identical to SEQ ID NO: 3614
  REGION 1..426: note = Human gut metagenome

SEQ ID NO: 21522 - protein, 258 aa, unidentified
  REGION 1..258: note = Human gut metagenome
SIVIEVAQFDTQKIKNPEILGKEYQEGDQLGFWNTREYVLARDGHKCQYCKGKSKDKILNVHHLESRKTGGDSPSNLITLCETCHKEYHKGNIDLKIKRGSSLRDAAVMGIMKWKLYEELRSRYDRVSMTFGYITKHNRIKYGIEKSHTSDAFVISMNINAKRIERQYLKRLIRRHNRQIHKMKILKGGKKKNNQAPFEVFGFRLFDKVLYNNKILFVYGRRKSGSFNIRDFNGENSKDVSRKKFKLIRGKRHPIILK

SEQ ID NO: 21523 - protein, 545 aa, unidentified; identical to SEQ ID NO: 5593
  REGION 1..545: note = Human gut metagenome

SEQ ID NO: 21524 - protein, 420 aa, unidentified
  REGION 1..420: note = Human gut metagenome
MQYAYVLNKRGEPLMPCSPGKARILLKQQKACVVKRTPFTIKLLHGSAGYKQPITLGVDAGSKHVGLSASTEKRELYSEEFTPRNDVVELLSTRRQNRRSRRNRKTRYRAPRFNNRVHGKHKGWLAPSVEVKIQEHITVIKRICRILPITLVRVETAEFDTQRLKAMLAGKPLPVGTDYQLGEMYDEYNVRQYVLKRDNYTCQCCGAHTTAKKTVKLHVHHLESRKVGGNAPSNLITLCTTCHNNLHKGKITLDGKKRGKTLRDAAFMGIMRNTLLTRLRNELNIPVQNTYGYITKLLREQNDIKKSHVNDARCISKHPLAKPCSVCYRTKAIRHHNRQIHKAKILKGGIRKANQAPYIVKGFRLWDKVLYNEQECFISGRRSSGYFALRKFDGTTITNSISFKKLRLLEPATNYLIERK

SEQ ID NO: 21525 - protein, 427 aa, Oscillochloris sp.; identical to SEQ ID NO: 5291

SEQ ID NO: 21526 - protein, 424 aa, Moorena sp.; identical to SEQ ID NO: 8180

SEQ ID NO: 21527 - protein, 415 aa, unidentified
  REGION 1..415: note = gut metagenome
MENEMAYCFVVDKNNRPLAPTKVNKGWYLVRKGRAKIKSRYPMVIQLEKEVESDKYDESRVVVGIDDGSAHVGLAIVQKCPTKNKVVFKGTIEQRQDVKHLMDVRRGYRRYHRYHKRYRQARFNNRHSSKRSGRLAPSIKQKKDAVLRVLYQLNRWIDIQEYYLEDVCMDIRAMTDGYKPYRWQYQKSSRLDENLRKAAIIRDGCKCQECGRSNCVLEVHHIKARKYGGADTIGNLITLCSGCHQKTEGREREFEDRYFKIIGSKPKRFDYAMHVMQGKNYLRERISELGPLHLTNGGETANKRIEWNIVKSHSNDAICITDCIPDTCDVKEWIIKPMRRKSKAKTDNVLGIRHRDLVSYTYKNGEIHTGYVTALYPELLALNFQSKTKHCKKVNARKCRLLWKFDKIYWLEQCV

SEQ ID NO: 21528 - protein, 420 aa, unidentified; identical to SEQ ID NO: 6693
  REGION 1..420: note = Human gut metagenome

SEQ ID NO: 21529 - protein, 415 aa, unidentified
  REGION 1..415: note = Human gut metagenome
MVYVLDKNGHPLMPTSRHGKVHRMLKSGQAKVVRKCPFTIQLLYESEHNVQAVSLGIDAGSKHIGVSATTKTTVLYEADVELRDDIVKLLAIRRQMRSSRRSRKTRYRPKRFDNRRRGEGWLAPSIRQKINTHLVTVAHVCEILPVSQIIVETASFDIQKIKNPEIQGIEYQQGEQMDFWNTREYVLFRDGHVCQCCKGKKKDPILNVHHIESRKTGGNAPNNLITLCETCHKGYHNGTIKLPKKIKRGMKFKDAAFMGIMRWAFYNTLKEKYEPDIPVSMTYGYLTKNTRIRHNLPKEHYIDARCISGNPDAVSDGVYYYQKKVRCHNRQIHKFNTLRKGVRKLNQSEYLVKGYRIFDKVRYQGREYFVFGRRKTGFFDIRTLSGEKANKGSISIKKIAFVDTRKNYITERRTV

SEQ ID NO: 21530 - protein, 459 aa, unidentified
  REGION 1..459: note = Candidatus Poribacteria bacterium
MRVYVINKNGNPLMPCKPAKARKLLRDKKAKVVNRCPFTIQLLWDCEENVQEVTVGIDKGSDVTGFSCVSNGEILMSGAIHHRTDIKGKMDARRANRRNRRSRKWYRPKRFNNRASSKRSGRLPPSIKANAEEVIRVVRKIPLPISHIVVEDVQVDIRRLSDPDVKNGEYQQSNRLDENLRLACLTRDGFICQKCKKQPPDSRDYGKKQRPEYRDYRSKKETRLEAHHIVWTTKGGKDSIYNLITLCESCHDKVHKKGESGKVKIKGGKVVTGMQKATHDFVLAAGFSDKVAQRTMQGKTLMYQELKKIASLSTVYGYQTSAYRKSLSLPKTHDIDALCVATLYTGAVIRRHRENFYIIKFRPRQTRRQYHDLPRKGKGRVRYQINSELEGFRKGDVVRVKGRWLKQINSIYSNGYLAFARVSGEPNSAKPKDCQLLQRGQTVIWEKVVDQEGGIVVNV

SEQ ID NO: 21531 - protein, 431 aa, unidentified
  REGION 1..431: note = Human gut metagenome
MPDKVYVISRLGHPLMPCSPAKARHLLDDKKAKVVKRMPFTIRLLYGSTKYIQPIILGVDAGSKTIGLSASTAKEEVFAAEVMPRNDVVENLSTRREFRRARRNRTTRYRKPRSDNRVRSNHERRLAPSVKVKIQEHITSIKRVCTILPISKVVIETAEFDLQLLKAIQEGKPIPEGEDYQKGEMYGSYNVCQYVLWRDNYTCICCGVRGTPKNPVRLHVHHFESRKYSGNAPDNHGTLCDDCHKKFHLGIITDVKLKTRRRQSTRDAAFMGIMRKTLMWRLRTELFIPVAETKGYITKATREKLLALPKSHTRDALAIAQGRRGFGIKEYAYVEPANHIYTVRPVRHHNRQLHKASILKGGIRKRNQASKYVFGFRLYDKVLYQGKACFVWGRRTSGTFLLRTIDGIKVKDGVSYRNLTLLERSSNYLIA

SEQ ID NO: 21532 - protein, 348 aa, Anoxybacillus sp.; identical to SEQ ID NO: 18653

SEQ ID NO: 21533 - protein, 241 aa, unidentified; identical to SEQ ID NO: 3977
  REGION 1..241: note = Human gut metagenome

SEQ ID NO: 21534 - protein, 406 aa, unidentified
  REGION 1..406: note = Human gut metagenome
MVYVQDIDGKPLMPTTRHGKVRRLLKSNKAVVVNLCPFTIRLTYISDSYKQEIVLGVDAGTKHVGLSATTKSKELYSSEVILRNDIVDLLSTRRELRKARRNRLRYRKPRFDNRVKSKRPGWIAPSVKYKVDAHIRVVENVCSILPISRIVIEVAQFDTQKIKNPEISGKEYQEGDQLEFWNTREYVLARDGHKCQYCKGKSKDSILNVHHIESRKTGGDSPSNLITLCETCHKEYHKGNIDLKIRRGKSLRDAAVMEIMKWRLYEELKSRYDRVFMTFGYITKHNRIKYGIEKSHTSDAFVISKNINAKRIERQYLKRLIRRHNRQIHKMKILKGGKKKNNQAPFEVFGFRLFDKVLYNNKIFFVYGRRKSGSFNIRDFNGENSKDVSRKKFKLIRGKRHPIILK

SEQ ID NO: 21535 - protein, 539 aa, Marinobacter sp.; identical to SEQ ID NO: 10373

SEQ ID NO: 21536 - protein, 424 aa, Moorena sp.
MVYVISQDGNPLMPCSNPIARLLLKQGKANVKKRNPFTIQLTYETTNYTQNLTLGVDTGSGTFGTAVSKDNGGIVYMSEVVVRNDISSKMKQRTTYRRNRRSRKTRYRKARWLNRANSRKTERFSLTMKSKLHSHVKEIKFIQSILPIKEMIFETGQFDPHLMKDPSLADQKAKLWKYQKGTNYGFENTKAMVRNRDHYTCQCCKGKHKDKKLEVHHIVFRSQGGSDEESNLITLCHTCHTKLHHGLIKLKLSGKKAGTLKYATQMNSIRKQLLRLYPDAIETFGYITNANRLHLGIEKEHYYDACVIASQGNAFSVKSNLYKKKCISDGDFQKTKGVRSEQPIITDKIYGFRKFDKVRYFGKDYFIKGRMSTGYAILMDIDGKKIDFSFMPKGYKTPKLVNLKRLEARSSWIVTTEEVTPNIA

SEQ ID NO: 21537 - protein, 419 aa, Anoxybacillus sp.; identical to SEQ ID NO: 5328

SEQ ID NO: 21538 - protein, 545 aa, unidentified
  REGION 1..545: note = Human gut metagenome
VQFAWWLCHPKPSDNIEDVNHETALMLLQIKAGTETFGTAPCGSGPKAEGVSPERKAMNTVAVVTNTNKPLMPTSPYRARKLLSSGKAKIVKHRPFTILLVNRSDGNVQEIEYKSDTGYLHVGISVCSEKREFVREQRDLLPDEKEKHNDRRKYRRTRRNRKRYRKARFDNRIGKIRKKEKNEHVWLPPSLEHKVDAQVQLFLRLYQVMPVKRAVFEMGQFDPALMKALEKGEAAPQGIDYQMGERYQIATRRAAVFTRDRYACVFCGRSIKDHAILHVHHIGFWKQDRSNRLDNLATCCEQCHTSENHRPGGILYGVEPKLESLASATYMNVVRFELLRRLKEAAPDVEFHISYGAKTSVIRKQRSISKSHTNDAYCLGQYFPKLRAEEIGFQKIRRNDRILQKFYDAEYLDSRDGTTKKGKELTNGRISRNHKKDHENLHQYRGKKLSKGRITIRRGRSSLKPGGLVRFDGEVLTVHGTHRSRKKNKAGHIKVSVNVEFERPSKTGRKSAALSKCQIISRSYNTGWKQIQLRKEEQGRIAAVV

SEQ ID NO: 21539 - protein, 431 aa, unidentified; identical to SEQ ID NO: 4306
  REGION 1..431: note = Human gut metagenome

SEQ ID NO: 21540 - protein, 412 aa, unidentified
  REGION 1..412: note = Human gut metagenome
MVYVISQDGKPLMPCSNPIARLLLKQGKAKVKKREPFTIKLTYEAPNYTQDLTLGVDTGSGTIGTAVSKDNGDIVYMSEVIVRNDITDKMTQRVKYRRNRRNRKIRYRKARWLNRANSIKNDRFSPTMQSKLHSHVKEIEYIKSILPITEMVFETGQFDTHFMKNPSLANPKVKHWGYQKGTNYGFENTKAMVLNRDSYTCQCCKGKHKDSKLEVHHIVFRSQGGSDEESNLITLCHTCHKDLHSGKINPKLSGKVKGNLKYATQMNSIRKQLFRLYPNAIETFGYVTKANRLHLGVNKEHYYDACTIATQGNAFNVKSNLYKKKCVSDGDFQKTKGVCSEQPIVTDKICGLDCQHFFRQIFLGYFSDIVQAFDTLRKNVCGDDYTSLHNPIVLSSVLPAYGMFHSIQILFL

SEQ ID NO: 21541 - protein, 418 aa, unidentified; identical to SEQ ID NO: 20220
  REGION 1..418: note = Human gut metagenome

SEQ ID NO: 21542 - protein, 411 aa, unidentified
  REGION 1..411: note = Mouse gut metagenome
MPCSQRKARLLLKNKKAKIYAYHPFTIQLFYASGETIQKCNIGVDTGSRHIGLAITSENKVLFKGEIDLRQDVKSNLDTRRTYRRNRRNRKTRYRKARFFNRVKSKQKNWLPPSIESKIHHTFHWIHKLENLVDDSKLHIEVGKFDVAKMIHPDIQGEDYQQGQCYGYFDTRYFVFARDDYTCQCCKKKNKILRTHHIRYRSNGGTDRADNLITVCTDCHTSKNHKKGGILYEWQQRHKKVKQYKEPPFMNIIRKRIYQKYPDAVISYGSQTTPKRKERNLDKTHYNDAIIISGIEDIKENPKEWLRIKQFRKKKRSLHEAAARKGRKEHNRTQKRNRKNTSYDKGWYLNDYVEVFGKKGYISGFTNSGVYIKNTNDDYITMPDKKYKQVSLCNIVRICHNNNWQYEIQKI

SEQ ID NO: 21543 - protein, 382 aa, unidentified
  REGION 1..382: note = Human gut metagenome
LRVFLEQTRKTADAGYKHVGLSASTEKAELYASQVELRQDITDLLSARRALRRARRNRKTRYRAPRFDNRIRTKCEGWLAPSVENRINAYLSRIEAVLRLLPITKITVETASFDTQLLKSPDIAGEEYQKGEQLGFWNVREYVLFRDGHVCQHCHGRSKDPVLNVHHLESRRTGGDSPGNLITLCETCHKELHRGEITLKAKRGQSFRAETFMGIMRWEVLDRLKASHPKLEVQNTYGYRTKHARIVNGIAKSHCADAFCIAGNLGAERLGEFLFQKQTRRNNRQIHKLSILKGGIRKRNQVPFEVKGFRLFDKVACKGEEGFIFGRRSSGYFDVRKLDGTRISAGISYKKLRLLEKRQTYLTEIRKEEALPPLPEGRGLRA

SEQ ID NO: 21544 - protein, 465 aa, unidentified; identical to SEQ ID NO: 9124
  REGION 1..465: note = Human gut metagenome

SEQ ID NO: 21545 - protein, 424 aa, unidentified; identical to SEQ ID NO: 3434
  REGION 1..424: note = Human gut metagenome

SEQ ID NO: 21546 - protein, 415 aa, unidentified; identical to SEQ ID NO: 4542
  REGION 1..415: note = Human gut metagenome

SEQ ID NO: 21547 - protein, 456 aa, Halomonas sp.; identical to SEQ ID NO: 2881

SEQ ID NO: 21548 - protein, 457 aa, unidentified; identical to SEQ ID NO: 3236
  REGION 1..457: note = Human gut metagenome

SEQ ID NO: 21549 - protein, 490 aa, Anaerostipes sp.; identical to SEQ ID NO: 6170

SEQ ID NO: 21550 - protein, 442 aa, Moorena sp.; identical to SEQ ID NO: 4449

SEQ ID NO: 21551 - protein, 477 aa, unidentified; identical to SEQ ID NO: 17358
  REGION 1..477: note = Human gut metagenome

SEQ ID NO: 21552 - protein, 447 aa, unidentified; identical to SEQ ID NO: 5316
  REGION 1..447: note = Human gut metagenome

SEQ ID NO: 21553 - protein, 406 aa, unidentified; identical to SEQ ID NO: 5200
  REGION 1..406: note = Human gut metagenome

SEQ ID NO: 21554 - protein, 428 aa, unidentified
  REGION 1..428: note = Human gut metagenome
LKVFVLNMRGQPLMPCSPAKARHLLKAGKAVVKRRTPFTIQLRIATGETKQNVTLGVDAGAKHVGLSATTEKEEVFASEVELRQDITGLLAARLSLRRDRRHRKTRYRAPRFLNRVRSKHKGWLAPSVENRIQAHMSRIDAVCRLLSVTKIVIETASFDIQKIKDPSVEGTDYQQGDQLGFWNVREYVLFRDGHVCQHCHGRSKDKILNVHHLESRQTGGDAPNNLITLCETCHKAYHAGKIKLKVKRGQSFRAEAFMGIMRWTLLDRVRKAHPGLPVENTYGYLTKHTRIPHGLPKTHCVDAYCIAGNLKAVRRGVYLHQRQMRKHNRQIHKFTVLSKRLEDGTKIGYRKLNQSPYLVHGFRLFDKVRCLGQIGFIFGRRSSGYFDVRRLDGVKLSPSISWRKLTLLEKRSTYLTELRKQDGASSPV

SEQ ID NO: 21555 - protein, 397 aa, unidentified
  REGION 1..397: note = Human gut metagenome
IVKRRTPFTIQLTIATGESKQPVTLGVDAGYKHVGLSASTEKAELYASEVELRQDVSDLLSARRALRQSRRSRNTRYRAPRFDNRIRTKRKGWLAPTVENRINVHLSRIETVLRLLPVTKITVETASFDTQLLKNPDIAGKEYQEGEQLGFWNVREYVLFRDGHVCQHCHGRSKDPVLNVHHLESRRTGGDSPDNLITLCETCHKALHRGDITLKAKRGKSFRAEAFMGIMRWEVHNRLRALHPGIEVSNTYGYRTKHARIANGIAKSHCADAFCIAGNLGAERLCEFFFQKQTRRNNRQIHKLSILKGGIRKRNQAPFEVKGFRLFDKVACQGEEGFIFGRRSSGFFDVRKLDGTRISAGISCKKLHLLEKRRTYLTEIRKEEALPPLPEGRGLRA

SEQ ID NO: 21556 - protein, 515 aa, unidentified; identical to SEQ ID NO: 5017
  REGION 1..515: note = Human gut metagenome

SEQ ID NO: 21557 - protein, 416 aa, unidentified
  REGION 1..416: note = Human gut metagenome
MIAAYVLDINGSPLMPMHNFKKVRKLLKEKKAKVVSREPFVIRLLYEPKTHIVEDCVLGIDTGSKTIGASVFCNGEILYASEVEIRNDIKIKMDRRRMYRRDRRNRKTRYRKTRFLNRGNSTKKGRYSPTLKSKFDSHVREIEFIKSILPIKHLVLETGSFDTHKLKNPNVKGWGYQRGINYGYANARAHALDRDNYTCQICGAKNTRLEVHHIKYRSQGGSDDLENLITLCEDCHHNLHKGKIELKVKGKKKSSLKHATQMSVIRSMLLKEYPEAIETFGYITKQNRWTLGLDKTHYIDAAVISSEGKSIKFNCDLYLKRHIAKSEYKLAKGLRSERKINMGKIHGFRKWDKVLYMGTEYFIKARRTRGVFELENIYKEKIDFSYMPRGFKTVKVSNLIRLSARSTTLCIRTKIS

SEQ ID NO: 21558 - protein, 426 aa, unidentified; identical to SEQ ID NO: 3964
  REGION 1..426: note = Cyanobacteria bacterium UBA11148

SEQ ID NO: 21559 - protein, 431 aa, unidentified; identical to SEQ ID NO: 11677
  REGION 1..431: note = Human gut metagenome

SEQ ID NO: 21560 - protein, 416 aa, unidentified
  REGION 1..416: note = Human gut metagenome
MVYVLSQNGQPLMPTGNHAKVRVLLNQRKAKVIKRCPFTIQLQYESTTHTQKINLGIDAGSKTIGVSATTDSKVLYESEVVLRNDIVELLSGRRALRNSRRSRKTRYRKPRFDNRKKPDGWLAPSIRQKIETHVTVVGNVMKILPVTKIIVETASFDIQKIKNPEIEGEGYQHGEQLDFWNVREYVLFRDGHTCQCCKGKSKDNILNVHHIESRKTGGNAPNNLITLCETCHKAYHKGIITLPKEIHRGMRFRDAAFMGIMRWAFYDRLKELYNPLGAEVINTYGYITKNTRIEHGLPKEHYVDARCISDNPAAKPLDHYYFQKKVRCHNRQIHKNTILKGGIRKRNQASYEVKGFRLYDQVLWKGQKCFIFGRRSTGRMDLRLLDGTHINASVGHKNLKLLSMRKNYLIEQRKAG

SEQ ID NO: 21561 - protein, 448 aa, Deinococcus sp.; identical to SEQ ID NO: 7409

SEQ ID NO: 21562 - protein, 379 aa, Halomonas sp.
HVLCLFELIHRGYQIKKALQQRAAFRRRRRSANLRYRAPRFNNRTKPKGWLAPSLQHRVDTVTAWVNRLNRLAPVTAISQELVRFDTQKLDNPEINGVEYQQGTLLGYEVREYLLEKWGRECAYCGTADTPLEIEHVIPRSRGGSNRVSNLTLSCHPCNQSKDALSLVDFFATDKGLKKRLKANGHTANARLERVQRQLKQPLRDASAINATRWALFNALKATSLPVAVGTGGRTKYNRQRLGIPKTHALDAACVGAFDALHAWQVPTLTIKAMGRGSYQRTRLTKHGFPRGYLMRQKQVHGFQTGDMVRAMVPTGKKAGTHTGRVAVRKTGSFNIQTEQGAVQGISHKYCTLIQRGDGYGYHFTPFTHLTGGAGQAVA

SEQ ID NO: 21563 - protein, 225 aa, unidentified
  REGION 1..225: note = Human gut metagenome
MVYVQDIDGKPMMPTTRHGKVRRLLKDNKAVVVNTCPFTIKLTYKTSDYKQEIVLGVDAGTKHVGLSATTKSKELYSGEVILRNDVVELLSTRRESRRARRNRLRYRKPRFENRVKSKRLGWVAPSVRHKVDAHIRVIDNICSTLPISRIIVEIAQFDTQKIKNPDISGNEYQEGDQLGFWNVREYVLARDGHKCQHCKGKSKDPILNVHHIESRKTGGDSPSIS

SEQ ID NO: 21564 - protein, 493 aa, unidentified; identical to SEQ ID NO: 3781
  REGION 1..493: note = Human gut metagenome

SEQ ID NO: 21565 - protein, 337 aa, unidentified
  REGION 1..337: note = Human gut metagenome
MPCSPAKARLLLKEKKAIVKRRTPFTIQLTIATGESKQPVTLGVDAGYKHVGLSASTEKAELYASEVELRQDVSDLLSARRALRQSRRNRKTRYRAPRFNNRLRTKRKGWLAPSVENRINAHLSRIEAVLRLLPVTKISVETASFDMQLLKNPDIAGKEYPEGEQLGFWNVREYVLFRDRHVCQHCYGRSKDPVLNVHHLESRRTGGDSPGNLITLCETCHKALHRGDITLKAKRGKSFRAEAFMGIMRWEVHNRLRALHPGIEVSNTYGYRTKQARTNRERHRQVALCGCFLHRRQPRRRKALRILLPEADAPEPPADSQALHPQRRHSKAQSGSL

SEQ ID NO: 21566 - protein, 417 aa, Streptomyces sp.; identical to SEQ ID NO: 20109

SEQ ID NO: 21567 - protein, 480 aa, unidentified
  REGION 1..480: note = Human gut metagenome
LYTKPLDNIGEGSLPPSGEINLKGMTFMVYVKSIDGKALMPTSNSKARKLLKQKKAKVVSLRPFVVKLTYKTKTEYIQKLNLGVDSGYSNIGFSVIDAKQEYIAGEVKLLEGMKKRLLEKASYRRIRRSRLRYRKARWNNRVKSKKKGWLAPSLKHKLDTHIKFIDYLKNILPIGKITIEVANFDIQKMKDDLISGIDYQNGDMFGFWNVREFVLHRDGHKCQNPNCKHKDKKEQILKVHHIRYRSEGGSDRPENLITLCSKCHTPANHKKGKFLYDWCVNGKKVRGFKDATFMSMIRWYLVNELKSKHNNVSITYGYITKNHRIQNGIEKSHLNDAFAIAKGTNQARTKDRFLVIQDRLKNRSLEKFYDSKIIDIRTEKKVSGGDLNCGRSTRNKNLNTENLRKYRGVKISKGQRRIRKQKYFYQPNDLVKYDGKVYTVKGTQNEGKYIALKEIKKVPKVELLIPYVFKKGLNWSYGLC

SEQ ID NO: 21568 - protein, 375 aa, unidentified
  REGION 1..375: note = Human gut metagenome
MPCSPAKARLLLKEKKAIVVRRTPFTIQLTIATGESKQPVSLGVDAGYKHVGLSASTEKAELYASEVELRKDITDLLSARRALRQSRRNRKTRYRAPRFDNRIRTKRKGWLAPSVENRINAHLSRIEAVLRLLPITKITVETASFDMQRLKNPDISGKEYQEGEQLGFWNVREYVLFRDGHVCRHCHGRSKDPVLNVHHLESRRTGSDSPDNLITLCETCHKALHRGEITLKAKRGQSFRAQAFMGIMRREVLNRLKASYPELKVHETYGYLTKHARIANGIVKSHGADAFCIAGNLGAERLGEFFFQKQTRRNNRQIHKLSILKGGIRKLDGTRISAGISCKKLRLLEKRRTYLTEIRKEEALPPLPEGRGLRA

SEQ ID NO: 21569 - protein, 436 aa, Moorena sp.; identical to SEQ ID NO: 19272

SEQ ID NO: 21570 - protein, 328 aa, unidentified
  REGION 1..328: note = Human gut metagenome
MVYVLANDGQPLMPTERHGKVCRMLKSGIAKVVKKCPFTIQLQYESERNVQPVALGIDAGSKHVGVSATTKAKVLYESDVELRDDIVKLLATRRQLRRRRRSRKTRYRPARFDNRRRKEGWLAPSIRQKIGSHLTVVANVCKILPVSQIIVETASFDIQKIKNPDIQGIEYQQGEQMDFWNIREYVLFRDGHTCQCCKGKSKDKVLNVHHIESRKTGGNAPNNLITLCETCHKGYHNGTVTLPKNIKRGMKFKDAAFMGIMRWTFYNTLKEQYEPDIPVHYTYGYITKNTRINHNLPKGHCIDARCISGNPDAVSDGTYYYQKKVRCH

SEQ ID NO: 21571 - protein, 512 aa, unidentified
  REGION 1..512: note = Human gut metagenome
MSTVYVLNKDGKPLMPTTRGGHVRHLLKEQKARVVRAKPFTIQLLYETNDVVQPLYLGIDPGRTNIGVAVVKANGTAVFTAHLETRNKEIPKLMQDRKKARRARRTNGRRCRRQRRAKANGTISKKCVKQTTAQNGSVSKRAKDIGVIKRRLPGCEKDVLCIGIKNKETKFTNRTRPEGWLTPTANQLLQTHINLVKKIQKFLPISDVVLEVNKFAFMRLDNPNIQKWQYQQGPLYKKESLESAVSEIQEHHCLFCKKPIDHYHHVVPQHKNGSNTIANIVGLCAEHHNLVHKDVAWQEKLAEEKTGLNKKYGALSVLNQIIPALTNELSSLFPKHSFVTNGKSTYDYRAAHGVSKDHWLDAYCIACSVLPSNVCDSNINNHMPYVLKQFRRHDRRVLNNENMNRVYTLNNKAVAINRHKAKDQKTVSLEEFRKEHPDDVCKLKVKEHHPTYRNMNRNFPGSVFLVGKQIHVMQGIASSKDGKATKYNDTSATAIAAGKCKFVAKNTGILFV

SEQ ID NO: 21572 - protein, 451 aa, unidentified
  REGION 1..451: note = Human gut metagenome
MSVAVMSKTGMRLMPTSEYRARKLLKSKKATVYRYNPFTIQLTERETGDVQTVELCMDTGYLHIGTSVKSEKHEYLGVQIDTLTDEKQKHDACRMYRRQRRSRKRYRQSRFNNRKRSDGWIAPSLEHKKDIHIQTISRICNAMPITNITLEMGNFDTQVLKALEENRPLPQGTDYQHGERYGIATLREAVFARDKYTCQCCRKTIADGAILHVHHIIYRSRGGTNRMSNLATACDRCHTPANHKPGGRLYNWKPKIASFKGATFMTAVRWKMYNEVKSKFSDINIHITYGAETKEQRRAFDITKSHVNDALVMGQFHPKHRSRPVCYKKKRRNNRCLEKFYDAKYIDSRDGKKRSGQELFNGRINRNHKKDSENLHQYRQQKVSAGRRTIRKQHYSIQPHDIIVFNRQQFETFGCHCNGARAILLPQKKSVAIKKLSVHKYAGGYFKSDFT

SEQ ID NO: 21573 - protein, 502 aa, unidentified; identical to SEQ ID NO: 2616
  REGION 1..502: note = Human gut metagenome

SEQ ID NO: 21574 - protein, 406 aa, unidentified
  REGION 1..406: note = Human gut metagenome
MVYVQDIDGKPLMPTTRHGKVRRLLKSNKAVVVNLCPFTIRLTYISDSYKQEIVLGVDAGTKHVGLSATTKSKELYSSEVILRNDIVDLLSTRRELRRARRDRMRYRKPRFNNRIKSKRPEWVAPSVRYKVDAHIRVVENVCSILPISRIVIEVAQFDTQKIKNPEISGKEYQEGDQLEFWNTREYVLARDGHKCQYCKGKSKDSILNVHHIESRKTGGDSPSNLITLCETCHKEYHKGNIDLKIRRGKSLRDAAVMGIMKWRLYEELKSRYDRVFMTFGYITKHNRIKYGIEKSHTSDAFVISKNINAKRIERQYLKRLIRRHNRQIHKMKILKGGKKKNNQAPFEVFGFRLFDRVLYNNKIFFVYGRRKSGSFNIRDFNGENSKDVSRKKFKLIRGKRHPIILK

SEQ ID NO: 21575 - protein, 406 aa, unidentified; identical to SEQ ID NO: 3415
  REGION 1..406: note = Human gut metagenome

SEQ ID NO: 21576 - protein, 453 aa, Lactobacillus sp.; identical to SEQ ID NO: 2687

SEQ ID NO: 21577 - protein, 420 aa, unidentified; identical to SEQ ID NO: 3685
  REGION 1..420: note = Human gut metagenome

SEQ ID NO: 21578 - protein, 416 aa, unidentified
  REGION 1..416: note = Human gut metagenome
MVYVLDKNGQPLMPTDRHRKVRLMLQSGQAKVIKRCPFTIQLNYDSGHQTQEISLGIDAGSKHIGVSTTTKIKVLYEADVELRNDIVDLLSSRRELRRGRRNRKTRYRQAKFNNRRRGNGWLAPSIRQKIGTHLTVVENICKILPISRIMVETASFDIQKIKNPDIQGAEYQQGDQLEFWNVREYVLFRDGHTCQYCKGKSKDKILNVHHIESRKTGGNAPNNLITLCETCHTGYHKGTVQLPKAIKRGMRFKDAAFMGIMRWAFYEALKQQYEPVGTPVHNTYGYITKHTRIAYNLPKEHYVDARCISGNPEASSNGEYYYQKKVRCHNRQIHKLTVLKGGIRKQNQATYLVKGYRLFDKVSYQGKGYFVFGRRQSGFFDIRTLSGEKVNKGSLSCKKLKFIATRTYYLTERRAV

SEQ ID NO: 21579 - protein, 412 aa, unidentified; identical to SEQ ID NO: 11530
  REGION 1..412: note = Human gut metagenome

SEQ ID NO: 21580 - protein, 480 aa, unidentified; identical to SEQ ID NO: 5187
  REGION 1..480: note = Human gut metagenome

SEQ ID NO: 21581 - protein, 556 aa, unidentified
  REGION 1..556: note = Human gut metagenome
LYIKMTSCTCTVFPAYNYAKTSSSQGKHNLLLRQERLIVKEVAYMSTVYVLNKDGKPLMPTTRCGHVRHLLKEQKARVVTSKPFTIQLLYEADDVVQSLYLGIDPGRTNIGVAVVKADGTAVFTAHLETRNKEIPKLMKKRKESRRARRTNGRRCRRQRRAKANGTISKKCVKHDTAQNGSVSKRAKEIGVIKRHLPGCEKDVLCIGIKNKEAKFSNRTRPEGWLTPTANQLLQTHINLVKKIQKFLPISDVVLEINKFAFMRLDNPNVQKWQYQQGPLYQKANLEETVSEMQEHHCLFCKKKIDHYHHVVPQHKNGSNTIGNIVGLCAKHHDLVHKDSAWEKKLAKKSTGLYKKYGALGVLNQIIPTLTNELSSLFPKHSFVTNGKSTYDYRAAHGVSKDHWLDAYCIACSVLPSNVCDSNINNHMPYVLKQFRRHDRRVLNNENMNRVYTLNNKAVAINRHKAKDQKTVSLEEFRKEHPDDVCKLKVKEHHPTYRNMNRNFPGSVFLVGKQIHVMQGIASSKDGKATKYNDTSATAIAAGKCKFVAKNTGILFV

SEQ ID NO: 21582 - protein, 413 aa, unidentified
  REGION 1..413: note = Human gut metagenome
MTNYVFVLDANGKQLAPTKEAKAWFLIRKKRATLVSKYPMVIQLNKEISDDEICKDEIRCGIDDVGLHVGIALVQKCQAKNKVIFKGTIEQRNDVKHLMDVRRGYRRYHRCHKRHRQARFNNRSSSKRDGKIAPSILQKRQATVRVINQLNKWINITNYWLEDVSIDIRALTDGYKSYRWQYQKSNRLDENIRKAVILRDECKCMECGKSNCRLEVHHIRPRRLNGSNTLSNLITLCEKCHQKTEGREELFMDKYFSLLKSSDNKNLNYAQHVMIGKKWLREQLSNLGILYLTNGGDTANKRINWNIEKSHSNDAICITDLQPDTCNIKEWSIKPMRRQSKAKTDNVLGINHRDLVEYTFKNGETHKGYVTALYPKQNAINFQSLTKHCKKVNAKKCRLLWKFSKIYWLDNVF

SEQ ID NO: 21583 - protein, 480 aa, Dorea sp.; identical to SEQ ID NO: 2726

SEQ ID NO: 21584 - protein, 442 aa, Lactobacillus sp.; identical to SEQ ID NO: 9501

SEQ ID NO: 21585 - protein, 434 aa, Anoxybacillus sp.; identical to SEQ ID NO: 3421

SEQ ID NO: 21586 - protein, 428 aa, unidentified; identical to SEQ ID NO: 6748
  REGION 1..428: note = Human gut metagenome

SEQ ID NO: 21587 - protein, 423 aa, unidentified
  REGION 1..423: note = Human gut metagenome
MVYVLNIDGQPLMPTDRHGKVRHLLKDGRAEVVKCCPFTIRLLYDSTHYTQDIVLGVDAGSKHIGLSGTTETKELYASDVELRNDIVDLISTRRQNRRFRRNRKTRYRKARFLNRLSDKKDWLAPSIRQKVDTHMTVVSRVCKILPVTKIIVETASFDIQKIKDPDISGTGYQHGEQLDFWNVREYVLFRDGHTCQCCKGKSKDPVLNVHHIESRKTGGDAPNNLITLCETCHKGYHSGAVQLPKAIHRGMRFKDAAFMGIMRWAFYNKLKEVYEPQDIEIRMTFGYLTKNTRIRHHLPKEHYIDARCISGHPEAIPNNEVFYQKKVRCHNRQIHKNTILKGGIRKRNQTGYLVKGFRLFDKVAYKGREYFIFGRRQSGFFDLRNLSGCKVNKGSLSYRKIGFLEPRQYYLCERRVMDTQGCA

SEQ ID NO: 21588 - protein, 502 aa, unidentified; identical to SEQ ID NO: 16737
  REGION 1..502: note = Human gut metagenome

SEQ ID NO: 21589 - protein, 415 aa, unidentified; identical to SEQ ID NO: 3018
  REGION 1..415: note = Human gut metagenome

SEQ ID NO: 21590 - protein, 416 aa, unidentified; identical to SEQ ID NO: 6135
  REGION 1..416: note = Human gut metagenome

SEQ ID NO: 21591 - protein, 402 aa, unidentified
  REGION 1..402: note = Human gut metagenome
MTALEEKLSKTEYIYVLGFDGKPQMPTRRKRHVLKLLKTGRARIAEDIPFTIRLTYRNSPVLQPVTLAEDPGRTNIGAAVLSPLGGLLFAAVIETRNKEIKKLMADRQKSRQASRRGERKARQRLAKRYGSMVKSGMVMRKLPMYAADKFVTCKFIRNTQARFCNRKRCPDWITPTVQHLVQTHLNIIRKISRYLPVTDIAFEVNRFAFMHMENPKAMGVDFQNGPLKGYDDVKEAICTQQHGKCLMCKKPISHFHHIVPRSRGGSDTIQNLAGLCPECHTKVHTDTTFRKDFDRKKSGQLKKYGALSALNQAVPFICKKLLEEYGEEHVHFCGGLDTSLIRTALGFEKTKKNQMHEVDAYCIGLAALEVNEVETPAFDHTFQIRQFRRQDRSIICLLYTSD

SEQ ID NO: 21592 - protein, 413 aa, unidentified; identical to SEQ ID NO: 2636
  REGION 1..413: note = Human gut metagenome

SEQ ID NO: 21593 - protein, 532 aa, unidentified
  REGION 1..532: note = Human gut metagenome
MSTVYVLNKDGKPLMPTTRGGHVRHLLKEQKARVVQSNPFTIQLLYETNDAVQPLYLGIDPGRTNIGVAVVKADGTAVFTAHLKSRNKEIPKLMQDRKRARRARRTNGRRHRRQRRAKANGTISKKCVKQTTTQNGSVSKRAKEIGIIKRHLPGCEKDVLCIGIKNKEAKYTNRERPEGWLTPTANQLLQTHVNLVKKVQKLLPISDVVLEVNKFAFMRLDNPDIQKWQYQQGPLYKKESLESAVSEMQEHHCLFCKKPIDHYHHVVPKSENGSNTIANIVGLCAEHHNLVHKDVAWQEKLAEEKTGLNKKYGALSVLNQIIPALTNKLSVLFPKHFFVTAGKSTHDYRAAHGVSKDHWLDAYCIACSVLPSNVCDSNINNHVPYELKQFRRHDRRVLHKANMSRVYTLNGKAVATNRHKAIKQTTDSLEEFRQNYPDDVYKLKVKEHHPAYRNLNRNYPGSVFLVGKQAHVMQGIASSKDGKTTKYNDTNATTITAGKCKFVAKNSGILFVQCKFRKALSDGTTKKLQYPV

SEQ ID NO: 21594 - protein, 462 aa, unidentified
  REGION 1..462: note = Human gut metagenome
MSVLVIGQNGRALMPTTTRKARILLKENKASVVCRHPFTIHLWYKTGCATQEGSIGIDTGSQHIGVGVTCRNKVILKDEHELRSSMEKRSLMETRATMRRGRRYRKVRYRKPKWRHHTKRMYFEKANRKGQHWRKVKTTTQSPRPERWLPPSLQSKCDHHFRIIDRYLKYLPDSITKNLVIEVGRFDMAHMNDPTIHGEMYQRGPMYDTENLRAYIFARDGYKCACCKAKAGSIRKKDGTSVKLVAHHIQFRSRGATDNPKYMISVCDHCHTTKAHQLGGILYSWMETNKKVTRGLRDATFMNILRRRLFDGYPQAAFTYGNITAVDRKRLLLPKSHANDAVAISLFGKDVSVINATCQTLRYKQVRKSKRSLHEATPRIGRKEPNTKAIRNKKNTTHVNGFKLWDSVLVNGQKLFICGFTGSSAYLVDQDGHYVSPPGKTYKQWTLSKLSRLHPNGNWLMA

SEQ ID NO: 21595 - protein, 536 aa, unidentified
  REGION 1..536: note = Human gut metagenome
VLRPRYQYPTRWYPSREQGSGNGCLSGEENTDLEQEVSGTLSKGDHSHPGEQDFCVPAITIQGGPAMSVFVVGLNGCRLMPTSERKARLLLKHGKASVYRKVPFTIKLNYKTGSTTQSGYLGIDTGSQHIGVSVVREDGVVLHKEEIGLRDSMSKRKLMQSRASSRRGRRHRKTRYRHPKWRPKAKRVYCEIPDRKGRHWKKKEITFASKRAKGWLPPSLQSKTDHHIWWIKKLQDLLPEGYRLSIELGRFDPARLKDPEIHGELYQKGPQYDYENVRAYVLNRDRYTCQVCGKKGGKLHVHHILYRSHGATDDPQYMATVCSDCHNTENHQQGGILYQWMQKQKKFTRGLRDATFMNILRKRLIEAFPGATFTYGNITKADRERLRLPKSHGNDATAIAIVKTGIMTVKDKEPVIYIQQVRRKKRSLHEETPRKGRKEPNRKASRYDKNTKAVTVTKRKNKKKITITGCLFDRVELNGKKGWISGFTDKSCYVKDENDQYIRTSPKYKQVSLSKLKILHHCGNWAIGARQSLGKG

SEQ ID NO: 21596 - protein, 340 aa, unidentified; identical to SEQ ID NO: 21471
  REGION 1..340: note = Human gut metagenome

SEQ ID NO: 21597 - protein, 423 aa, Arthrospira sp.; identical to SEQ ID NO: 3469

SEQ ID NO: 21598 - protein, 296 aa, unidentified
  REGION 1..296: note = Human gut metagenome
INAHLSRIEAVLRLLPVTKITVETASFDLQLLKNPDISGKEYQEGEQLGFWNIREYVLCRDGHVCQHCYGRSKDPVLNVHHLESRRTGGDSPGNLITLCETCHKALHRGEITLKAKRGQSFRAEAFMGIMRWEVHNRLRALHPGIEVSNTYGYRTKHARIANGIAKSHCADAFCIAGNLGAERLCEFFFQKQTRRNNRQIHKLSILKGGIRKRNQAPFEVKGFRLFDKVACQGEEGFIFGRRSSGFFDVRKLDGTRISAGISCKKLHLLEKRRTYLTEIRKEEALPPLPEGRGLRA

SEQ ID NO: 21599 - protein, 419 aa, unidentified; identical to SEQ ID NO: 17238
  REGION 1..419: note = Human gut metagenome

SEQ ID NO: 21600 - protein, 515 aa, unidentified; identical to SEQ ID NO: 20306
  REGION 1..515: note = Human gut metagenome

SEQ ID NO: 21601 - protein, 415 aa, unidentified; identical to SEQ ID NO: 2764
  REGION 1..415: note = metagenome

SEQ ID NO: 21602 - protein, 447 aa, unidentified
  REGION 1..447: note = Human gut metagenome
MVAVLSKTGIRLMPTSSYRARKLLARKKAVIAGYRPFTIRLTERESGEIQPIEYTIDTGYYHIGNSVKTVKHELAAVEVRTLMDEKLRQEDRHRYRRQRRSRLRYRAARFDNRRRREGWLAPSVRHRMEQNLSVLNRIARVVPVSRIVMEMGQFDTQVLKAVASGIPLPQGADYQQGDRYGIATLREAVFTRDNYTCQCCGKKGTDGVILHVHHIRYRSQGGTDAMSNLATVCYKCHTPKNHKPGGILYGWKLKLPSFKGATFMTSVRWMLYHQVKELYPELEIQLTYGAATKEQRRILDVPESHVNDAYTMGDFHPSHRVRPVIYQKKRRNNRVLEKFYDAKYIDLRDGKKHSGQELFNGRTNRNHNRDTENLHKYRGKKVSKGRRSIRRRRYPFQPHDLVVYRGKSLETAGCHNKGTRLLIGKRSIAVKEVKIRQYCGGYFAVEI

SEQ ID NO: 21603 - protein, 434 aa, unidentified; identical to SEQ ID NO: 2893
  REGION 1..434: note = Human gut metagenome

SEQ ID NO: 21604 - protein, 509 aa, unidentified
  REGION 1..509: note = Human gut metagenome
VYVLNKDGKPLMPTTRCGHVRRLLKEQKAQVVTSKPFTIQLLYETDDVVQPLYLGIDPGRTNIGVAVVKIDGTAVFTAHLETRNKEIPKLMQGRKKARRARRTNGRRCRRQRRAKANGTISKKCVKQTTAQNGSVSKRAKKIGVIKRHLPGCEKEVLCIGIKNKEAKFSNRARPEGWLTPTANQLLQTHINLVKKIQKFLPISDVVLEINKFAFMRLDNPNVQKWQYQQGPLYQKASLEEAVSEMQEHHCLFCKNTIDHYHHVVPQHKNGSNTIGNIVGLCAKHHDLVHKDTSWQEKLAKKKTGLNKRYGALSVLNQIIPALTKELSSLFPKHFFATNGKSTYDYRAAHGVSKDHWLDAYCIAGSVLPNDACDNNINSHVPYELKQFRRHDRRALHKENMSRVYTLNGKSVATNRHKAIKQTTDSLEEFRQRQPNDVCKLKVKEHHPEYRNPKRNFPGCVFLVGKHTHVMQGTSGSHNGKADGYYDTNGNSYSSGKCKFVAKNKGIVFA

SEQ ID NO: 21605 - protein, 463 aa, unidentified
  REGION 1..463: note = Wastewater metagenome
MAVFVLDRSGRPLMPCTEKRARLLLERGRACVHLVMPFTIRIVDLKAENCAFQALRVKLDPGSKATGIALVRETEGKGVAVVNLFELVHRGRQISEALTARRGHRRLRRSKLRYRPPRFDNRGNQKKGWLPPSLQHRVDTSMAWVSRIQRLAPVSAISTELVRFDMQAMENPEIEGAQYQQGTLAGYEVREYLLEKWDRTCAYCGAKDVPLQIEHIHPKSKNGSDRINNLTLACQCCNQKKAALPVEMFLAKKPELLKRILAQAKRPLKDAAAVNSTRWALVNALKATGLPVETASGGQTKFNRSQLGIPKTHALDAACVGEVGSITDWQKPTLSIKAMGRGSYQRTRLDKFGCVRGYLTRSKSIKGFQTGDMVKAEVTTGKKIGSYTGRVAVRATGSFNIQTSAGLVQGVSHRYCTVVQRGNGYGYSLVAKTDVRGTPPQHRDASHPALYLPGLKAEVSRAN

SEQ ID NO: 21606 - protein, 406 aa, unidentified; identical to SEQ ID NO: 10294
  REGION 1..406: note = Human gut metagenome

SEQ ID NO: 21607 - protein, 447 aa, unidentified
  REGION 1..447: note = Human gut metagenome
VPAYRIKHITKKEAPYMVYVLDIDGQPLMPTSRHRKVRKLLNSHLAKVVKRCPFTIQLLYQSTKETQPVSLGVDAGSRHIGLAATTEQKVVYQEELVPRNDVVKLLSARRALRSSRRSRKTRYRKPRFNNRVHSKHKGWLAPSVEVKIQEHITAIKRICQILPISDIHVETAEFDLQRLKAMEEGRPLPVGTDYQLGEQYDFYNTRQYVLHRDEYTCQCCGTHDNNVKLHVHHIESCQTRGDAPNNLITLCEHCHKLLHAGKTILPKGKKRGKSYRDATFMGIMRKTLLERLKKEIDVPVEGTYGYITKYWRERAGLEKSHINDAICISKHPYARPLETYYLTKAVRHHNRQIHKTKLSKGGIRKRNQAPYLVKGFRLFDKVLYQGESYFIFGRRITGYFDIRTLDGTKVNKGSTSYKKLRIQDTAEAYLTEVRAIPHMNEFTCVLA

SEQ ID NO: 21608 - protein, 443 aa, Ktedonobacter sp.; identical to SEQ ID NO: 5715

SEQ ID NO: 21609 - protein, 398 aa, unidentified
  REGION 1..398: note = gut metagenome
RRAKANGTISKKCVKQTTAQNGSVSKRAKDIGVIKRRLPGCEKDVLCIGIKNKEAKFNNRTRPEGWLTPTANQLLQTHINLVKKIQKFLPISDVVLEINKFAFMRLDNPNIQKWQYQQGPLYQKANLEEAVSEMQEHHCLFCKKPIEHYHHVVPQHKNGSNTIDNIVGLCTKHHDLVHKETAWQEKLAKKKTGLNKKYGALSVLNQIIPALTKELSSLFPKHFFATNGKSTYDYRAAHGVSKDHWLDAYCIACSVLPSNVCDSNINNHMPYELKQFRRHDRRVLNNENMNRVYTLNNKAVAINRHKAKDQKTVSLEEFRKEHPDDVCKLKVKEHHPTYRNMNRNFPGSVFLVGKQIHIMQGIASSKDGKATKYNDTSATAIAAGKCKFVAKNTGILFV

SEQ ID NO: 21610 - protein, 493 aa, unidentified; identical to SEQ ID NO: 3781
  REGION 1..493: note = Human gut metagenome

SEQ ID NO: 21611 - protein, 515 aa, unidentified; identical to SEQ ID NO: 4456
  REGION 1..515: note = Human gut metagenome

SEQ ID NO: 21612 - protein, 424 aa, unidentified; identical to SEQ ID NO: 11884
  REGION 1..424: note = Human gut metagenome

SEQ ID NO: 21613 - protein, 475 aa, unidentified
  REGION 1..475: note = Human gut metagenome
MVAVVTSTGKPLMPTSAYRARKLLKKGRAVIFKYRPYFTIQLVDRADGEVQEVEYKSDTGSVHVGISVCTEKKELLSEQRDLLENEPEHHNDRKKNRRTRRNRKRYRKPRFDNRKKKPQEGHEKWLPPTLLHKMEVQVRLFREFCRVVPVTSACFEMGKFDTQALKAVSKGEPVPEGEGYQKGERYGTDTLRAAVFLRDGHTCRFCGRSVKDGAILHVHHVGYWKGDRTNRPANLASACEQCHTPANHGKNGILYGKEPEFKTLKDASYMTSVRWIMLDEIKKAAPGVQVSVTYGVTTKRKRQELHLPKSHVNDAFSMASFHPKKRSDTEYRKKIPRHDRVLQKFYDAIYLDTRDGSEKKGSELSNGRISRNHKKDSENLHQYRGHKVSKGHNSIRRGASSLKPGSIVMYKGEKMTVHGTHTRYVKGKDGKTAKKVNVQFTCPASDGKKSASLEKCTPVSRVYNTGWKRYWPDKK

SEQ ID NO: 21614 - protein, 456 aa, unidentified; identical to SEQ ID NO: 10472
  REGION 1..456: note = Human gut metagenome

SEQ ID NO: 21615 - protein, 515 aa, unidentified
  REGION 1..515: note = Human gut metagenome
MTFNKRRHLMPQIYVLGMDGKPQMPTTRRRHVQKLLDTGKARIAEHVPLTIQLLYDNDPVLQPVTLAEDPGRTNIGLAILDLKGNLLLSAVVETRNKEIAKLMEKRRQCRRASRNGERKARQRLAKKYGTMIKAGMMMRKLPQYAAEKFITCKIIRNTESRFCNRKRKDGWLTPSARHLVQTHVNLVHKIQKYLPVTDVALEVNRFAFMLLEDPSVCGVDFQNGPLKGYDDRDAVVYDLQDGKCLMCKNEITQYHHIVPRSRNGSNTINNIAGLCDKCHDRVHKDADFAKQLKDKKAGLDKKYGALSVLNQAIPFICQKLEAEFGKEHVHYCTGRETSLVRRSIGYHKTKKNQVHEVDAWCIGALSLKQIPEDVPDFKDVHLIKQFRRRDRSLIKAQTERVYKLDGKTVAKNRKKRTGQETDSLEDWYNRQVETYGKQAADRMRSQLKATESRRRYNNPDRMMPGAVFLYQGVRYVMRGQHCKGAYLQAVGMGNKDFSAKECKIVTQNTGLVFVS

SEQ ID NO: 21616 - protein, 442 aa, unidentified; identical to SEQ ID NO: 4418
  REGION 1..442: note = Human gut metagenome

SEQ ID NO: 21617 - protein, 430 aa, unidentified; identical to SEQ ID NO: 8619
  REGION 1..430: note = Human gut metagenome

SEQ ID NO: 21618 - protein, 394 aa, unidentified
  REGION 1..394: note = Human gut metagenome
MDAVAVISASGKPLMPTNPVRARKLIKKGKAVIYKYRPLFTIRLTERTDGDIQTIEYCCDTGYQHIGLSIKSRKHEYVNERRDLLPNETERHNDSRKYRKARRRRKLRHRACRRDNRHDNQICKDGYAPSIRNKRDQHISLYRSYTEILPVERAVFEMGQFDTQVLKAIEKGEPLPQGKDYQHGERYGYATLREAVFARDDYTCICCGKNSFKDKRILCVHHLGFRIGDRTNRLANLATVCTKCHTPKNHQPKGKLYNLKPELKDFKGATFMTMVRWDMLDKLKVVSKDIQVDVTYGAATKEARRDLKIKKSHANDAYCMGSFHPSHRTDLKRYEKCRRNNRVLSKFYDATYIDIRDGKKKKANALGCNRTKRRESRRSEKNERIYRGEKVSKG

SEQ ID NO: 21619 - protein, 554 aa, unidentified
  REGION 1..554: note = Human gut metagenome
MIEQSSDIPFAVRVTPSPTLRLGMPMLWKLNRSRQNRISTGPELAVTGLQQKRRTMRYVYVLDMNGEPLMPTCRYGKVRRMLKSGQAKAVDTLPFTIQLLKPTKTRILQPVIAGQDPGRTNIGMAAVRSDGTELYRAHIETRNKEIVSLMNDRRSFRQASRRGERLARKRLAKKLHTTAKHLNGRILPGCKEPLAVKDIINTESRFNNRLRPEGWLTPTATQLLRTHLEAFRKLSGILPVTEMVLEVNRFAFMQLDNPDMEKRDIDFCRGPLHGTGGVKAAVSLQQDELCLLCREREIEHYHHIVPRSKRGSNTINNIAGLCEKCHERVHKDQAAAEKLQSRKDGLSKKYGGTSVLNQIIPSLTEELGIRYPGHTHVTNGWNTKEFREKHELEKNHDIDAYCIAASILKDVQPVMQTEPYEIKQFRRHNRARIHHQTERTYRYDGKIIAKNRKKRMDQKTDSLEDWVADMTKQYGQGTANRMLSKVTVQKSTRHYNAKGRMMPGTVFTYQKKRFVMTGQLTGGAYYRAYGQDKKNFPAKVVRVVQKNKGLVYVA

SEQ ID NO: 21620 - protein, 428 aa, unidentified
  REGION 1..428: note = Human gut metagenome
LKVFVLNMRGQPLMPCSPAKARHLLMDKKAVVKRRTPFTLQLTIATGETKQDVTLGVDAGAKHIGLSASTEKEEVFASEVELRQDITGLLAARLAFRRARRHRKTRYRAPRFLNRVHSKHRGWLAPSVENRIQAHMSRIDAICGLLPVTKIVIETASFDIQKIKNPDVEGTDYQQGDQLGFWNVREYVLFRDGHVCQHCRGRSKDKVLNVHHLESRQTGGDAPNNLITLCETCHKAYHAGKIKLKVKRGQSFRAEAFMGIMRWTMLDRVRKAHPDLPVENTYGYLTKNTRITLGLPKTHCIDAYCIAGNLNARRRGVYLYQRQMRKHNRQIHKCKVLSKTLKDGTKVGYRKLNQTPYLVKNFRLFDKVRCFGQTAFIFGRRTSGHFDVRTLNRTRLSDCVNSKKLTLLEKRRTFLTELRKEDGASSPV

SEQ ID NO: 21621 - protein, 349 aa, Halomonas sp.
MAVFVLDKKKQPLMPCSEKRARLLLARGRAVVHKRYPFTIRLKNRVGGEAQPLRLGIDPGSKTTGLALMRETEGELRHVLCLFELIHRGYQIKKALQQRAAFRRRRRSANLRYRAPRFNNRIKPKGWLAPSLQHRVDTVMAWVNRLSKSAPITGISQELVRFDTQKLENPEISGVEYQQGTLLGYEVREYLLEKWGRECAYCGTADTPLEIEHVVPRSRGGSNRVSNLTLSCHPCNAEKDSQTLTDFFATNKGLKKRLKANGLSADAQLERVQRQLKQPMRDASAVNATRWALFSALKTTDLPVAVSSGGHTKYNRQRLNIPKTHALDAACVGAFEKLHDWTVPTLTIK

SEQ ID NO: 21622 - protein, 417 aa, unidentified; identical to SEQ ID NO: 17744
  REGION 1..417: note = metagenome

SEQ ID NO: 21623 - protein, 435 aa, Fervidicola sp.; identical to SEQ ID NO: 19783

SEQ ID NO: 21624 - protein, 424 aa, unidentified; identical to SEQ ID NO: 14068
  REGION 1..424: note = Human oral metagenome

SEQ ID NO: 21625 - protein, 443 aa, unidentified
  REGION 1..443: note = Human gut metagenome
LTKDENRPSGRTTGLRAEQAEPAGIRKGDTLKVFVLNMRGKPLMPCSPAKARHMLKAGKAFVVRRTPFTIKLTIATGETKQDVTLGVDAGARHVGISATTEKEEVFASEVALRQDITGLLADRLAFRRARRNRKTRYRAPRFNNRVRSKHKGWLAPSVENRIQAHMSRIDAVCRLLPVTKIVIEAASFDVQKIKNPTIEGTDYQQGDQLGFWNVREYVLFRDGHICQHCRGRSKDPILNVHHLESRKTGGDAPNNLITLCETCHKAYHAGKIKLKVKRGQSFRAEAFMGIMRWTLLDRVRKTHPKLPVENTYGYLTKHKRIALGLPKTHCADAFCIAGNLKALRRGDFLFQQQTRKHNRQIHKCSILKGGVRKLNQAPFLVKGFRLFDKVRIGGQIGFVFGRRVRGTFNIRRLDKTVIGTDINCKKLSLLETRKTFLTELRKE

SEQ ID NO: 21626 - protein, 421 aa, unidentified; identical to SEQ ID NO: 2738
  REGION 1..421: note = Human gut metagenome

SEQ ID NO: 21627 - protein, 431 aa, unidentified; identical to SEQ ID NO: 6230
  REGION 1..431: note = Human gut metagenome

SEQ ID NO: 21628 - protein, 476 aa, unidentified
  REGION 1..476: note = Human gut metagenome
LEVVDTEGVSHPGLPGKYKHKGGQLMSVAVISKTGERLMPTSEYRVRKLLKSGKAIIHSYHPFTIQLTERETGDIQPIELCMDTGYIHVGISVKSEKHEYLAEQIDTLTDERGRHDACRMYRRQRRSRKRYRQARFNNRKRDQGWIAPSLEHKKKIHIQAISRINNVMPITDITLEMGNFDTQVLKAKEEGKPLPQGADYQHGERYGITTLREAVFARDGYTCQCCGRAIKDGVILHVHHIVYRSHGGTNRMSNLITVCDKCHTPANHKQGGKLYNWKPKIASFKGATYMTTIRWKLYNEVKTLFPDIDIHITYGAETKERRRAFDIDKSHVNDAFVMGQFHPKHRSKPICYKKKRRNNRCLEKFYDAKYIDSRDGKKRSGQELFNGRISRNHKKDSENLHQYRLQKVTPGRRAIRRQHYPIQPHDIIIYNGNKIEVSGCQHKGTRVVFSKTKKSVQISKIKLFKYAGGYSKSVFN

SEQ ID NO: 21629 - protein, 451 aa, unidentified
  REGION 1..451: note = Human gut metagenome
MSVAVISKTGERLMPTSEYRARKLLKSGKAIKYSYHPFTIQLTERKTGNIQPIELCMDTGYIHIGISVKSEKHEYLTEQIDTLTDERSRHNARRMYRSQRRNRKRYRQPRFNNRKKDKGWIAPSLEHKKNIHVQAISRISRVMPVTDITMEMGNFDTQVLKAKEEGRPLPQGVDYQHGERYSIATLREAVFARDGYKCQCCGRTIKDGAILHIHHIKYRSQGGTNSISNLATVCDKCHTPKNHKPGGKLYGWKPKLPSFKGATFMTTIRWQLYNEAKALFPDIDIHITYGAATKERRRELNIDKSHINDAFVMGQFHPRHRIKAVLYKKKRRNNRCLEKFYDAKYIDSRDGKKRSGQELFNGRINRNHKKDSENLHQYRLQKVTAGKRTVRKQHYSVQPHDIIIYESRKRETTGCHCNGARVMLLPDKKSVSIKKIKIYRYAGGYFKSTFN

SEQ ID NO: 21630 - protein, 471 aa, unidentified
  REGION 1..471: note = IscB polypeptide
MQQLRQRNTYTPTNTSLVCSNCDSELNKDVNLSVQNSKTCLNISEENQRQHTDGSDLRVLNIVYVLNQRGKPLMPTKSSKARKLLKQGNARVVRNTPFTIQLLYATGESKQAITLGVDTGYQYIGLSAVTKKQELFAAIIKLRTDIVKLLLARRSYRRNRRQRKTWYRQSRFLNRKKNKGWLAPSIQHRLDSHLRIINFVKRLLPISEIVIEVAAFDIQKIKNPSIEGKDYQNGEQKDFWNVREYVLYRDKHTCQYCHVKDTILEVHHIISRSTGGSNSPDNLITLCIKCHQKITQNKLKLTIRLSDAFKTETFMSIIRWKIVDRLRKLGNVVRCTYGYVTKSKLINLHLAKSHINDAFVIAEGNLLKERCVSYIVIQKRRNNRKLQQCRKGYKPAIRRCRYSIQPKDIVVINKQLYISMGTSNFGQQITVRDTTGERNYSVKKIEKHYYINGWLFLSICKYKELGYAVVH

SEQ ID NO: 21631 - protein, 349 aa, unidentified
  REGION 1..349: note = Human gut metagenome
MPRNDVVENLSTRREFRHARRNRTTRYRKPRFNNRVHSKNNGWLAPSVEVKIQEHITSIKRVCAILPISKIVVETAEFDLQLLKAVQDGKPVPEGEDYQKGEMYGSYDVRQYVLWRDNYTCTCCGVKGTDKKPVKLHVHHFESRKHGGNAPDNYGTLCEDCHKKLHLGIITDISLKTRKRPSTRDAAFMGIMRKTLMQRLITGLSIPVAETKGYITKAAREEILKLPKTHTNDALAIAQGRHGFGIREQAYVKPTNRIYTVRPVRHHNRQLHKATMLKGGIRKLNQASKYIFGFRLYDKVLYQGGECFVWGRRRSGSFLLRTIDGTKVKDGVGYRNLTLLERSTNYLIA

SEQ ID NO: 21632 - protein, 419 aa, Moorena sp.; identical to SEQ ID NO: 2999

SEQ ID NO: 21633 - protein, 278 aa, unidentified
  REGION 1..278: note = Human gut metagenome
VVVETAEFDLQLLKAIADGKPVPQGEDYQKGEMYGHYNVRQYVLWRDNYTCQCCGTHPSKKKEVRLHVHHLESRKVGGDAPDNQVTLCESCHEKLHKGLIAEKDFKKRKRRSTRDATFMGIMRKTLMQRLCSELPIPVVKTRGYITKATREKLLVLPKSHTNDALAIAQGKQGFNVGYLPGIVQINKIYTIRPVRHHNRQLHKAAILTGGIRKSNQAGKYVFGYCLFDKVQFNGQDCFIWGRTTGIFTIKTINGKMIKDGISFKKLKLVEKSTSYLIA

SEQ ID NO: 21634 - protein, 453 aa, Moorena sp.; identical to SEQ ID NO: 6443

SEQ ID NO: 21635 - protein, 527 aa, Actinomadura sp.; identical to SEQ ID NO: 17242

SEQ ID NO: 21636 - protein, 268 aa, unidentified
  REGION 1..268: note = Human gut metagenome
LLKAVAEGKPVPQGEDYQKGEMYGHYNVRQYVLWRDSYTCCICGVHGSVRKGVPLHVHHLESRRVGGDAPDNLVTLCTACHDKLHKGIIMAADIKKRKRRSTRDATFMGIMRMTLLRRLREQLPVPVVETRGYITKATRENLLVLPKSHTNDALAIAHGPQGFRAEYLPNIRQADRLYTIRPVRHHNRQLHKATILKGGVRKANQAEKYICGFRLYDKVLYNGIECFVWGRRTSGSFLLRQLNGEKVKDGVSYKHLKLLERSQSYLVA

SEQ ID NO: 21637 - protein, 512 aa, unidentified; identical to SEQ ID NO: 7636
  REGION 1..512: note = Human gut metagenome

SEQ ID NO: 21638 - protein, 431 aa, unidentified
  REGION 1..431: note = Human gut metagenome
MDAWDIIVILNKRGKPLMPCSPAKARLLLKEKKAIVVRRTPFTIQLTIATGESKQPVSLGVDAGYKHVGLSASTEKAELYASEVELRKDITDLLSARRALRQSRRNRKTRYRAPRFDNRIRTKRKGWLAPSVENRINAHLSRIKAVLRLLPITKITVETASFDMQRLKNPDISGKEYQEGEQLGFWNVREYVLFRDGHVCRHCHGRSKDPVLNVHHLESRRTGSDSPDNLITLCVTCHKALHRGEITLKAKRGQSFRAQAFMGIMRREVLNRLKASYPELKVHETYGYLTKHARIANGIVKSHGADAFCIAGNLGAERLGEFFFQKQTRRNNRQIHKLSILKGGIRKRNQAPFEAKGFRLFDKVACQGEEGFIFGRRSSGSFDVRKLDGTRISAGISCKKLRLLEKRRTYLTEIRKEEALPPLPEGRGLRA

SEQ ID NO: 21639 - protein, 406 aa, unidentified
  REGION 1..406: note = Human gut metagenome
MVYVQDIYGRPLMPTTRHGKVRRLLKSKKATVVNLCPFTIRLLYDTTGYKQEITLGVDTGTKHVGLSATTKSKELYASEVILRSDVVDLLSTRRELRKIRRYRLRYRKPRFMNRIKSKKRGWIAPSIRQKIDSHIRIIGFVYSILPVSKLIIEVAQFDTQKIKNPEISGKEYQEGEQLGFWNVREYVLARDEHKCQHCKGKSKDPVLNVHHIESRKTGGDSPSNLITLCKTCHKEFHKGNIKLKVNRGESLRDAAVMSIMKWELYDELKSLYPNVKMTFGYITKYNRINHGIEKSHVSDAFVISRNFDSERLGYYYKRKLVLRHNRQIHKMKAPKGGNKRMNQSPFKVFGFRLFDKVMFQGKERFIYARRLRGIFNIRDINGENKKDISYKKLEYVSHGLISIVAG

SEQ ID NO: 21640 - protein, 442 aa, unidentified
  REGION 1..442: note = Human gut metagenome
MSTTVFVLDKKHRPLMPCRPARARRLLRAGRARVVKRFPFVIRLVDRTVEQSEVQPVLIKLDPGSRETGAAVVRDDEKKRHHALAFFVIKHRGGAIRDALKARSAFRRRRRSQNLRCRSPRFLNRVKPKGWLPPSLRHRVETTLSFVRRMCRYLPVSGIATELVKFDSQKLQNPEVSGVKYQQGTLFEYEVREYLLEKFGRKCVYCGAEGVPLNIDHVVPRAKGGSNRVSNLVLACVSCNQKKGARSLEDFLKGKPEVLARVRRELKTPLRDAAAVNATRWVLFNELKATGLPVETGSGALTKLNRHAFGVEKEHWLDALCVGRLNGAVTRKGLNVLEIRCMGRGSRQRTRLTKYGFPRGYLMRQKCVHGFATGDMVEANVPKGKKAGLWRGRVAVRVSGSFNIQTPKGVIQGVGWKHCRLISHNDGYGYAWLGHAPHSSPA

SEQ ID NO: 21641 - protein, 413 aa, unidentified; identical to SEQ ID NO: 3295
  REGION 1..413: note = Human gut metagenome

SEQ ID NO: 21642 - protein, 436 aa, unidentified
  REGION 1..436: note = Human oral metagenome
MTKTLTTRTIQACVLDQQGKPLMPTTRLGKVYRLLKTQKAHIVSYEPFTIQLDYEPDTQVIQPMTLGVDSGALHSGYSVANEHREYYSAEVIARNDISNRLSDRRMYRQNRRSRKTRYRKPRFNNRKNKKKGWLPPSLEQKVATQVNEIDHIHRYFPIETIIVETAEFDIQKIKNPDITGVEYQQGTLQGYNIRNYLLEKHGRKCFYCGKAVSDFEVEHMFPKSKGGSNRIDNLTLSCHDCNEKKGTLTAEEFIQQTLPAKKAVAKLKQLPNEKRLFKYMAYMNATRWTLYDAIKERYPNVKMTYGYITKYERIQAGLPKTHHIDAKCITGFATVPSMSQTVVKVKMRRHNRQLHRATFSKGHIRKVACLPTVTFGFQLYDLVLFDNHRYYIKSRRSSGAFALVSVEGLKDENRNYKKLTLLAHTNAYLTNRYVNA

SEQ ID NO: 21643 - protein, 477 aa, Blautia sp.; identical to SEQ ID NO: 2707

SEQ ID NO: 21644 - protein, 557 aa, unidentified; identical to SEQ ID NO: 14359
  REGION 1..557: note = Human gut metagenome

SEQ ID NO: 21645 - protein, 421 aa, unidentified
  REGION 1..421: note = Human gut metagenome
MRGQPLMPCSPTKARHLLRDKKAVVNRRTPFTIQLTIATGETKQDVTLGVDAGAKHIGLSASTEKEEVFASEVELRQDITKLLSARLAFRRSRRHRKTRYRAPRFLNRVHSKHKGWLAPSVENRIQAHMSRIDAICGLLPVTKIVIETASFDIQKIKDPSVEGTDYQQGDQLGFWNVREYVLFRDGHVCQHCHGRSKDKILNVHHLESRQTGGDAPNNLITLCETCHKAYHAGKIKLKVKRGQSFRAEAFMGIMRWTLLDRVRKAHPGLPVENTYGYLTKHTRITHGLPKTHCVDAYCIAGNLKAVRRGVYLHQRQMRKHNRQIHKFTVLSKRLEDGTKIGYRKLNQSPYLVHGFRLFDKVRCLGQIGFIFGRRSSGYFDVRRLDGVKLSPSISWRKLTLLEKRSTYLTELRKQDGASSPV

SEQ ID NO: 21646 - protein, 435 aa, Desulfobacterium sp.; identical to SEQ ID NO: 10303

SEQ ID NO: 21647 - protein, 408 aa, Halomonas sp.
MAIFVLDKKKQPLMPCSEKRARLLLQRGRAVVHKRYPFTIRLKDRVGGSTQPLSLGIDPGSKTTGLALIREPDSQQRHVLCLFELIHRGYQIKKALQQRAAFRRRRRSANLRYRAPRFNNRTKPKGWLAPSLQHRVDTVTAWVNRLNRLAPVTAISQELVRFDTQKLDNPEINGVEYQQGTLLGYEVREYLLEKWGRECAYCGTADTPLEIEHVIPRSRGGSNRVSNLTLSCHPCNQSKDALSLVDFFATDKGLKKRLKANGHTANARLERVQRQLKQPLRDASAINATRWALFNALKATSLPVAVGTGGRTKYNRQRLGIPKTHALDAACVGAFDALHAWQVPTLTIKAMGRGSYQRTRTRVSAWLSDAAEAGARLSNRRHGACDGTDWQESRYPYGACRGTQNRQF

SEQ ID NO: 21648 - protein, 512 aa, unidentified; identical to SEQ ID NO: 12632
  REGION 1..512: note = Human gut metagenome

SEQ ID NO: 21649 - protein, 440 aa, unidentified
  REGION 1..440: note = Human gut metagenome
TVQQSTHHLPFGRVFIRRNLFMVYVISQDGKPLMPCSDPIARLLLKQGKAKVKKREPFTIKLTYETTNHTQGLTLGVDTGSGTIGTAVSKDNGDIVYMSEVVVRNDITDKMTQRAKYRRNRRNRKTRYRKARWLNRASSIKKDRFSPTMQSKLHSHVREIEYIQSILPVTEMVFETGQFDMQLMKNPSLANPKVRPWGYQKGANYGFENTKAMVLNRDNYTCQCCKGKHKDSKLEVHHIVFRSQGGSDEESNLLTLCHTCHKDLHSGKINPKLSGKLKGNLKYATQMNSIRKQLFRFYPNAIETFGYVTKANRLHLGVDKEHYYDACTIATQGNAFNVKSNLYKKKCVSDGDFQKTKGIRSEQPIVTDKICGFRKFDKVRYFGNDYFIKGRMSTGYAILMDIDGNKIDFSTMPRGYKTPKLSNCKRITARSTVMTQVKVV

SEQ ID NO: 21650 - protein, 439 aa, Moorena sp.
MKVCVVNQHGRPLMPTTPRKARLLLKAGKARIVSRTPFTIQLLYGTRGYTQPITLGVDAGYATVGFSAVTDKEELAGGDLKLLVGISDRLNERAMYRGGRRSRTRYRKPRFDNRRRAEGWLAPSIQHKLDSHLRLMDRLCAVLPITHIVIEVASFDIQRLKDPDIAGEGYQQGEQTGFWNLREYILHRDAHTCQNPQCPNRTKEKVLQVHHLGYWCGDDSDRPANLITLCTRCHTPENHQPGGFLWGWQPHLNSFRPETFMSMVRWRLVEAVGAEATYGYLTKSRRIELGLSKSHAHDAFVIAGGSAQPRADPLLLEQVRRNRRALQTFYDAKYIDTRTGEVVKAQALNNGRRTRNRNLNSENLRRYRGPKVAKGRVSIRRRRYPYQPGDLVSYEGHIYRVQGMGGYGRNLKLAGRPKEVKASLVAPVCWRKGICQQVS

SEQ ID NO: 21651 - protein, 477 aa, Ferroplasma sp.; identical to SEQ ID NO: 11016

SEQ ID NO: 21652 - protein, 442 aa, Virgibacillus sp.; identical to SEQ ID NO: 6559

SEQ ID NO: 21653 - protein, 248 aa, unidentified
  REGION 1..248: note = Human gut metagenome
MVAVVDMSGRPLMPTNEYRARKLLKQKKAKIFGYRPFTIQLTERKSTEIQPIELCMDTGYIHIGISAKSERHEYLGMQIDTLTDEKLKRDDKRQYRRQRRNRKRYRAPRFDNRRRKEGWIAPSLEHKKEIHIDAIQRICKVMPITDITLEMGNFDTHVLKAVEEGKPLPQGSDYQHGERYGIATLREAVFLRDGYKCQCCEKSVKDGAILHVHHIKYRSQGGTNRMSNLITVCDKCHTPKNHKPGGKL

SEQ ID NO: 21654 - protein, 404 aa, unidentified; identical to SEQ ID NO: 18375
  REGION 1..404: note = Clostridiaceae bacterium UBA2240

SEQ ID NO: 21655 - protein, 465 aa, unidentified; identical to SEQ ID NO: 3856
  REGION 1..465: note = Human gut metagenome

SEQ ID NO: 21656 - protein, 440 aa, unidentified
  REGION 1..440: note = Human gut metagenome
VPPATNPFQHWRRILTGRKTEVTNLRVFVLNKRGKPLMPCSPAKARILLKEQKAVVTRRMPFTIRLTIATGETKQPVTLGVDAGYKHVGLSACTEKAELYASEVELRQDITELLSARLALRRARRNRQTRYRAPRFDNRVGSKHKGWLAPSVENRINAHLSRIDAVLRILPISKIVIETAAFDTQLLKDTNIEGATYQQGEQFGFWNVREYVLFRDGHVCQHCHGKSKDPVLNVHHLESRRTGGDAPNNLITLCETCHKALHQGKLTLKVKRGFTYKAETFMGIMRWTVQDRLKTAYPDIEIRNTYGYLTKHSRISHGIAKSHCADAYCIAGHLKAKRLAGYYFQKQTRRHNRQIHKLTILKGGLRKRNQAAYEIKGFRLFDKVKVLGEEGFIFGRRASGYFDVRKLDGTRISAGISSKKLTLLEKRKTYLTEYRKEAAL

SEQ ID NO: 21657 - protein, 420 aa, unidentified
  REGION 1..420: note = Human gut metagenome
MSVAVMSKTGMQLMPTSEYRARKLLKSKKATVYGHNPFTIQLTERETGDVQPVELCMDTGYLHIGTSVKSEKHEYLGVQIDTLTDEKQKHDACRMYRRQRRGRKRYRQSRFNNRKRSDGWIAPSLEHKKDIHIQTISRICNAMPITNITLEMGNFDTQVLKALEKNRPLPQGTDYQHGERYGIATLREAVFARDKYTCQCCRRTIADSAILHVHHIIYRSRGGTNRMSNLATVCDRCHTPANHKPGGRLYNWKPKIASFKGATFMTAVRWKMYNEVKSKFSNIKIHITYGAKTKEQRRAFDITKSHVNDAFVMGQFHPKHRSRPICYKKKRRNNRCLEKFYDAKYIDSRDGKKRSGQELFNGRIDRNHKKDSENLHQYRQQKVSAGRRTIRKQHHSIQPHDIVVFNRQQSVQSATERQEL

SEQ ID NO: 21658 - protein, 279 aa, unidentified
  REGION 1..279: note = Human gut metagenome
VVVETAEFDLQLLKAIADGKPVPQGEDYQKGEMYGHYNVRQYVLWRDNYTCQCCGTHPSKKKEVRLHVHHLESRKVGGDAPDNQVTLCESCHEKLHKGLIAEKDFKKRKRRSTRDATFMGIMRKTLMQRLCSELPIPVVKTRGYITKATREKLLVLPKSHTNDALAIAQGKRGFNVGYLPEIAQIDKIYTIRPVRHHNRQLHKATILKGGIRKSNQTEKYVFGYCLFDKVQFNGQDCFIWGRRTTGIFTIKTINGKMIKDGISFKKLKPVEKSTGYLIA

SEQ ID NO: 21659 - protein, 351 aa, unidentified
  REGION 1..351: note = Human gut metagenome
HVGISATTEKEEVFASEVALRQDITGLLADRLAFRRARRNRKTRYRAPRFNNRVRSKHKGWLAPSVENRIQAHMSRIDAVCRLLPVTKIVIEAASFDVQKIKNPTIEGTGYQQGDQLGFWNVREYVLFRDGHVCQHCHGRSRDKILNVHHLESRKTGGDAPNNLITLCETCHKAYHAGKIKLKVKRGQSFRAEAFMGIMRWTLLDRVRKTHPKLPVENTYGYLTKHKRIALGLPKTHCADAFCIAGNLKALRRGDFLFQQQTRKHNRQIHRCSILKGGVRKLNQAPFLVKGFRLFDKVRIGGQIGFVFGRRVRGIFNIRRLDKTVIGKDINCKKLSLLETRKTFLTELRKE

SEQ ID NO: 21660 - protein, 338 aa, unidentified
  REGION 1..338: note = Human gut metagenome
LRHKKELNVNVVKMYCAVMPITHATVEVGSFDTMLVKAIQEGKAIPEGADYQKGPRYNLATLREAVFYRDNYTCQVCGRKIADGAILHMHHMFYWKGRHGNSLDELLTVCEKCHTPANHQKSGKLYGFGENVKFADLSGAAFMNTVRWQIVNELYATFGKDFVTVTYGAMTKEKRIALHLEKSHNNDAYAMGEFHPNCRCTFEHYEKVRRNNRILEKFYDSRYIDIRTGEIATGKELFNGRINRNHKKDSENLHRYRGKRTYAGHRALRRKKVALNPGDLVSLNGEVLIVYGTHTDKKGAVNVEFKTPAKNGRKSASLKKLKIVKATSSIHPAWEKVS

SEQ ID NO: 21661 - protein, 451 aa, unidentified
  REGION 1..451: note = Sediment metagenome
MQTLQLKFKNVPTGTSLACSSTTLPLNRDERTSVAEKVLDCNNPEVNQRARTPGLKGIVFVLSIDGSPLMPCTYAKARHLLEGGKAKVVKLNPFVIRLKFECENKVQKMRLGVDAGYKTVGFSAIIDKREVFAGDFNLDQNTSKRLIEKKMYRRKKRGRLRYREPRFDNRKISAGWLPPSTQRKFDAHVTLVNTLKKLLPIEKIITEIGNFDIQKLMNPEVSGKGYQQGDLFGYNNLKAFLMEREHGKCQLCGKGFIKGNGSHTHTHHVILRSQGGTDRPNNMALLHKKCHDKLHEERLFDNLKRARQYKAETFMSIVGGMFQGILGCEIIYGYETKTKRDMLGLEKSHVNDAFVIAGGTTQERCTSGVIEQKRRNNRTLQTNRKGFIPSIRKKRYPIQSRDFIWIGRKKYLCGGTACRGYQVYYFDGLEKKLIPVKKVNRIYSTGGLVWR

SEQ ID NO: 21662 - protein, 406 aa, unidentified; identical to SEQ ID NO: 2752
  REGION 1..406: note = Human gut metagenome

SEQ ID NO: 21663 - protein, 418 aa, Beggiatoa sp.
MQSVFVLDLEKNPLMPCHPARARKLLRKGRAAVYKRYPFTIILKDRVGGELQPVELKFDPGSKTTGIAVVGQFELGQEVVFGANLEHRGQQIKQDLKSRRANRSARRNRKTRYRPARFNNRCRTLGWLPPSLMSRVFNVETWTKRLQKLVPITSIAVETVRFDTQKMQNPEISGIEYQQGVLAGYEVREYLLEKCAYCGKTNVPLEIEHIQPKSKGGSDRISNLTIACVPCNQKKGNRPVEDFLKRKPKILKKVKAQTKKSLKDTAAVNATRYAIGNVLKKTKLPVTFWSGARTKFNRTSQNYPKYHWIDAACVGETGASVCIPDTLKPLTIVAMGHGTRQMCRVDKYGFPRTSAKKQKVIKGFQTGDLVKAVVTSGKKIGTYFGRIAVRTTGYFNITTKNGETTQGISWKCCQMLQP

SEQ ID NO: 21664 - protein, 460 aa, unidentified; identical to SEQ ID NO: 15791
  REGION 1..460: note = Human gut metagenome

SEQ ID NO: 21665 - protein, 426 aa, Moorena sp.; identical to SEQ ID NO: 20622

SEQ ID NO: 21666 - protein, 372 aa, Moorena sp.
CQVKIDPGSKVTGFALVQKDQVIWAMELEHRGGLIKKKLESRRAVRRGRRNRNTRYRKPRFLNRKRPEGWLPPSLEHRILTTQTWVKRLIKFCPVSEIWVERVKFDTQKMQSPEISGVEYQQGELAGYEVREYLLEKWGRECAYCGKKNVPLEIEHIHPKSKGGSNRVSNLCLACEKCNQRKGNKPVEDFLKKKPKLLQKIKAKAKQPLKDAAAVNATRNRLVKVLQGIKPVITGTGAQTKYNRTKLGFPKQHWVDAACVGNIETLTLKISQPLLVTCKGQGGRQKAALNKCGYPIRHNPLKPIGRRPRCANKGWVTGDLVRHQRLGIGKVTPRSKGSFGFTPLGMKGYKSCKPQDISAIHRKDGYIYSFCG

SEQ ID NO: 21667 - protein, 415 aa, unidentified; identical to SEQ ID NO: 3018
  REGION 1..415: note = Human gut metagenome

SEQ ID NO: 21668 - protein, 406 aa, unidentified; identical to SEQ ID NO: 16062
  REGION 1..406: note = Human gut metagenome

SEQ ID NO: 21669 - protein, 475 aa, Blautia sp.; identical to SEQ ID NO: 4128

SEQ ID NO: 21670 - protein, 406 aa, unidentified; identical to SEQ ID NO: 16733
  REGION 1..406: note = Human gut metagenome

SEQ ID NO: 21671 - protein, 476 aa, unidentified
  REGION 1..476: note = uncultured beta proteobacterium
MAVFVLDRQSKVLMPCTEKRARLLLACARARVHKLVPFVIRLTDREAKSCAVQPFEVKIDPGSKVTGLAVVRVSALVQNHTGEVKKSAHVLHLIELQHRGRQISEALTARRQMRRRRRANLRYRAPRFLNRGNKKKGWLAPSLQHRVHTTRSWVRRLMRYAPVAHLAQELARFDMQALQAQAEGRDISGVLYQQGTLFGYEMREYLLEKWGRKCGYCDLKDTPLEIDHITARSRGGSDRVSNLTLACHSCNQKKGAQDISVFLAKDAARLKRVLAHAKAPLKDAAAVNATRWSLFNALNATGLPVTVASGGRTKFNRLQLGIPKTHALDAACVGEIANLAAWNKPTLQIKCTGRGCYQRTRINKYGFARGYLMRKKSVKGFQTGDLVKAVVKKGKNAGTHAGRVAVRASGSFNIQTSKGLVQGISHAHCTVMQRADGYGYQQVAKMDSIGTPPMRGTLARSALSLPALKGGVSRAK

SEQ ID NO: 21672 - protein, 306 aa, unidentified
  REGION 1..306: note = Human gut metagenome
LAPSVEVKIQEHITSIKRVCRILPVSKVVIETAEFDLQLLKAIEESKPVPQGEDYQQGEMYGHYNVRQYVLWRDGYTCQCCGAHATKKKEVRLHVHHLESRKVDGDAPDNQVTLCESCHEKLHKGLIAEKDFKKRKRKSTRDATFMGIMRKTLMQRLCSELPIPVIETRGYITKATREKLLVLPKSHTNDALAIAQGKQGFNVGYLPGIVQINKIYTIRPVRHHNRQLHKATILKGGIRKSNQTEKYVFGYRLFDKVQFNGQDCFIWGRRTTGIFTIKTINGKMIKDGISFKKLKLAEKSTSYLIA

SEQ ID NO: 21673 - protein, 376 aa, unidentified
  REGION 1..376: note = Human gut metagenome
SVSKRAKDIGVIKRRLPGCEKDVLCIGIKNKETKFTNRTRPEGWLTPTANQLLQTHINLVKKIQKFLPISDVVLEVNKFAFMRLDNPNIQKWQYQQGPLYKKESLESAVSEIQEHHCLFCKKPIDHYHHVVPQHKNGSNTIGNIVGLCAKHHDLVHKDSAWEKKLAQKSTGLNKKYGALGVLNQIIPTLTNELSSLFPKHSFVTNGKSTYDYRAAHGVSKDHWLDAYCIACSVLPSNVCDSNINNHMPYELKQFRRHDRRVLNNENMNRVYTLNNKAVAINRHKAKDQKTVSLEKFRKEHPDDVCKLKVKEHHPTYRNMNRNFPGSVFLVGKQIHVMQGIASSKDGKATKYNDTSATAIATGKCKFVAKNTGILFV

SEQ ID NO: 21674 - protein, 431 aa, unidentified; identical to SEQ ID NO: 5232
  REGION 1..431: note = Human gut metagenome

SEQ ID NO: 21675 - protein, 418 aa, unidentified; identical to SEQ ID NO: 4327
  REGION 1..418: note = Human gut metagenome

SEQ ID NO: 21676 - protein, 419 aa, unidentified; identical to SEQ ID NO: 10184
  REGION 1..419: note = Human gut metagenome

SEQ ID NO: 21677 - protein, 396 aa, unidentified; identical to SEQ ID NO: 4508
  REGION 1..396: note = Human gut metagenome

SEQ ID NO: 21678 - protein, 247 aa, unidentified
  REGION 1..247: note = Human gut metagenome
MYGSYNVCQYVLWRDNYTCICCGVRGTPKNPVRLHVHHFESRKYGGNAPDNHGTLCDDCHKKFHLGIITDVKLKTRRRQSTRDAAFMGIMRKTLMWRLRTELFIPVAETKGYITKATREKLLVLPKSHTRDALAIAQGRHGFGIKEYAYVEPANHIYTVRPVRHHNRQLHKASILKGGIRKRNQASKYVFGFRLYDKVLYQGKACFVWGRRTSGTFLLRTIDGIKVKDGVSYRNLTLLERSSNYLIA

SEQ ID NO: 21679 - protein, 431 aa, unidentified
  REGION 1..431: note = Human gut metagenome
MPNKVYVLDKHGRPLMPCSPAKARHLLDEGKAKIKKRTPFTIQLVYGSSGYTQEVILGVDAGSKTIGVSALTKKEELFAANVIPRNDVVDLLSTRREFRRARRNRKTRYRKPRFDNRVRSKHKGWLAPSVEVKIQEHITAIRRVCGILPVSKVVVETAEFDLQLLKAIADGKPVPQGEDYQKGEMYGHYNVRQYVLWRDDYTCQCCGAHATKKKEVRLHVHHLESRKVGGDAPDNQVTLCESCHEKLHKGLITEKDFKKRKRRSTRDATFMGIMRKTLMQRLCSELPIPVVETRGYITKATREKLLVLPKSHTNDALAIAQGKQGFNVGYLPGILQIDKIYTIRPVRHHNRQLHKAAILKGGIRKSNQAGKYVFGYRLFDKVQFNGQDCFIWGRRTTGIFTIKTINGKMIKDGISFKKLKLAEKSTSYLIA

SEQ ID NO: 21680 - protein, 441 aa, Lactobacillus sp.; identical to SEQ ID NO: 10422

SEQ ID NO: 21681 - protein, 431 aa, unidentified
  REGION 1..431: note = Human gut metagenome
MPDKVYVISRLGHPLMPCSPAKARHLLDDKKAKVVKRMPFTIRLLYGSTKYIQPIILGVDAGSKTIGLSASTAKEEVFAAEVMPRNDVVENLSTRREFRRARRNRTTRYRKPRSDNRVRSNHERWLAPSVKVKIQEHITSIKRVCTILPISKVVIETAEFDLQLLKAIQEGKPIPEGEDYQKGEMYGSYNVCQYVLWRDNYTCICCGVRGTPKNPVRLHVHHFESCKYGGNAPDNHGTLCDDCHKKFHLGIITDVKLKTRRRQSTRDAAFMGIMRKTLMWRLRTELFIPVAETKGYITKATREKLLVLPKSHTRDALAIAQGRHGFGIKEYAYVEPANHIYTVRPVRHHNRQLHKASILKGGIRKRNQASKYVFGFRLYDKVLYQGKACFVWGRRTSGTFFLRTIDGIKVKDGVSYRNLTLLERSSNYLIA

SEQ ID NO: 21682 - protein, 406 aa, unidentified; identical to SEQ ID NO: 2703
  REGION 1..406: note = Human gut metagenome

SEQ ID NO: 21683 - protein, 416 aa, Quinella sp.
VYVINQYGKPLMPCSARKARVLLKEGKAIVIRREPFTIRLKFGSSGYKQPITLGVDAGAKHIGLSASTVKRELYSAEVVLRTDITDLLSTRRELRRARRNRKTRYRQPRFLNRVKAKKQGWLAPTIQNRINAHLKVVDNVCKILPVAKIVVETASFDIQKLKNPDISGIEYQQGEQLNFWNVREYVFFRDNHTCQHCHGKSKNNVLNVHHLESRKTGGDAPNNLITLCETCHKAYHAGKIKLKQTRGQSFKAEAFMGIMRWAFFNKLKEIYQTLEVKNTYGYITKNKRIRASLPKEHYIDAFCIAGNMQAERLNYYHYQKQVRKHNRQIHKLTINKGGTRKRNQSPFEIFGYRLFDKVKCKGEVGFIFGRRASGSFDIRKLDGTKISAGISYKKLVLISKRKTYLTERRGAAHPHS

SEQ ID NO: 21684 - protein, 441 aa, Moorena sp.
MCVFVLDRDRHPLDPCHPARARQLLAAGRASVCRRFPFTIILQDRTRAESVVHDHRLKIDPGSKTTGLALLAGARVRWAAELTHRGQRIKDALESRRAVRRHRRQRKTRYRPPRFLNRTRPSRWLPPSLQSRIANVMTWVERLTRLCPITALSQKLVRFDTQLLQHPEIAGVAYQHGALAGYEVREYLLEKWHRTCAYCGVKDVPLEVEHMIPRVRGGSDRVSNLTLACVPCNQKKGRQTAAEFGFPQLQAQAKFPLKDAAAVNATRWALYRALQTTGLPVETGTGGRTKYNRTRLHIPKSHWGDAACVGASTPEALSLAGVQPLLITAMGHGTRQMCRTDAYGFPNRHRARQKRYCGLQTGDIVKAVVPTGKYAGTWISRVVVKARGWFDLVIYGKKASVHQKHCIRLWAADGYTYTLPAVAGSAVSSPRSSEGSPQRKF

SEQ ID NO: 21685 - protein, 308 aa, unidentified
  REGION 1..308: note = Lachnospiraceae bacterium
MIIALDKYKRPLGFLTERRCRILMERKRAVLYRVFPTVVILMDVDARTSPDLPLFRIKIDPGSKYTGIAIIRNDTDEFVYAMQIEHRGDAVRAALNKRKNARRNRRSRETGYRRAKWGNRCLSEKDKRSYDSSREDGWLPPSIRSAADNVISWVRRLGRWINLTECSFEAVRFDTQLMEDPDIEGEEYQHGTLFGLEIKEYLMEKFGHTCQYCGGKSGDPVLEWEHMRPKSRGGSDRVKNALLSCSSCNKDKGNRTPEEWLELIKARLPREKGKRKELDEERVELIQKVVDGKPQGGALRYAVWVSSS

SEQ ID NO: 21686 - protein, 419 aa, Moorena sp.; identical to SEQ ID NO: 4209

SEQ ID NO: 21687 - protein, 447 aa, unidentified
  REGION 1..447: note = Human gut metagenome
MVAVLSKTGIRLMPTSSYRARKLLARKKAVIAGYRPFTIRLTERESGEIQPIEYTIDTGYYHIGNSVKTVKHELAAVEVRTLMDEKLRQEDRHRYRRQRRSRLRYRAARFDNRRRREGWLAPSVRHRMEQNLSVLNRIARVVPVSRIVMEMGQFDTQVLKAVASGIPLPQGADYQQGDRYGIATLREAVFTRDNYTCQCCGKKGTDGVILHVHHIRYRSQGGTDAMSNLATVCYKCHTPKNHKPGGILYGWKLKLPSFKGATFMTSVRWMLYHQVKELYPELEIQLTYGAATKEQRRILDVPKSHVNDAYTMGEFHPSHRVRPVIYQKKRRNNRVLEKFYDAKYIDLRDGKKHSGQELFNGRTNRNHNRDTENLHKYRGKKVSKGRRSIRRRRYPFQPHDLVVYRGKSLETAGCHNKGTRLLIGKRSIAVKEVKIRQYCGGYFAVEI

SEQ ID NO: 21688 - protein, 462 aa, unidentified; identical to SEQ ID NO: 2823
  REGION 1..462: note = Human gut metagenome

SEQ ID NO: 21689 - protein, 445 aa, unidentified; identical to SEQ ID NO: 10136
  REGION 1..445: note = Microbial mat metagenome

SEQ ID NO: 21690 - protein, 420 aa, unidentified; identical to SEQ ID NO: 8166
  REGION 1..420: note = Human gut metagenome

SEQ ID NO: 21691 - protein, 472 aa, unidentified
  REGION 1..472: note = Human gut metagenome
VVGNNLLSIKPLINIGEGVIYSSICTGLSLQTYQKRKEVPYMVYVLDIDGQLLMPTTRHGKVRRLLNNHLAKVVKRCPFTIQLLYQSTKETQPVSLGVDAGSKHIGMAATTEKKVVYQEELSPRNDVVKLLSARRTLRRTRRNRKTRYRKPRFNNRAHSKHKGWLAPSVEVKIQEHITAIKRICQILPISEIHVETAEFDLQRLKAMDEGSPLPVGIDYQLGEQYDFYNTRQYVLHRDGYTCQCCGTHDNNIKLHVHHIESRQTGGDAPNNLIILCEHCHKALHEGKLELPKGKKRGKSYRDATFMGVMRKTLLERLKKEIDVPVEGTYGYITKYWRERAGLEKSHIHDAVCISKYPYAKPLDIYYLTKTVRHHNRQIHKSNFSKGGIRKRNQAPYLVKGFRLFDKVLYQGKEYFIFGRRATGYFDIRTLDGTKVNKGSISYKKLRIQDTAKAYLKEARAIPHMNEFTCVLA

SEQ ID NO: 21692 - protein, 430 aa, unidentified; identical to SEQ ID NO: 3252
  REGION 1..430: note = Human gut metagenome

SEQ ID NO: 21693 - protein, 419 aa, unidentified; identical to SEQ ID NO: 5677
  REGION 1..419: note = metagenome

SEQ ID NO: 21694 - protein, 447 aa, unidentified; identical to SEQ ID NO: 4640
  REGION 1..447: note = Human gut metagenome

SEQ ID NO: 21695 - protein, 742 aa, unidentified
  REGION 1..742: note = Human gut metagenome
MRGQPLMPCSPAKARHLLKAEKAVVKRRTPFTIQLRIATGETKQNVTLGVDAGAKHVGLSATTEKEEVFASEVELRQDITGLLATRLSLRRDRRHRKTRYRAPRFLNRVRSKHKGWLAPSVENRIQAHMSRIDAVCRLLPVTKIVIETASFDIQKIKDPSVEGTDYQQGDQLGFWNVREYVLFRDGHVCQHCHGRSKDKILNVHHLESRQTGGDAPNNLITLCETCHKACHAGKIKLKVKRGQSFRAEAFMGIMRWTLLDRVRKAHPGLPVENTYGYLTKNTRITLGLPKAHCVDAYCIAGNLKAVRRGVYLHQRQVRKHNRQIHKCTILLQTLEDGTKIGYRKLNQTPHMVKNFRLFDKVRCLGQTGFIFGRRSSGCFDVRRLDGVKLSSGISYRKLTLLEKRGTHLTELIKEDGASSSVRRQRFLRRVSMNKPCTYLLSALMASAVLAPVAALAADKSELEVRMEAAQKVLADRSYYERWSPEAALKTVEDAKAANEAGSARQKEIDGALDVMKDWCHTRFLVNACIKDARDLHHEREKEIRSVRLKADEMIRLDRVEQRRARQESQKQNVKQPMKLGGSTESPESRSESRAEEVKTKQSRAEERRALEEANVRAYEEKQARAARKAEERHDPIRVKSRVKAPSSPIEGHLGRTAADVEAGRAEAAERMAQEDANIAAFNAKQAEAKKRLEEAEATAAERKASREARQANFNKTLEERRAAQKRYEESRENKDSGLKKYF

SEQ ID NO: 21696 - protein, 411 aa, unidentified; identical to SEQ ID NO: 5658
  REGION 1..411: note = Human gut metagenome

SEQ ID NO: 21697 - protein, 423 aa, unidentified; identical to SEQ ID NO: 6991
  REGION 1..423: note = Microbial mat metagenome

SEQ ID NO: 21698 - protein, 515 aa, unidentified
  REGION 1..515: note = Human gut metagenome
MTALEERLSKTEYIYVLGFDGKPQMPTRRKRHVLKLLKTGRARIAEDIPFTIRLTYRNAPVLQPVTLAEDPGRTNIGAAVLSPLGGLLFSAVIETRNKEIKKLMADRKKSRQASRRGERKARQRLAKRYGSMVKSGMVMRKLPMYAADRFVTCKFIRNTQARFCNRKRCPDWITPTVQHLVQTHLNIIRKISRYLPVTDIAFEVSRFAFMHMENPKAMGVDFQNGPLKGYDDVKEAIRTQQHGKCLMCKKPIAHFHHIVPRSRGGSDTIQNLAGLCPECHTKVHTDTAFRKDFDRKKSGQLKKYGALSALNQAVPFICKKLLEEYGEEHVHFCRGLDTSLIRTALGFEKTKKNQMHEVDACCIGLAALEVNEVETPAFDHTFQIRQFRRQDRSIIHHQTGRSYYQGKEKVAQNRKPGFEQKTTALSQWYEEQVRIHGEKEAEKLRSQLRVEKSCRHYNDMDRFLPGAVFLYEGKRYVLSGRITNGKYLRACGQGMKNFPAAECTFIRHNAGLVFI

SEQ ID NO: 21699 - protein, 427 aa, Moorena sp.; identical to SEQ ID NO: 3216

SEQ ID NO: 21700 - protein, 447 aa, unidentified; identical to SEQ ID NO: 8397
  REGION 1..447: note = Human gut metagenome

SEQ ID NO: 21701 - protein, 401 aa, unidentified; identical to SEQ ID NO: 14966
  REGION 1..401: note = Human gut metagenome

SEQ ID NO: 21702 - protein, 420 aa, unidentified; identical to SEQ ID NO: 3546
  REGION 1..420: note = Human gut metagenome

SEQ ID NO: 21703 - protein, 431 aa, unidentified
  REGION 1..431: note = metagenome
MPNKVYVINKHGRPLMPCSPAKARHLLDAGKAKVKKRTPFTIQLVYGSSGYTQEVILGVDAGSKTIGMSASTTKEELLSAEVKPRNDVVDLLSTRREFRRARRNRKTRYRKPRFDNRVRSKHKGWLAPSVEVKIQEHITAIRRVCGILPVSKVVVETAEFDLQLLKAIADGKPVPQGEDYQKGEMYGHYNVRQYVLWRDGYTCQCCGAHTTKKKEVRLHVHHLESRKVGGDAPDNQVTLCESCHEKLHKGLIAEKDFKKRKRKSTRDATFMGIMRKTLMQRLCSELPIPVIETRGYITKATREKLLVLPKSHTNDALAIAQGKQGFNVGYLPEIAQIDKIYTIRPVRHHNRQLYKATILKGGIRKSNQTKKYVFGYRLFDKVQFNGQDCFIWGRRTTGIFTIKTINGKMIKDGISFKKLKLAEKSTSYLIA

SEQ ID NO: 21704 - protein, 442 aa, unidentified; identical to SEQ ID NO: 2903
  REGION 1..442: note = Human gut metagenome

SEQ ID NO: 21705 - protein, 415 aa, unidentified; identical to SEQ ID NO: 5047
  REGION 1..415: note = Human gut metagenome

SEQ ID NO: 21706 - protein, 440 aa, Bacillus sp.; identical to SEQ ID NO: 19648

SEQ ID NO: 21707 - protein, 554 aa, Acidithiobacillus sp.; identical to SEQ ID NO: 7890

SEQ ID NO: 21708 - protein, 427 aa, Enterococcus sp.; identical to SEQ ID NO: 5630

SEQ ID NO: 21709 - protein, 424 aa, unidentified; identical to SEQ ID NO: 17364
  REGION 1..424: note = Human gut metagenome

SEQ ID NO: 21710 - protein, 459 aa, unidentified; identical to SEQ ID NO: 11427
  REGION 1..459: note = Cyanobacteria bacterium UBA11366

SEQ ID NO: 21711 - protein, 418 aa, unidentified
  REGION 1..418: note = Human gut metagenome
MVYVLGQDGHPLMPTCRHGKVKRMLKSGMAKVVKKCPFTIQLQYESTTHTQKINLGIDAGSKTIGVSATTESKVLYESEVVLRNDIVELLSGRRALRRSRRNRKTRYRKPRLDNRRRPDGWLAPSIRQKIKTHVTVVENVMKILPVTKIIVETASFDIQKIKNPEIEGAEYQYGEQLDFWNVREYVLFRDGHTCQCCKGKSKDNILNVHHIESRKTGGNAPNNLITLCETCHKAYHKGVITLPKEIHRGMRFRDAAFMGIMRWAFYDRLKELYTPFGVEVINTYGYITKNTRIEHGLPKEHYVDARCISGNPAAKPLGHYYFQKKVRCHNRQIHKNTILKGGIRKRNQAAYLVKGYRLFDKVKYQNQEYFIFGRRSSGFFDIRTLDGTKVNKGSISCKKLQLVEKSKHYLTEQRKVAA

SEQ ID NO: 21712 - protein, 421 aa, unidentified; identical to SEQ ID NO: 11064
  REGION 1..421: note = Human gut metagenome

SEQ ID NO: 21713 - protein, 422 aa, unidentified; identical to SEQ ID NO: 18257
  REGION 1..422: note = Human gut metagenome

SEQ ID NO: 21714 - protein, 451 aa, Moorena sp.; identical to SEQ ID NO: 3199

SEQ ID NO: 21715 - protein, 278 aa, unidentified
  REGION 1..278: note = Human gut metagenome
MVYVVANDGQPLMPTERHGKVCRMLKSGMAKVVKKCPFTIQLQYESERNVQPVSLGVDAGSKHIGISATTKTKVLYESDVELRDDIVKLLATRRQLRRSRRSRKTRYRPVRFDNRKRKEGWLAPSIRQKIGSHLTVVANACKILPINQIIVETASFDIQKIKDPEIQGIEYQQGEQMDFWNIREYVLFRDGHICQCCKGRSKDKILNVHHIESRKTGGNAPNNLITLCETCHKGYHNGTVILPKNIKHGMQFKDAAFMGIMRWTFYNTLKEQYEPDIP

SEQ ID NO: 21716 - protein, 462 aa, unidentified
  REGION 1..462: note = Human gut metagenome
MGVLVIGQNGRALMPTTTRKARILLKENKASVVYRHPFTIHLRYKTGCATQEGSIGIDTGSQHIGVGVTCRDKVILKDEHELRSSMEKRSLMETRTTMRRGRRYRKVRYRKPKWRHHTKRMYFEKANRKGQHWRKVKTTTQSPRPKGWLPPSLQSKCDHHFRIIDRYLKYLPDSITKNLVIEVGRFDMARMNDPTIHGKMYQRGPMYDAENLRAYIFARDGYKCACCKAKAGSVRKEDGTTVKLVAHHILFRSRGATDNPKYMISVCDHCHTTKAHQPGGILYSWMEKNKKVTRGLRDATFMNILRRRLFDRFPQAAFTYGNITAVDRKRLLLPKSHANDAVAISLFGKDVSVINATCQTLRYKQVRKSKRSLHEATPRKGRKEPNTKAIRNKKNTTHVNGFKLWDSVLANGQKLFICGFTGSSAYLVDQDGHYVSPPGKTYKQWTLSNLSRLHPNGNWLMA

SEQ ID NO: 21717 - protein, 422 aa, unidentified; identical to SEQ ID NO: 5457
  REGION 1..422: note = Human gut metagenome

SEQ ID NO: 21718 - protein, 423 aa, unidentified; identical to SEQ ID NO: 3951
  REGION 1..423: note = Human gut metagenome

SEQ ID NO: 21719 - protein, 413 aa, unidentified
  REGION 1..413: note = Human gut metagenome
MRGRPLMPCSPAKARHLLKAGKAVVRRRTPFTIQLRIATGETKQSVTLGVDAGAKHVGLSAATEKEEVFASEVELRQDITGLLAARLSLRRERRQRKTRYRAPRFLNRVRSKHKGWLAPSVENRIQAHMSRIDAVCRLLPVTKIVIETASFDIQKIRNPEVEGTGYQQGDQLGFWNVREYVLFSDGHVCQHCHGRSRDKILNVHHLESRKTGGDAPNNLITLCETCHKAYHAGKIKLKVKRGQSFRAEAFMGIMRWTLLNRMRKAHPSLPVENTYGYLTKHKRITLGLPKTHCTDAFCIAGNLKAQRSGVYLYQKQTRKHNRQIHKCSILKGGVRKLNQSPYLVKGFRLFDKVKCLGQVGFIFGRRASGYFDVRTLGGKKLSPAIHAKKLTLLEKRKTFLTELRKESAASSPV

SEQ ID NO: 21720 - protein, 512 aa, unidentified; identical to SEQ ID NO: 3971
  REGION 1..512: note = Human gut metagenome

SEQ ID NO: 21721 - protein, 431 aa, unidentified
  REGION 1..431: note = gut metagenome
MPNKVYVINKHGRPLMPCSPAKARHLLDAGKAKVKKRTPFTIQLVYGSSGYTQEVILGVDAGSKTIGMSASTTKEELLSAEVKPRNDVVDLLSTRREFRRARRNRKTRYRKPRFDNRVRSKHKGWLAPSVEVKIQEHITSIKRVCRILPVSKVVIETAEFDLQLLKAIEEGKPVPQGEDYQQGEMYGHYNVRQYVLWRDGYTCQCCGAHATKKKEVRLHVHHLESRKVDGDAPDNQVTLCESCHEKLHKGLIAEKDFKKRKRKSTRDATFMGIMRKTLMQRLCSELPIPVIETRGYITKATREKLLVLPKSHTNDALAIAQGKQGFNVGYLPGIVQINKIYTIRPVRHHNRQLHKATILKGGIRKSNQTEKYVFGYRLFDKVQFNGQDCFIWGRRTTGIFTIKTINGKMIKDGISFKKLKPVEKSTGYLIA

SEQ ID NO: 21722 - protein, 406 aa, unidentified; identical to SEQ ID NO: 2973
  REGION 1..406: note = Human gut metagenome

SEQ ID NO: 21723 - protein, 302 aa, Parasutterella sp.
MPCSPAKARLLLKEKKAIVVRRTPFTIQLTIATGESKQPVSLDVDAGYKHVGLSASTEKAELYASEVELRQDITDLLSARRALRESRRNRKTRYRAPRFDNRIRTKRKGWLAPSVENRINAHLSRIESVLRLLPVTKITVETASFDTQLLKNPDISGKEYQEGEQLGFWNIREYVLCRDRHVCQHCYGRSKDPVLNVHHLESRRTGGDSPGNLITLCETCHKALHRGEITLKAKRGQSFRAEAFMGIMRSEVPNRLKASHPELEVNNTYGYRTKHARIANDIAKSHCADAFCIAGNLGAERL

SEQ ID NO: 21724 - protein, 470 aa, unidentified
  REGION 1..470: note = Human gut metagenome
MSVFVVGLNGCRLMPTSERKARLLLKEGKASVYRKVPFTIKLNYKTGSTVQPGYLGIDTGSQHIGITAVREDGTVLHKEEIGLRDSMTKRKLLESKASLRRGRRYRKTRYRHPKWRPETKRVYCEKPDRKGRHWKKQKNTFTSKRQAGWLPPSLQSKTDHHIRWIRKILGLLPEGYRLSIELGRFDPARMKDPEIHGELYQKGPQYDYENVRAYVLDRDRYTCQACKKKGGKLQVHHILYKSSGATDNPQYMATVCSDCHTLENHQPGGILYRWKQEQKKFTRGLRDATFMNILRKRLMEAFPDAVFTYGNITKVDREALKLPKSHANDATAIALVRTGITSIKDNEPVIHIQQVRRKKRSLHEENPRKGRKEPNRTASRNSKNTKSVTVNKKLGKIKTQVTAWLFDRVELDGKKGWISGFTGKSCYVKDRQDKYVCLSKKYDSVSITKLKILHHCGNWVVGAETTLGKG

SEQ ID NO: 21725 - protein, 536 aa, unidentified; identical to SEQ ID NO: 4526
  REGION 1..536: note = Human gut metagenome

SEQ ID NO: 21726 - protein, 420 aa, unidentified; identical to SEQ ID NO: 6718
  REGION 1..420: note = Human gut metagenome

SEQ ID NO: 21727 - protein, 418 aa, unidentified; identical to SEQ ID NO: 4327
  REGION 1..418: note = Human gut metagenome

SEQ ID NO: 21728 - protein, 472 aa, Moorena sp.
VVGNNLLSIKPLINIGEGVIYSSICTGLSLQTYQKRKEVPYMVYVLDIDGQPLMPTTRHGKVRRLLNNHLAKVVKRCPFTIQLLYQSTKETQPVSLGVDAGSKHIGMAATTEKKVVYQEELSPRNDVVKLLSARRTLRRTRRNRKTRYRKPRFNNRAHSKHKGWLAPSVEVKIQEHITAIKRICQILPISEIHVETAEFDLQRLKAMDEGSPLPVGIDYQLGEQYDFYNTRQYVLHRDGYTCQCCGTHDNNIKLHVHHIESRQTGGDAPSNLIILCEHCHKALHEGKLELPKGKKRGKSYRDATFMGVMRKTLLERLKKEIDVPVEGTYGYITKYWRERAGLEKSHIHDAVCISKYPYAKPLDIYYLTKTVRHHNRQIHKSNFSKGGIRKRNQAPYLVKGLRLFDKVLYQGKEYFIFGRRATGYFDIRTLDGTKVNKGSISYKKLRIQDTAKAYLKEARAIPHMNKFTCILA

SEQ ID NO: 21729 - protein, 415 aa, unidentified
  REGION 1..415: note = Human oral metagenome
VAEMLKKYSFVLDADEKQLDPTIEQNTWRLIRQEKACLISKFPMIIKLNKIVKNPNQDEIRCGIDDGTNHVGLALVQKCQTRNKVLFKGVIEQRKDVKHLIDVRRNYRRYHRYHKRYRQQRFNNRASSKRSGRLPPSIKQRKQAIIRVINRLCKWIRINNYWLEDVKINIRALTDGFKPYKWQYQKPNRLDNNLRLAAIYRDSCQCIECGKKNTRFEVHHITPQSKGGADTISNLATLCPECHTKTFRQEEQFADRYYSLIGSTGNINGLADAQRVMQGKTWLREQLTQHGRLFLTTGADTANKRDDWNIVKTHSNDAICITDLEPENIDIEEWIIKPMRRKSKARTEQVCGFRHRDLVTYTYRNGEIHMGYVTALYPDKNKLSFQSPTKRCTGVNALKTKLLWRFNKIYWLKYS

SEQ ID NO: 21730 - protein, 301 aa, unidentified
  REGION 1..301: note = Human gut metagenome
KHKGWLAPSVEVKIQEHITVIKRICRILPITLVRVETAEFDTQRLRAMLAGKPLPVGTDYQLGEMYDEYNARQYVLKRDHYTCQCCGAHTTTMKSVKLHVHHLESRKVGGNAPSNLITLCTTCHANLHKRKVTLDGKKRGKTLRDAAFMGIMRKALMARLKEELSIPVQETYGYITKMRREQNDIKKSHVNDARCISKHPLAEPCSVCYRTKAIRHHNRQIHKANFSKGGYRKRSQISYIVEGYRLWDKVLYKGQECFISGRRASGRFALKKLDGTSISKSVTFKKLRLLEPATNYLIERM

SEQ ID NO: 21731 - protein, 512 aa, unidentified; identical to SEQ ID NO: 15053
  REGION 1..512: note = Human gut metagenome

SEQ ID NO: 21732 - protein, 431 aa, unidentified
  REGION 1..431: note = metagenome
MPNKVYIINKHGRPLMPCSPAKARHLLDAGKAKVKKRTPFTIQLVYGSSGYTQEVILGVDAGSKTIGLSASAETEELLSAEVKPRNDVVDLLSTRREFRRARRNRKTRYRKPRFDNRVRSKHKGWLAPSVEVKIQEHITSIKRVCRILPVSKVVIETAEFDLQLLKAIADGKPVPQGEDYQKGEMYGHYNVRQYVLWRDDYTCQCCGAHATKKKEVRLHVHHLESRKVGGDAPDNQVTLCESCHEKLHKRLITAKDFKKRKRRSTRDATFMGIMRKTLMQMLCSELPIPVVKTRGYITKATREKLLVLPKSHTNDALAIAQGKHGFNVGYLPGILQIDKIYTIRPVRHHNRQLHKATILKGGIRKSNQTEKYVFGYRLFDKVQFNGQDCFIWGRRTSGYFVVKTIDGKVIHNSASFKKLNLVERASNYLIA

SEQ ID NO: 21733 - protein, 406 aa, unidentified
  REGION 1..406: note = Human gut metagenome
MVYVLDKNGQPLMPTDRHRKVRLMLQSGQAKVIKRCPFTIQLTYNTGHQAQEISLGIDAGSKHIGVSATTKTRVLYEADVELRNDIVDLLSSRRELRRGRRNRKTRYRPARFDNRRREDGWLAPSIRQKIGTHLTVVENICKILPISRITVETASFDIQKIKNPDIQGAEYQQGDQLGFWNNREYVLFRDNHTCQCCKGKSKDKILNVHHIESRKTGGNAPNNLITLCEICHTGYHKGAIQLPKTVKRGMRFKDAAFMGIMRWAFYEALKQQYEPVGTPVHNTYGYITKHTRIEHNLPKEHYVDARCISGNPDAFPNGEYYYQKKVRCHNRQMHKLTILKGGIRKQNQATYLVKGYRLFDKVSYQRKEYFVFGRRKSGFFDIRTLSGKQVNKGSLSCKKRKRLNSG

SEQ ID NO: 21734 - protein, 463 aa, unidentified
  REGION 1..463: note = Candidatus Anoxychlamydiales bacterium
MQKLVGRDTYTPTDTPLVRSNCDLPLNKEETLSVSDLKTPSNNPEVDCPNIQGALKAFVYVISKNGIALMPCTKAKAKKLLREGKAQIVSYKPFTIKLLFECENQVQKVTLGIDPGYENIGFSAISEKKELFSTKVKLRTDVSKLLTEKRMYRRNRRIKLWYRKPRFLNRKKTKRLPPSLEHKLNSHLRIVKKILTFIPISKIIVEVANFDIQKIKNPQIENFQYQRGDLYGYQNLKAYLLQREQAKCQLCLKKSTKGNSFRLHHIIPRKDRGTNKVNNLSLLHEKCHDKLHKKKIFHLLKKNRQFKPETFMSSIRFKLATELKKLCSNISLSFGYMTKIKRDILKLEKNHHTDAFVIANGSFEKRVQPSLFLPKRKNNRCLQLNRKGFKPSIRRKRYKMQPKDVVQVKNKKYEVIGIFNKGNWLRVRDKTKTLNYPVKKVEKHIFINGWQFIPSLKERVFLP

SEQ ID NO: 21735 - protein, 465 aa, unidentified
  REGION 1..465: note = Human gut metagenome
MSTCVCVLSNNGERLMPTIRLGKVRHLLKDGKAKIIKHHPFTIQLLYDSETNIQPIEICEDVGYNYIGISVKSQSHEYVSAQYDTLQDKKSCHDACRRMRRTRRNRLRYRQKRFDNRKRDKGWLAPSLKHKKELNVNVIKMYCEVVPITHATVEVGSFDTMLVKAIEEGKATPEGADYQKGPRYNLATLREAVFYRDNYTCQVCGREASEGAILHVHHMFYWKGRHDNSLSELITVCEKCHTPANHQKGGKLYGFGEDIKFANLSGAAFMNTVRWQIVNELYAAFGKPFVTFTYGAMTKEKRIALHLEKSHNNDAYAMGEFHPNCRCTFEHYEKVRRNNRILEKFYDSRYIDIRTGEIATGKELFNGRINRSHKKDSENLHKYRGKRIRKGYRALRRKKVALNPGDLVSLNGEILTVHGTHTKKNGSVNVEFKTPSKSGKKSTSLKKLKIIKTISPMRSAWDKVS

SEQ ID NO: 21736 - protein, 456 aa, unidentified
  REGION 1..456: note = Human gut metagenome
MSTCVCVLSNSGERLMPTFRLGKVRRLLKDGKAKIVKHHPFTIQLLHDSKTNTQPIEICEDVGYNYIGISVKSESHEYVSAQYDTLQDEKACHDSCRKLRRTRRNRLRYRKPRFDNRKRGEGWLAPSLEHKKQLNIRLIERYVSVIPITHATVEVGSFDTMLLQAIQKGKSKPEGVDYQKGPRYNLATLREAVFYRDNYTCQVCGRKIADGAILHMHHMFYWKGRHGYQLDELVTACEKCHTPANHQKGGKLFGFGEDKEFANLSGAAFMNAVRWQIVDALHATYGKEFVTITYGAMTKEKRIILGIEKTHNNDAYAMGDYHPVHRCVFRHYQKRRRNNRVLEKFYDATYIDTRTGNKAKGKELFNGRISRNHKKNSEDLHKYRSKKVSKGRRSIRRQRYAIQPYDTVRLESKTYITSGCHNKGTRLLIPANGKSKSVAISKVQVVCHAGAWIQII

SEQ ID NO: 21737 - protein, 470 aa, unidentified; identical to SEQ ID NO: 2925
  REGION 1..470: note = Human gut metagenome

SEQ ID NO: 21738 - protein, 435 aa, Moorena sp.
MRRVFVLDKKQKPLMPCQPARARHLLSSGKAAVFRREPFTIILQEREYGDTQPLELKIDPGSKTTGTALVIQGKNGCKVLWAGELHHRGLEIKASLLARNKIRRQRRNIHCRYRPQRGKRKRSKGLLMPSLRHRVLTVGNWVNRLCRWAPVSGLALELVRFDTQKLQNPEIEGVEYPRGELFGYEVREYLLEKWGRKCAYCGAEHVPLEIDHIAPRARGGTDRVSNLTLACRPCNERKGALPVEEFLKNDPERLKAIKAQAKTPLKDAAAVNSTRWALFEALKATGLPIETGSGGRTKFNRTRQGYPKAHWIDAACVGESGADVQIPQGLRALTIRAIGHGSRQMCLMDKYGTPRTKPKKVKRVLGFQSGDLVRLVQPKGKHKGVYVGKVSVRERGAFDIQDCINGERTKITAPHHRFTLLQRGDGYVYERPKPA

SEQ ID NO: 21739 - protein, 415 aa, unidentified
  REGION 1..415: note = Human gut metagenome
MVYVLDKDGHPLIPTNRHGKVRRMLKSGQVKVVKKCPFTIQLMYESEHNVQPVSLGIDAGSKRIGVSATTKTTVLYEADVELRDDIVKLLATRRQMRFFRRSRKTRYRPKRFDNRRRGKGWFAPSIRQKINTHLVTVARVCEILPVTQIIVETASFDIQKIKNPKIQGVEYQRGEQTDFWNVREYVLFRDGHVCQCCKGKKKDPILNVHHIESRKSGGDAPNNLITLCETCHKGYHNGTIKLPKRIKRGMKFKDAAFMGIMRWTFYNTLKEKYEPDIPVSMTYGYLTKNTRIQHNLPKEHYIDARCISGNPDAKSDGVYYYQKKIRCHNRQIHKFNTLRKGVRKLNQSEYLVKGYRIFDKVRYQGKEYFVFGRRKTGFFDIRTLSGEKANNGSLSIKKIAFVDTRKNYITERRTV

SEQ ID NO: 21740 - protein, 477 aa, unidentified; identical to SEQ ID NO: 5307
  REGION 1..477: note = Human gut metagenome

SEQ ID NO: 21741 - protein, 422 aa, unidentified; identical to SEQ ID NO: 9722
  REGION 1..422: note = Human gut metagenome

SEQ ID NO: 21742 - protein, 415 aa, unidentified
  REGION 1..415: note = Human gut metagenome
MIYVRSKDGKVLMPTERCGKIGYLLRHGKAHVVSRVPFVVQLDYETSTYTQDVSLGIDAGSKHIGVSASSKKKELFAAQVELRNDVVNLLSTRRELRRTRRNRKTRYRKASFNNRKKKDGWIAPSVEQKVKSHLKVIRLVRDLLPIAKTTIEVAQFDAQKIKNPDIKGEEYQQGEQMDFWNVREYVLARDGHRCVHCNGKSKDPILNVHHLESRKIGGNSPSNLVTLCETCHKAYHRGEFTLKIKRGRTLRDAAFMGIMRLAVYERAKSEFGNVHLTYGYVTKNTRIENGIAKTHAADAFCIAKNVHAMRLRTLFHCRCVARHTRALHVCNPKRGGMRRSCIASHKIGKSRFQRFDMVRWKGRECFIFGSTHGRPVLRDIEGYKMHENASVNIKTIKFLKRLRNNMLVEARTFKS

SEQ ID NO: 21743 - protein, 290 aa, unidentified; identical to SEQ ID NO: 18171
  REGION 1..290: note = Human gut metagenome

SEQ ID NO: 21744 - protein, 431 aa, unidentified
  REGION 1..431: note = Human gut metagenome
MPDKVYVISRLGHPLMPCSPAKARHLLDDKKAKVVKRMPFTIRLLYGSTKYIQPIILGVDAGSKTIGLSASTAKGEVFAAEVMPRNDVVENLSTRREFRRARRNRTTRYRKPRSDNRVRSNHERWLAPSVKVKIQEHITSIKRVCTILPISKVVIETAEFDLQLLKAIQEGKPIPEGEDYQKGEMYGSYNVCQYVLWRDNYTCICCGVRGTPKNPVRLHVHHFESRKYGGNAPDNHGTLCDDCHKKFHLGIITDVKLKTRRRQSTRDAAFMGIMRKTLMWRLRTELFIPVAETKGYITKATREKLLVLPKSHTRDALAIAQGRHGFGIKEYAYVEPANHIYTVRPVRHHNRQLHKASILKGGIRKRNQASKYVFGFRLYDKVLYQGKACFVWGRRTSGTFLLRTIDGIKVKDGVSYRNLTLLERSSNYLIA

SEQ ID NO: 21745 - protein, 470 aa, unidentified; identical to SEQ ID NO: 2825
  REGION 1..470: note = Human gut metagenome

SEQ ID NO: 21746 - protein, 411 aa, unidentified; identical to SEQ ID NO: 2867
  REGION 1..411: note = Human gut metagenome

SEQ ID NO: 21747 - protein, 449 aa, Moorena sp.; identical to SEQ ID NO: 13052

SEQ ID NO: 21748 - protein, 392 aa, unidentified
  REGION 1..392: note = metagenome
MVYVINKEGQALMPTERFGKVRRLLKNGLAHVVCRIPFTIRLDYETTHFVQPISLGVDAGSKHIGISATTSKKELYAADVELRNDIVDKLSTRREQRRTRRNRLRYRKARFNNRVSSKHKGWLAPSVENKIQTHLTVVEKIHKFLPITKIIVETASFDIQKINNPSISSEEYQQGEQLDFFNVREYVLFRDNHTCQHCKGKSKDHILNVHHIESRKTGGNSPSNLITLCESCHKAYHNGKIDIKIKRGASFRDATFMGIARWTTYERLKNIYPNVSMTFGYITKNTRITNGLPKEHYVDARCISGNFLKGGRKKLNQSPFLVKGYRLFDLVEYQKKLYYIFGRRDSGFFDIRRLDGTKVNKGSISCKHIRLVDIRRNIITERRNSCSIPPTN

SEQ ID NO: 21749 - protein, 515 aa, unidentified; identical to SEQ ID NO: 5111
  REGION 1..515: note = Human gut metagenome

SEQ ID NO: 21750 - protein, 544 aa, unidentified
  REGION 1..544: note = Human gut metagenome
MKQKKQKVMIYILNKKGKPLMPTTRCGHVRKLLDSKKAVVVNSNPFTIRLKYDTPNCVQDMFAGIDSGRENIGSGASNEDGDCLYLGELRTSNKLIKIKMTERAGFRRERRRHDRQNKQRKARKDHTEIQNGNIDICRTTISCKSVQISYPAAEESVTHKIIRGKEGKFANRHRDEGWITPSARQLVQMHMNDLRSICKILPISHVTLERVAFDFQKLENENIKAWEYGKGKLYGYDSPKKYIHDVQDGKCLVCGKPHIDYLHHIIPRSKGGSDNVSNIAGLCYDCHYGPMGVHNCQDTQDRLPELKNEANKQYKVSLLNSVMPVLIEEMDKFCEANSIIFSICEGHDTAKVRDMYDLQKDHCLDGFAISLVGRNVKSVDVMPDRIYQKQRYKKKSKNIIQKRNCREYYDGKKLVAVNRHKGTDQKADSLEEYMNTYAETHTADECKKHFDSLTVKPARRTYTFHKKGCICPFHIGDKVRYEKKNKIKGNTKVETFICESIHFYKDENKAKVEHNKTKSKRMKFCRVLEAGCTPYIDYRKLALM

SEQ ID NO: 21751 - protein, 504 aa, unidentified; identical to SEQ ID NO: 3854
  REGION 1..504: note = Human gut metagenome

SEQ ID NO: 21752 - protein, 427 aa, unidentified; identical to SEQ ID NO: 5922
  REGION 1..427: note = Plant metagenome

SEQ ID NO: 21753 - protein, 264 aa, unidentified
  REGION 1..264: note = Human gut metagenome
VAEGKPVPQGEDYQKGEMYGHYNVRQYVLWRDGYTCRVCGAHGSVKKGVPLHVHHLESRKVGGDAPDNLVTLCTACHDKLHKGIITAADLKKRKRRSTRDATFMGIMRMTLLRRLREQLPVPVVETRGYITKATREKLLVLPKSHTNDALAIAHGPQGFRAGYLPNIRQADRLYTIRPVRHHNRQLHKATILKSGVRKANQAETYICGFRLYDKVLYNGIECFVWGRRTSGSFLLRQLNGEKVKDGVSHKHLKLLERSQSYLVA

SEQ ID NO: 21754 - protein, 500 aa, Moorena sp.
VAITLEIGDFQMLNRNSVFVLDTNKNPCDPIHPGKARKLLSQNKAAVFRQYPFTIILKEVSKPTKKYRIKIDPGAKFTGLALLSKANIVWCAELEHRGFQITEALTKRRTLRTTRRNRKTRYRKARFLNRKRPKGWLPPSLMSRVFNIESWVKKLCRLAPVSAISMELVRFDTQKMVNPEISGTEYQQGELMGYEVRQYLLEKFNRTCVYCGAKEVPFNLDHFHPKSKGGSNRVSNLVLSCVPCNQNKDNQLPADFLSDKPKLLALIENQRKKPLADTAAVNTTRWKLKEVLESSGLPVEVGSGRLTKYNRKRLGISKSHWSDAACVGVSTPNTLNIQNYQPLLIKAMGHGSRQMVKPDKYGFPRTSPKLRQKSFYGFQTGDIVKAVVTKGKKIGTYVGRVAVRKTGSFNIKTKTETVQGISHKYCKHLHKSDGYTYSFGELVKQKTVNFVQKVGQVLDTPVQLSLFDISELTTETKSQTKRGQHTKKFDGLDGEQLSLF

SEQ ID NO: 21755 - protein, 366 aa, unidentified
  REGION 1..366: note = Human gut metagenome
KHVGLSASTEKAELYASEVELRQDVSDLLSARRALRQSRRSRNTRYRAPRFDNRIRTKRKGWLAPTVENRINVHLSRIETVLRLLPVTKITVETASFDTQLLKNPDIAGKEYQEGEQLGFWNVREYVLFRDGHVCQHCHGRSKDPVLNVHHLESRRTGGDSPGNLITLCETCHKALHRGEIKLKAKRGRSFRAETFMGIMRWGVLNRLKASHPKLEVHNTYGYRTKHARIANGIAKSHCADAFCIAGNFGAKRLGEFFFQKQTRRNNRQIHKLSILKGGIRKRNQAPFEVKGFRLFDKVACQGEEGFIFGRRSTGYFDVRKLDGTCISAGISYKKLHLLEKRRTYLTEIRKEEALPPPPEGRGLRA

SEQ ID NO: 21756 - protein, 408 aa, unidentified; identical to SEQ ID NO: 6548
  REGION 1..408: note = Human gut metagenome

SEQ ID NO: 21757 - protein, 470 aa, unidentified
  REGION 1..470: note = Human gut metagenome
MSVFVVGLNGCRLMPVSERKARLLLKGGKASVYRKVPFTIKLNYKTGSTVQPGYLGIDTGSQHIGVSVVRQDGTVLHKEEIGLRDSMSKRKLLESRASLRRGRRYRKTRYRHPKWKPKTKRIYSEKADRKGRHWKKQKNMFTSKRQAGWLPPSLQSKTDHHIQWIRKLLHLLPEGYRLSIELGRFDPARMKDPGIHGELYQKGPQYDYENVRAYVLARDGYTCRVCKKKGGKLHVHHILYRSRGASDDPKYMAAVCSNCHTTENHLPGGILYQWMQDQKKFTRGLRDATFMNILKKRLRRAFPDAVFTYGNITKADREKLGLPKSHGNDATAIALVKTEVKSVKDEEPVIHIQQVRRKKRSLHEETPRKGRKGPNRTASRSDKNTKSVTVTKGSGEKKASMTACLFDRVELDGKKGWITGFTGTSCYVKDKEDNYICTSPKYKQVSISKLRILHHCGNWVIGAEKPLGKG

SEQ ID NO: 21758 - protein, 384 aa, unidentified
  REGION 1..384: note = Oil field metagenome
MEKESVQRVFVLDKNKQPLMPCHPARARELLKKGKAAVFRYHPFTIILKDREGGDTQPIQVKIDPGSKITGVTLVGDFKNGKKVIWGAEIHHRGQSIKKALDTRRGVRRSRRNRKIRYRIARFDNRKRSKGWLPPSLISRVENILTWIKRIRRFSPITGISLELVRFDTQKLQDPEINGIEYQRGTLYGYEIKEYLLEKWGRKCVYCGKENVPLEIEHIVPKSKGGSDRISNLTLACHECNQKKGNQSIEEFLTNNPERLKQIKSESKRPLKDTAALNATRWYIFNQLRGNSLTAGKEELPIEVGTGGRTKYNRETQNYPKKHWIDAACVGESGQNVQIEPDMQVLEIKAMGHGMRRMCFVDKYGFPKNIVQKNEHIWDTKQAI

SEQ ID NO: 21759 - protein, 426 aa, unidentified
  REGION 1..426: note = Lachnospiraceae bacterium
MVYVLSKDGQPLMPTKRYGKVKHLLRSKRAKAIKRCPFTIQLTYDSDSYTQSITLGVDAGSKTIGLSATTKTQELYAAEVTPRNDISDLLETRRSLRSSRRNRKLRYREPRFLNRTKSKHPGWLAPSVRAKVDSHLKVIEDMTKILPISKIIIETASFDLQKIKAMELGLPTPEGTDYQKGELLDFVNVREYVFWRDNYTCQWCHGKSKSNILHTHHWAYWKGDHTDKPSSQITLCDKCNDSKNHKPEAKMLWGWEPKITFTAKGAAFMGIMRWSVYNELKEIYEPSGIHIKMTYGYITKANRIAYNLPKEHRVDARCITGYPDVLPAEEWYNSKKIRCHNRQIHKSNPKRGVRKLNQAPYMVNGYRLFDKVLFKNTECYITGRRSTGYFALKTLDGQKIHDSAKVKDLKLIEPRKLYLTERKAQV

SEQ ID NO: 21760 - protein, 430 aa, Microvirga sp.; identical to SEQ ID NO: 7723

SEQ ID NO: 21761 - protein, 440 aa, unidentified
  REGION 1..440: note = Human gut metagenome
VRRAVFYRHYPAVIILKDVDARNIYKLPSYRIKIDPGAVHTGIAIVCNETNEVMYFLQIEHRGSEVKKALITRKQTRRNRRSRETRYRRCKFKSGGDFDSSRKNGWLPPSVKSTADNVIHWVEKLCRYINITECSFEAVRFDSQLMDNPEIGGEEYQQGTLSGYELREYLMEHFRHTCQYCGGESGDPVLEWEHKIPRSRGGSDSVKNASLACSCCNRDKGNRTLEEYLEDSKHISPKGKSEKALNEARISHISGILEKGTIYGSNRYSAWVNSTRRYIEKYLFLMFDDVECCSGGRTKYNRIKLKLPKDHHYDALCVGSVPKEGYTDRTNSYVLYVKATGRGTRFRGQCNSCGVITVKYKNNSKRKFGFQTGDIVQLNKPKGKDTGQYTGKVAVRSSGSFDLIRKGCKRITANYKYFRMMQYSDGYEYLGPLRPIPHSA

SEQ ID NO: 21762 - protein, 417 aa, unidentified
  REGION 1..417: note = Human gut metagenome
MPCSPAKARLLLKEKKAIVKRRTPFTIQLTIATGEAKQPVALGVDSGYKHIGLSATTEKAELYASEVELRQDITDLLSARLALRRSRRSRKTRYRAPRFDNRVASKRKGWLAPSVENRIAAHMSRVEAVMRVLPVTAITVETAAFDTQLLKNPNIAGEAYQQGEQLGFWNVREYVLFRDGHVCQHCRGKSKDPILNVHHIESRRTGGDAPNNLITLCETCHKAFHRGEIKLKVKRGKSFKAETFMGIMRWTLFERLKKAHPELRVRNTYGYLTKHKRISHGIAKSHCADAYCIADNLGAKRLEGFFFQKQTRKHNRQIHKLSILKGGLRKKNQAPYEVKGFRLFDKVICKGEEAFIFGRRTSGSFDVRRLDGTRISAGINYKKLRLLEPRTTYLTEFRKEAALPHLHECRGFRAEFL

SEQ ID NO: 21763 - protein, 493 aa, unidentified; identical to SEQ ID NO: 3154
  REGION 1..493: note = Human gut metagenome

SEQ ID NO: 21764 - protein, 512 aa, unidentified; identical to SEQ ID NO: 5824
  REGION 1..512: note = Human gut metagenome

SEQ ID NO: 21765 - protein, 393 aa, unidentified
  REGION 1..393: note = Human gut metagenome
MVYVQDINGKPLMPTTRHGKVRRLLKDKKAVVVNLCPFTIKLMYVTSDYKQEIVLGVDAGTKHVGLSATTKSKELYSSEVILRNDIVDLLSTRRELRKARRNRLRYRKPRFDNRVKSKRLGWIAPSVIYKVDAKIRVVENVCSILPISRIVIEVAQFDTQKIKNPEISGKEYQEGDQLEFWNTREYVLARDGHKCQYCKGKSKDSILNVHHIESRKTGGDSPSNLITLCETCHKEYHKGNIDLKIRRGKSLRDAAVMGIMKWRLYEELKSRYDRVFMTFGYITKHNRIKYGIEKSHTSDAFVISKNINAKRIERQYLKRLIRRHNRQIHKMKILKGGKKKNNQAPFEVFGFRLFDKVLYNNKIFFVYGRRKSGSFNIRDFNGENSKDVSRKKV

SEQ ID NO: 21766 - protein, 431 aa, unidentified; identical to SEQ ID NO: 5232
  REGION 1..431: note = Human gut metagenome

SEQ ID NO: 21767 - protein, 462 aa, unidentified; identical to SEQ ID NO: 13564
  REGION 1..462: note = Human gut metagenome

SEQ ID NO: 21768 - protein, 473 aa, unidentified; identical to SEQ ID NO: 3562
  REGION 1..473: note = uncultured beta proteobacterium

SEQ ID NO: 21769 - protein, 394 aa, unidentified
  REGION 1..394: note = hot springs metagenome
LLHGSSGYKQKCIAGIDAGSKNIGIAVTTEDGRVIYKAQVELRQDIKENIETRRRLRRARRSRKKRYRKPRYLNRKRPEGWLPPSVRAKIEAHYNIIKRLSKIIPISEIKVEVGQFDTQALQNPDIQGIEYQNGEMKGFDSVKEYVKIRDKFKCHYAELRPDISCSDKLTVDHIIPRSRGGTNNPSNLVCCCEAHNIAKGNMSYKEFTGKELPAIEDFRPATFMNVLRDYLVPRLMEIAPTSYTFGLYTRRTRKEWELEKSHINDAIAITGIKPKWQDDVWYCIRQVRKKKRSLHEEIPRRGRKEPNREAKRNSKNTKEIIVNGNKWCLWDKVYIPAINKTGYISGFSNNWVYVQDIFGNYLQISNKYKQINPKELVLLGRNNNFVCQQFISTL

SEQ ID NO: 21770 - protein, 420 aa, unidentified; identical to SEQ ID NO: 18287
  REGION 1..420: note = Human gut metagenome

SEQ ID NO: 21771 - protein, 443 aa, unidentified
  REGION 1..443: note = Human gut metagenome
LTKDENRPSGRTTGLRAEQAEPAGIRKGDTLKVFVLNMRGKPLMPCSPAKARHMLKAGKAFVVRRTPFTIKLTIATGETKQDVTLGVDAGARHVGISATTEKEEVFASEVALRQDITGLLADRLAFRRARRNRKTRYRAPRFNNRVRSKHKGWLAPSVENRIQAHISRIEAVCRLLPVTKIVIETASFDIQKIRNPEVEGTGYQQGDQLGFWNVREYVLFRDGHICQHCRGRSKDPILNVHHLESRKTGGDAPNNLITLCETCHKAYHAGKIKLKVKRGQSFRAEAFMGIMRWTLLDRVRKAHPGLPVENTYGYLTKHTRITHGLPKTHCADAFCIAGNLKALRRGDFLFQQQTRKHNRQIHKCSILKGGVRKLNQAPFLVKGFRLFDKVRIGGQIGFVFGRRVRGTFNIRRLDKTVIGTDINCKKLSLLETRKTFLTELRKE

SEQ ID NO: 21772 - protein, 452 aa, unidentified; identical to SEQ ID NO: 14544
  REGION 1..452: note = IscB polypeptide

SEQ ID NO: 21773 - protein, 442 aa, unidentified; identical to SEQ ID NO: 16198
  REGION 1..442: note = Human gut metagenome

SEQ ID NO: 21774 - protein, 429 aa, unidentified
  REGION 1..429: note = Human gut metagenome
QNKQRKARKDHTEIQNGNADICRTTISCKSVQISYPAAEKSVTHKIIRGKEGKFANRHRDEGWITPSARQLVQMHMNDLKSMCKILPISHVTLERVAFDFQKLENENIKVWEYGKGKLYGYDSPEEYIHDVQNGKCLVCGKPHIDYLHHIIPRSKGGSDKVSNIAGLCYDCHYGPMGVHNCQNTQDRLPELKSEANKQYKVSLLNSVMPVLIEEMDKFCKANSIMFSICEGHDTAKVRDMYDLQKDHCIDGFAISLVDRNVKSVDVMPDRIYQKQRYKKKSKNIIQKRNCREYYDDKKLVAVNRHKGTDQKADSLEEYMNTYAETHTTDECKKHFDSLVVKPARRTYTFHKEWRICPFHIGDKVRYEKKNKIKSNTKVDTFICEGIRFVKDENKAEVKHNKTKSKKMKFCRVLESGCTPYVDYRKLALM

SEQ ID NO: 21775 - protein, 412 aa, unidentified; identical to SEQ ID NO: 6913
  REGION 1..412: note = Human gut metagenome

SEQ ID NO: 21776 - protein, 447 aa, Halolactibacillus sp.; identical to SEQ ID NO: 8599

SEQ ID NO: 21777 - protein, 512 aa, unidentified
  REGION 1..512: note = Human gut metagenome
MSTVYVLNKDGKPLMPTTRGGHVRHLLKEQKARVVRTNPFTIQLLYETDNLVQPLYLGIDPGRTNIGVAVVKTDGTAVFTAHLETRNKEIPKLMQGRKKARRARRTNGRRCRRQRRAKANGTISKKCVKQATAQNGSVSKRANEIGVIKRHLPGCEKEVLCIGIKNKEAKFSNRTRPEGWLTPTANQLLQTHINLVKKIQKFLPISDVVLEINKFAFMRLDNPNVQKWQYQQGPLYQKASLEEAVSEMQEHHCLFCKNTIDHYHHVVPQSENGSNTIGNIVGLCTKHHDLVHKDTSWQKKLAKKKTGLNKRYGALSVLNQIIPALTKELSSLFPKHFFATNGKSTYDYRAAHGVSKDHWLDAYCIAGSVLPNDACDNNINNHVPYELKQFRRHDRRALHKENMGRVYTLNGKSVATNRHKAIKQTTDSLEEFRQRQPNDVCKLKVKEHHPEYRNPKRNFPGCVFLVGKHTHVMQGTSGSHNGKADGYYDTNGNSYSSGKCKFVVKNEGIVFT

SEQ ID NO: 21778 - protein, 455 aa, unidentified
  REGION 1..455: note = Human gut metagenome
MVFVLDRHHKPLMPCHPARARRLLGKGRARIHKLYPFTIRLVDRELKDSTVQPVVLKLDPGSKETGMALVREDETKTHHALYFVNLKHRGSEIKQSLLQRSSFRRSRRSRNLHYRAPRFLNRTRPQGWLAPSLQHRVDTTLSWVERLRKLAPVATLEMELVKFDTQKMQNPEIDGVAYQQGKLAGFEVREYLLEKFGRKCIYCGTEGVPLNIDHIVPKSAGGSNRVSNLVLACVDCNQKKNNLPFEVFLKGDKAKINRIRSQLKTPLKDAASVNTTRWQLFEALKLTGLSLTTATGARTKYNRHQFGVPKEHWLDALCVGKVAAIRGWQTLDVLVVKCTGRGAYKRTRLTKDGFPRGYLTRTKRFFGFGTGDMVVATVFAGKKKGSYKGRVAVRKSGSFAIQTASRKVDGISYRYCRFLSRADGYGYSWHSSKSLINSTKETALLPRINTQVSAP

SEQ ID NO: 21779 - protein, 454 aa, Moorena sp.
  REGION 376..427: note = misc_feature - Xaa can be any naturally occurring amino acid
VDTNKQPLDPVHPGWARKLLNTGQAAVFRRYPFTLILKKQVAEEVARPLRLKLDPGSKTTGFALVDDQNGEVVFAAELTHRGQQIKNALHARRAVRRSRRQRKTRYRAPQFDNRRRPKGWLAPSLESRMATTLTWTRRLMRVCPITEISMELVKFDMQLMDHPEIAGIEYQQGELAGYEVREYLLEKWGRRCAYCDAKDVPLQIEHLVCRARGGTDRVSNVCLACEPCNRKKGTQDISVFLKRDPVRLARLLAQAKAPLRDAAAVNTTRWVLYDRLKTFGLPIECGSGGLTKYNRVKLGFPKAHWTDAACVGKSTPQELCVKGVTPLLITAMGHGSRQMCRMNKRGFPRTGPKAARRVKGFQTGDIVRAVVPTGKXXXXXXXXXXXXXXXXXXXXXXXXXXXXXXXXXXXXXXXXXXXXXXXXXXXXTNNFSVRWQLRWKAALAFHCQQCLLNV

SEQ ID NO: 21780 - protein, 431 aa, unidentified; identical to SEQ ID NO: 12062
  REGION 1..431: note = Human metagenome

SEQ ID NO: 21781 - protein, 315 aa, unidentified
  REGION 1..315: note = Human oral metagenome
RRGYRQRRRYWKRYRKERFSNRASTRRKGRITPTILQKRQAVVRVVDRLSKYIRIDSIYLEDVAIDVRVLTDEKKLYSWQYQRSNRLDENLRKATILRDNCKCQLCGKRNCRLEVHHITPRRMDGANTIGNLITLCSECHSNVTGREIEFAEQLYSKIGKKKNNASLQYASHVMVGKTWLREELSKRTPVFLTTGGDTANKRIDWNLEKSHEIDAVCITNLEPESVGVKPWNVKPLRHQRKTMKVKEILGFRHRDIVCYTFKNGEYHEGYVTALYPSEGKQKEGLNFLSPTKHCKRVNPKKCQRLDRPDKFLWLA

SEQ ID NO: 21782 - protein, 424 aa, unidentified
  REGION 1..424: note = Human gut metagenome
MRVFVFNMRGRPLMPCSQRKARLLLSENKAMIYKYHPFTIQLTYTTGETKQDCHIGIDTGSKYIGAAVRSEDKVFWKGEIELRQDIRSNLDTKRIYRRSRRNRKTRYRKPRFLNRKRRDEWLPPSLQSRINHTFHWIDTLSSLVPNPILHIEVGKFDVAKMINPEIHGVDYQHDQTYGFFDERYFVFARDNYTCQCCGKSKNKILNTHHIIYRSNGGTNRVDNLITVCTDCHTSQNHRKGGIFYQWQEQHKKVKQYKEPPFMNTLRKRIFVAYPDAEITYGSETTPKRKAMKLDKTHYNDAIVISGINEIKENPEEWLLIKQFRKKKRSLHEATARKGRKKPNRNQTRNSKNTPYYKGFYLNDKVSVFGKSGYITGFTSNAAYIKDENNDYITLPNKTYKQVSINKMKLECHNNNWQYIIKNAV

SEQ ID NO: 21783 - protein, 284 aa, unidentified
  REGION 1..284: note = Human gut metagenome
LPVSKVVVETAEFDLQLLKAIADGKPVPQGEDYQKGEMYGHYNVRQYVLWRDNYTCQCCGTHPSKKKEVRLHVHHLESRKVGGDAPDNQVTLCESCHEKLHKGLIAEKDFKKRKRKSTRDATFMGIMRKTLMQRLCSELPIPVVKTRGYITKATREKLLVLPKSHTNDALAIAQGKRGFNVGYLPEIAQIDKIYTIRPVRHHNRQLHKATILKGGIRKSNQTEKYVFGYRLFDKVQFNGQDCFIWGRRTTGIFTIKTINGKMIKDGISFKKLKPVEKSTGYLIA

SEQ ID NO: 21784 - protein, 430 aa, unidentified; identical to SEQ ID NO: 7436
  REGION 1..430: note = Human gut metagenome

SEQ ID NO: 21785 - protein, 493 aa, unidentified; identical to SEQ ID NO: 10546
  REGION 1..493: note = Human gut metagenome

SEQ ID NO: 21786 - protein, 389 aa, unidentified
  REGION 1..389: note = Human gut metagenome
VTTILKTCFAASNLAKIVVLMDAWDIIVVLNKRGKPLMPCSPAKARHLLKEKKAAVVRRTPFTIQLTIATGESKQPVSLGVDAGYKHVGLSASTEKAELYASEVELRQDITDLLSARRALRQSRRNRKTRYRAPRFDNRIRTKRKGWLAPSVENRINAHLSRIETVIRLLPVTKISVETTSFDMQLLKNSDIAGKEYQEGEQLGFWNVLEYVLFRDGHVCHHCYGRSKDSVLNVHHLESRRTGGDSPGNLITLCETCHKALHRGGITLKAKRGQSFRAEAFMGIMRWEVLNRLKASHPELEVNNTYGYWTKHARIANGIAKSHCADAFCIAGNLGAERLGEFFFQKQTRRNNRQIHKLSILKGGIRKRNQVPFEVNGFRLFDKVACKGE

SEQ ID NO: 21787 - protein, 417 aa, unidentified
  REGION 1..417: note = Human gut metagenome
MPCSPVKARLLLKEKKAIVKRRTPFTIQLTIATGEAKQPITLGVDSGYKHIGLSATTEKAELYASQVELRQDITDLLSARLALRRSRRSRKTRYRAPRFNNRVASKRKGWLAPSVENRIAAHMSRVEAVMRVLPVTAITVETAAFDTQLLKNPNIAGAAYQQGEQLGFWNVREYVLFRDGHVCQHCRGKSKDPILNVHHIESRRTGGDAPNNLITLCETCHKAFHRGEIELKVRRGKSFKAETFMGIMRWTLFERLKKAHPELRVRNTYGYLTKHKRISYGIAKSHCADAYCIADNLGAKRLEGFFFQKQTRKHNRQIHKLSILKGGLRKKNQAPYEVKGFRLFDKVICKGEEAFIFGRRTSGSFDVRRLDGTRISAGISYKKLRLLEPRTTYLTEFRREAALPPLHKCRGFCAEFL

SEQ ID NO: 21788 - protein, 470 aa, unidentified; identical to SEQ ID NO: 2949
  REGION 1..470: note = Human gut metagenome

SEQ ID NO: 21789 - protein, 430 aa, Moorena sp.; identical to SEQ ID NO: 3328

SEQ ID NO: 21790 - protein, 452 aa, unidentified
  REGION 1..452: note = Human gut metagenome
MSVLVIGRNGRALMPTTSRKARLLLKKKIASVVCRHPFTIQLLYKTGCATQEGCIGIDTGSQHIGVGVTCGDRVILKEEHELRSSMEKRSLLVTRAAMRRGRRYRKVRYRKPKWRHHTKRMYFEKPNRKGQHWRKVKTTTQSPRPKGWLPPSLQSKCDHHFRIIDRYLKYLPDSITRNLVIEAGRFDMARMNDPMIHGEMYQRGPMYDAENLRAYIFARDGYQCACCKAKAGTTRKTDGTTVKLVAHHILFRSRGATDNPKYMVSVCDHCHTTKAHQPGGVLYSWMERNKKVTRGLRDAAFMNILRQRLFARYPQAAFTYGNITAADRKQLRLPKSHANDAVAISLFGKEVSAVRDTCQTVHYKQVRKSKRSLHEAIPRKGRKRPNTKAVRNKKNTTQVNGFKLWDSVLANGKKLFICSFTGTSAYLIDKNGCYVSQPGKTYKQWPLSMMLY

SEQ ID NO: 21791 - protein, 431 aa, unidentified
  REGION 1..431: note = Human gut metagenome
MPNKVYVINKHGRPLMPCSPAKARHLLDAGKAKVKKRTPFTIQLVYGSSGYTQEVILGVDAGSKTIGVSALTKKEELFAANVIPRNDVVDLLSTRREFRRARRNRKTRYRKPRFDNRVRSKHKGWLAPSVEVKIQEHITTIRRVYGILPVSKVVVETAEFDLHLLKAIADGKPVPQGEDYQKGEMYGHYNVRQYVLWRDDYTCQCCGAHATKKKEVRLHVHHLESRKVGGDAPDNQVTLCESCHEKLHKGLIAEKDFKKRKRRSTRDATFMGIMRKTLMQRLYSELPIPVIETRGYITKATREKLLVLPKSHTNDALAIAQGKRGFNVGYLPEIAQIDKIYTIRPVRHHNRQLHKAAILKGGIRKSNQAGKYVFGYRLFDKVQFNGQDCFIWGRRTTGIFTIKTINGKMIKDGISFKKLKPVEKSTSYLIA

SEQ ID NO: 21792 - protein, 408 aa, unidentified; identical to SEQ ID NO: 11651
  REGION 1..408: note = Human gut metagenome

SEQ ID NO: 21793 - protein, 405 aa, unidentified
  REGION 1..405: note = Marine metagenome
LLKKGKASVYRRFPFTIILNERVGGSTQPTELKYDPGSKTTGISLVVHGKTASRVVWAGELTHRSWNIIEALNTRRNVRKFRRYRKTRYRQPRFLNRTRKDKWLPPSIQSRVDNIVTTTRKLKVFAPLSLLACEVVKFDTQKLRNPEIDGAEYQRGTLFGFELWEYLLVKWNHSCAYCNAKNTPLEKEHVVAKSKGGSNSVTNLVVSCRPCNEKKGNKSIEEFLKKKPSVLKKIKLQLKAPLKDAASMNATRYAIARELEIFNLPVNYGTGGQTKYNRTNQGYRKEHWIDASCATSTGENIQILDTMTPLIIKAVGRGSRKMCQTDGYGFPSSKPKAVKRIKGFQTNDIVKAIVTKGKKKGVYVGKVSIRSTGRFNIKTKQGTIQGINHRYCNLLQRIDGYEYHT

SEQ ID NO: 21794 - protein, 460 aa, unidentified; identical to SEQ ID NO: 8636
  REGION 1..460: note = Human gut metagenome

SEQ ID NO: 21795 - protein, 412 aa, unidentified; identical to SEQ ID NO: 4932
  REGION 1..412: note = Human gut metagenome

SEQ ID NO: 21796 - protein, 417 aa, unidentified; identical to SEQ ID NO: 17640
  REGION 1..417: note = Human gut metagenome

SEQ ID NO: 21797 - protein, 431 aa, Moorena sp.
MRVFVLNKNRQPLDPCKPARARILLSAGKAKVYRRYPFTIILAEEVKRPITHEHQLKIDPGAKTSGLAIVQGKRVIWGSELTHRGFQIREALISRRQLRRSRRNRKTRYRKPRFLNRTRPKGWLAPSLTSRVQNILTWVKKLSRFCPVTGISQELVRFDTQKLQNPEISGIEYQQGTLYGYELREYLLEKWNRKCAYCGVTGTQLEVEHIKPLSKGGSNRVSNLAIGRRPRYANACRPCNQAKSNQDIELFLSKKPSILKRILSQAKRPLADAASVNTTRWKLYHDIKSIGLPVEVGSGGLTKFNRCRQSLPKTHWLDAANVGKVETLIVEVTLPLVITAKGHGTRQLCRTNKYGFPTRHCSRIKFHKGFQTGDIVRAVVTKGKKIGTYVGRVATRKSGSFNISTKSGLVQGISHKYCKFIHRKDGYAYTN

SEQ ID NO: 21798 - protein, 414 aa, unidentified
  REGION 1..414: note = Human gut metagenome
MPCSPAKARLLLKEKKAIVVRRTPFTIQLTIATGEAKQPVSLGVDAGYKHVGLSASTEKAELYASEVELRQDITDLLSARRALRQSRRNCKTRYRAPRFDNRIRTKRKGWLAPSVENRINAHLSRIEAVLRLLPVTKITVETASFDMQLLKNPDISGKEYQEGEQLGFWNIREYVLCRDGHVCQHCYGRSKDPVLNVHHLESRRTGGDSPGNLITLCETCHKALHRGEITLKAKRGQSFRAEAFMGIMRWEVLNRLKASHPELEVNNTYGYRTKHARIANDIAKSHCADAFCIAGNLGAERLGEFFFQKQTRRNNRQIHKLSILKGGIRKRNQAPFEVNGFRLFDKVACKGEEGFIFGRRSSGFFDVRKLDGTRISAGISYKKLHLLEKRRTYLTEIRKEEALPPLPEGRGLRA

SEQ ID NO: 21799 - protein, 462 aa, unidentified; identical to SEQ ID NO: 9356
  REGION 1..462: note = Human gut metagenome

SEQ ID NO: 21800 - protein, 430 aa, unidentified
  REGION 1..430: note = Human gut metagenome
LETRNKEVPKLMQDRKKARRARRTNGRRCRRQRRAKANGTISKKCVKQDTAQSKNPSKRAKEIGIIKRRLPGYKKDVLCIGIKNKEAKYTNRTRPEGWLTPTANQLLQTHINLVRKMQKFLPISDVVLEVNKFAFMRLDNPDIQKWQYQQGPLYQKGSLENAVSEMQEHHCLFCDKPIDHYHHVVPQSENGSNTIANIVGLCAEHHNLVHKDAAWQKKLAEEKVGLNKKYGALSVLNQIIPALTNKLSVLFPKHFFVTAGKSTHDYRAAHGVSKDHWLDAYCIACSVLPSNVCDSNINNHMPYELKQFRRHDRRVLNNENMNRVYTLDNKAVAINRHKATEQEAASLEEFRKEHPNDVCKLKVKEHHPTYRNMNRNYPGSIFLVGKHVHIMQGIAGSKDGKATTYKDSNANSITASKCKFVAKISGILFV

SEQ ID NO: 21801 - protein, 408 aa, unidentified
  REGION 1..408: note = hot springs metagenome
MVYVLSKNGKPLMPTKRYGKVRRLLKQKLARVVRREPFTIQLLYDTTEYTQDVVVGVDIGSKTVGISAVSEKEELFSAEITLRTDVKGLLLDRRAYRKNRRYRKRRYRKPRFLNRRRPNAWLPPSIKWKVNAHLRIINFLSKILPISKIVVEIAPFDIHKIINPNVNGKEYQEGVQKGFWDVREYCLWRAGYRSEISGKQGILEVHHIIPRSQGGTDNPSNLIVLTLEEHKAIHKGKLKIPKSKLEKIKILKDASHVSVIGWYIVNKLKEKYNVEITYGSITKAKRMEIGLEKAHRNDAFVIASGNKNIKRLNYWYIGRFFRRQNRSLHKAKPIKGGKRPVNTIKQAYGFRRFDKVEYQKRDYLILGLRSSGYFLIGSITGEKMHDSVKYNKLKLLESAKTLMFERKI

SEQ ID NO: 21802 - protein, 470 aa, unidentified; identical to SEQ ID NO: 2925
  REGION 1..470: note = Human gut metagenome

SEQ ID NO: 21803 - protein, 436 aa, unidentified
  REGION 1..436: note = Human metagenome
MTKTLTKQTTQACVLDQQGKPLMPTTRLGKVYRLLKTQKAHIVSHEPFTIQLNYEPDTHIIQPMTLGVDSGAIHSGYSVTNENREYYSAEVIARDNISKRLLNRRMYRKNRRSRKTRYRKPRFKNRKNEKKGWLPPSLKQKVTVQLKEIDHLHHHFPIETIIVEVAEFDIQKIKNPDISGIEYQQGTLQGYNIRNYLLEKHGRKCFYCEKTVSKFEVEHMIPKTRGGSNRIDNLTLSCHECNQKKDTLTAEEFIKQILPAKKATAKLKQLPNEKRLFKYMAHMNATRWSLYNTIKEKYANVKMTYGYITKYNRIQAGLPKAHHIDAKCITGFTTVPSIDQTVVKIKMRRHNRQLHQLTFSKGHVRKAASLPTIIFGFQLYDLVLFNNHRYYIKSRRSSGSFDLVSIEGLKDTNRSYKKLTLLAHTNAYLTNRYTNE

SEQ ID NO: 21804 - protein, 429 aa, Parasutterella sp.; identical to SEQ ID NO: 3656

SEQ ID NO: 21805 - protein, 465 aa, unidentified
  REGION 1..465: note = Human gut metagenome
MSTCVCVLSNSGERLMPTFRLGKVRRLLKDGKAKIVKHHPFTIQLLYDSKANTQPIEICEDVGYNYIGISVKSQSHEYVSAQYDTLQDEKACHDSCRKLRRTRRNRLRYRKPRFDNRKRGEGWLAPSLRHKKELNVNVVKMYCAVMPITHATIEVGSFDTMLVKAIQEGKAIPEGADYQKGPRYNLATLREAVFYRDNYICKVCGRKATEGAILHMHHMFYWKGRHGNSLSELITVCEKCHTPANHQKSGKLYGFGENVKFADLSGAAFMNTVRWQIVNELYAAFGKDFVTVTYGAMTKEKRIALHLEKSHNNDAYAMGSFHPVNRCAFEHYEKVKRNNRILEKFYDSQYIDTRTGELTNGKSLFNGRISRSHKKDSENLHKYRGKRICKGHRALRRKKLALNPGDLVSLNGEILVVHGTHTKKNGSVNVEFKTPSRGGKKSASLKKLKIVKTSNLMHSAWTKVS

SEQ ID NO: 21806 - protein, 426 aa, unidentified
  REGION 1..426: note = Anaerobic digester metagenome
MVFVLDTNKKPLSPCHEAVARKLLKQGKAAIFRRYPFTIILKKAVEDIKNKQEYRLKIDYGSKHTGLAILQNNNVIWLAQIGHRTDIKKKLDDRRMFRRNRRNRRTRYRKPRFLNRKRKEGWIPPSLESRVNNVKTWVKRLQKLVPLTHISYENVKFDTQLMQNPEISGIEYQQGTLQGYEIREYLLEKFGRKCCYCSKENIPLEIEHIIPKSRGGTNRVDNLCLSCRECNQKKGNMTAEEFGYPNVQRQVKQSLKDSSVVNSTRWKVYDVLCNSGLEVECGTGALTKMNRIKLGLPKEHYFDACCVGQSTPDKLYFKTKDVLYIKAKGRGSHCRTNLDKYGFPRGYLARQKYFFGFQTGDMVKAEIPKGKYKGIWYGEVACRKSGSFDIKDKEGQRVVQGVNHKYFSVVQHFDGYSYRKEVANLI

SEQ ID NO: 21807 - protein, 432 aa, Moorena sp.
MQPTKQQNWVFQINGDKQPLDMIHPGRCRELQNRGKLASFRRFPYVVIQQQTIESLQTKEYILKIDPGSQWTGFAIQCGDNILFRAELNHRGESIKFDLVKRAWFRRGRRSRNLRYRKKRLNRAKPEGWLAPSIRHRVLTVETWIKRFMRYCPIAWIEIEQVRFDTQKLANPEIDGVEYQQGELQGYEVREYLLQKWGRKCDYCGTENVPLEVEHIQSKSKGGSSRIGNLTLACHVCNVKKGNLDVRDFLAKSPDILNQVLENSTKPLKDAAAVNSTRYAIVKMAKSICENVKCSSGARTKMNRVRQGLEKTHSLDAACVGESGASIRVLTDRPLLITCKGHGSRQSIRVNASGFPAVKNAKTVFTHIAAGDVVRFTIGKDRKKAQAGTYTARVKTPTPKGFEVLIDGARISLSTMSNVVFVHRSDGYGYEL

SEQ ID NO: 21808 - protein, 442 aa, unidentified; identical to SEQ ID NO: 16323
  REGION 1..442: note = Human metagenome

SEQ ID NO: 21809 - protein, 406 aa, unidentified; identical to SEQ ID NO: 5685
  REGION 1..406: note = Human gut metagenome

SEQ ID NO: 21810 - protein, 489 aa, unidentified
  REGION 1..489: note = Human gut metagenome
VTDVSTIYVLNKDGKPLMPTTRCGHVRYLLKEKKARVAASKPFTIQLLYETNDVVQPLYLGIDPGRTNIGVAVVKTDGTAVFTAHLETRNKEIPKLMQGRKKARRARRTNGRRCRRQRRAKANGTISKKCVKQTTAQNGSVSKRAKGIGVIKRHLPGCEKDVLCIGIKNKEAKFSNRTKSEGWLTPTANQLLQTHINLVKKIRKFLPISDVVLEINKFAFMQLDNPNVQKWQYQQGPLYQKANLEEAVSEMQEHHCLFCKKPIAHYHHVVPQSENGSNTIGNIVGLCTKHHDLVHKDTAWQKKLAKKKTGLNKKYGALSVLNQIIPALTKELGSLFPKHFFATNGKSTYDYRAAHGVRKDHWLDAYCIACSVLPNDVCDKNINSRVLYELKQFRRHDRRALNNENMSRVYTLNENVVATNRHKATKQTTDSLEEFRQNHPDDACKLKVKEHHPTYRNMSRNYPGSVFLVGNQVHVMQGVAGSKDGKATT

SEQ ID NO: 21811 - protein, 470 aa, unidentified; identical to SEQ ID NO: 2825
  REGION 1..470: note = Human gut metagenome

SEQ ID NO: 21812 - protein, 420 aa, unidentified; identical to SEQ ID NO: 19265
  REGION 1..420: note = Human gut metagenome

SEQ ID NO: 21813 - protein, 470 aa, unidentified
  REGION 1..470: note = Human gut metagenome
MSVFVVGLNGCRLMPVSERKARLLLKGGKASVYRKVPFTIKLNYKTGSTVQPGYLGIDTGSQHIGVSVVRQDGTVLHKEEIGLRDSMSKRKLLESRASLRRGRRYRKTRYRHPKWKPKTKRIYNEKADRKGRHWKKQKNTFTSKRQAGWLPPSLQSKTDHHIQWIRKLLHLLPEGYRLSIELGRFDPARMKDPGIHGELYQKGPQYDYENVRAYVLARDGYTCRVCKKKGGKLHVHHILYRSRGASDDPKYMAAVCSNCHTTENHLPGGILYQWMQDQKKFTRGLRDATFMNILKKRLRRAFPDAVFTYGNITKADREKLGLPKSHGNDATAIALVKTGVTSVRDEEPVIHIQQVRRKKRSLHEETPRKGRKEPNRTASRNDKNTRSVTVSKGSREKKVSMTACLFDRVELDGKKGWITGFTGTSCYVKDKEDNYICTSPKYKQVSISRLRILHHCGNWAIGAEKPLGKG

SEQ ID NO: 21814 - protein, 426 aa, Moorena sp.; identical to SEQ ID NO: 13414

SEQ ID NO: 21815 - protein, 470 aa, unidentified; identical to SEQ ID NO: 2825
  REGION 1..470: note = Human gut metagenome

SEQ ID NO: 21816 - protein, 470 aa, unidentified; identical to SEQ ID NO: 12303
  REGION 1..470: note = Human gut metagenome

SEQ ID NO: 21817 - protein, 330 aa, unidentified
  REGION 1..330: note = Human gut metagenome
LRVFVLNKRGKPLMPCSPAKARLLLKEKKAAVVRRTPFTIQLTIATGESKQSVSLGVDAGYKHVGLSASTEKAELYASEVELRQDISDLLSARRALRQSRRNRKTRYRAPRFDNRIRTKRKGWLAPSVENRINAHLSRIETILRLLPVTKITVETASFDMQLLKNPDISGKEYQEGDQLGFWNVREYVLFRDGHVCQHCHGRSEDPVLNVHHLESRRTGGDSPSNLITLCETCHKALHRGEITLKAKRGQSFRAEAFMGIMRREVLNRLKASHPELEVHNTYGYRTKHARIANGIDKSHCTDAFCIAGNLGAKRLGEFLFLSLIHISEPT

SEQ ID NO: 21818 - protein, 442 aa, unidentified; identical to SEQ ID NO: 3234
  REGION 1..442: note = Human gut metagenome

SEQ ID NO: 21819 - protein, 433 aa, Microcystis sp.; identical to SEQ ID NO: 6520

SEQ ID NO: 21820 - protein, 408 aa, unidentified
  REGION 1..408: note = Human gut metagenome
MVYVQDIDGKPMMPTTRHGKVRRLLKANKATVVNLCPFTIRLTYATSGYKQEIVLGVDAGTKHVGLSATTKSKELYSSEVILRSDIVELLSTRRELRRTRRNRLRYRKPRFGNRVKSKHHGWVAPSVRHKIDAHIRVIDNICSTLPISRIIVEIAQFDTQKIKNPDISGNEYQEGDQLGFWNVREYVLARDGHKCQHCKGKSKDPILNVHHIESRKTGGDSPSNLITLCETCHKEYHKGNIDLKVKRGKSLRDAAVMGIMKWKLYEELKSRYPNVSMTFGYITKYNRIKYGIEKYHISDAFVISKNFNALRLEYHYKVRLVRRHNRQVHKQKVLKGGAKKPNQSPFEVFGFRLFDRVMFEGNYYFIFGRRKSGSFNIRDINGGNQRNVTYKKLKLSIGKRFMIQKEMN

SEQ ID NO: 21821 - protein, 417 aa, unidentified
  REGION 1..417: note = metagenome
MPCSPAKARLLLKERKAIVKRRTPFTIQLTIATGEAKQPVTLGVDSGYKHIGLSATTEKAELYASQVELRQDITDLLSARLALRRSRRSRETRYRAPRFNNRVASKHKGWLAPSVENRIAAHLSRVEAVMRVLPVTAITVETAVFDTQLLKTPDIAGAAYQQGEQLGFWNVREYVLFRDEHVCQHCRGKSKDSILNVHHIESRRTGGDAPNNLITLCETCHKAFHRGKIKLKVRRGKSFKAETFMGIMRWTLFERLKKAHPELNVRNTYGYLTKHKRISYGIAKSHCADAYCIADNLGAKRLEGFFFQKQTRKHNRQIHKLLILKGGLKKKNQAPYEVKGFRLFDKVICKGEEAFIFGRRTSGSFDVRRLDGTRISAGINYKKLRLLEPRTTYLTEFRKEAALPPLHECRGFRAEFL

SEQ ID NO: 21822 - protein, 422 aa, Deinococcus sp.; identical to SEQ ID NO: 19900

SEQ ID NO: 21823 - protein, 449 aa, unidentified
  REGION 1..449: note = metagenome
TNIGVAVVKTDGTAVFTAHLETRNKEIPKLMQGRKKARRARRTNGRRCRRQRRAKANGTISKKCVKQTTAQNGSVSKRAKKIGVIKRHLPGCEKKVLCIGIKNKEAKFSNRTRPEGWLTPTANQLLQTHINLIKKIRKFLPVNDVVLEINKFAFMQLDNPNIQKWQYQQGPLYQKASLEEAVSEMQEHHCLFCKKSIVHYHHVVPQSENGSDTIGNIVGLCTKHHDLVHKDTAWQKKLAKKKTGLNKKYGALSILNQIIPALTKELSSLFPKHFFATNGKSTHDYRAAHDVSKDHWLDAYCIACSILPNDTCDKNINGRVPYKLKQFRRHDRRALHKENMSRVYTLDGKKVATNRHKAIKQTTDSLEEFRQRQPNDVYKLKVKEHHPEYRNPKRNFPGCVFLVGKHTHVMQGTSGSHNGKADGYYDTNGNSYPSGKCKFVAKNKGIVFA

SEQ ID NO: 21824 - protein, 414 aa, unidentified
  REGION 1..414: note = Human gut metagenome
MPCSPAKARLLLKEKKAIVKRRTPFTIQLTIATGESKQPVSLGVDAGYKHVGLSASTEKAELYASEVELRQDITDLLSARRALRQSRRNRKTRYRAPRFDNRIRTKRKGWLAPSVENRINAHLSRIEAVLRLLPVTKITVETASFDLQLLKNPDISGKEYQEGEQLGFWNIREYVLCRDGHVCQHCYGRSKDPVLNVHHLESRRTGGDSPGNLITLCETCHKALHRGEITLKAKRGQSFRAEAFMGIMRWEVLNRLKASHPELEVNNTYGYRTKHARIANDIAKSHCADAFCIAGNLGAERLGEFFFQKQTRRNNRQIHKLSILKGGIRKRNQAPFEVNGFRLFDKVACKGEEGFIFGRRSSGYFDVRKLDGTCISAGISYKKLHLLEKRRTYLTEIRKEEVLPPLPEGRGLRA

SEQ ID NO: 21825 - protein, 413 aa, unidentified
  REGION 1..413: note = Human gut metagenome
MTNYAFVLDANGKQLAPTKEQKAWFLIRKKRATLVSKYPMVIQLKKEIPDEQIYKDEICCGIDDGGLHVGISLVQKCKTKNKVVFKGTMEQRKDVKHLMEVRKGYRRYHRFYKRYRQARFNNRKSSKRKERIAPSILQKRQATIRVINQLNKWINITNYWLEDVAIDIRALTDDYKAYRWQYQQSNLLDENIRKAVILRDGCKCMECGKSNCKLEVHHIKPRRLNGSNTLGNLISLCKKCHQKTEEQEEVYMNRYFSMLNSSDNKNLNYAQHVMIGKKWLREQLSKLGTLTLTTGGDTANKRIDWNIEKSHSNDAICITGLQPDTCNIKEWTIKPMRRQSKAKTDNVLGINHRDLVEYTFRNGETHRGYVTALYPGQNAINFQSSTKHCKKVNAKKCKLIWKYSKIYWLANVQ

SEQ ID NO: 21826 - protein, 431 aa, unidentified
  REGION 1..431: note = Human gut metagenome
MPNKVYVINKHGRPLMPCSPAKARHLLDEGKAKVKKRTPFTIQLIYGSSGYTQEVILGVDAGSKTIGMSVSTTKEELLSAEVKPRNDVVDLLSTRREFRRARRNRKTRYRKPRFDNRVRSKHRGWLAPSVEVKIQEHITSIKRVCRILPVSKVVVETAEFDLQLLKAIADGKPVPQGEDYQQGEMYGHYNVRQYVLWRDGYTCKCCGAHTTKKKEVRLHVHHLESRKVGGDAPDNQVTLCESCHEKLHKGLIAEKDFKKRKRKSTRDATFMGIMRKTLMQRLCSELPIPVVKTRGYITKATREKLLVLPKSHTNDALAIAQGKRGFNVGYLPEIAQIDKIYTIRPVRHHNRQLHKATILKGGIRKSNQTEKYVFGYRLFDKVQFNGQDCFIWGRRTTGIFTIKTINGKMIKDGISFKKLKPVEKSTGYLIA

SEQ ID NO: 21827 - protein, 426 aa, Parasutterella sp.; identical to SEQ ID NO: 3045

SEQ ID NO: 21828 - protein, 469 aa, Desulfobacter sp.; identical to SEQ ID NO: 2403

SEQ ID NO: 21829 - protein, 423 aa, Arthrospira sp.; identical to SEQ ID NO: 12407

SEQ ID NO: 21830 - protein, 514 aa, unidentified; identical to SEQ ID NO: 9930
  REGION 1..514: note = Human gut metagenome

SEQ ID NO: 21831 - protein, 414 aa, unidentified; identical to SEQ ID NO: 4924
  REGION 1..414: note = Human gut metagenome

SEQ ID NO: 21832 - protein, 427 aa, Phocaeicola sp.
LRVFVRNKRGKPLMPCSPAKARLLLKEKKAIVVRRTPFTIQLTIATGETKQPVSLGVDAGYKHVGLSASTEKAELYASEVELRQDITDLLSARRALRQSRRNRKTRYRAPRFDNRIRTKRKGWLAPSVENRINAHLSRIETVLRLLPVTKITVETASFDLQLLKNPDISGKEYQEGEQLGFWNIREYVLCRDGHVCQHCYGRSKDPVLNVHHLKSRRTGGDSPGNLITLCETCHKALHRGEITLKAKRGQSFRAEAFMGIMRWEVLNRLKASHPELEVNNTYGYRTKHARIANGIAKSHCADAFCIAGNLGAERLGEFFFQKQTRRNNRQIHKLSILKGGIRKRNQAPFEVNGFRLFDKVACQGEEGFIFGRRSSGFFDVRKLDGTRISAGISCKKLHLLEKRRTYLTEIRKEEALPPLPEGRGLRA

SEQ ID NO: 21833 - protein, 396 aa, unidentified
  REGION 1..396: note = Human gut metagenome
VVRRTPFTIQLTIATGEAKQPVSLGVDAGYKHVGLSASTEKAELYASEVELRQDVSDLLSARRALRQSRRSRNTRYRAPRFDIRIRTKRKGWLAPTVENRINVHLSRIETVLRLLPVTKITVETASFDTQLLKNPDIAGKEYQEGEQLSFWNVREYVLFRDGHVCQHCHGRSKDPVLNVHHLESRRTGGDSPGNLITLCETCHKALHRGEIKLKAKRGRSFRAETFMGIMRWGVLNRLKASHPKLEVHNTYGYRTKHARIANGIAKSHCADAFCIAGNFGAKRLGEFFFQKQTRRNNRQIHKLSILKGGIRKRNQAPFEVKGFRLFDKVACQGEEGFIFGRRSTGYFDVRKLDGTCISAGISYKKLHLLEKRRTYLTEIRKEEALPPPPEGRGLRA

SEQ ID NO: 21834 - protein, 414 aa, unidentified
  REGION 1..414: note = Human gut metagenome
MPCSPAKARLLLKEKKAIVVRRTPFTIQLTIATGESEQPVSLGVDAGYKHVGLSASTEKAELYASEVELRKDITDLLSARRALRQSRRNRKTRYRAPRFDNRIRTKRKGWLAPSVENRINAHLSRIEAVLRLLPITKITVETASFDMQRLKNPDISGKEYQEGEQLGFWNVREYVLFRDGHVCRHCHGRSKDPELNVHHLESRRTGSDSPDNLITLCETCHKALHRGEITLKAKRGQSFRAQAFMGIMRREVLNRLKASYPELKVHETYGYLTKHARIANGIVKSHGADAFCIAGNLGAERLGEFFFQKQTRRNNRQIHKLSILKGGIRKRNQAPFEAKGFRLFDKVACQGEEGFIFGRRSSGSFDVRKLDGTRISAGISCKKLRLLEKRRTYLTEIRKEEALPPLPEGRGLRA

SEQ ID NO: 21835 - protein, 428 aa, Moorena sp.
MQNYVLVIDTDKQPLNPISPKKARRLLDKGKAAVFRMYPFTIILKAAIANPTISPCQIKIDPGSKVTGFALVQDDQVIWGMELEHRGGLIKKKLESRSGVRGGRRNRNTRYRKPRFLNRKRPEGWIPPSLEHRVLTIETWVRRLTKFCPVNEIWIEIVKFDTQKMQDPEINGVEYQQGELAGYEVREYLLEKWGRECAYCGKQNIPLQIEHIHPKSKGGSDSAKPTLRERVSNLCLACEKCNQRKGNRPIEEFLKKKPDLLQKIKNKALSPLRDAAAVNTTRNKVVKVLKEIKPVLTGTGAQTKYNRTKLGLPKQHWIDAACVGDVEALVLRTYQPLVVTCKGQGGRQKAALNKYGYPIRHNPLKPIKGWSSGDIAKNLLTGEFGRVNPRSKSNSFNYTVPGKKAISLHVKNLLRVHRKDGYTYGFSR

SEQ ID NO: 21836 - protein, 424 aa, unidentified
  REGION 1..424: note = Human gut metagenome
MVHVISKDGNPLMSCCNVIARLLLKQGKAQVKKREPFTIKLNYETTNYLQNLTLGVDTGSRTIGTAVSNDNGDILYMSEVVVRNDITEKMTQRAKYRRNRRNRKTRYRKARWLNRANSIKNDRFSPTMRSKLYSHVKEIECIKSILPITQMVFETGQFDTHLMKNPSLANPRIRRWGYQKGPNYGYENTKAMVLNRDNYTCQCCKGKHKDSKLEIHHIVFRSKGGSDEASNLITLCHTCHKDLHSGKINPKLKGRIKGNLKFATQMNTIRKQLFRLYPNAIETFGYITKANRLQLGVNKEHYYDACTIATQGNRFTIKSNLYKKKCISDGDFQQTKGICSKQPIVTNKIHGFRKFDKVRYLGKNYFIKGRMSTGYAVLMDINGKKADFSNMPKGFKTPKMANFKRIEARTTWMTTTVVLTSNIA

SEQ ID NO: 21837 - protein, 472 aa, unidentified; identical to SEQ ID NO: 8020
  REGION 1..472: note = Human gut metagenome

SEQ ID NO: 21838 - protein, 297 aa, unidentified
  REGION 1..297: note = Human gut metagenome
QEHITAIRRVCGILPVSKVVVETAEFDLQLLKAIADGKPVPQGEDYQKGEMYGHYNVRQYVLWRDNYTCQCCGTHPSKKKEVRLHVHHLESRKVGGDAPDNQVTLCESCHEKLHKGLIAEKDFKKRKRKSTRDATFMGIMRKTLMQRLCSELPIPVIETRGYITKATREKLLVLPKSHTNDALAIAQGKRGFNVGYLPEIAQIDKIYTIRPVRHHNRQLHKATILKGGIRKSNQTEKYVFGYCLFDKVQFNGQDCFIWGRRTTGIFTIKTINGKMIKDGISFKKLKPVEKSTGYLIA

SEQ ID NO: 21839 - protein, 420 aa, unidentified; identical to SEQ ID NO: 3504
  REGION 1..420: note = Human gut metagenome

SEQ ID NO: 21840 - protein, 426 aa, unidentified; identical to SEQ ID NO: 3614
  REGION 1..426: note = Human gut metagenome

SEQ ID NO: 21841 - protein, 518 aa, unidentified; identical to SEQ ID NO: 3878
  REGION 1..518: note = Human gut metagenome

SEQ ID NO: 21842 - protein, 441 aa, unidentified; identical to SEQ ID NO: 17939
  REGION 1..441: note = Marine metagenome

SEQ ID NO: 21843 - protein, 405 aa, unidentified
  REGION 1..405: note = Human gut metagenome
MENRIEYCFVVDKNNRPLTPTKVNKGWYLVRKSRAKLKSKYPMVIQLEKEVKSDEDDESHIVCGIDDGSAHVGLAIVQKCPTKNKVVFKGTIEQRQDVKHLMDVRRGHRRYHRYHKRYRQARFNNRSSSKRTCRLAPSIKQKKDAILRVLYQLNKWVNIQEYHLEDVCIDIRALTDDYKPYRWQYQKSNRLDENLRKATILRDECRCQECGKSNCVLEVHHIRARKYGGADTIGNLITLCSGCHQKTEGRERDFEDRYFNMIKSKPKRFDYAMHVMQGKTYLREKISELGSLHLTNGGETANKRIEWNMEKSHGNDAICVTDCIPDNCDVKEWIIKPMRRKSKAKTNNLLGIRHRDLVSYTYKNGETHTGYVTALYPEQLVLNFQSKTKHCKKVNARKCRLLCKF

SEQ ID NO: 21844 - protein, 447 aa, unidentified; identical to SEQ ID NO: 8397
  REGION 1..447: note = Human gut metagenome

SEQ ID NO: 21845 - protein, 438 aa, Clostridium sp.; identical to SEQ ID NO: 4933

SEQ ID NO: 21846 - protein, 426 aa, unidentified
  REGION 1..426: note = Human gut metagenome
MVYVQDINGKPLMPTTRHGKVRRLLKENKAVVVNLCPFTIKLMYVTSDYKQEIVLGVDAGTKHVGLSATTKSKELYSSEVILRNDIVDLLSTRRELRRARRNRLRYRKPRFNNRIKSKRPGWIAPSVKYKIDAHIRVVENVCSILPISRIVIEVAQFDTQKIKNPNISGKEYQEGDQLGFWNTREYVLARDGHKCQYCKGKSKDKILNVHHIESRKTGGDSPSNLITLCETCHKEYHKGNIDLKIRRGKSLCDAAVMGIMKWRLYEELKSKYDNISMTFGYVTKYNRINHDIEKSHVSDAFVISKNFNAIRLGYYYKVRLVRRHNRQIHKQKIQKGGIKRLNQSPFEVFGFRLFDRVMFENSYYFIFGRRKTGSFDIRYIDGKNQKNVTYKKLKLSRCKRFMIQMELNKKTRTCFENEGNSDRDAA

SEQ ID NO: 21847 - protein, 391 aa, Methanobrevibacter sp.; identical to SEQ ID NO: 13532

SEQ ID NO: 21848 - protein, 417 aa, unidentified
  REGION 1..417: note = IscB polypeptide
MEVYVLNKEGQPLMPTRPVIARLLLKEGKAKCIRRTPFTIKLLVDTTEYKQEVVAGMDTGSKTIGCAAIANGKVVYQSEVQIRQDVSKKMEQRKMYRRNRRGRKTRYRKARWQNRASMREEGRLAPSIKSKVDSHLREKKFVESILPVSTFKVETASFDIHKISNPDVGKWQYQKGQQKDFYNVKAYVLHRDGYQCQKCKTKKGKLHVHHVVFKSNGGTNSPDNLIVLCSDCHDKLHKGEFEIKGTRSKTKHATEVGIVKSQLKKQFGNFEETFGYETKYKREQILGLPKTHYFDAVAICCEESEIVELSDSVHFKKHVAKGDYQQTKGSRSEKKIPTGKLFGLRKFDYIKTPNGIGFVKGKRSTGFFAISDLEGKIINPSVNVKKNCKRLSARTTTLTERRQAHSSAGQARAVSCA

SEQ ID NO: 21849 - protein, 264 aa, Moorena sp.; identical to SEQ ID NO: 20057

SEQ ID NO: 21850 - protein, 420 aa, unidentified; identical to SEQ ID NO: 4570
  REGION 1..420: note = Human gut metagenome

SEQ ID NO: 21851 - protein, 432 aa, Lactobacillus sp.; identical to SEQ ID NO: 6011

SEQ ID NO: 21852 - protein, 363 aa, unidentified
  REGION 1..363: note = Human gut metagenome
LSKVKTMRVFVFNMRGRPLMPCSQRKARLLLRENKAKIYKYHPFTIQLTYTTGETKQDCHIGIDTGSKYIGAAVRSEDKVFWKGEIELRQDIRSNLDTKRIYRRSRRNRKTRYRKPRFLNRKRRDEWLPPSLQSRINHTFHWIDTLSSLVPNPILHIEVGKFDVAKMINPEIHGVDYQHGQTYGFFDERYFVFARDNYTCQCCGKSKNKILNTHHIIYRSNGGTNRVDNLITVCTDCHTSQNHRKGGIFYQWQEQHKKVKQYKEPPFMNTLRKRIFVAYPDAEITYGSETTPKRKAMKLDKTHYNDAIVISGINEIKENPEEWLLIKQFRKKKRSLHEATARKGRKKPNRNQTRNSKNTPYYK

SEQ ID NO: 21853 - protein, 442 aa, unidentified; identical to SEQ ID NO: 2807
  REGION 1..442: note = Human gut metagenome

SEQ ID NO: 21854 - protein, 431 aa, unidentified
  REGION 1..431: note = Human gut metagenome
MDAWDIIVVLNKRGKPLMPCSPAKARLLLKEKKAIVKRRTPFTIQLTIATGETKQPVSLGVDAGYKHVGLSASTEKAELYASEVELRQDITDLLSARRALRQSRRNRKTRYRAPRFDNRIRTKRKGWLAPSVENRINAHLSRIKAVLRLLPITKITVETASFDMQRLKNPDISGKEYQEGEQLGFWNVREYVLFRDGHVCRHCHGRSKDPVLNVHHLESRRPGSDSPDNLITLCVTCHKALHRGEITLKAKRGQSFRAQAFMGIMRREVLNRLKASYPELKVHETYGYLTKHARIANGIVKSHGADAFCIAGNLGAERLGEFFFQKQTRRNNRQIHKLSILKGGIRKRNQAPFEAKGFRLFDKVACQGEEGFIFGRRSSGSFDVRKLDGTRISAGISCKKLRLLEKRRTYLTEIRKEEALPPLPEGRGLRA

SEQ ID NO: 21855 - protein, 502 aa, unidentified
  REGION 1..502: note = compost metagenome
MLPQSAALEERDADTARERHETVPLPAGKPPKLPSHTVEGSGPDGPVTGPVRDERKEKKMAVFVLDRRKKPLMPCSEKRARLLLERGRARVHRLVPFTIRLVDRTQEESALQPLRVKLDPGSKTTGIAVVREAESADEETGEIQRQVHVLWLAQLVHRGQQISEALAARRAFRRRRRSANLRYRAARFLNRSKPKGWLAPSLRHRVETTLSWVRRLQRLAPISGISQELVRFDPQALENPEISGIEYQQGTLAGYEVREYLLEKWGRQCAYCGATDVPLQIEHIHPKARGGSDRVSNLTLACAPCNHAKGAQDVRVFLAKDPQRLARILEQAKRPLHDAAAVNSTRWSLFEALKATGLPVETGSGARTKFNRVRLGLPKTHALDAVCVGVTHTVFDWDRPTLQIKATGRGSYQRTRLDRFGFPRGYLTRQKRHFGFQTGDLVRAEVPKGKKAGTYVGRVAVRASGSFNIQTREDVIQGIAHRYCTLLQRADGYGYSWIKRAT

SEQ ID NO: 21856 - protein, 417 aa, Parasutterella sp.; identical to SEQ ID NO: 15435

SEQ ID NO: 21857 - protein, 390 aa, unidentified
  REGION 1..390: note = Human gut metagenome
MRGKPLMPCSPAKARHMLKAGKAVVVRRTPFTIKLTIATGETKQDVTLGVDAGARHVGISATTEKEEVFASEVALRQDITGLLADRLAFRRARRNRKTRYRSPRFNNRVRSKHKGWLASSVENRIQAHMSRIDAVCRLLPVTKIVIEAASFDVQKIKNPTIEGTDYQQGDQLGFWNVREYVLFRDGHVCQHCHGRSRDKILNVHHLESRKTGGDAPNNLITLCETCHKAYHAGKIKLKVKRGQSFRAEAFMGIMRWTLLDRVRKTHPKLPVENTYGYLTKHKRIALGLPKTHCADAFCIAGNLKALRRGDFLFQQQTRKHNRQIHRCSILKGGVRKLNQAPFLVKGFRLFDKVRIGGQIGFVFGRRVRGIFNIRRLDKTVIGKDINCKKN

SEQ ID NO: 21858 - protein, 502 aa, unidentified; identical to SEQ ID NO: 2616
  REGION 1..502: note = Human gut metagenome

SEQ ID NO: 21859 - protein, 420 aa, unidentified; identical to SEQ ID NO: 6017
  REGION 1..420: note = Human gut metagenome

SEQ ID NO: 21860 - protein, 406 aa, unidentified
  REGION 1..406: note = Human gut metagenome
LRVFVLNKRGKPLMPCSPAKARLLLKEKKAIVKRRTPFTIQLTIATGETKQPVGLGVDAGYKHVGLSASTDKAELYASQVELRQDITDLLSARRALRRARRNRKTRYRAPRFNNRIRTKRKGWLAPSVENRINAHLSRIEAVLRLLPVTKITVETASFDMLLLKNPDIAGKEYQEGEQLGFWNVREYVLFRDGHVCQHCYGRSKDPVLNVHHLESRRTGGDSPGNLITLCETCHEALHRGEIALKTKRGHSFRAEAFMGMMRWEVLNRLKASHSELEVNNTYGYRTKHARIVNGIDKSHCADAFCIAGNLGAERLCEFFFQKQTRRNNRQIHKLSILKGGIRKRNQAPFEIKGFRLFDKVACKGEESFIFGRRSSGYFDVRKLDGTRISAGISYKKLRLLEKRRTY

SEQ ID NO: 21861 - protein, 512 aa, unidentified
  REGION 1..512: note = Human gut metagenome
MSTVYVLNKDGKPLMPTTRGGHVRHLLKEQKARVVRTKPFTIQLLYETDDVVQLLYLGIDPGRTNIGVAVVKTDGTAVFTAHLETRNKEIPKLMKKRKESRCARRTNGRRCRRQRRAKANGTISKKCVKHDTAQNGSVSKRAKEIGVIKRHLPGCEKDVLCICIKNKEAKFSNRTRPEGWLTPTANQLLQTHINLVKKIQKFLPISDVVLEINKFAFMRLDNLNVQKWQYQQGPLYQKANLEETVSEMQEHHCLFCKKKIDHYHHVVPQHKNGSNTIDNIIGLCTQHHDLVHKDATWQKRLAKKKTGLNKKYGALSVLNQIIPALTKELSSLFPKHFFVTNGKSTYDYRAAHGVSKDHWLDAYCIACSVLPNDTCDKTINSRVPYELKQFRRHDRRALNNENMSRVYMFNGKMVATNRHKATEQTTDSLEEFRQRQPNDVCNLKVKEHHPTYRNINRNYPGSVFLVGNQVHVMQGIAGSKDGEATTYKDTNANSIAAGKCKFVAKNSGILFV

SEQ ID NO: 21862 - protein, 375 aa, unidentified
  REGION 1..375: note = Human gut metagenome
VSKRAKDIGVIKRRLPGCEKDVLCIGIKNKETKFTNRTRPEGWLTPTANQLLQTHINLVKKIQKFLPISDVVLEVNKFAFMRLDNPNIQKWQYQQGPLYKKESLESAVSEIQEHHCLFCKKPIDHYHHVVPQHKNGSNTIGNIVGLCAKHHDLVHKDSAWEKKLAQKSTGLNKKYGALGVLNQIIPTLTNELSSLFPKHSFVTNGKSTYDYRAAHGVSKDHWLDAYCIACSVLPSNVCDSNINNHMPYELKQFRRHDRRVLNNENMNRVYTLNNKAVAINRHKAKDQKTVSLEKFRKEHPDDVCKLKVKEHHPTYRNMNRNFPGSVFLVGKQIHVMQGIASSKDGKATKYNDTSATAIATGKCKFVAKNTGILFV

SEQ ID NO: 21863 - protein, 406 aa, unidentified
  REGION 1..406: note = IscB polypeptide
MLVYVLNKTGKPLMPCSPKKAKMLLKQGKAKVVNRTPFTIQLLFCGSGYKQEVILGVDAGSKMIGLSAVIEKKEVFSAEVQIRNDIVELLATRKQNRRIRRSRKVRYRQSRFLNRKRSIGWIAPSVENKISTHLRIIDKVHQILNITKIIVEVTSFDIQKIKKPTIEGVEYQQGEQLDFWNVREYVLFRDSHKCQGRKGCKNKELSVHHIESRKIGGDAPSNLITFCTKCHDDYHKGLLKLNLKRGKSFRDATFMGIMRWTLFNRLKDLYSNVSLTYGYITKNTRIVNSLPKEHRIDALCITRKPIVKRLENWLMVRQVRRHNRQIHKTKILKGGIKKLNQAPHIVKGFRLFDKVLFESSECFIFGRRSSGYFDLRTLGGVRIHASANVKNLKLVDTNKTLLWERK

SEQ ID NO: 21864 - protein, 448 aa, Deinococcus sp.; identical to SEQ ID NO: 14669

SEQ ID NO: 21865 - protein, 431 aa, unidentified
  REGION 1..431: note = Human gut metagenome
MPDKVYVISRLGHPLMPCSPAKARHLLDDKKAKVVKRTPFTIRLLYGSTKYIQPVILGVDAGSKTIGLSASTVKEELFAAEVMPRNDVVENLSTRRAFRRARRNRTTRYREPRSDNRVRSNHECWLAPSVKVKIQEHITSIKRVCTILPVSKVAIETAEFDLQLLKAIQDGKPIPEGEDYQKGEMYGSYNVRQYVLWRDNYTCTCCGVKGTDKKPVKLHVHHFESRKHGGNAPDNYGTLCEDCHKKFHLGIIIDEILKTRKRRSTRDAAFMGIMRKTLMQRLRTELSIPVAETKGYITKATREKLLVLPKSHTSDALAIAQGRHGFGIKAHTYVEPANHIYTVRPVRHHNRQLHKASILKSGIRKRNQASKYVFGFRLYDKVLYQGKACFVWGRRTSGSFLLRTIDGIKVKDGVSCRNLTLLERSSNYLIA

SEQ ID NO: 21866 - protein, 493 aa, unidentified
  REGION 1..493: note = Human gut metagenome
MAAVYVISASGKPLMPTTRCGHIRGLLNAGKARVVEREPFTIQLKYETPDVTQPLYLGIDPGRTNVGSAVVREDGECVFTAQLTTRNKDVPKLMKARKQFRMAHRRLKRRCKRQRRAKAAETLSQKGEFQRQLPGYEESILCKGIRNKEARFNNRQRPAGWLTPTANHLLLTHLNMVKKLQKLLPITDVVLEVNRFAFMAMENPSIRRWQYQQGPLYGKGSVEDAVYAQQDGHCLFCGKPIAHYHHVVPQHKNGSETLENRVGLCNEHHDLVHKDRAWDAKMKETKAGLNKKYHALSVLNQIIPALTEQLTAMFPQHAFVTTGKDTADFREDYGIAKEHHLDAYCIACSVLAEPTKVAAPTGKPHRLMQFRRHDRQVCHKENIKRVYLSEGKAVATNRHKAIEQKDDSLEEFRKTHTQQEVSALTVKDHQPVYKDMRRFMPGGVFLFNGKVHTLQRSHGRYKGMPFYYIDTDGSKNHAKGCIFLQQNCGLRWV

SEQ ID NO: 21867 - protein, 449 aa, unidentified
  REGION 1..449: note = Human oral metagenome
LATDNSPRFVGSRICFDRCENRNKEGGRTLVYVISKTGQPIMPTENHAKVRILLKSGKAKVVKRTPFTIQLTGTSKTFTQEVTLGVDAGSKHVGLSASTAKKELFSAELRPRNDVVDLMSSRRALRRSRRNRTMRYRQARFLNRVHFKHKWWLAPSVEVKIWNHIQGIRFVMKLLPVKTIRVETAEFDLQRLKALEAGEPVPVGTDYQLGEMYGQYNVRQYVLHRDGYTCQCCGAHGTDKKPVKLHVHHLETRKTGGDAPDNLITLCEDCHTGYHAGTVALPITKRRRKSTRDAAFMGIMRKTLLERLRNMFPDANICSTYGYITKYWREKKNIVKTHTSDAFVIAKNFDAERLDRSLLIVPKRQHNRQIHKCKINKGGMRKLNQTPKFVFGYQLFDRVMCMGQEGFVFARRSSGGFDIRKLSGEKIKPNINYKKLKRLESRNTLLVSY

SEQ ID NO: 21868 - protein, 424 aa, unidentified; identical to SEQ ID NO: 3351
  REGION 1..424: note = Human gut metagenome

SEQ ID NO: 21869 - protein, 442 aa, unidentified; identical to SEQ ID NO: 4522
  REGION 1..442: note = Human gut metagenome

SEQ ID NO: 21870 - protein, 419 aa, unidentified; identical to SEQ ID NO: 8011
  REGION 1..419: note = metagenome

SEQ ID NO: 21871 - protein, 507 aa, unidentified
  REGION 1..507: note = Human gut metagenome
MSEYIYVIGVDGDPQMPTKRKRHVEKLLQAGRARVFRQIPFTIQLTYENKPVLQPITIAEDPGRSNIGMAVVSLSGELLSAAVVQTRNKEIVKLMEKRKQHRRASRNGERKARQRLAKKCHTMIKAGSLMRKLPMYGKDKRVQCNVIRNTEARFCNRKREDGWLTPSAEHLVQTHINLIHKMQKFLPITDVAFEINRFAFLSLEDPSISGVDFQNGPLKGYDDLNAAIEDLQDGHCLMCNSPIEHRHHIVPRSMQGSNTIGNIAGLCCKCHERVHKDARFEDRLKKKKAGLNKRYAAVSALNQAIPFICKRLEQEFGKEHVHYCSGRDTSMVRRSFGYHKTKEEQLHEVDAWCIAVLSLRQIPEKAPEFDHVHELLQFRRQDRSRIKSQTSRAYYHEGKKIAKNRKKAEGQREDSLQEWRKQQVKRYGEEQTRKMISQLEIKKSIRRYNRLDRLMPGAVFYYQGIRYVMRGQHCEGTYLQAVGMGSKDFPAKKCKIVAHNEGLVFVS

SEQ ID NO: 21872 - protein, 408 aa, unidentified
  REGION 1..408: note = Human gut metagenome
LMPCSPGRARLLLKQQKACVVKRTPFTIKLLYGSAGYKQPVALGIDAGSKHVGLSASTEKRELYREEFTPRNDVVELLSTRRQNRRSRRNRKTRYRAPRFDNRVHSKHKGWLAPSVEVKIQEHITVIKRICRILPITLVRVETAEFDTQRLKAMLKGKPLPVGTDYQLGEMYDEYNVRQYVLKRDNYTCQCCGAHPTEKKPIRLHVHHIESRHVGGNAPNNLITLCVACHKALHEGKITLDKGKKRGKPLRDAAFMGIMRNTLLARLKDELNIPVKQTYGYITKLLREKNKIPKSHVNDARCIAKAPNAKPCDTMLYTRALRHHNRQIHKAKILKGGIRKKNQAPYLVKGFRLWDKVRYNGEECFITGRRSSGYFALKKYDGTVISNSASYKKLMLLEAATNYITERS

SEQ ID NO: 21873 - protein, 427 aa, Moorena sp.
VCKVFVLDTEKRHLDPIHSAQARQLLRNKKAAIYRRFPFTIILKESRPDSPVTPLRLKLDPGARTTGIALVNDTTGEVVFAAELKHRGFAIRDALTSRRQLRRGRRNRKTRYRKPRFLNRTRPLGWLAPSLQSRIENIKTWVEKLRKLAPITAISQELVKFDMQLMRNPDIEGKEYQQGTLAGYETREYLLEKWGRQCAYCGVKDVPLQIEHIHPRSKGGSNSITNLTLSCSKCNIKKGTKDIRDFLKKDPNKLQKILLQVKRPLTDAAAVNATRYALLEGLKATGLTVECGSGGLTKFNRSHQSLPKTHWIDAACVGKSTPILNIKGVKPLLITANGHGTRQMTGTDKFGFPNRHRSNKQIHFSFSTGDIVKAVVTSGKKIGEYVGRILCRATGSFDIATKLGRISGINYKYCLAIHKKDGYSYAF

SEQ ID NO: 21874 - protein, 420 aa, unidentified
  REGION 1..420: note = Human oral metagenome
MLVYVLKQNGQPFMPTSRFGKVRRLLKEGKAKVVRREPFTIKLLYEPETCVIQECYCGVDTGSKHVGVAVVGNDRVLYQSQTELRDDIKGKMDRRRAFRRNRRNRKTRYRKCRFLNRGISTKNGSLPPSVKHKVQAHIDEIEFCKKILPISDKNVILEVSQFDTTLLKNPSLISEKVKHWGYQKGFNYGHSSRRKAVLHRDNYTCQCCGKGDCRLEVHHIIFRCNGGTDDEENLITLCKDCHDGVHAGTVVLNTKPKKSKNLKHATHMSIIRSRLLKKYSEAIETFGFVTSENRNHLNLPKDHYIDACVIASGGLDFKKLDVIYYKRRVSKGEYQLTRKSCGKEFICKGKILGFKQLDKVEYFGIKCFINSRRSMGVATLVDIFENKLNFSNLPRGYRSPKMHLLRRLSSRRTVLTMSKI

SEQ ID NO: 21875 - protein, 472 aa, unidentified
  REGION 1..472: note = Human gut metagenome
VVGNRLLSIKPLINIGEGVIYSSICTGLSLQTYQKRKEVPCMVYVLDINGQPLMPTTRHGKVRRLLNSHLAKVVKRCPFTIQLLYQSTKEIQPVSLGVDAGSKHIGVVATTEKKVVYQEELSPRNDVVKLLSARRTLRRTRRNRKTRYRKPRFNNRVHSKHKGWLAPSVEVKIQEHITTIKRICQILPISEIQVETAEFDLQRLKAMEEGRTPPVGTDYQLGEQYDFYNTRQYVLHRDGYTCQCCGTHDNNIKLHVHHIESRQTGGDAPNNLIILCEHCHKALHEGKLELPKGKKRGKSYSDATFMDVMRKTLLERLKKEIDVPVEGTYGYITKYWRERAGLEKSHIHDAVCISQYPYAKPLDIYYLTKTVRHHNRQIHKSNFSKGGIRKRNQAPYLVKGFRLFDKVLYQGKEYFIFGRRATGYFDIRTLDGTKVNKGSISYKKLRIQDTAKAYLKEARAIPHMNKFTCVLA

SEQ ID NO: 21876 - protein, 420 aa, unidentified
  REGION 1..420: note = Human gut metagenome
MQYVYVLNKHGKPLMPCSPGKARLLLKQQKAHVVKRTPFTIKLLYGSAGYKQHITLGVDAGSKHVGLSASTEKLELYCEEFTPRNDVVDLLSTRRAFRRSRRNRKTRYREPRFDNRVHSKHKGWLAPSVEVKIQEHITVIKHICKILPISLVRVETAEFDTQRLKAMLAGKPLPVGTDYQLGEMYDEYNVRQYVLKRDHYTCQCCGTHNTAKKVVKLHVHHLESRKTGGNAPSNLVTLCTTCHKNLHKGRVTLDGKERGKPLRDAAFMGIMRKTLMVRLKEELPIPVQGTYGYITKMRREQNDIKKSHTNDARCISKHPLAEPCSVCYRTKAIRHHNRQTHKANFSKKGIRKRSQMPYLVEGFRLWDKVLYKGQECFVSGRRSSGSFALKKLDGTSISKGVTFKKLRLLEPATNYLIERM

SEQ ID NO: 21877 - protein, 450 aa, Moorena sp.; identical to SEQ ID NO: 2935

SEQ ID NO: 21878 - protein, 371 aa, unidentified
  REGION 1..371: note = gut metagenome
MVYVQDINGKPMMPTTRHGKVRRLLKDKKAVVVNLCPFTIKLMYVTSDYKQEIVLGVDAGTKHVGLSATTKSKELYSSEVILRNDIVDLLSTRRELRRTRRNRLRYRKPRFDNRVKSKRPGWVAPSVRYKIDAHIRVIDNVCSILPISRIVIEVAQFDTQKINNPNISGKEYQEGNKLGFWNVREYVLARDGHKCQYCKGKSKSKILNVHHIESRKTGGDSPSNLITLCEICHKEYHKGNIDLKIRRGKSLRDAAVMGIMKWRLYEELKSRYDRVFIERQYLKRLIRRHNRQIHKMKILKGGKKKNNQAPFEVFGFRLFDKVLYNNKIFFVYGRRKSGSFNVRDFNGENSKDVSRKKFKLIRGKRHPIILK

SEQ ID NO: 21879 - protein, 416 aa, unidentified
  REGION 1..416: note = Human metagenome
MPCSPAKARHLLDAGKAKVKKRTPFTIQLVYGSSGYTQEVILGVDDGSKTIGISVSTKKEEVFAADVTPRNDVVNLLSACREFRRARRNRKTRYRKSRFDNRVRSKRKGWLAPSVEVKIQEHITAIKMVCRILPVSKVVIETAEFDLQLLKAIADGKPVPQGEDYQKGEMYGHYNVRQYVLWRDNYTCQCCGAHATKKKEVRLHVHHLESRKVGGDAPDNQVTLCESCHEKLHKGLITEGDFKKRKRRSTRDATFMGIMRKTLMQRLCSELPIPVIETRGYITKATREKLLVLPKSHTNDALAIAQGKQGFNVGYLPGILQIDKIYTIRPVRHHNRQLHKAAILKGGIRKSNQAGKYVFGYRLFDKVQFNEQDCFIWGRRTTGIFTIKTINGKMIKDGISFKKLKLVEKSTGYLIA

SEQ ID NO: 21880 - protein, 223 aa, unidentified
  REGION 1..223: note = Human gut metagenome
MVYVLDKNGQPLMPTDRHRKVRLMLQSGQAKVIKRCPFTIQLNYDSGHQTQEISLGIDAGSKHIGVSATTKIKVLYEADVELRNDIVDLLSSRRELRRGRRNRKTRYRQAKFNNRRRGNGWLAPSIRQKIGTHLTVVENICKMLPISRIMVETASFDIQKIKNPDIQGAEYQQGDQLEFWNVREYVLFRDGHICQCCKGKSKDKILNVHHIESRKTGAMPRTI

SEQ ID NO: 21881 - protein, 415 aa, unidentified; identical to SEQ ID NO: 2674
  REGION 1..415: note = Human gut metagenome

SEQ ID NO: 21882 - protein, 420 aa, unidentified; identical to SEQ ID NO: 7360
  REGION 1..420: note = Human gut metagenome

SEQ ID NO: 21883 - protein, 420 aa, unidentified
  REGION 1..420: note = Human metagenome
MLVYVLKQNGQPFMPTARFGKIRRLLKTKKAKVVRREPFTIKLLYEPETDVVQECYCGVDTGSRHIGVAVVSNDKVLYQSQTELRNDIKRKMDARRAYRRNRRQRKTRYRKPRFLNRSNSTKSNRLPPSVKHKVQAHIDEIEFCKKILPVSDLIVEVSQFDTALMKDPSLISEKVKHWGYQQGFNYSYSSRREAILHRDNYTCQCCGKKNCRLEVHHVKFRSNGGTDDEENLLTLCEDCHKGVHAGTIVLNKKPKKSKNLKYATHMSIIRSYLLKKYPNAIETFGFVTSENRNHLKLKKDHYIDACVVASGGLEFKELDVIYRKRRVSVQDRVLTKGVRGEQKLPTGKIFGFKKFDKVEYLGETCFIKGRRSSGAFVLMDIDNNSIDFRDRGGEQNPSYKSIKRLNTRRNILCISRRIER

SEQ ID NO: 21884 - protein, 453 aa, unidentified
  REGION 1..453: note = Human gut metagenome
MTAVYVISADGQKLMPTLRNGKVRHLLKEGKAKICKYRPFTIQLTYDTPNQVQPIEIGMDSGYQHIGLSVKTEKKEIFSAEFTLLTDEKKRHDDCRKYRRTRRNRLRYRKPRWLNRTKTIPEGWLAPSLLHKAEAHIKLVKDICSVAPITNVTTEAGEFDPALLKAMHEGKEPPQGTDYQQGPLYFADSLRKAVFQRDNYTCKICHKSALKDKNVILKIHHALYWKNRHGNNLSELITVCDRCYTSANHAPNGKLYGLEPKVARLESAAYMNIVRWYIINTLKKELPNIQVNFCYGALTARKRKDLELEKSHTNDAFCIGNFLPSLRSVATEYFKKKRRNSRILEKFYDAKYIDIRDGKIKKGAELSTGRTNRSIPRNNENNLRKFRSEKKSKGRRQIRKTRYSFQQNDFVFYKKRLYKVIGMQNLGKYISLQGFKPVPISQVQLYKHANAWT

SEQ ID NO: 21885 - protein, 325 aa, unidentified
  REGION 1..325: note = Human gut metagenome
NENIKVWEYGKGKLYGYDSPEEYIHDVQNGKCLVCGKPHIDYLHHIIPRSKGGSDKVSNIAGLCYDCHYGPMGVHNCQNTQDRLPELKSEANKQYKVSLLNSVMPVLIEEMDKFCKANSIMFSICEGHDTAKVRDMYDLQKDHCIDGFAISLVDRNVKSVDVMPDRIYQKQRYKKKSKNIIQKRNCREYYDDKKLVAVNRHKGTDQKADSLEEYMNTYAETHTTDECKKHFDSLVVKPARRTYTFHKEWRICPFHIGDKVRYEKKNKIKGNTKVDTFICEGIRFVKDENKAEVKHNKTKSKKMKFCRVLESGCTPYVDYRKLALM

SEQ ID NO: 21886 - protein, 444 aa, unidentified; identical to SEQ ID NO: 13472
  REGION 1..444: note = Human gut metagenome

SEQ ID NO: 21887 - protein, 509 aa, unidentified; identical to SEQ ID NO: 9060
  REGION 1..509: note = Human gut metagenome

SEQ ID NO: 21888 - protein, 415 aa, unidentified; identical to SEQ ID NO: 11876
  REGION 1..415: note = Human gut metagenome

SEQ ID NO: 21889 - protein, 577 aa, unidentified
  REGION 1..577: note = Candidatus Poribacteria bacterium
MSKVSVLDTHKNVLEPCHPAVARCLLRKGEAAVFKRYPFTIILKREVPSPKTTDHTLSIDPGSKCTGMAITDSENNIIVCFELHHRGAAIKKGLSNRAGYRRSRRTRKLRHRPARWQNRSRKAPILTANGWQYQSFGQSSEGWIAPSLMSRVFNIYTWVSRLSKIYPITQLAVEHVKFDTQLMENPEISGVEYQRGTLFETEVWEYLLEKFKRKCYYCGAKNVPLEKEHILPKAKGGTNRVSNLTTSCRECNIKKGNRHPDEIQGDFGKRVQSALRAAKKPLKDAQAVNTIRWKIVETLKATGLPVTYGTGGKTKYNQTKAGLPKTHYYDAACIVGVPNAIECDSVLAIHAVGYGHRQDLGDFQTKAGLKDPYPKFKKPYKRIGHCEGIQRLDILEMKGKIGYLSDFRKTDEGKPQKLRIKHTWDGDGRIGGNITEVKRIQKRDGYAYQIIPIQKTKPKKDRVAPVITGRQLTMSWGDEAPDKGKQPFNTASIAEKNTKTGTLRVMNGTKGSGRTAPFTKPEKPCSALRFLFYHNAEPRIKRRFANGSQPIRPNLARRPSSHQHQVFLKRGETEIPK

SEQ ID NO: 21890 - protein, 413 aa, unidentified; identical to SEQ ID NO: 3023
  REGION 1..413: note = Human gut metagenome

SEQ ID NO: 21891 - protein, 417 aa, unidentified
  REGION 1..417: note = Human gut metagenome
MPCSPAKARLLLKERKAIVKRRTPFTIQLTIATGEAKQPVTLGVDSGYKHIGLSATTEKAELYASEVELRQDITDLLSARLALRRSRRSRKTRYRVPRFDNRVASKRKGWLAPSVENRITAHMSRVEAVMRVLPVTAITVETAAFDTQLLKNPDITGAAYQQGEQLGFWNVREYVLFRDGHVCQHCRGKSKDPILNVHHIESRRTGGDAPNNLITLCETCHKAFHRGEIKLKVRRGKSFKAETFMGIMRRTLFERLEKAHPELNVRNTYGYLTKHKRISYGIAKSHCADAYCIADNLGAKRLEGFFFQKQTRKHNRQIHKLLILKGGLKKKNQAPYEVKGFRLFDKVICKGEEAFIFGRRTSGSFDVRRLDGTRISAGINYKKLRLLEPRTTYLTEFRKEAALPPLHKCRGFCAEFL

SEQ ID NO: 21892 - protein, 443 aa, Anoxybacillus sp.; identical to SEQ ID NO: 4769

SEQ ID NO: 21893 - protein, 490 aa, unidentified
  REGION 1..490: note = Human gut metagenome
MNYVYVLDPDGKPMMPTTRFGKVRRMLRSGEAKAVTTRPFTIRLTYWPKTHETQPVVAGFDPGRTNICLCTVRDDGRPLYLAHCETRNKEIKNLMSDRKGHRQASRRGERLARKRIAKRLGTTVKGLLRRILPGCKEPLCLKDIINTEARFNNRLRPKGWLTPTARHLLLTHVNLLKQMQKILPVSGVVVEINRFAFMQLDNPGVKKKDIDFQHGQLFGFSGVREAVRLQQNGLCLCCKKREIEHYHHIIPRSKRGSDTLPNIAGLCKACHEKVHTSEEAAKKLASRKAGLTKKYGGTSVLNQIIPKLFDTLKEMFPGHTYATTGQTTKSFREEHGLLKDHMVDAYSIACSILENPVVSIPDAHYEIHQFRRHDRALIHHQTERTYYMDGKAVCKNRHKRFEQKGDSLEEFAKVHPDLVSKLTVKKSRRYYNDPGRILPGAIFIYEGKQYVLTGRSSGGKQYRAFGYGTRNFQAGKSKIVWQNTGLVYVG

SEQ ID NO: 21894 - protein, 435 aa, Moorena sp.; identical to SEQ ID NO: 21738

SEQ ID NO: 21895 - protein, 421 aa, unidentified
  REGION 1..421: note = Human metagenome
MVYILNKHNEPMMPCSERKARLLLKQGRAVIYRKDVFTIKLINGSYGYKQHITLGVDCGSKHIGVSATTDKQELFSANAELRNDVVKLLSDRRMLRRSRRFRKTRYRKPRFNNRIVKNGWIAPSIKQKIQSHFNLVGFLHKLLPISKIVIETASFDIQKINNPSISGSEYQQGEQLDFFNVREYVLFRDNHICQHCKGKSKDKVLNVHHIESRKTGGDSPNNLITLCETCHKAYHRGEFELNVKRGKSFRDSAFMGIMRWKLYDELKLRYDNVSMTFGYITKYKRIKLGLDKEHYNDAYCICGNLAAKMLSTHHFIRFIPRHSRVLHMHKFSKGGVRRSASASYWLNGGKPSKSGAMFTMFDKVKFNGIVCFISGSSNGYAALRDINWNKIDGCKTVVTVNKLLLISRKYGGFIVEKKIII

SEQ ID NO: 21896 - protein, 548 aa, unidentified
  REGION 1..548: note = Human gut metagenome
LFLQIPQAFGCLLRLSIFPVDSSAQVALSRTIPLTANTQPRETQPPVSAGETYSKRRVAYMPTVYVLNKDGKPLMPTTRCMHVRHLLKNGKARVVKSKPFTIQLLYETDDVVQPLYLGIDPGRTNIGVAVVKADGAAVFTAHLETRNKEVPKLMKKRKESRCARRTNGRRCRRQRRAKTNGTISKKCVKQTTAQNGSVSKRAKEIGVIKRHLPGCEKDVLCIGIKNKEAKFTNRARPEGWLTPTANQLLQTHINLVKKIQKFLPISDVVLEVNKFAFMQLDNPNIQKWQYQQGPLYQKGSLENAVSEMQEHHCLFCEKPIEHYHHVVPKSENGSNTIANIVGLCTEHHNLVHKDATWQKKLAKEKVGLVKKYSALSVLNQIISALTKEMNSLFPKHFFVTNGKSTYDYRTAHGVSKDHWLDAYCIACSVLPNDVCDSNINSHVPYELKQFRRHDRRVLHKANMSRVYTLNGKTVATNRHKAIKQTTDSLEEFRQSHPGDVCKLKVKEHHPAYRNLNRNYPGSVFLVDGQVHVMQGVSGSHNGKADGYY

SEQ ID NO: 21897 - protein, 423 aa, unidentified
  REGION 1..423: note = Human gut metagenome
LRVFVLNKRGKPLMPCSPAKARHLLKEKKAIVVRRTPFTIQLTIATGESKQPVSLGVDAGYKYVGLSASTEKAELYASEVELRQGITDLLSARRALRRARRNRKTRYRAPRFDNRIRTKRKGWLAPSVENRINAHLSRIETVLRMLPVTKITVETASFDMQLLKDPDISGKEYQEGEQLGFWNVREYVLFRDGHVCQHCHGRSKDPVLNVHHLESRRTGGDSPGNLITLCETCHKALHRGEITLKAKRGQSFRAETFMGIMRREVLDRLKASHPKLEVQNTYGYRTKHARISNGIAKSHCADAFCIAGNLGAKRLGEFLFQKQTRRNNRQIHKLSILKGSLRKRNQAPFEVKGFRLFDKVAYQGEEGFIFGRRSSGFFDIRRLDGTRISAGINYKKLRLLEKRRTYLTEIRKEEARRPLPEGR

SEQ ID NO: 21898 - protein, 443 aa, Ectothiorhodospira sp.; identical to SEQ ID NO: 18021

SEQ ID NO: 21899 - protein, 434 aa, Moorena sp.
MQNFVFQLDSNKQPLDMVHPAKARKLQSQGKAANFRMYPYTIIRNVSFGNNPNTKSYTLKIDPGATWTGFAIQCGEEIIFRMELKHRGGLIKKSLEQRAGFRKGRRSRNLRYRKKRFNRKKPEGRLAPSLRHRLQTVETWMKKFLKLCPITCIEIEQVRFDLQKLENPEISGVQYQRGELQGYEIREYLLEKWGRQCVYCEKQDTPLQIEHIKPKSKGGSNRIGNLTLSCPECNQNKGNQDVEDFLSGKPDLLKRVLAEAPKPLDSGSAVNSTRYAIVEMAKNLCDHVKCWTGGRTKYNRVNQELPKSHSIDAACVGESGSKIKLLVNQPLIVESKGHGTKQARRANKKGFPALNKDNQPIKPKTRYTHCVAGDMIKFRLDKDRKTVKAGIYKGRVKTPTPKGFEVKINDCRVSQKMNYLIRFMHRNDGYNYSF

SEQ ID NO: 21900 - protein, 436 aa, unidentified
  REGION 1..436: note = Human gut metagenome
LLMVAVVDLFGKPLMPTNEYRARKLLKQKKAKIFGYRPFTIQLTERKSAEIQPIELCMDTGYIHIGISAKSERHEYLGMQIDTLTDEKLKRDDKRQYRRQRRNRKRYRAPRFDNRRRKEGWIAPSLEHKKEIHIDAIQRICKVMPITDITLEIGNFDTHVLKAVEEGKPLPQGSDYQHGERYGIATLREAVFLRDGYKCQCCEKSVKDGAILHVHHIKYRSQGGTNRMSNLITVCDKCHTPKNHKPGGKLWNWKPKLAEFKGASYMTSIRWTLYNEVTALLPNSSVHITYGAKTKESRRKLDIKKSHVNDAYVMGLFCPKHRTKPVYFKKKRRNNRVLEKFYDAKYIDSRDGKKQSGQELFNGRINRNHRKDSENLHLYRKQKVTKGKRSIRNKHYPIQPHDILLYQKKKYENAGCHNNGSRGILLPEKKSVALKQ

SEQ ID NO: 21901 - protein, 447 aa, unidentified; identical to SEQ ID NO: 8397
  REGION 1..447: note = Human gut metagenome

SEQ ID NO: 21902 - protein, 431 aa, unidentified; identical to SEQ ID NO: 2746
  REGION 1..431: note = Human gut metagenome

SEQ ID NO: 21903 - protein, 430 aa, unidentified
  REGION 1..430: note = Human gut metagenome
MPKVYVLNRHGRPLMPCTPAKARHLLDAGKAKVRHRTPFTIQLLYGSTGYTQEVILGVDAGSKTIGLSAATETEELFSAEVKPRNDVVELMSARRQFRRARRNRTTRYRKPRFDNRVRSKHKGWLAPSVEVKIQEHMTAIRRACAILPVSKVVVETAEFDLQLLKAVAEGKPVPQGEDYQKGEMYGHYNVRQYVLWRDSYTCCICGVHGSVRKGVPLHVHHLESRRVGGDAPDNLVTLCTACHDKLHKGIIMAADIKKRKRRSTRDATFMGIMRMTLLRRLREQLPVPVVETRGYITKATRENLLVLPKSHANDALAIAHGPQGFRAEYLPNIRQADRLYTIRPVRHHNRQLHKATILKGGVRKTNQAEKYICGFRLYDKVLYNGIECFVWGRRTSGSFLLRQLNGEKVKDGVSYKHLKLLERSQSYLVA

SEQ ID NO: 21904 - protein, 419 aa, Geobacillus sp.; identical to SEQ ID NO: 3993

SEQ ID NO: 21905 - protein, 424 aa, unidentified; identical to SEQ ID NO: 8578
  REGION 1..424: note = Human gut metagenome

SEQ ID NO: 21906 - protein, 414 aa, Moorena sp.; identical to SEQ ID NO: 5563

SEQ ID NO: 21907 - protein, 455 aa, unidentified
  REGION 1..455: note = Human gut metagenome
MVFVLDRHHKPLMPCHPARARRLLGKGRARIHKLYPFTIRLVDRELKDSTVQPVVLKLDPGSKETGMALVREDETKTHHALYFVNLKHRGSEIKQSLLQRRNFRRSRRSRNLHYRAPRFLNRTRPQGWLAPSLRHRVDTTLAWVERLRRLAPVATLEMELVKFDTQKMQNPEIDGVAYQQGKLAGFEVREYLLEKFGRKCIYCGAEGVPLNIDHIVPKSAGGSNRVSNLVLACVDCNQKKNNLPFEVFLKGDKAKINRIRSQLKTPLKDAASVNTTRWQLFEALKLTGLSLTTATGARTKYNRHQFGVPKEHWLDALCVGKVAAIRGWQTLDVLVVKCTGRGAYKRTRLTKDGFPRGYLTRTKRFFGFGTDDMVVATVFAGKKKGSYKGRVAVRKSGSFAIQTASRKVDGISYRYCRLLSRADGYGYSWHSSKSLINSTKETALLPRINTQVSAP

SEQ ID NO: 21908 - protein, 340 aa, unidentified
  REGION 1..340: note = metagenome
DLLSARRTLRQSRRNRKTRYRAPRFDNRIRTKRKGWLAPSVENRIDAHLSRIEAVLRLLPVTKITVETASFDLQLLKNPDISGKEYQEGEQLGFWNIREYVLCRDGHVCQHCYGRSKDPVLNVHHLESRRTGGDSPDNLLTLCETCHKALHRGEITLKAKRGQSFRAETFMGIMRWEVLNRLKASHSELKVHNTYGYLTKHARIENGIAKSHGADAFCIAGNLGAERLGEFFFQKQTRRNNRQIHKLSILKGGIRKRNQAPFEVKGFRLFDKVACQGEEGFIFGRRSSGFFDVRKLDGTRISAGISYKKLHLLEKRQTYLMEIRKEEAFPPLPEGRGLRA

SEQ ID NO: 21909 - protein, 437 aa, Moorena sp.
MRVYVRNKNGNPLMPCKPAKARHLLRDGKAKVVNRCPFTIKLEWDCEENVQEVTVGIDKGSSVTGFSCVRFAKQRTGAFAGSRLGNGKILMSGEIHHRTDIKDKMDARRANRRNRRNRKWYRPKRFNNRASSRRSGRLPPSIKANVEEVIRVVGQLPLPISHIIVEDVAVDVRRLSNPDVKGSEYQQSNRLDENLRLACLTRDDFTCQKCNKKETLLEAHHIVWTTKGGKDSIYNLITLCESCHDKVHRKGESGKVKIKGGKVVKGMAGFSDKVVQRTMQGKTLMYQELEKIASFETVYGYQTSAYRKSLSLPKTHDIDALCVATVLTGEVITQDPSQAQDENFYTIKFRQRQTRRQFHDLPQKGVGRVRYQVNAELEGFRKGDIVRVKEKWIKQINSIYSSGYLAFARVKGEPSAAKPKDCQLLQKGQTMIWEKVV

SEQ ID NO: 21910 - protein, 427 aa, Eubacterium sp.; identical to SEQ ID NO: 3021

SEQ ID NO: 21911 - protein, 512 aa, unidentified
  REGION 1..512: note = Human gut metagenome
MSTVYVLNKDGKPLMPTTRCGHVRHLLKEQKARVVTSKPFTIQLLYETDDVVQPLYLGIDPGRTNIGVAVVKADGTAVFTAHLETRNKEIPKLMKKRKDSRRARRTNGRRCRRQRRAKANGTISKKCVKQTTAQNGSVSKRAKEIGVIKRHLPGCEKDVLCIGIKNKEAKFSNRTKPEGWLTPTANQLLQTHINLVKKIRKFLPISDVVLEINKFAFMQLDNPNVQKWQYQQGPLYQKANLEEAVSEMQEHHCLFCKKPIAHYHHVVPQSENGSNTIGNIVGLCTKHHDLVHKDTAWQKKLTKKKTGLNKKYGALSVLNQIIPALTKELSSLFPKHFFATNGKSTYDYRAAHGVRKDHWLDAYCIACSVLPNDVCDKNINSRVLYELKQFRRHDRRALNNENMSRVYTLNENVVATNRHKATKQTTDSLEEFRQNHPDDACKLKVKEHHPTYRNMSRNYPGSVFLVGNQVHVMQGVAGSKDGKATTYKDTNANSIAAGKCKFVAKNSGILFV

SEQ ID NO: 21912 - protein, 408 aa, unidentified
  REGION 1..408: note = metagenome
MVYVQDIDGKPMMPTTRHGKVRRLLKANKATVVNLCPFTIRLTYATSGYKQEIVLGVDAGTKHVGLSATTKSKELYSSEVILRSDIVELLSTRRELRRTRRNRLRYRKPRFGNRVKSKHHGWVAPSVRHKVDAHIRVIDNICSTLPISRIIVEIAQFDTQKIKNPDISGNEYQEGDQLGFWNVREYVLARDGHKCQHCKGKSKDPILNVHHIESRKTGGDSPSNLITLCETCHKEYHKGNIDLKVKRGKSLRDAAVMGIMKWKLYEELKSRYPNVSMTFGYITKYNRIKYGIEKYHISDAFVISKNFNALRLEYYYKVRLVRRHNRQIHKQKVLKGGAKKPNQSPFEVFGFRLFDRVMFEGNYYFIFGRRKSGSFNIRDINGGNQRNVTYKKLKLSIGKRFMIQKEMN

SEQ ID NO: 21913 - protein, 445 aa, Allochromatium sp.; identical to SEQ ID NO: 21220

SEQ ID NO: 21914 - protein, 408 aa, unidentified
  REGION 1..408: note = Human gut metagenome
MVYVQDIDGKPMMPTTRYGKVRRLLKNKKAVVVNLCPFTIRLTYVTSDYKQEIVLGVDAGTKHVGLSATTKSKELYSSEVILRNDIVDLLSTRRELRRARRNRLRYRKPRFDNRIKSKRPGWIAPSVKYKIDAHIRVVENVCSILPISRIVIEVAQFDTQKIKNPNISGKEYQEGDQLGFWNTREYVLARDGHKCQYCKGKSKDKILNVHHIESRKTGGDSPSNLITLCETCHKEYHKGNIDLKIKRGKSLRDAAVMGIMKWKLYEELKSRYPNVSMTFGYITKYNRIKYGIEKYHISDAFVISKNFNALRLEYHYKVRLVRRHNRQIHKQKVLKGGAKKPNQSPFEVFGFRLFDRVMFEGNYYFIFGRRKSGSFNIRDINGGNQRNVTYKKLKLSIGKRFMIQKEMN

SEQ ID NO: 21915 - protein, 414 aa, unidentified; identical to SEQ ID NO: 2588
  REGION 1..414: note = Human gut metagenome

SEQ ID NO: 21916 - protein, 440 aa, unidentified
  REGION 1..440: note = Human gut metagenome
MSTGLRAEQAEPAGIRKGDTLKVFVLNMRGKPLMPCSPAKARHMLKAGKAVVLRRTPFTISLTVATGETKQEVTLGVDAGAEHVGISATTEKEEVFASEVELRQDIKGLLADRLEFRRARRNRKTRYRAPRFDNRVRSKHKGWLAPSVENRIQAHISRIEAICRVLPITKIVSETASFDIQKIKNPEVEGTDYLQGDQLGFWNVREYVLFRDGHVCRHCRGRSKDPFLNVHHLESRKTGGDAPNNLITLCETCHKAYHAGKIKLKARRGTPFRAEAFMGIMRWTLLERVRKAHLELPVENTYGYLTKHKHIVLGLPKTHCADAFCIAGNLSALRRGEFLYQRQTRKHNRQIHKCSILKGGVRKLHQAPFLVKGFRLFDKVKCKGRIGIIFGRRSSGYFDVRTLDGVRLSAGISSKKLMLLEKQTTFLTQLRKEVGASSPS

SEQ ID NO: 21917 - protein, 450 aa, unidentified; identical to SEQ ID NO: 5360
  REGION 1..450: note = Human gut metagenome

SEQ ID NO: 21918 - protein, 411 aa, unidentified; identical to SEQ ID NO: 3917
  REGION 1..411: note = Human gut metagenome

SEQ ID NO: 21919 - protein, 431 aa, unidentified; identical to SEQ ID NO: 12300
  REGION 1..431: note = Human gut metagenome

SEQ ID NO: 21920 - protein, 456 aa, unidentified
  REGION 1..456: note = activated sludge metagenome
MAVFVLDRHQKPLMPCSEKRARKLLERGRARVHRLMPFSIRLVDREVRDAVLQPLKIKLDPGSKTTGVALVRESEAIDEDTGDVKTTVHVLNLFELTHRGHQISEALTARRQMRRRRRGNLRYRAPRFLNRTKPKGGVAPSLQHRVETTRSWVSRLTGLAPVTGIAQELVRFDLQQMENPEISGVAYQQGTLAGYEIREYLLNKWGRECAYCGAKNTPLQIEHIHPKAKGGSGRVSNLTLACQPCNQQKGAQDLHVFLAKDPKRLARIQAQAKAPLKDAAAVNSTRWALLNTLKNTGVPVTTGSGGHTKFNRMRLGIPKTHALDAACVGNIEAIQNWKKPTLAIKATGRGSYQRTRLNAYGFPQGYLTRQKRIHGFQTGDQVKAAVTKGKKVGVYIGRVAVRASGSFNIQTAQGVVQGISYRYCQILQRADGYGYSQRGTLEKAAELRSARYPSPD

SEQ ID NO: 21921 - protein, 470 aa, unidentified; identical to SEQ ID NO: 2825
  REGION 1..470: note = Human gut metagenome

SEQ ID NO: 21922 - protein, 414 aa, unidentified
  REGION 1..414: note = Human gut metagenome
MVYVINKQGQALMPTERFGKVRRLLKNSLAHVVCRIPFTIQLDYDTTDYTQPVSLGVDAGSKHIGISATTSEKELYAADVELRNDIVDKLSTRRGLRRTRRSRLRYRKARFNNRVSSKRKGWLAPSVENKIQTHLTVVEKIHKFLPITNIVVETASFDIQKINNPSISGSEYQQGEQLDFFNVREYVLFRDNHICQHCKGKSKDKVLNVHHIESRKTGGDSPNNLITLCETCHKAYHRGEFELNVKRGKSFRDAAFMGIMRWSFYDRLKNIYPNVSMTFGYITKNTRITNNLPKEHYVDARCISGNPVAKPLGYYFYQKKVRCQNRQIHKANFLKGGRKKLNQAPFLVKGFRLFDLVEYQKELYYIFGRRSSGSFDIRKLDGTKVNKGSINCKYLRLVDTRKSILIEKRTQVNL

SEQ ID NO: 21923 - protein, 446 aa, unidentified; identical to SEQ ID NO: 4517
  REGION 1..446: note = Terrestrial metagenome

SEQ ID NO: 21924 - protein, 423 aa, unidentified
  REGION 1..423: note = Lachnospiraceae bacterium UBA2888
MKQGNRVFVLNMRGEPLMPCSQRKARVLLKEGKAIINTYNPFTIQLTYATGETKQDCHIGVDTGAKHIGIAVTSEDKVFYKAEVELRQDVSSNLDSKRIYRRGRRSRKCRYRKPRFLNRKRTDKWLPPSLQNRINHTFAWIDEFSVLVPSPVLHIEVGKFDTAKMINPDIHGVDYQLGQTYGFFDERYFVFARDNYTCQVCGKSKGKILQTHHIIYRSNGGTDRVDNLITVCTDCHTSANHKKGGILYKWQAEHKKVKQYKEPPFMNTLRRRIFDKYPNAIITYGSETTLKRKEIGLEKTHYNDAIVISSITAIKANPNEWLLIRQFRKKKRSLHESTARKGRKEPDRTQKRNRKNTPYYKGFWLNDKVSVLDQVGYITGFTSGGAYIKNKNDEYITLPGKSYKQVGISNLRLLSHNNNWQYI

SEQ ID NO: 21925 - protein, 414 aa, unidentified
  REGION 1..414: note = Human gut metagenome
MPCSPAKARLLLKEKKAIVKRRTPFTIQLTIATGESKQPVSLGVDAGYKHVGLSASTEKAELYASEVELRQDVSDLLSARRALRQSRRNRKTRYRAPRFDNRIRTKRKGWLAPSVENRINAHLSRIEAVLRLLPVTKITVETASFDLQLLKNPDISGKEYQEGEQLGFWNVREYVLFRDRHVCQHCYGRSKDPVLNVHHLESRRTGGDSPGNLITLCETCHKALHRGEITLKAKRGQSFRAETFMGIMRWEVLDRLKASHPKLEVQNTYGYRTKHARISNGIAKSHCADAFCIAGNLGAERLGEFFFQKQTRRNNRQIHKLSILKGGIRKRNQAPFEVNGFRLFDKVACQGEEGFIFGRRSSGFFDVRKLDGTRISAGISCKKLHLLEKRRTYLTEIRKEEALPPLPEGRGLRA

SEQ ID NO: 21926 - protein, 465 aa, unidentified
  REGION 1..465: note = Human gut metagenome
MSTCVCVLSNSGERLMPTIRLGKVRRLLKDGKAKIIKHHPFTIQLLYDSKANTQPIEICEDVGYNYIGISVKSQSHEYVSAQYDTLQDEKACHDSCRKLRRTRRNRLRYRKPRFDNRKRGEGWLAPSLEHKKQLNIRLIERYVSVIPITHATVEVGSFDTMLVKAIEEGKATPESADYQKGPRYNLATLREAVFYRDNYICKVCGRKATEGAILHMHHMFYWKGRHGNSLSELITVCEKCHTPANHQKSGKLYGFGENVKFADLSGAAFMNTVRWQIVNELYAAFGKDFVTVTYGAMTKEKRIALHLEKSHNNDAYAMGSFHPVNRCAFEHYEKVKRNNRILEKFYDSQYIDTRTGELTNGKSLFNGRISRGHKKDSENLHKYRGKRICKGHRALRRKKLALNPGDLVSLNGEILVVHGTHTKKNGSVNVEFKTPSKSGKKSTSLKKLKIVKTSNLMHSAWTKVS

SEQ ID NO: 21927 - protein, 431 aa, unidentified; identical to SEQ ID NO: 13124
  REGION 1..431: note = Human gut metagenome

SEQ ID NO: 21928 - protein, 442 aa, unidentified; identical to SEQ ID NO: 2903
  REGION 1..442: note = Human gut metagenome

SEQ ID NO: 21929 - protein, 400 aa, unidentified
  REGION 1..400: note = Human gut metagenome
KKAIVKRRTPFTIQLTIATGESKQPVSLGVDAGYKHVGLSASTEKAELYASEVELRQDITDLLSARRALRQSRRNRKTRYRAPRFDNRIRTKRKGWLAPSVENRINAHLSRIETVIRLLPVTKISVETTSFDMQLLKNSDIAGKEYQEGEQLGFWNVREYVLFRDGHVCQHCHGRSKDPVLNVHHLESRRTGGDSPGNLITLCETCHKALHRGEITLKAKRGQSFRAETFMGIMRWEVLDRLKASHPKLEVQNTYGYRTKHARISNGIAKSHCADAFCIAGNLGAERLGEFLFQKQTRRNNRQIHKLSIPKGGIRKRNQVPFEVKGFRLFDKVAYKGEEGFIFGRRSSGYFDVRKLDGTHISAGISYKKLRLLEKRQTYLTEIRKEEALPPLPEGRGLRA

SEQ ID NO: 21930 - protein, 512 aa, unidentified; identical to SEQ ID NO: 4350
  REGION 1..512: note = Human gut metagenome

SEQ ID NO: 21931 - protein, 413 aa, unidentified; identical to SEQ ID NO: 3023
  REGION 1..413: note = Human gut metagenome

SEQ ID NO: 21932 - protein, 424 aa, unidentified
  REGION 1..424: note = Cyanobacteria bacterium UBA8543
MFVFVLDINKKPLNPTHPARARKLLKTGKAAVFKRYPFTMILKEEIVEPSNQELRIKIDSGAKTTGIAILRNEVVLWAAELTHRGFQIREALTSRRQLRRSRRNRKTRYRQPRFNNRCRTDGWLPPSLISRVDNILTWAKRLLRLSPITAISTELVRFDTQLMQNPEISGIEYQQGELAGYELREYMLEKWHRKCAYCGVTDTQLEIEHIIAKSKGGSNRVSNLTLSCTKCNQKKGNKPIEQFLKNKPEVLKLILAQAKRSLADTAAVNATRWKLLNSLKELGLPVETGTGGRTKYNRCRQNLPKTHWLDASNVGASTPEDLKVLVSKPLVIKATGHGNRQMCGTNAYGFPIRHRSNIKKHFGFQTGDIVKAVVTKGKKIGSYTGRVLCRATGNFDVTTASGRVAGISHKYCSFIHRSDGYAYQ

SEQ ID NO: 21933 - protein, 440 aa, Moorena sp.
MSNVFVLDTQKRPLDPVHPGRARILLAQGKAAVLKRYPFTIILKVVIEKPEVHPLRIKIDPGSQTTGLALVNDRTGEVVFAAELSHRGDAIKKALDQRRAVRRGRRQRRTRYRQPRFANRKRRAGWMAPSLESRVVNVLTWVKRLSGLCTISAISLELVKFDLQQMENPEISGVEYQQGTLFGYEIRHYLLEKWKRACSYCGIKEVPLQIEHIQAKANGGTDRVSNLTLACDSCNKAKGTQDIRVFLAEKPDLLARILAQAKAPLKDGAAVNTTRWALYERLKQEGLPIECGSGGLTKFNRTQRDLPKEHWIDAACVSTSTPSELQIAGIIPLLITATGHGNRQKCNVDEIGFPCSKPKGGKSVKGYQTGDIVRAVVTTGTKQGVYVGRVLVRASGSFDIRTNQGRVQGLSHRFCTPVHRSDGYSYQQGALLADHPTQSA

SEQ ID NO: 21934 - protein, 440 aa, unidentified
  REGION 1..440: note = Human gut metagenome
MPTNSYRARRLLKSKRAVIYRYRPVFTIKLADRTNGYTQQIEYKCDTGYQNIGISICSDTKEFVNEQRDLLKDEVKRHSDSRKYRRTRRNRLRYRKKRFDNRKGMISKDGFAPSTRNKRDVHIHLYEEYYKVFPITKAVFEMGQFDTQVLKAVEAGLPVPEGTDYQRGEQYGYATLREAVFVRDSYTCICCGKSAIKDGVKLRIHHIGYLSGDRSNRMANLGSVCENCHTSKNHKPGGKLYNLKPKLKTFKGATFMTMVRYSMVKKLKVTTPDVDIKVTYGAATKLARKDINVKKTHSNDAYCMGEFHPKHRSDFKHYKKCRRNSRVLSKFYDAKYRDLRDGSVKTGSQLSCGRTNRKISRHTEFDERIYRAHKISRGRVSIRRQHYSLRPGDKVLYDGKVYFVTGMQNSGTHVKLTNGKVCSLKKVHVLQHCNAWTAVI

SEQ ID NO: 21935 - protein, 456 aa, unidentified
  REGION 1..456: note = Human gut metagenome
MSTCVCVLSNSGERLMPTFRLGKVRRLLKDGKAKIVKHHPFTIQLLYDSKTNTQPIEICEDVGYNYIGISVKSESHEYVSAQYDTLQDEKACHDSCRKLRRTRRNRLRYRKPRFDNRKRSEGWLAPSLEHKKQLNIRLVERYVSVIPITHATVEVGSFDTMLLQAIQKGESKPEGVDYQKGPRYNLATLREAVFYRDNYTCQVCGRKIADGAILHMHHMFYWKGRHGYQLDELVTACEKCHTPANHQKGGKLFGFGEDKEFANLSGAAFMNAVRWQIVDALHATYGKEFVTITYGAMTKEKRIILGIEKTHSNDAYAMGDYHPVHRCVFRHYQKRRRNNRVLEKFYDATYIDARTGNKAKGKELFNGRISRNHKKDSEDLHKYRSKKVSKGRRSIRRQRYAIQPYDTVRLESKTYITSGCHNKGTRLLIPANGKSKSVAICKVQVVCHAGAWIQII

SEQ ID NO: 21936 - protein, 431 aa, unidentified; identical to SEQ ID NO: 2746
  REGION 1..431: note = Human gut metagenome

SEQ ID NO: 21937 - protein, 421 aa, unidentified
  REGION 1..421: note = Human gut metagenome
MRGQPLMPCSPAKARHLLKAGKAMVRRRTPFTIQLRIATGETKQSVTLGVDAGAKHVGLSATMEKEEVFASEVELRQDITGLLAARLSLRRERRHRKTRYRAPRFLNRVRSKHKGWLAPSVENRIQAHMSRIDAVCKLLPVTKIVIETASFDIQKIRNPTVEGTDYQQGNQLGFWNVREYVLFRDGHVCQHCHGHSKDKILNVHHLESRQTGGDAPNNLITLCETCHKAYHAGKIKLKVKRAQSFRAETFMGIMRWTLLDRVRKAHPGLPVENTYGYLTKNTRITLELPKTHCVDAYCIAGNFKAVRRGVYLYQRQVRKYNRQIHKCTVLSKTLKDGTKIGYRKLNQTPHLVKNFRLFDKVRCLEQTGFIFGRRSSGYFDVWRLDGVKLSSGISYRKLTLLEKRSTYLTELRNEDGASSPV

SEQ ID NO: 21938 - protein, 426 aa, Scytonema sp.; identical to SEQ ID NO: 2729

SEQ ID NO: 21939 - protein, 437 aa, unidentified
  REGION 1..437: note = Wastewater metagenome
MPCSEKRARLLLARGRACVHRLVPFVIRLTDRQLDTCTLQPLRIKLDPGSKTTGLALVRDTEHLNTDTGEIQRGVAVLSLIELVHRGRHISEALTARRQMRRRRRGCLRYRAPRFLNRGNKQRGWLAPSLQHRINTTMAWVARIRRWSPVTALSAELVRFDMQRLQNPEISGVEYQQGTLAGYEVREYLLAKWSRKCAYCGVENVPLQIDHVHPKAKGGTNRVSNLTLACGPCNARKSAQSVDAFLAKDPKRLTALLAQAKRPLKDAAAVNATRWALVGALKATGLPVETASGGCTKFNRSRLAIPKTHALDAVCVGAVSVVTNWQKPSLTIKCTGRGSYQRTRLDKYGFPRGYLMREKSVKGFKTGDLVRAIVPTGKKAGRHTGRVAIRKSGSFNIQTLAGVVQGIGYRHCRLLQRADGYGYFFNKAACDTAQKRE

SEQ ID NO: 21940 - protein, 462 aa, Moorena sp.; identical to SEQ ID NO: 4520

SEQ ID NO: 21941 - protein, 424 aa, unidentified
  REGION 1..424: note = Human gut metagenome
MVYVLDINGQPLMPTARHGKVRRLLNSHLAKVVKRCPFTIQLLYKSTKETQPVSLGVDAGSKHIGLAATTEQKVVYQEELIPRNDVVKLLSARRASRRSRRNRKTRYRKPRFNNRVHSKHKGWLAPSVEVKIQEHITAIKNVCKILPVSEIHVETAEFDLQRLKAMEEGKPLPVGTDYQLGEQYDFYNTRQYVLHRDGYTCQCCGTHDNDVKLHVHHIESRQTGGNAPHNLITLCEHCHKALHEGKIELPKGRKRGKSYRDAAFMGIMRNTLLKRLKKEADVPVTMTYGYITKYWREKVGLEKSHINDAICISKHPYAKPLNAYYLTKAVRRHNRRIHNVNFSKGGIRKRKRASHLVKGFRLFDKVLYQGKSYFIFGRRATGFFDIRTLDGVKVNKGSISYKKLKIQDTAKAYLKEVRIIPHIG

SEQ ID NO: 21942 - protein, 346 aa, unidentified
  REGION 1..346: note = Human gut metagenome
MVYVQDINGKPMMPTTRHGKVRRLLKDKKAVVVNLCLFTIKLMYVTSDYKQEIVLGVDAGTKHVGLSATTKSKELYSSEVILRNDIVDLLSTRRELRRSRRNRLRYRKPRFDNRIKSKRPGWVAPSVKYKVDAHIRVIDNVCSILPISRIVIEVAQFDTQKINNPNISGKEYQEGDQLGFWNVREYVLARDGHKCQHCKGKSKDPVLNVHHIESRKTGGDFPSNLITLCETCHKEYHKGNIDLKIKRGSSLRDAAVMGIMKWRLYEELKSKYDNISMTFGYVTKYNRIKHGIEKSHVFDAFVISKNFDAIRLGYYYKVRLVRRHNRQIHKQKIPKGGIKRPNQSPF

SEQ ID NO: 21943 - protein, 416 aa, unidentified; identical to SEQ ID NO: 4039
  REGION 1..416: note = Human gut metagenome

SEQ ID NO: 21944 - protein, 477 aa, unidentified; identical to SEQ ID NO: 2707
  REGION 1..477: note = Human gut metagenome

SEQ ID NO: 21945 - protein, 408 aa, unidentified; identical to SEQ ID NO: 6729
  REGION 1..408: note = Human gut metagenome

SEQ ID NO: 21946 - protein, 451 aa, Moorena sp.; identical to SEQ ID NO: 4938

SEQ ID NO: 21947 - protein, 339 aa, Moorena sp.
MQNYVFVIDTNKQPLNPISPKKARRLLDKGKAAVFRMYPFTIILKTAINNPTISPCQIKIDPGSKVTGFALVQNNQIVWGMELEHRGGLIKKKLESRKAVRRGRRNRNTRYRKPRFLNRRRPPGWLTPSLDHRILTIQTWVKRLIKFCPVNEIWVERVKFDTQKMQNPEINGVEYQQGELAGYEVREYLLEKWGRECTYCGQQNVPLQIEHISPKSFGGSNRVSNLCLACEKCNQRKGNKPIEEFLKKKRSLLQKITSKAKQPLKDAAAVNTTRNKLVKVLQKIKPVVTGTGAQTKYNRTKLGFPKEHWIDAACVGDIEALQLKTNPDGVTKQAQMLAM

SEQ ID NO: 21948 - protein, 415 aa, unidentified
  REGION 1..415: note = Human gut metagenome
MVYVVANDGQPLMPTERHGKVCRMLKSGMAKVIKKCPFTIQLQYESKRNVQPVSLGVDAGSKHIGISATTKTKVLYESDVELRDDIVKLLATRRQLRRSRRNRKTRYRPARFDNRKRKEGWLAPSIRQKMESHLTVVANVCKILPVSRIIVETASFDIQKIKNPDIQGVEYQQGEQMDFWNIREYVFFRDGHTCQCCKGRSKDKILNVHHIESRKTGGNAPNNLITLCETCHKGYHNGTVILPKNIKRGMKFKDAAFMGIMRWAFYNALKEQYEPAIPVSMTYGYLTKNTRIRHNLPKEHHIDARCISGNPDAVSDGTYYYQKKVRCHNRQIHEQTILKGGIRKSNQAEYLVKGYRLFDKVRYHGREYFIFGRRKTGFFDIRTLSGEKVNKGSISIKKIAFVDTRKNYITERRTV

SEQ ID NO: 21949 - protein, 462 aa, unidentified; identical to SEQ ID NO: 5736
  REGION 1..462: note = Myxococcales bacterium UBA1671

SEQ ID NO: 21950 - protein, 413 aa, unidentified; identical to SEQ ID NO: 7540
  REGION 1..413: note = Human gut metagenome

SEQ ID NO: 21951 - protein, 532 aa, unidentified
  REGION 1..532: note = Human gut metagenome
MSTVYVLNKDGKPLMPTTRGGHVRHLLKEQKARVVRAKPFTIQLLYETDDAVQLLYLGIDPGRTNIGVAVVKADGTAVFTAHLKSRNKEIPKLMQDRKRARRARRTNGRRHRRQRRAKANGTISKKCVKQTTTQNGSVSKRAKEIGIIKRHLPGCEKDVLCIGIKNKEAKYTNRERPEGWLTPTANQLLQTHVNLVKKVQKLLPISDVVLEVNKFAFMRLNNPNIQKWQYQQGPLYKKESLESAVSEIQEHHCLFCKKPIDHYHHVVPKSENGSNTIANIVGLCAEHHNLVHKDVAWQEKLAEEKTGLNKKYGALSVLNQIIPALTNKLSVLFPKHFFVTAGKSTHDYRAAHGVSKDHWLDAYCIACSVLPSNVCDSNINNHVPYELKQFRRHDRRVLHKANMSRVYTLNGKAVATNRHKAIKQTTDSLEEFRQNYPDDVYKLKVKEHHPAYRNLNRNYPGSVFLVGKQAHVMQGIASSKDGKTTKYNDTNATTITAGKCKFVAKNSGILFVQCKFRKALSDGTTKKLQYPV

SEQ ID NO: 21952 - protein, 465 aa, unidentified; identical to SEQ ID NO: 3603
  REGION 1..465: note = gut metagenome

SEQ ID NO: 21953 - protein, 557 aa, Blautia sp.; identical to SEQ ID NO: 7395

SEQ ID NO: 21954 - protein, 389 aa, unidentified; identical to SEQ ID NO: 11535
  REGION 1..389: note = Human gut metagenome

SEQ ID NO: 21955 - protein, 355 aa, unidentified
  REGION 1..355: note = Mouse gut metagenome
VLCALRYIGIYRRTRRNRLRYRKPRFNNRISNKKEGWFAPSLKNKADQHIMLIQRLATVAPIKDIYLEVGSFDTQLLDAIAKGLPIQEGTDYQQGALYGEETLRKAVFQRDNYTCQVCGRTIKDGAKLHTHHFLYWKGRHGNRLDELCTVCEKCHTSANHQKGGKLYGWGADKKFKSYVSAAFMNTVRWYIVNQVKDLVSDTEVHTTYGAATKLARKDFQFEKSHVNDAYAMGKLHPNIRCETEYYKKVRRNNRCLEKFYDAKYIDIRDGKKKSGKELGCQRINRREPRMSEKNLRIYHGQKVSKGRRSIRKQRYSIRPGDVVLFNGQKYISKGCGSYGTQVLLDTGKSVSIKKV

SEQ ID NO: 21956 - protein, 475 aa, unidentified; identical to SEQ ID NO: 6136
  REGION 1..475: note = Human gut metagenome

SEQ ID NO: 21957 - protein, 431 aa, unidentified; identical to SEQ ID NO: 4306
  REGION 1..431: note = Human gut metagenome

SEQ ID NO: 21958 - protein, 408 aa, unidentified
  REGION 1..408: note = Human gut metagenome
MVYVQDINGKPMMPTTRHGKVRRLLKDKKAVVVNLCPFTIKLTYETTNYKQEIVLGVDTGTKHVGISATTKSKELYSSEVILRNDIVDLLATRRELRRTRRSRLRYRKSRFDNRVKSKREGWVAPSVKYKIDAHIRVINNVCSILPISRIIIEVAQFDTQKINNPEISGKEYQEGNQLGFWNVREYVLARDGHKCCHCKGKSKDKILNVHHIESRKIGGDSPSNLVTLCETCHKEYHKGNIDLKIKRGKSLRDAAIMGIMKWRLYETLKSKFSNISMTFGYITKYNRIRNNIEKSHISDAFVISNNFNAKRLGFLYKIKLVRRHNRQIHKMKIQKGGVKRLNQSPFEVFGFRLFDRVKVDNKFYFIYGRRRTGRFNIRDINGENSKDVTHKKLNLSRCKRFMVKIEMK

SEQ ID NO: 21959 - protein, 470 aa, unidentified; identical to SEQ ID NO: 2825
  REGION 1..470: note = Human gut metagenome

SEQ ID NO: 21960 - protein, 366 aa, unidentified
  REGION 1..366: note = Human gut metagenome
MVYVQDINGKPMMPTTRHGKVRRLLKDKKAIVVNLCPFTIKLMYVTSDYKQEIVLGVDVGTKHVGLSATTKRKELYSSEVILRNDIVDLLSTRRELRKTRRNRLRYRKPRFNNRIKSKRPGWIAPSVKYKVDAHIRVIDNVCSILPIFRIVIEVAQFDTQKINNPEISGKEYQEGDQLGFWNVREYVLARDGHKCQYCKGKSKDPVLNVHHIESRKTGGNSPSNLITLCETCHKEYHKGNIDLKIRRGKSLRDAAVMGIMKWRLYEELRLGCYYKVRLVRRHNRQIHKQKIPKGGIKRLNQSPFEVFGFRLFDRIMFENSYYFIFGRRKTGSFNIRDIDGKSQKNIMYKKLKSSRCKRFMIQKEMN

SEQ ID NO: 21961 - protein, 472 aa, unidentified
  REGION 1..472: note = Human gut metagenome
VVDNRLLSIKSLINIGEGVIYSSICTGLSLQTYQKRKEVPCMVYVLDINGQPLMPTTRHGKVRRLLNSHFAKVVKRCPFTIQLLYQSTKEIQPVSLGVDAGSKHIGMAATTEKKVVYQEELSPRNDVVKLLSARRTLRRTRRNRKTRYRKPRFNNRVHSKHKGWLAPSVEVKIQEHITAIKRICQILPISEIHVEISEFDLQRLKAMEEGRTLPVGTDYQLGEQYDFYNTRQYVLHRDGYTFQCCGTHDNNIKLHVHHIESRQTGGDAPSNLITLCEHCHKALHKGKLELPKGKKRGKTYRDATFMGIMRKTLLERLRKEVDVPASGTYGYITKYWRERAGLEKSHINDAICISKYPYAKPLDTYYLTKAVRNHNRQIHKSNFSKGGIRKRNQAPYLVKGFRLFDKVLYQGKEYFIFGRRATGYFDIRTLDGTKVNKGSISYKKLRIQDTAKAYLKEARAIPHMNKFTCVLA

SEQ ID NO: 21962 - protein, 425 aa, unidentified
  REGION 1..425: note = Human metagenome
MVFVLNRSKKPLNMISHAQARILLKNRLAVVHKIYPFTIRLRDNSCGSQDKAYTVKIDPGSRTTGIAIVDDANKVVILAEIEHRGHVIKKKLDQRKAARRSRRNRKTRYRESRFLNRTRPEGWLAPSIKSRADNVINFICKYKKLINISKVMIEYVSFDVAQMSSNTKLWGSNYQQGPLYQQKLRSFIFSRSNGKCVYCGAKATNIDHVIPRANGGTNSTYNLVASCRACNQMKSNLSLKEFGKLMGKNYSHLEPKKLPKDAAIVQSARNYMVKEITKLVTDTTTHDAWLTKYNRNELGLPKEHYYDALSVGEVPPKFNFLTDKMLTISAKGRGSRQMCSMDKYGFPRTSAKASKSVEGFQTGDIVKAVVPSGSKAGVYLGRVAVRSNRCFDIQTKTKTIEGIWHKHFHIIQRGDGYLYNYKKIL

SEQ ID NO: 21963 - protein, 416 aa, Parasutterella sp.; identical to SEQ ID NO: 10114

SEQ ID NO: 21964 - protein, 279 aa, unidentified
  REGION 1..279: note = Human gut metagenome
VVVETAEFDLQLLKAIADGKPVPQGEDYQQGEMYGHYNVRQYVLWRDNYTCQCCGTHPSKKKEVRLHVHHLESRKVGGDAPDNQVTLCESCHEKLHKGLIAEKDFKKRKRRSTRDATFMGIMRKTLMQRLCSELPIPVVKTRGYITKATREKLLVLPKSHTNDALAIAQGKRGFNVGYLPEIAQIDKIYTIRPVRHHNRQLHKATILKGGIRKSNQTEKYVFGYRLFDKVQFNGQDCFIWGRRTTGIFTIKTINGKMIKDGISFKKLKPVEKSTGYLIA

SEQ ID NO: 21965 - protein, 417 aa, Moorena sp.
MVYVISHTGKALMPTNRHGKVKHLLRKGCARVVRREPFTIQLLYDNTEYTQPITLGVDAGTTHVGLSATNESDELFAAEVTLRRDIPGLLTVRREARRTRRNSRTRYRAPHFNNRTKPDGWLAPSVEHAVQSHLSLIRKVHSFLPVTKTVIEVAQFDTQLLKNPDIQGEQYQQGEQMGFWNTREYVLFRDGHTCQHCHGKSGDKVLNVHHIESRQTGGDAPNNLITLCETCHKAYHRGAFQLKVRRGASLRDAALMSIMRWTVYNRAKEEFGNVRLAYGYITKNTRIRHGQEKSHAIDARCISGHPLASSSDTLWLMRQRRRHNRQIYKANTLKGGIRKKNQAPYLVKGFRLLDKVLYDGLECFIFGRRSSGSFDIRKFDGTRVNAGISYKKLKFKSISNSFIVSQLKRNVCVSSPA

SEQ ID NO: 21966 - protein, 396 aa, unidentified
  REGION 1..396: note = Human gut metagenome
VVRRTPFTIQLTIATGESKQPVSLGVDAGYKHVGLSASTEKAELYASEVELRKDITDLLSARRALRQSRRNRKTRYRAPRFDNRIRTKRKGWLAPSVENRINAHLSRIEAVLRLLPITKITVETASFDMQRLKNPDISGKEYQEGEQLGFWNVREYVLFRDGHVCRHCHGRSKDPVLNVHHLESRRTGSDSPDNLITLCETCHKALHRGEITLKAKRGQSFRAQAFMGIMRREVLNRLKASYPELKVHETYGYLTKHARIANGIVKSHGADAFCIAGNLGAERLGEFFFQKQTRRNNRQIHKLSILKGGIRKRNQAPFEAKGFRLFDKVACQGEEGFIFGRRSSGSFDVRKLDGTRISVGISCKKLRLLEKRRTYLTEIRKEGALPPLHEGRGLRA

SEQ ID NO: 21967 - protein, 515 aa, unidentified; identical to SEQ ID NO: 13182
  REGION 1..515: note = Human gut metagenome

SEQ ID NO: 21968 - protein, 462 aa, unidentified; identical to SEQ ID NO: 2823
  REGION 1..462: note = Human gut metagenome

SEQ ID NO: 21969 - protein, 420 aa, unidentified; identical to SEQ ID NO: 11172
  REGION 1..420: note = Human gut metagenome

SEQ ID NO: 21970 - protein, 414 aa, unidentified
  REGION 1..414: note = metagenome
MVYVINKQGQALMPTERFGKVRRLLKNSLAHVVCRIPFAIQLDYDTTDYTQPVSLGVDAGSKHIGISATTSEKELYAADVELRNDIVDKLSTRREQRRTRRGRLRYRKARFNNRVSSKRKGWIAPSIENKIQTHLTIVEKIHKFLPITNIVVETASFDIQKINNPSISGSEYQQGEQLDFFNVREYVLFRDNHICQHCKGKSKDKVLNVHHIESRKTGGDSPNNLITLCETCHKAYHRGEFKLNVKRGKSFRNAAFMGIMRWSFYDRLKNIYPNVSMTFGYITKNTRITNNLPKDHYVDARCISGNPMSKPLGYYFYQKKVRCQNRQIHKANFLKGGRKKLNQAPFLVKGFRLFDLVEYKKELYYIFGRRSSGSFDIRKLDGTKVNKGSINYKHLRLIDKRKSILTEKRTQVNL

SEQ ID NO: 21971 - protein, 441 aa, Ktedonobacter sp.; identical to SEQ ID NO: 12415

SEQ ID NO: 21972 - protein, 447 aa, unidentified; identical to SEQ ID NO: 5937
  REGION 1..447: note = Human gut metagenome

SEQ ID NO: 21973 - protein, 416 aa, unidentified; identical to SEQ ID NO: 8117
  REGION 1..416: note = Human gut metagenome

SEQ ID NO: 21974 - protein, 438 aa, unidentified
  REGION 1..438: note = Human gut metagenome
LTTGKHITSAQPWQEEKFSERKVSEMTSYAFVLDADGKQLAPTKEQKAWFLIRKKRAALVSKYPMVIQLNKEIPDEEICKDEIRCGIDDGGLHVGIALVQKCQTQNKVVFKGTIEQRNDVKHLMDIRRGYRRYHRYHKRYRQARFNNRSSSKQKGRIAPSILQKRQATVRVINQLNKWINITDYWLEDVAIDIRAMTDGYKSYKWEYQKSNRLDENIRKAVILRDGCKCMECGKSNCKLEVHHIKPRRLKGSNTLGNLITLCTKCHQKTKGVEELYMDRYFALLNSSDDKNLNYAQHVMIGKKWLREQLSSLGILHLTNGGDTANKRIDWDITKSHSNDAICITNLRPNKCEIKEWTIKPMRRQSKAKTDNVLGIKHRDFVEYTFRNSETHRGYVTALYPEQNALNFQSPTKHCKKVNARKCKVIWKYSKIYWLDNVS

SEQ ID NO: 21975 - protein, 422 aa, unidentified; identical to SEQ ID NO: 5333
  REGION 1..422: note = Human gut metagenome

SEQ ID NO: 21976 - protein, 507 aa, unidentified
  REGION 1..507: note = Human gut metagenome
MSEYIYVLGMDGDPQMPTKRKRHVEKMLQTGRARVFRQVPFTIQLTYKNQPVLQPVTIAEDPGRSNIGMAVVSLRGELLSAAVVQTRNKEIVKLMERRKQYRRASRNGERKARQRLAKKCHTMVNAGFLMRKLPMYGEDKRVRCNVIKNTESRFCNRKREDGWLTPSAEHLVRTHINLIHKMQKFLPITDVAIEINRFAFLSLEDPSISGVDFQKGPLKGYDDLNASVEDLQDGHCLMCDSPIEHRHHIVPRSMQGSNTIGNIAGLCYKCHERVHKDARFEDRLKKKKAGLDKRYAAVSALNQAIPFICKRLEQEFGKEHVHYCSGRDTAMVRRSFGYHKTKEEQLHVVDAWCIAVLSLRQIPEKAPEFDHVHEILQFRRQDRSIIDAQTSRRYYHEGKKIAKNRKKAEGQREDSLQEWRKRQVERYGEEQTRKMISQLKVKKSIRRYNRLDRLMPGAVFYYQGVRYVMRGQHCEGTYLQAVGMGSKDFPAKKCKIVAHNEGLVFVS

SEQ ID NO: 21977 - protein, 367 aa, unidentified
  REGION 1..367: note = Human gut metagenome
WITPSARQLVQMHMNDLKSMCKILPISHVTLERVAFDFQKLENENIKVWEYGKGKLYGYDSPEEYIHDVQNGKCLVCGKPHIDYLHHIIPRSKGGSDKVSNIAGLCYDCHYGPMGVHNCQNTQDRLPELKSEANKQYKVSLLNSVMPVLIEEIDKFCKANSIMFSICEGHDTAKVRDMYDLQKDHCLDGFAISLVGRNVKSVDVMPDRIHQKQRYKKKSKNIIQKRNYREYYDDKKLVAINRHKGTDQKADSLEEYMNTYAETHTADECKMHFESLTVKPARRTYTFHKEGRICPLHIGDKVRYEKKNKIKGNTKVDTFICEGIYFSKDENKAKVEHNKTKSKKMKFCRAIESGCIPYIDYIKLALI

SEQ ID NO: 21978 - protein, 453 aa, Lactobacillus sp.; identical to SEQ ID NO: 4050

SEQ ID NO: 21979 - protein, 456 aa, Halomonas sp.; identical to SEQ ID NO: 4656

SEQ ID NO: 21980 - protein, 493 aa, unidentified; identical to SEQ ID NO: 2644
  REGION 1..493: note = Human gut metagenome

SEQ ID NO: 21981 - protein, 493 aa, unidentified; identical to SEQ ID NO: 7728
  REGION 1..493: note = gut metagenome

SEQ ID NO: 21982 - protein, 318 aa, unidentified
  REGION 1..318: note = Human gut metagenome
LVKKIQKFLPISDVVLEINKFAFMRLDNPNVQKWQYQQGPLYQNASLEEAVSEMQEHHCLFCKKPIAHYHHVVPQSENGSNTIGNIVGLCTKHHDLVHKDTAWQKKLAKKKTGLNKKYGALSVLNQIIPALTKELSSLFPKHFFATNGKSTYDYRAAHGVSKDHWLDAYCIACSVLPNDVCDSNINSRVPYELKQFRRHDKRALHKANMNRVYTLDGKKVATNRHKAIKQTTDSLEEFRQRQPDDVCKLKVKEHHPEYRNPERNFPGCVFLVGKHTHVMQGTSGSHNGQADGYYDTNGNSYSSGKCKFVAKNKGIVFA

SEQ ID NO: 21983 - protein, 430 aa, unidentified
  REGION 1..430: note = Human gut metagenome
MPKVYVLNRHGRPLMPCTPAKARHLLDAGKAKVRHRTPFTIQLLYGSTGYTQEVILGVDAGSKTIGLSAATETEELFSAEVKPRNDVVELMSARRQFRRARRNRTTRYRKPRFDNRVRSKHKGWLAPSVEVKIQEHMTAIRRACAILPVSKVVVETAEFDLQLLKAVAEGKPVPQGEDYQKGEMYGHYNVRQYVLWRDSYTCCICGVHGSVRKGVPLHVHHLESRRVGGDAPDNLVTLCTACHDKLHKGIIMAADIKKRKRRSTRDATFMGIMRMKLLRRLREQLPVPVVETRGYITKATRENLLVLPKSHTNDALAIAHGPQGFRAEYLPNIRQADRLYTICPVRHHNRQLHKATILKGGVRKANQAEKYICGFRLYDKVLYNGIECFVWGRRTSGSFLLRQLNGEKVKDGVSYKHLKLLEHSQSYLVA

SEQ ID NO: 21984 - protein, 456 aa, unidentified; identical to SEQ ID NO: 12878
  REGION 1..456: note = Human gut metagenome

SEQ ID NO: 21985 - protein, 303 aa, unidentified
  REGION 1..303: note = Human gut metagenome
APSVENRINAHLSRIGAILRLLPVTKITVETASFDTQLLKNPDISGKEYQEGEQLGFWNVREYVLFRDGHACQHCHGRSKDPVFNVHHLESRRTGGDSPGNLLTLCETCHKALHRRETKLKTKRGQSFRAEAFMGIMRWEVLNRLKASHPELEVHNTYGYRTKHTRIVNGIDKSHCADAFCIAGNLGAKRLGEFFFQKQTRRNNRQIHKLSILKHGLRKRNQAPFEVKGFRLFDKVVCQGEEGFIFGRRSSGSFDVRKLDGTRISAGISCKKLRLLEKRRTYLKEIRKEEALPPLPEGRSLRA

SEQ ID NO: 21986 - protein, 495 aa, Moorena sp.
MSTTLARGESGGSMAGEVIHQRRHKVMAYVAVLSASGKSLMPTTAYKARKLLKSGRAKIYSYRPLFTIQMQDREEGTTQPIEMKVDTGAQYIGVSVCSEKHEYWNRRYDMLPNEKEMHDEARKNRRNRRQKLRYRAPRFDNRTHGHNRKEDQWFAPSLKHRENIHIQLAAKICAVVPVTDAYFEMGQFDIQVLKAYEAGKPIPVGGDYQKGERYGYATLREAIFARDNYTCQVCGAKLDDKHHPILRMHHIGYWKHDHSNRMGNLMTVCIKCHTAANHKPGGKLYGLEPELPTFKGAAFMNTVRWDMFTQLKKALPNVKCHITYGAMTKLKRSELNTRKTHSNDAYCMGTLHPKWRTDFQHYQKVRRNNRVLSKFYDAQYIDTRDGEKMSGAQLSCGRTKRSESRHSIKNLRGYRGRRATSKGKKPKISKGHISTRRHKYAFNTGDIVIVQGKKLTVSGTQHYGEYVVFRDKTHVAAKAKEVTMYRHGDGWVRVV

SEQ ID NO: 21987 - protein, 328 aa, unidentified
  REGION 1..328: note = metagenome
MPCSPAKARLLPKERNAIVVRRTPFTVQLTIATGETKQPVSLGVDAGYKHVGLSASTEKAELYASEIELRQDITDLLSARRELRRARRNRKTRYRGPRFDNRIRTKRKEWFAPSVENRINAHLSRIEKVLRLLPVTTITVETASFDTQLLKNPDISGKEYQEGEQLGFWNIREYVLCRDGHVCQHCYGRSKDPVLNVHHLESRRTGGDSPGNLITLCETCHKALHRGEITLKAKRGQSFRAEAFMGIMRWEVLDRLKASHPELEVQNTYGYRTKHVRIANGIAKSHCADAFCIGGNLGAERLGEFFFQKQTRRNNRQIHKLSILKGAL

SEQ ID NO: 21988 - protein, 471 aa, Leptospirillum sp.
MLPQSRALEVPDADNREGQDETVRDNTPVRNIPEGRCFARSALRPQGQCNVRFDGGFVQVFVLDKKKKPLMPCHPARARELLREGRAVVHRIAPFTIRLKDRIGGETQPIRVKLDPGSKTTGLAVVREEETDGEKTAHVLFQAEIHHRGSAIKKRLDQRRAFRRRRRSQLRYRTPRFDNRTRPDGWLPPSLRHRVDTTLAWVERLRRLVPVSELSQELVRFDMQKIENPEISGVEYQQGTLAGYEVREYLLEKWGWTCAYCGASDMPLEIDHIHPRSLGGSDRVSNLTLACRSCNLKKGNRPVGEFLAKTPERLSTILARAKAPLKDAAAVNATRWALFQALKATGLPVETASGGRTKYNRTRLDSFGFPRGFLTRTKAHFGFQTGDRVMAIVTKGKKTGTYAGRVAVRSSGSFNIQTGSGVVQGISYKDCRLLQRADGYGYSIHPITEKGGAGEGLSLPGMNAGLSRARG

SEQ ID NO: 21989 - protein, 337 aa, Oscillatoria sp.; identical to SEQ ID NO: 18802
  REGION 28..29: note = misc_feature - Xaa can be any naturally occurring amino acid
  SITE 32: note = misc_feature - Xaa can be any naturally occurring amino acid
  SITE 46: note = misc_feature - Xaa can be any naturally occurring amino acid
  REGION 48..49: note = misc_feature - Xaa can be any naturally occurring amino acid

SEQ ID NO: 21990 - protein, 413 aa, unidentified; identical to SEQ ID NO: 3220
  REGION 1..413: note = Human gut metagenome

SEQ ID NO: 21991 - protein, 442 aa, unidentified; identical to SEQ ID NO: 3234
  REGION 1..442: note = Human gut metagenome

SEQ ID NO: 21992 - protein, 413 aa, unidentified; identical to SEQ ID NO: 19628
  REGION 1..413: note = Human gut metagenome

SEQ ID NO: 21993 - protein, 408 aa, unidentified
  REGION 1..408: note = Human gut metagenome
MVYVQDIDGKPMMPTTRHGKVRQLLKDKKAVVINTCPFTIKLMYKTSDYKQEIVLGVDAGTKHVGLSATTKSKELYSSEVILRSDIVDLLSTRRELRRTRRNRLRYRKPRFDNRIKSKRTGWVAPSVRHRIDAHIRVIDNVCSILPISRIIVEVAQFDTQKIKNPNISGNEYQEGNQLGFWNVREYVLTRDGHKCQHCKGKSKDPILNVHHIESRKTGGDSPSNLITLCETCHKEYHKGKIDLRVKRGKSLRDAAVMGIMKWKLYEELKSRYDNVSMTFGYITKYNRIKYGIEKSHISDAFVISKNFNALRLGYHYKVRLVRRHNRQIHKQKVLKGGVKKPNQSSFEVFGFRLFDRVMFEGNCYFIFGRRKSGSFNIRDIDGGNQRDITYKKLKLLRCKRFMIQKETN

SEQ ID NO: 21994 - protein, 418 aa, unidentified
  REGION 1..418: note = Human gut metagenome
GKPLMPCSPAKARLLLKEKKAIVVRRTPFTIQLTIATGETKQPVSLGVDAGYKHVGLSASTEKAELYASEIELRQDITDLLSARRELRRARRNRKTRYRAPRFDNRIRTKRKGWLAPSVENRINAHLSRIEAVLRLLPVTKITVETASFDMQLLKNPDISGKEYQEGEQLGFWNVREYVLFRDGHVCQHCHGGSKDPVLNVHHLESRRTGGDSPGNLITLCETCHKALHRGEITLKAKRGQSFRAEAFMGIMRWEVLNRLKASHPELEVNNTYGYRTKHARISNGIAKSHCADAFCIAGNLGAKRLGEFFFQKQTRRNNRQIHKLSILKHGLRKRNQAPFEIKGFRLFDKVACKGEEGFIFGRRSSGYFDVRKLDGTRISAGISYKKLHLLEKRQTYITEIRKEKALPPLPEGRGLRA

SEQ ID NO: 21995 - protein, 529 aa, unidentified; identical to SEQ ID NO: 6786
  REGION 1..529: note = Human gut metagenome

SEQ ID NO: 21996 - protein, 413 aa, unidentified; identical to SEQ ID NO: 15509
  REGION 1..413: note = Human gut metagenome

SEQ ID NO: 21997 - protein, 420 aa, Moorena sp.; identical to SEQ ID NO: 3094

SEQ ID NO: 21998 - protein, 480 aa, unidentified
  REGION 1..480: note = Human gut metagenome
LYTKPLDNIGEGSLPPSGEINLKGMTFMVYVKSIDGKALMPTSNAKARKLLKQKKAKVVSLRPFVVKLTYKTKTEYIQKLNLGVDSGYSNIGFSVIDAKQEYIAGEVKLLEGMKKRLLEKASYRRIRRSRLRYRKARWNNRVKSKKKGWLAPSLKHKLDTHIKFIDYLKNILPIEKITIEVANFDIQKMKDDLISGIDYQNGDMFGFWNVREFVLHRDGHKCQNPNCKHKDKKEQILKVHHIRYRSEGGSDRPENLITFCSKCHIPANHKKGKFLYDWCVNGKKVRGFKDATFMSMIRWYLVNELKSKHNNVSITYGYITKNHRIQNGIEKSHLNDAFAITKGTNQARTKDRFLVIQDRLKNRSLEKFYDSKIIDIRTGKKVSGGDLSCGRSTRNKNLNTENLRKYRGAKISKGQRRIRKQKYFYQPNDLVKYDGKVYTVKGTQNEGKYIALKEIKKVPKVELLIPYVFKKGLNWSYGLC

SEQ ID NO: 21999 - protein, 460 aa, unidentified; identical to SEQ ID NO: 3778
  REGION 1..460: note = Human gut metagenome

SEQ ID NO: 22000 - protein, 430 aa, unidentified
  REGION 1..430: note = Anaerobic digester metagenome
MGKTVQRVFVLDNNKNQLMPCHPARARELLKKGKASIFRYYPFTIILKDREGGDTQPIQVKIDPGSKYTGVALVADFKRGKKVIWASVIHHRGYVIKKNLDTRRAVRRSRRNRKTRYRQPRFLNRKRKEGWLPPSLISRVENILTWIKRIRRFSPITGISMELVRFDTQKLQNPEIKGIEYQRGTLYGYEIKEYLLEKWGRKCVYCGKENIPLEIEHIVPKSKGGSDRISNLTLACHECNQKKGNQSIEEFLANNPERLNQIKSESKKPLKDTAAVNATRWYLFNQLKKERLPIEVGTGGQTMYNRETQGYPKEHWIDAACVGESGQNVQLEPDMKVLEIKAMGHGMRRMCFVDKYGFPKSYRPKERTYMGYKTGDIVLAKVPKGKNKGIHTGRIVIRHSPSFLLNGVGNVHPKYLTLLQRNDGYGYKIS

SEQ ID NO: 22001 - protein, 280 aa, unidentified
  REGION 1..280: note = Human gut metagenome
LLKEKKAIVVRRTPFTIQLTIATGETKQPVSLGVDAGYKHVGLSASTENAELYASEVELRQDVSDLLSARRALRQSRRNRNTRYRAPRFDNRIRTKRKGWLAPTVENRINVHLSRIETVLRLLPVTKITVETASFDTQLLKNPDIAGKEYQEGEQLGFWNVREYVLFRDGHVCQHCHGRSKDPVLNVHHLESRRTGGDSPGNLITLCETCHKELHRGEITLKAKRGQSFRAETFMGIMRWEVLDRLKASHPKLEVQNTYGYWTKHARMLSASPAILAPKG

SEQ ID NO: 22002 - protein, 425 aa, Moorena sp.; identical to SEQ ID NO: 14003

SEQ ID NO: 22003 - protein, 415 aa, Bacillus sp.; identical to SEQ ID NO: 21045

SEQ ID NO: 22004 - protein, 414 aa, unidentified; identical to SEQ ID NO: 5310
  REGION 1..414: note = metagenome

SEQ ID NO: 22005 - protein, 490 aa, unidentified; identical to SEQ ID NO: 6170
  REGION 1..490: note = Human gut metagenome

SEQ ID NO: 22006 - protein, 536 aa, unidentified; identical to SEQ ID NO: 4526
  REGION 1..536: note = Human gut metagenome

SEQ ID NO: 22007 - protein, 392 aa, unidentified
  REGION 1..392: note = Human gut metagenome
MTNYVFVLDANGKHLSPTKEQKAWFFIRKKRATLVSKYPMVIQLNKEIPDDKICKDEIRCGIDDGGLHTGIALVQKCQTKNKVLFKGVIEQRNDVKHLMDVRRGYRRYHRYHKRYRPARFNNRSSSKKEGKIAPSILQKRQATIRAVAQLNKWINITDYWLEDVAIDIRALTDGFKPYKWQYQKSNRLDENIRKAVILRDGCQCVECGRTNCKLEVHHIKPRRLNGSNALSNLITLCERCHQNTEGREELFMDKYFALLNSSDNKYLNYAQHVMIGKKWLREQLSSLGILHLTNGGDTANKRIDWNIEKFHSNDAICITNLQPDTCDVKEWTIKPMRRQSKAKADNVLGIKHRDLVEYTFKSGETHRGYVTALYPKQNAINFQSPTKQCKKM

SEQ ID NO: 22008 - protein, 470 aa, unidentified; identical to SEQ ID NO: 2825
  REGION 1..470: note = Human gut metagenome

SEQ ID NO: 22009 - protein, 435 aa, unidentified; identical to SEQ ID NO: 16785
  REGION 1..435: note = Human gut metagenome

SEQ ID NO: 22010 - protein, 416 aa, unidentified
  REGION 1..416: note = Human gut metagenome
MVYVLDKNGQPLMPTDRHRKVRLMLQSGQAKVIKRCPFTIQLNYDSGHQTQEISLGIDAGSKHIGVSATTKIKVLYEADVELRNDIVNLLSSRRELRRGRRNRKTRYRQAKFNNRRRGNGWLAPSIRQKIGTHLTVVENICKMLPISRIMVETASFDIQKIKNPDIQGAEYQQGDQLGFWNNREYVLFRDNHTCQCCKGKSKDKILNVHHIESRKTGGNAPNNLITLCEICHTGYHKGAIQLPKTVKRGMRFKDAAFMGIMRWAFYEALKQQYEPVGTPVHNTYGYITKHTRIEHNLPKEHYVDARCISGNPEASSNGEYYYQKKVRCHNRQMHKLTILKGGIRKQNQATYLVKGYRLFDKVSYQRKEYFVFGRRKSGFFDIRTLSGKQVNKGSLSCKKLKFIATRMYYLIERRAV

SEQ ID NO: 22011 - protein, 458 aa, Scytonema sp.; identical to SEQ ID NO: 6085

SEQ ID NO: 22012 - protein, 461 aa, unidentified
  REGION 1..461: note = Human gut metagenome
VQPLYLGIDPGRTNIGVAVVKANGTAVFTAHLETRNKEIPKLMQDRKKARRARRTNGRRCRRQRRAKANGTISKKCVKQTTAQNGSVSKRAKDIGVIKRRLPGCEKDVLCIGIKNKETKFTNRTRPEGWLTPTANQLLQTHINLVKKIQKFLPISDVVLEVNKFAFMRLNNPNIQKWQYQQGPLYKKESLESAVSEIQEHHCLFCKKPIDHYHHVVPQHKNGSNTIGNIVGLCAKHHDLVHKDSAWEKKLAKKSTGLYKKYGALGVLNQIIPTLTNELSSLFPKHSFVTNGKSTYDYRAAHGVSKDHWLDAYCIACSVLPSNVCDSNINNHMPYVLKQFRRHDRRVLNNENMNRVYTLNNKAVAINRHKAKDQKTVSLEEFRKEHPDDVCKLKVKEHHPTYRNMNRNFPGSVFLVGKQIHVMQGIASSKDGKATKYNDTSATAIAAGKCKFVAKNTGILFV

SEQ ID NO: 22013 - protein, 413 aa, unidentified
  REGION 1..413: note = Human gut metagenome
MPCSPAKARLLLKEKKAIVARRTPFTIQLTIATGEAKQPVSLGVDAGYKHVGLSASTENAELYASEVELRQDVSDLLSARRALRQSRRSRNTRYRAPRFDNRIRTKRKGWLAPTVENRINVHLSRIETVLRLLPVTKITVETASFDTQLLKNPDIAGKEYQEGEQLGFWNVREYVLFRDGHVCQHCHGRSKDPVLNVHHLESRRTGGDSPGNLITLCETCHKALHRGEIKLKAKRGRSFRAETFMGIMRWGVLNRLKASHPKLEVHNTYGYRTKHARIANGIAKSHCADAFCIAGNFGAKRLGEFFQKQTRRNNRQIHKLSILKGGIRKRNQAPFEVKGFRLFDKVACQGEEGFIFGRRSTGYFDVRKLDGTCISAGISYKKLHLLEKRRTYLTEIRKEEALPPPPEGRGLRA

SEQ ID NO: 22014 - protein, 421 aa, unidentified
  REGION 1..421: note = Human gut metagenome
MQYVYVLNKHGEPLMPCSPGKARLLLKQQKACVVKRTPFTIKLLYGSAGYKQPITLGVDAGSKHVGLSASTEKRELYREEFTPRNDVVDLLSTRRQNRRSRRNRKTRYRAPRFDNRVHSKHKGWLAPSVEVKIQEHITVIKRICRILHITLVRVETAEFDTQRLKAMLKGKSLPVGTDYQLGEMYDEYNVRQYVLKRDNYTCQCCGAHPTEKKPVRLHVHHLESRHVGGNAPNNLITLCVACHKALHEGKITLDKGKKRGKPLRDAAFMGIMRNTLLARLKDELNIPVKQTYGYITKLLREKNKIPKSHVNDARCIAKAPNAKPCDTMLYTRALRHHNRQIHKAKILNGGIRKKNQAPYLVKGFRLWDKVRYNGEECFITGRRSSGYFALKKYDGTVISNSASYKKLMLLEAATNYITERS

SEQ ID NO: 22015 - protein, 430 aa, unidentified
  REGION 1..430: note = Human gut metagenome
MPNKVYVINKHGRPLMPCSPAKARHLLDAGKAKVKKRTPFTIQLVYGSSGYTQEVILGVDAGSKTIGMSASTTKEELLSAEVKPRNDVVDLLSIRREFRRARRNRKTRYRKPRFDNRVRSRHKGWLAPSVEVKIQEHITAIRRVCGILPVSKVVVETAEFDLHLLKAIADGKPVPQGEDYQQGEMYGHYNVRQYVLWRDGYTCQCCGAHATKKKEVRLHVHHLESRKVGGDAPDNQVTLCESCHEKLHKGLIAEKDFKKRKRHSTRDATFMGIMRKTLMQRLCSELPIPVVKTRGYITKATREKLLVLPKSHTNDALAIAQGKRGFNVGYLPEIAQIDKICTIRPVRHHNRQLHKATILKGGIRKSNQTEKYVFGYRLFDKVQFNGQDCFIWGRTTGIFTIKTINGKMIKDGISFKKLKPVEKSTSYLIA

SEQ ID NO: 22016 - protein, 443 aa, unidentified
  REGION 1..443: note = Human gut metagenome
LTKDENRPSGRTTGLRAEQAEPAGIRKGDTLKVFVLNMRGKPLMPCSPAKARHMLKAGKAFVVRRTPFTIKLTIATGETKQDVTLGVDAGARHVGISATTEKEEVFASEVALRQDITGLLADRLAFRRARRNRKTRYRAPRFNNRVRSKHKGWLAPSVENRIQAHISRIEAVCRLLPVTKIVIETASFDIQKIRNPEVEGTGYQQGDQLGFWNVREYVLFRDGHVCQHCHGRSRDKILNVHHLESRKTGGDAPNNLITLCETCHKAYHAGKIKLKVKRGQSFRAEAFMGIMRWTLLDRVRKTHPKLPVENTYGYLTKHKRIALGLPKTHCADAFCIAGNLKALRRGDFLFQQQTRKHNRQIHRCSILKGGVRKLNQAPFLVKGFRLFDKVRIGGQIGFVFGRRVRGIFNIRRLDKTVIGTDINCKKLSLLETRKTFLTELRKE

SEQ ID NO: 22017 - protein, 418 aa, unidentified
  REGION 1..418: note = Human gut metagenome
MVYILNKHNEPLMPCSERKARLLLKDGMAIVCRKDIFTIKLINGSYGYKQHITLGVDCGSKHVGVSATTDKQELFSANAELRNDVVKLLSDRRMLRRNRRSRKTRYRKPRFNNRIVKNGWISPSIKQKIQSHFNLVDFLHKLLPISKIVIETASFDIQKINNPSISGSEYQQGEQLDFFNVREYVLFRDNHTCQHCKGKSKDKVLNVHHIESRKTGGNSPNNLITLCETCHKAYHRGDFELNVKRGKSFRDSAFMGIMRWELYDELKLRYDNVSMTFGYITKYKRIKLGLDKEHYNDAYCICGNLAAKMLSAHHFIRFIPRHSRVLHIQKFSKGGVRRSASAPYWLNGGKPSKSGAMFTMFDKVKFNGIVCFISGSSNGYAALRDINWNKIDGCKTVVTVNKLLLISRKYGGFIVEKK

SEQ ID NO: 22018 - protein, 411 aa, unidentified
  REGION 1..411: note = Human gut metagenome
LYDSKTNTQPIEICEDVGYNYIGISVKSQSHEYVSAQYDTLQDEKACHDSCRKYRRTRRNRLRYRKPRFDNRKRSEGWLAPSLRHKKELNVNVVKMYCAVMPITHATVEVGSFDTMLVKAIQEGKAIPEGADYQKGPRYNLATLREAVFYRDNYVCKVCGRKATEGAILHVHHMFYWKGRHGNSLSELITVCEKCHTPANHQKGGKLYGFGENVKFADLSGAAFMNTVRWQIVNELYAAFGKDFVTVTYGAMTKEKRIALHLEKSHNNDAYAMGNCHPAHRCEFGHYQKRCRNNRVLEKFYDATYIDTRTGDKAKGKELFNGRISRNHKKDSEDLHKYRSKKVSKGRRSIRRQRYAIQPYDTVRLKSKSYITSGCHNKGTRLLIPANGKSKSVAISKVQVVCHAGAWIQII

SEQ ID NO: 22019 - protein, 494 aa, unidentified; identical to SEQ ID NO: 5675
  REGION 1..494: note = Human gut metagenome

SEQ ID NO: 22020 - protein, 488 aa, unidentified; identical to SEQ ID NO: 9276
  REGION 1..488: note = Human gut metagenome

SEQ ID NO: 22021 - protein, 462 aa, unidentified
  REGION 1..462: note = Human gut metagenome
MSVLVIGRNGKALMPTNPRKARLLLKKKTASVVCRHPFTIQLLYKTGCATQEGCIGIDTGSQHIGVGITCGDRVILKDEHALRSSMEKRSLLATRAVMRRGRRYRKVRYRKPKWRHHTKRMYFEKANRRGQHWRKVKTTTQSPRLKGWLPPSLQSKCDHHFRIIDRYLKYLPDPITRNLVIEAGRFDMARMNDPTIHGEMYQRGPMYDAENLRAYIFARDNYQCACCKAKAGTTRKADGTTVKLVAHHILFRSRGATDNPKYIISVCDHCHTTKAHQPGGILYSWMENNKKVARGLRDAVFMNILRKRLFARYPQSAFTYGNITATDRKQLRLPKSHANDAVAISLFGKEASTVKNICQTMHYKQIRKSKRSLHEAIPRKGRKNPNTKAVRNKKNTTQVNGFKLWDSVLANGKKLFICSFTGTSAYLIDKNGCYISQPGKTYKQWPLSKLKRLHPNGNWLMA

SEQ ID NO: 22022 - protein, 411 aa, unidentified; identical to SEQ ID NO: 3917
  REGION 1..411: note = Human gut metagenome

SEQ ID NO: 22023 - protein, 413 aa, Ferroplasma sp.
MPVFILNDDGKPLIPCKPAKARHLLSDKKAKVISSNPFTIQLLWHCEENVETITLGIDSGYKHIGFSAVTDNKELISGEVVIRTDIPKLNEEKAMYRRKKRNKLWYRKPRFMNRGNNKEGWFAPSIEHKLETHIRLIEKLKRILPVSNTVIEVASFDTQKMKNPEISGIEYQQGELQGYEIREYLLEKFHHICVYCSKTGVPLEIEHLTPRSRDGPDTVNNLAISCHECNQKKNNLTAEEFGYPEVRKRALITMRDAAFMNTVRWKLTQLTGSEHTLGFITKKNRISLSLDKTHVNDAFVIAGGTVQIRTSPFTITQRRRNNRSIQTNRKGFRPSIRRKRYAFQPGDIVVYDHERFSVVGMHNYGKSIVIKGGGKKMDINTKKVKLVKYGKGLQFAPQFLPTLSDGVSLGGVR

SEQ ID NO: 22024 - protein, 544 aa, Actinomadura sp.; identical to SEQ ID NO: 16226

SEQ ID NO: 22025 - protein, 412 aa, unidentified
  REGION 1..412: note = Human gut metagenome
RRARRTNGRRHRRQRRAKANGTISKKCVKQTTTQNGSVSKRAKEIGIIKRHLPGCEKDVLCIGIKNKEAKYTNRERPEGWLTPTANQLLQTHVNLVKKVQKLLPISDVVLEVNKFAFMRLDNPDIQKWQYQQGPLYQKESLESAVSEMQEHHCLFCKKPIDHYHHVVPKSENGSNTIANIVGLCAEHHNLVHKDVAWQEKLAEEKTGLNKKYGALSVLNQIIPALTKELSSLFPKHFFVTNGKSTYDYRAAHGVSKDHWLDAYCIASSVLPNDTCDKTINSRVPYELKQFRRHDRRALNNENMSRVYTFNGKMVATNRHKATEQTTDSLEEFRQRQPNDVCNLKVKEHHPTYRNMNRNYPGSVFLVGNQVHVMQGIAGSKDGEATTYKDTNANSIAAGKCKFVAKNSGILFV

SEQ ID NO: 22026 - protein, 413 aa, unidentified; identical to SEQ ID NO: 3295
  REGION 1..413: note = Human gut metagenome

SEQ ID NO: 22027 - protein, 424 aa, Moorena sp.; identical to SEQ ID NO: 13009

SEQ ID NO: 22028 - protein, 419 aa, unidentified; identical to SEQ ID NO: 7217
  REGION 1..419: note = Wastewater metagenome

SEQ ID NO: 22029 - protein, 522 aa, Moorena sp.; identical to SEQ ID NO: 16031

SEQ ID NO: 22030 - protein, 422 aa, unidentified; identical to SEQ ID NO: 3922
  REGION 1..422: note = bioreactor sludge metagenome

SEQ ID NO: 22031 - protein, 512 aa, unidentified; identical to SEQ ID NO: 3057
  REGION 1..512: note = Human gut metagenome

SEQ ID NO: 22032 - protein, 408 aa, Halomonas sp.; identical to SEQ ID NO: 21647

SEQ ID NO: 22033 - protein, 447 aa, unidentified; identical to SEQ ID NO: 5316
  REGION 1..447: note = Human gut metagenome

SEQ ID NO: 22034 - protein, 444 aa, unidentified; identical to SEQ ID NO: 19934
  REGION 1..444: note = Microbial mat metagenome

SEQ ID NO: 22035 - protein, 518 aa, unidentified; identical to SEQ ID NO: 19733
  REGION 1..518: note = Human gut metagenome

SEQ ID NO: 22036 - protein, 343 aa, unidentified
  REGION 1..343: note = Human gut metagenome
RKYWRLLPVFSDISSIVNRKTRYRAPRFDNRIRTKRKGWLALSLENRINAHLSRIEAVLRLLPVTKITVETASFDLQLLKNPDISGKEYQEGEQLGFWNIREYVLCRDGHVCQHCYGRSKDPVLNVHHLESRRTGGDSPGNLITLCETCHKALHRGEITLKAKRGQSFRAEAFMGIMRWEVHNRLRALHPGIEVSNTYGYRTKHARIANGIAKSHCADAFCIAGNLGAERLCEFFFQKQTRRNNRQIHKLSILKGGIRKRNQAPFEVKGFRLFDKVACQGEEGFIFGRRSSGFFDVRKLDGTRISAGISCKKLHLLEKRRTYLTEIRKEEALPPLPEGRGLRA

SEQ ID NO: 22037 - protein, 515 aa, unidentified; identical to SEQ ID NO: 3339
  REGION 1..515: note = Human gut metagenome

SEQ ID NO: 22038 - protein, 430 aa, unidentified
  REGION 1..430: note = Human gut metagenome
MPKVYVLNRHGRPLMPCTPAKARHLLDAGKAKVKKRTPFTIQLVYGSSGYTQEVILGVDAGSKTIGVSASTKKEELFAANVIPRNDVVDLLSTRREFRRARRNRKTRYRKPRFDNRVRSKHKGWLAPSVEVKIQEHITSIKRVCRILPVSKVVIETAEFDLQLLKAIEEGKPVPQGEDYQQGEMYGHYNVRQYVLWRDDYTCQCCGAHATKKKEVRLHVHHLESRKTGGDAPRNLIPLCDSCHKKHHDGLITEDDFKKRKRRSTRDATFMGIMRKTLIQRLRAELTIPVAETRGYITKATREKLLVLPKSHTNDALAIAQGKHGFNVGYLPGILQIDKIYTIRPVRHHNRQLHKATILKGGIRKSNQAEKYVFGYRLFDKVQFNGQDCFIWGRRTSGYFVVKTIDGKVIHNSASFKKLRLVERASNYLIA

SEQ ID NO: 22039 - protein, 433 aa, Moorena sp.
MVYVISKDGKPLMPTKNHAKVRILLKHQKAKIVKRKPFTIQLLYETTTYTQPITLGIDSGYNYIGFSAVTEKEELISGEVKLLQGISERLKKRAMYRRQRRNRLRYRKPRFDNRRKPEGWLPPSIQHKYDSHVRFINLLKSILPITEVIIEAASFDIQKIKNPDIEGIDYQNGEQKGFYNLREYVLYRDNYTCQLCGKDNLPLEVHHIGYWKPDRTDRPSNLITLCINCHTPENHLRSGKLWGWQPKLRAFKEATFMSVVRWKLVNVLGCKYTYGYITKAKRKALMLEKTHYNDAFIIAGGSNQKRVEPIYFEQVRRNNRSLEKFYDAKYIDTRTGKPATGQELFNGRRIRNKNYNTENLRKYRGQKLSKGRRSIRKQRYVYQPKDVVIYEGQKYIVKGVQNRGAYIKLEGLPKPVRIELVRPYLFRKGFCVA

SEQ ID NO: 22040 - protein, 422 aa, unidentified
  REGION 1..422: note = Human gut metagenome
LNKRGKPLMPCSPAKARLLLKEKKAIVVRRTPFTIQLTIATGESKQPVSLGVDAGYKHVGLSASTDKAELYASQVELRQDITDLLSARRALRQSRRNRKTRYRAPRFDNRIRTKRKGWLAPSVENRINAHLSRIEAVLRLLPVTKITVETASFDMLLLKNPDIAGKEYQEGEQLGFWNVREYVLFRDGHVCRHCHGRSKDPVLNVHHLESRRTGSDSPDNLITLCETCHKALHRGEITLKAKRGQSFRAQAFMGIMRREVLNRLKASYPELKVHETYGYLTKHARIANGIVKSHGADAFCIAGNLGAERLGEFFFQKQTRRNNRQIRKLSILKGGIRKRNQAPFEAKGFRLFDKVACQGEEGFIFGRRSSGSFDVRKLDGTRISAGISCKKLRLLERRRTYLTEIRKEEALPPLPEGRGLRA

SEQ ID NO: 22041 - protein, 431 aa, unidentified
  REGION 1..431: note = Human gut metagenome
MPNKVYVINKHGRPLMPCSPAKARHLLDAGKAKVKKRTPFTIQLVYGSSGYTQEVILGVDAGSKTIGMSASTTKEELLSAEVKPRNDVVDLLSTRREFRRARRNRKTRYRKPRFDNRVRSKHKGWLAPSVEVKIQEHITSIKRVCRILPVSKVVIETAEFDLQLLKAIEEGKPVPQGEDYQQGEMYGHYNVRQYVLWRDGYTCQCCGAHATKKKEVRLHVHHLESRKVDGDAPDNQVTLCESCHEKLHKGLIAEKDFKKRKRRSTRDATFMGIMRKTLMQRLCSELPIPVIETRGYITKATREKLLVLPKSHTNDALAIAQGKQGFNVGYLPGIVQINKIYTIRPVRHHNRQLHKATILKGGIRKSNQTEKYVFGYCLFDKVQFNGQDCFIWGRRTTGIFTIKTINGKMIKDGISFKKLKPVEKSTGYLIA

SEQ ID NO: 22042 - protein, 494 aa, unidentified; identical to SEQ ID NO: 15434
  REGION 1..494: note = Human gut metagenome

SEQ ID NO: 22043 - protein, 432 aa, Moorena sp.; identical to SEQ ID NO: 16069

SEQ ID NO: 22044 - protein, 418 aa, unidentified
  REGION 1..418: note = Human gut metagenome
MVYVLGQDGHPLMPTCRHGKVKRMLKSRMAKVVKKCPFTIQLQYESTTHTQKINLGIDAGSKTIGVSATTDSKVLYESEVVLRNDIVELLSGRRALRRSRRNRKTRYRKPRFDNRRRPDGWLTPSIRQKIKTHVTVVENVMKILPVTKIIVETASFDIQKIKNPEIEGAEYQYGEQLDFWNVREYVLFRDGHTCQCCKGKSKDNILNVHHIESRKTGGNAPNNLITLCETCHKAYHKGVITLPKEIHRGMRFRDAAFMGIMRWAFYDRLKELYTPFGVEVINTYGYITKNTRIEHGLPKEHYVDARCISGNPAAKPLGHYYFQKKVRCHNRQIHKNTILKGGIRKRNQAAYLVKGYRLFDKVKYQNQEYFIFGRRSSGFFDIRTLNGTKVNKGSISCKKLQLVEKSKHYLTEQRKVTT

SEQ ID NO: 22045 - protein, 472 aa, unidentified; identical to SEQ ID NO: 13504
  REGION 1..472: note = Human gut metagenome

SEQ ID NO: 22046 - protein, 528 aa, unidentified; identical to SEQ ID NO: 20672
  REGION 1..528: note = Human gut metagenome

SEQ ID NO: 22047 - protein, 431 aa, unidentified
  REGION 1..431: note = Human oral metagenome
MLVYVISKDGQPLMPISRCGKVRRLLKNKQAKVVRRCPFTIKLLFEPEHNFVRECYLGVDTGSKHVGVAVVSNDRVLYQSQTELRVNIKKKIDYRRMYRRYRHYRKTRYRKCRFLNRRNSIKKDRLPPSVQHKVQAHIDEIEFCKKILPVLDENIILEVSQFDTALMKNPSLMNEKIKHWGYQQGFNYGYSSRRSAILHRDNYTCQCCGKKNTRLEVHHIIYRTNGGSNDETNLITLCKECHTKVHKGIITIDKKPKKLRFKHATHMSIIRSRLLKVYPQAIETFGFVTSENRHHLGLEKAHYIDACVIASGGLEFEPSDTIYYKRRVSCNERKLTKGVRDEQKLPVGKIQGFRRFDKVKYFGKEYFIMSRITRGGYAFLMDIFNNKIDFSDKPKGWRWPKLLNCKRISARRSTLCMLTTMIVSENKNSNQ

SEQ ID NO: 22048 - protein, 421 aa, unidentified
  REGION 1..421: note = Human gut metagenome
MRGQPLMPCSPTKARHLLRDKKAVVNRRTPFTIQLTIATGETKQDVTLGVDAGAKHVGLSATTEKEEVFASEVELRQDITKLLSARLAFRRSRRHRKTRYRAPRFLNRVHSKHKGWLAPSVENRIQAHMSRIDAICGLLPVTKIVIETASFDIQKIKNPDIEGTDYQQGDQLGFWNVREYVLFRDGHVCQHCRGRSKDKVLNVHHLESRQTGGDAPNNLITLCETCHKAYHAGKIKLKVKRGQSFRAEAFMGIMRWTLLDRVRKAHPDLPVENTYGYLTKNTRITLGLPKTHCIDAYCIAGNLNARRRGVYLYQRQMRKHNRQIHKCKVLSKTLKDGTKVGYRKLNQTPYLVKNFRLFDKVRCFGQTGFIFGRRTSGHFDVRTLNRTRLSDCVNSKKLTLLEKRRTFLTELRKEDGASSPV

SEQ ID NO: 22049 - protein, 512 aa, unidentified
  REGION 1..512: note = Human gut metagenome
MSTVYVLNKDGKPLMPTTRCGHVRHLLKEQKARVVTSKPFTIQLLYEADDVVQSLYLGIDPGRTNIGVTVVKADGTAVFTAHLETRNKEIPKLMKKRKESRRARRTNGRRCRRQRRAKANGTISKKCVKHDTAQNGSVSKRAKEIGVIKRHLPGCEKDVLCIGIKNKEAKFSNRTRPEGWLTPTANQLLQTHINLVKKIQKFLPISDVVLEINKFAFMRLDNPNVQKWQYQQGPLYQKANLEETVSEMQEHHCLFCKKKIDHYHHVVPQHKNGSNTIDNIVGLCTQHHDLVHKDATWQKRLAKKKTGLNKKYGALSVLNQIIPALTKELSSLFLKHFFVTNGKSTYDYRAAHGVSKDHWLDAYCIACSVLPNDTCDKTINSRVPYELKQFRRHDRRALNNENMSRVYTFNGKMVATNRHKATEQTTDSLEEFRQRQPNDVCNLKVKEHHPTYRNMNRNYPGSVFLVGNQVHVMQGIASSKDGEATTYKDTNANSIAAGKCKFVAKNSGILFV

SEQ ID NO: 22050 - protein, 483 aa, Moorena sp.
MQKLRERNTYTPTDIPHVRGNCDSRLISPEGRGRAANLKTSFNNPDAALTAREQAGQALRVPAIYVLNKRGKPLMPTTANKARRLLKKGLAKVVRRTPFTIQLLCPTGEALLPVQLGVDSGYSHVGLSAVSEKRELYSEEVHLRDDIVKLNAERKQYRRGRRYRKTWYRKARFLNRGNKKTGWLAPSLQNKLNAHLKTVEKVRKILPISQITVEIASFDIQKIQKMDIEGTDYSQGVQLGFENVRAYVLHRDGHTCQHCKGRSKELTLHVHHIKSRQTGGNRPDNLVTLCTSCHRNHHEGNITLKIKKSNGFKAETFMTTIRRTLMDQVRDKGIFIAPTYGYITQQNRRNLELPKSHVHDAFVIAGGKEQKRSPTTYFTKQVRKCNRKLFKGDRSHLPNTAPRFIQGFQRFDKVLWKRQECFVFGRRMIGYFDLRLLDGTKIHASAKIKDLKILESAKSFLTEVRRAHSSDSTRLSVSCVNFL

SEQ ID NO: 22051 - protein, 421 aa, unidentified; identical to SEQ ID NO: 7313
  REGION 1..421: note = Bioreactor metagenome

SEQ ID NO: 22052 - protein, 404 aa, unidentified
  REGION 1..404: note = activated sludge metagenome
MPCSNKKARQLLKNKKAEIIKYNPFTIRLLYATGETNQEINIGVDTGAKYIGIAITSQDKILVKGEIELRQDVKENLFSKKIFRKSRRNRKTRYRQARWNNRKRKDNWLPPSVQSKVDNQINWINKFVSLFPNSNLIIEVGKFDTAKMINPEIEGKEYQQGNLYEYENVKSYIIARENNKCQICGKDYDNNGWHLHHIKQRKDGGTDKVDNLALVHEQCHKDFHLGKFPKFKFTKPKEYKDATFMNILRQQIFERVNCKITYGSYTKVDRNNLNLDKTHYNDAIAISGIKNIKETTSDIFLIKQFRKKKRSLHEATARKGRKEPNVKSIRNSKNTKYSSGFYLNDKVKVFGKIGWISGFCSGGCYVKDIDDNYIIIPNKNYKQVGFKRLVLMCHNNNWQFICTR

SEQ ID NO: 22053 - protein, 471 aa, Moorena sp.; identical to SEQ ID NO: 12870

SEQ ID NO: 22054 - protein, 430 aa, Oribacterium sp.; identical to SEQ ID NO: 10842

SEQ ID NO: 22055 - protein, 417 aa, unidentified
  REGION 1..417: note = Human gut metagenome
MPCSPAKARLLLKEKKAIVKRRTPFTIQLTIATGEAKQPVALGVDSGYKHIGLSATTEKAELYASQVELRQDITDLLSARLALRRSRRSRKTRYRAPRFDNRVASKRKGRLAPSVENRIAAHMSRVEAVMRVLPVTAITVETAVFDTQLLKTPDIAGAAYQQGEQLGFWNVREYVLFRDGHVCQHCRGKSKDPILNVHHIESRRTGGDAPNNLITLCETCHKAFHRGEIKLKVRRGKSFKAETFMGIMRWTLLERLKKAHPELRVRNTYGYLTKHKRISHGIAKSHCADAYCIADNLGAKRLEGFFFQKQTRKHNRQIHKLLILKGGLKKKNQAPYEVKGFRLFDKVICKGEEAFIFGRRTSGSFDVRRLDGTRISAGINYKKLRLLEPRTTYLTEFRKEAALPPLHKCRGVCAEFL

SEQ ID NO: 22056 - protein, 431 aa, unidentified
  REGION 1..431: note = Human gut metagenome
MDAWDIIVVLNKRGKPLMPCSPAKARLLLKEKKAIVKRRTPFTIQLTIATGESKQPVTLGVDAGYKHVGLSASTEKAELYASEVELRQDVSDLLSARRALRQSRRNRKTRYRAPRFDNRIRTKRKGWLAPSVENRINAHLSRIEAVLRLLPVTKITVETASFDLQLLKNPDISGKEYQEGEQLGFWNIREYVLCRDGHVCQHCYGRSKDPVLNVHHLESRRTGGDSPGNLITLCETCHKALHRGEITLKAKRGQSFRAEAFMGIMRWEVLNRLKASHPELEVNNTYGYRTKHARIANDIAKSHCADAFCIAGNLGAERLGEFFFQKQTRRNNRQIHKLSILKGGIRKRNQAPFEVNGFRLFDKVACKGEEGFIFGRRSSGFFDVRKLDGTCISAGISYKKLHLLEKRRTYLTEIRKEEALPPLPEGRGLRA

SEQ ID NO: 22057 - protein, 442 aa, Lactobacillus sp.; identical to SEQ ID NO: 9293

SEQ ID NO: 22058 - protein, 494 aa, unidentified
  REGION 1..494: note = Human gut metagenome
MAMVYVQNKDGKPLMPTTRYCYVRLLLKENKARVVCTTPFTIQLNYDTPDITQDLILGIDPGRTNIGVAVVKEDGQCVFSAHLETRNKDIPLLMKKRAGFRRQHRTLDRRRKRQRRARAAGTTIAEGSVERLLPGYEKPVVCHYIRNKAARFNNRSRPAGWLTPTANHLLQTHINLIAKVAKFLPITKVVVELNRFAFMAMDNPNIHRWEYQQGPLYGLGSVEDAVYAQQDGHCLFCKKPIDHYHHVIPRHKGGSETLANRCGLCAKHHDLVHKDKAWADKLVTRKEGMNKKYHALSVLNQIIPFLMEYLGSETPYDVYATDGKSTKGFRVAKNVPKEHYTDAYCIACSILDTDVDVSAPTSPFELKQFRRHDRQACIRQMVDRKYLLDGKVVAANRHKAFEQESDSLQEFREAYGDAAVSQLTVKPHSPQYKDMTRIMPGAVMDFGGAVGILQGSEGFHNGKPDYYKSTKGERVLTRRCALLAQNAGMVFIPA

SEQ ID NO: 22059 - protein, 423 aa, Microcoleus sp.
MSNFIFVLDTNRKPLTPCKPSMARKLLVAGKAAVFRRFPYTIILKKAVTASIESISLKLDPGSKTTGIALLQGEKVIFGAELTHRGQAIKASLESRRLLRRVRRNRHTRYRQARFLNRTRRKGWLAPSLQHRVETTLTWVNKFIRLAPVSSIAMELVRFDLQQLENPEISGVEYQQGELLGYEIREYLLNKWDRKCAYCGAENLALQVEHIHPKAKGGSNRISNLCLACEKCNVKKGTQDIKDFLFKKPDLLKQIMAQVKRPLKDAAAVNSTRWALFNRLKLTGLPVTTGSGGQTKYNRTRLKLPKPHWLDAACVGQIESLSVLTSNPLLIKATGHGTRQMCRTDKFGFPSRYVPREKFVKGFQTGDIVKAVVTSGKKVGEYVGRVAVRSTGSFNVSASELVQGISHKYCKIVHHKDGYSYSF

SEQ ID NO: 22060 - protein, 424 aa, unidentified; identical to SEQ ID NO: 10419
  REGION 1..424: note = Human gut metagenome

SEQ ID NO: 22061 - protein, 456 aa, unidentified
  REGION 1..456: note = Human gut metagenome
MSTCVCVLSNSGERLMPTFRFGKVRRLLKDGKAKIVKHHPFTIQLLYDSKANTQPIEICEDVGYNYIGISVKSQSHEYVSAQYDTLQDEKACHDSCRKLRRSRRNRLRYRKPRFDNRKRGEGWLAPSLEHKKQLNIRLIERYVSVIPITRATVEVGSFDTMLLQAIQKGESKPEGVDYQKGPRYNLATLREAVFYRDNYTCQVCGRKVADGAILHMHHMFYWKGRHGYQLDELVTACEKCHTPANHQKGGKLYGFGKDKKFANLSGAAFMNAVRWQIVDALHATYGKEFVTITYGAMTKEKRIALQLEKTHNNDAYAMGDYHPACRCKFRHYQKRRRNNRVLEKFYDATYIDARTGNKAKGKELFNGRISRNHKKDSENLHKYRSKKVSKGRRSIRRQRYAIQPYDTVRLENKTYITSGCHNKGTRLLIPANGKSKSVAISKVQVVCHAGAWIQII

SEQ ID NO: 22062 - protein, 431 aa, unidentified; identical to SEQ ID NO: 11325
  REGION 1..431: note = Human gut metagenome

SEQ ID NO: 22063 - protein, 465 aa, unidentified
  REGION 1..465: note = metagenome
MSTCVCVLSNNGERLMPTIRLGRVRHLLKDGKAKIIKHHPFTIQLLYDSKTNTQPIEICEDVGYNYIGISVKSQSHEYVSAQYDTLQDEKACHDSCRKLRRTRRNRLRYRKPRFDNRKRGDGWLAPSLKHKKELNVNVVKMYCTVMPITHATVEVGSFDTMLVKAIQEGKVIPEGADYQKGPRYNLATLREAVFYRDNYVCKICGRKATEGAILHMHHMFYWKGRHGNSLNELLTVCEKCHTPANHQKSGKLYGFGEKIKFADLSGAAFMNTVRWQIVNELYVAFGKPFVTITYGAMTKEKRIALQLEKSHNNDAYAMGEFHPNLRCMFEHYEKARRNNRILEKFYDSRYIDIRTGEIATGKELFNGRINRNHKKDSENLHKYRGKRTYAGHRALLRKKMNLNPGDLVSLNGENLIVHSTHTKKNGAVNVEFETPAKSGQKSASLKKLKIVKAADSIHPAWKKIS

SEQ ID NO: 22064 - protein, 431 aa, unidentified
  REGION 1..431: note = Human gut metagenome
MPNKVYVINKHGRPLMPCSPAKARHLLDAGKAKVKKRTPFTIQLVYGSSGYTQEVILGVDAGSKTIGMSASTTKEELLSAEVKPRNDVVDLLSTRREFRRARRNRKTRYRKPRFDNRVRSRHKGWLAPSEEVKIQEHITAIKMVCRILPVSKVVVETAEFDLQLLKAIADGKPVPQGEDYQKGEMYGHYNVRQYVLWRDGYTCQCCGAHTTKKKEVRLHVHHLESRKTGGDAPGNLVTLCDSCHEKLHKGLITEDDFKKRKRRSTRDATFMGIMRKTLMQRLCSELPIPVVKTRGYITKATREKLLVLPKSHTNDALAIAQGKHGFNVGYLPGIEQIDKIYTIRPVRHHNRQLHKATILKGGIRKSNQAEKYVFGYRLFDKVQFNGQDCFIWGRRTSGYFVVKTIDGKVIHNSASFKKLRLVERASNYLIA

SEQ ID NO: 22065 - protein, 430 aa, unidentified; identical to SEQ ID NO: 6608
  REGION 1..430: note = gut metagenome

SEQ ID NO: 22066 - protein, 422 aa, unidentified
  REGION 1..422: note = Human gut metagenome
MQYVYVVGSNGKPLMPCSPAKARKLLKSKSAAVLQRTPFTIKLLHHAGGYKQPITLGVDAGSKHVGLSACTDTEELYKEELTPRNDVVKLLSARRECRRGRRHRKTRYRAPRFNNRVHSKHKGWLAPSVEVKIQEHITAIHRICRRLPITKIVVETAEFDTQRLKAMLEGKPLPVGIDYKRGEMYDEYNVRQYVLKRDNYTCQHCGARGSAEKGIKLHVHHLETRQTGGNAPNNLITLCKDCHTALHDGKITLKLDKKKRGKPLRDSAFMGIMRKTLLSRIRKEVAIPVVETQGYITKLLREENHIQKSHTNDARCIAGCPKALPCDTTYHTKAIRHHNRKIHKINILKGGVRKLNQAPYKVFGFRIWDKVKYKGQECFITGRRSSGYFALKKLGGTTISNSANYKKIHFLEPANHYIIERS

SEQ ID NO: 22067 - protein, 414 aa, unidentified; identical to SEQ ID NO: 3759
  REGION 1..414: note = Human gut metagenome

SEQ ID NO: 22068 - protein, 453 aa, unidentified
  REGION 1..453: note = Human gut metagenome
MSVAVVSKTGMLLMPTSEYRARKLLKSKKAIIHGYHPFTIQLTERETGYIQPVELCMDTGYIHIGTSVKSEKHEYLGEQIDTLTDERQKHDACRMYRRQRRNRKRYRQPRFNNRERDDGWIAPSLEHKKTIHIQAISRICKVIPVTDITLEMGNFDTQVLKAREEGRPLPQGLDYQHGERYSVTTLREAVFLRDGYTCQCCGRTIKDGAILHAHHVVYRSQGGTNRISNLITVCDKCHTPANHKPGGKLYGWKPKVASFKGATYMTTIRWKLYNEVKALFLDIDIHITYGAETKERRRAFDITKSHVNDAFVMGQFHPKHRSKPVCYKKKRRNNRCLEKFYDAKYIDSRNGKTRTGQELFNGRISRNHKKYSENLHQYRRQKISAGKRTIRKQHYAIQPHDIVIFNGEKFETSGCHNNGTRVILLPQKKSVAIKKLNIYRYAGGYFKSAFNQK

SEQ ID NO: 22069 - protein, 518 aa, unidentified
  REGION 1..518: note = Human gut metagenome
MTPKKRKEASRMSEYIYVLGMDGDPQMPTKRKRHVEKLLQAGRARVFRQIPFTIQLTYENKPVLQPVTIAEDPGRSNIGMAVVSLSGELLSAAVVQTRNKEIVKLMEKRKQHRRASRNGERKARQRLAKKCHTMIKTGFLMRKLPMYGKDKRVRCNVIKNTEAKFCNRKREDGWLTPSAEHLVRTHINLIHKMQKFLPITDVAIEINRFAFLSLEDPSISGVDFQNGPLKGYDDLNVAIEDLQDGHCLMCNSPIEHRHHIVPRSMQGSNTIGNIAGLCCKCHERVHKDARFEDRLKKKKAGLNKRYAAVSVLNQAIPFICKRLEQEFGKEHVYYCSGRDTSMVRRSLGYHKTKEEQLHEVDAWCIAVLALQHVPEKAPEFDHVHEILQFRRQDRSRIKAQTSRAYYHEGKKIAKNRKKAEGQKDDSLQGWRKRQVERYGEEQTRKMISQLKVKKSIRRYNRLDRLMPGAVFYYQGVRYVMRGQHSNGQYLQAVGMRDKDFPAKKCKIVVHNQGLVFVS

SEQ ID NO: 22070 - protein, 413 aa, unidentified
  REGION 1..413: note = Human gut metagenome
MTGYAFVLDVNGKQLAPTKEQKAWFLIRKKRVILVSKYPMVIQLNKEIPDEEICKDEIRCGIDDGGLHVGIALVQKCQTKNKVIFKGIIEQRNDVKHLMEVRRDYRNYHRYHKRYRQARFNNRSSSKREGRIAPSILQKRQATIRVINRLNKWINITNYWLEDVSIDIRALTDGYKSYSWQYQRSNRLDENIRKAVILRDNCECKECGKGNCRLEVHHIKPRRLNGSNTMDNLITLCENCHQKTEGQEELYMSRYFDLLKSSDNKRLNYAQHVMIGKKWLREELSNLGILYLTNGGDTANKRIDWGIEKSHSNDAICITDLQPDICNIKEWTIRPMRRQSKAKTDNVLGIKHRDLVEYTFKNGETYKGYVTALYPEQKAINFQSPTKHCKKVNARKCKLLWKYSKIYWLENAG

SEQ ID NO: 22071 - protein, 406 aa, unidentified; identical to SEQ ID NO: 6079
  REGION 1..406: note = Human gut metagenome

SEQ ID NO: 22072 - protein, 413 aa, unidentified; identical to SEQ ID NO: 5965
  REGION 1..413: note = Human gut metagenome

SEQ ID NO: 22073 - protein, 462 aa, unidentified
  REGION 1..462: note = Human gut metagenome
MSVLVIGRNGRALMPTNPRKARLLLKKKTASVVCRHPFTIQLLYKTGCATQEGSIGIDTGSQHIGVGITCGDRVILKDEHALRSSMEKRSLLATRAAMRRGRRYRKVRYRKPKWRHHTKRMYFEKANRRGQHWRKVKTTTQSPRSKGWLPPSLQSKCDHHFRIIDRYLKYLPDPITRNLVIETGRFDIARMNDPTIHGEMYQRGPMYDAENLRAYIFARDDYQCACCKAKAGTTRKADGTTVKLVAHHILFRSRGATDNPKYIISVCDHCHTTKAHQPGGILYSWMENNKKVARGLRDAVFMNILRKRLFARYPQSAFTYGNITATDRKQLRLPKSHANDAVAISLFGKEASTVKNICQTMHYKQIRKSKRSLHEAIPRKGRKNPNTKAVRNKKNTTQVNGFKLWDSVLADGKKLFICSFTGTSAYLIDKNGCYISQPGKTYKQWPLSKLKRLHPNGNWLMA

SEQ ID NO: 22074 - protein, 472 aa, unidentified
  REGION 1..472: note = Human gut metagenome
VVGNNLLSIKPLINIGEGVIYSSICTGLSLQTYQKRKEVPYMVYVLDIDGQPLMPTTRHGKVRRLLNNHLAKVVKRCPFTIQLLYQSTKETQPVSLGVDAGSKHIGMAATTEKKVVYQEELSPRNDVVKLLSARRTLRRTRRNRKTRYRKPRFNNRAHSKHKGWLAPSVEVKIQEHITAIKRICQILPISEIHVETAEFDLQRLKAMDEGSPLPVGIDYQLGEQYDFYNTRQYVLHRDGYTCQCCGTHDNNIKLHVHHIESRQTGGDAPNNLIILCEHCHKALHEGKLELSKGKKRGKSYRDATFMGVIRKTLLERLKKEIDVPVEGTYGYITKYWRERAGLEKSHIHDSVCISKYPYAKPLDIYYLTKTVRHHNRQIHKSNFSKGGIRKRNQAPYLVKGFRLFDKVLYQGKEYFIFGRRATGYFDIRTLDGTKVNKGSISYKKLRIQDTAKAYLKEARAIPHMNKFTCILA

SEQ ID NO: 22075 - protein, 515 aa, unidentified
  REGION 1..515: note = Human gut metagenome
MTALEEKLSKTEYIYVLGFDGKPQMPTRRKRHVLKLLKTGRARIAEDIPFTIRLTYRNAPVLQPVTLAEDPGRTNIGAAVLSPLGDLLFAAVIETRNKEIKKLMADRQKSRQASRRGERKARQRLAKRYGSMVKSGMVMRKLPMYAADKFVTCKFIRNTQARFCNRKRCPDWITPTVQHLVQTHLNIIRKISRYLPVTDIAFEVNRFAFMHMENPKAMGVDFQNGPLKGYDDVKEAICTQQHGKCLMCKKPISHFHHIVPRSRGGSDTIQNLAGLCPECHTKVHTDTTFRKDFDRKKSGQLKKYGALSALNQAVPFICKKLLEEYGEEHVHFCGGLDTSLIRTALGFEKTKKNQMHEVDAYCIGLAALEINEVETPAFDHTFQIRQFRRQDRSIIHHQTGRSYYQGKEKVAQNRKPGFEQKTTALSQWYEEQVRIHGEKEAEKLRSQLRVEKSCRHYNDMDRFLPGAVFLYEGKRYVLSGRITNGKYLRACGQGMKNFPAAECTFIRHNAGLVFI

SEQ ID NO: 22076 - protein, 450 aa, Clostridium sp.; identical to SEQ ID NO: 10358

SEQ ID NO: 22077 - protein, 420 aa, unidentified; identical to SEQ ID NO: 3153
  REGION 1..420: note = Human gut metagenome

SEQ ID NO: 22078 - protein, 406 aa, unidentified; identical to SEQ ID NO: 7406
  REGION 1..406: note = metagenome

SEQ ID NO: 22079 - protein, 494 aa, unidentified; identical to SEQ ID NO: 5897
  REGION 1..494: note = Human gut metagenome

SEQ ID NO: 22080 - protein, 481 aa, unidentified
  REGION 1..481: note = Human gut metagenome
ARVVTSKPFTIQLLYETDDVVQPLYLGIDPGRTNIGVAVVKADSTAVFTAHLETRNEEIPKLMQGRKKARRARRTNGRRCRRQRRAKANGTISKKCVKQTTAQNGSASKRAKEIGVIKRHLPGCEKELLCIGIKNKETKFSNRTRPEGWLTPTANQLLQTHINLVKKIQKFLPISDVVLEINKFAFMQLDNPNIQKWQYQQGPLYQKASLEEAVSEMQEHHCLFCKKPIAHYHHVVPQSENGSNTIGNIVGLCTKHHDLVHKDATWQKKLAKKKTGLNKKYGALSVLNQIIPALTKELSSLFPKRFFATNGKSTYDYRAAHGVSKDHWLDAYCIACSVLPNDTCDRTINSRVPYELKQFRRHDRRALHKENMSRVYTLNGKSVATNRHKATEQTTDSLEEFRQRQPNDVCKLKVKEHHPTYRNMNRNYPGSVFLIGKQVHVMQGIAGSKDGEATTYKDTNANSIAAGKCKFVAKNSGILFV

SEQ ID NO: 22081 - protein, 480 aa, unidentified
  REGION 1..480: note = Human gut metagenome
LYTKPLDNIGEGSLPPSGEINLKGMTFMIYVKSIDGKALMPTSNAKARKLLKQKKAKVVSLRPFVVKLTYKTKTEYTQKLNLSVDSGYSNIGFSVIDTKQEYIAGEVKLLEGMKKRLLKKASYRRIRRSRLRYRKARWNNRVKSKKKGWLAPSLKHKLDTYIKFIDYLKNILPIGKITIEVANFDIQKMKDDLISGIDYQNGAMFGFWNVREFVLHRDGHKCQNPNCKHKDKKEQILKVHHIRYRSEGGSDRPENLITLCSKCHTPANHKKGKFLYDWCVNGKKVRGFKDATFMSMIRWYLVNELKSKHNNVSITYGYITKNHRIQNGIEKSHLNDAFAIAKGTNQARTKDRFLVIQDRLKNRSLEKFYDSKIIDIRTEKKVSGGDLSCGRSTRNKNLNTENLRKYRGAKISKGQRRIRKQKYFYQPNDLVKYDGKVYTVKGTQNEGKYIALKEIKKVPKVELLIPYVFKKGLNWSYGLC

SEQ ID NO: 22082 - protein, 248 aa, unidentified
  REGION 1..248: note = Human gut metagenome
GTGYQQGDQLGFWNVREYVLFRDGHVCQCCKGKKKDPILNVHHIESRKSGGDAPNNLITLCETCHKGYHNGTIKLPKRIKRGMKFKDAAFMGIMRWTFYNTLKEKYEPDIPVSMTYGYLTKNTRIQHNLPKEHYIDARCISGNPDAKSDGVYYYQKKIRCHNRQIHKFNTLCKGVRKLNQSEYLVKGYRIFDKVRYQGKEYFVFGRRKTGFFDIRTLSGEKANNGSLSIKKIAFVDTRKNYITERRTV

SEQ ID NO: 22083 - protein, 416 aa, unidentified
  REGION 1..416: note = Human gut metagenome
MVYVLDKNGQPLMPTDRHRKVRLMLQSGQAKVIKRCPFTIQLNYDSGHQTQEISLGIDAGSKHIGVSTTTKIKVLYEADVELRNDIVDLLSSRRELRRGRRNRKTRYRQAKFNNRRRGNGWLAPSIRQKIGTHLTVVENICKMLPISRIMVETASFDIQKIKNPDIQGAEYQQGDQLEFWNVREYVLFRDGHTCQCCKGKSKDKILNVHHIESRKTGGNAPNNLITLCETCHTGYHKGTVQLPKAIKRGMRFKDAAFMGIMRWAFYEALKQQYEPVGTPVHNTYGYITKHTRIEHNLPKEHYVDARCISGNPDAFPSGEYYYQKKVRCHNRQIHKLTILKGGIRKQNQATYLVKGYRLFDKVSYQGKGYFVFGRRQSGFFDIRTLSGEKVNKGSLNCKKLKFIATRTYYLTERRAV

SEQ ID NO: 22084 - protein, 451 aa, unidentified; identical to SEQ ID NO: 5203
  REGION 1..451: note = Human gut metagenome

SEQ ID NO: 22085 - protein, 406 aa, unidentified; identical to SEQ ID NO: 2874
  REGION 1..406: note = Human gut metagenome

SEQ ID NO: 22086 - protein, 442 aa, unidentified
  REGION 1..442: note = metagenome
MSTSVFVLDKKHRPLMPCRPARARRLLRAGRARVVKRFPFVIRLVDRTVEQSEVQPVLIKLDPGSRETGAAVVRDDEKMRHHALAFFVIKHRGGAIRDALKARSAFRRRRRSQNFRCRSPRFLNRVKPKGWLPPSLRHRVETTLSFVRRMCRYLPVSGIATELVKFDSQKLQNPEVSGVKYQQGTLFEYEVREYLLEKFGRKCVYCGAEGVPLNIDHVVPRAKGGSNRVSNLVLACVSCNQKKGARSLEDFLKGKPEVLARVRRELKTPLRDAAAVNATRWVLFNELKATGLPVETGSGALTKLNRHAFGVEKEHWLDALCVGRLNGVVTRKGLNVLEIRCMGRGSRQRTRLTKYGFPRGYLMRQKCVHGFATGDMVEANVPKGKKAGLWRGRVAVRVSGSFNIQTPKGVIQGVGWKHCRLISHNDGYGYAWLGHAPHSSPA

SEQ ID NO: 22087 - protein, 412 aa, unidentified
  REGION 1..412: note = Human gut metagenome
GLGDVYKRQVQDIYGRPLMPTTRHGKVRRLLKSKKATVVNLCPFTIRLLYDTTGYKQEITLGVDTGTKHVGLSATTKSKELYASEVILRSDVVDLLSTRRELRKIRMYRLRYRKPRFMNRIKSKKRGWIAPSIRQKIDSHIRIIGFVYSILPVSKLIIEVAQFDTQKIKNPEISGKEYQEGEQLGFWNVREYVLARDEHKCQHCKGKSKDPVLNVHHIESRKTGGDSPSNLITLCKTCHKEFHKGNIKLKVNRGESLRDAAVMSIMKWELYDELKSLYPNVKMTFGYITKYNRINHGIEKSHVSDAFVISRNFDSERLGYYYKRKLVRRHNRQIHKMKAPKGGNKRMNQSPFKVFGFRLFDKVMFQGKERFIYARRLRGIFNIRDINGENKKDISYKKLEYVSHGLISIVAG

SEQ ID NO: 22088 - protein, 425 aa, Planktothrix sp.; identical to SEQ ID NO: 3728

SEQ ID NO: 22089 - protein, 406 aa, unidentified; identical to SEQ ID NO: 9803
  REGION 1..406: note = Human gut metagenome

SEQ ID NO: 22090 - protein, 357 aa, unidentified
  REGION 1..357: note = Human gut metagenome
MNRVFVLSKTGKALMPCRPARARQLLQSKKARVKRLYPFTIQLTQRSDGYIQPVELKFDPGSRQTGIGLVLHGKNRLSAIYGAVLTHRGQEIKSNLDSRRIIRRARRNRKTRYRQTEYLLEKYNYSCVYCGVKNVSFEKEHVIPRSCGGSNRISNLVLSCHDCNQKKDNLPIDEFLKDNPALLKKIKAQLKSSLKDAAAVNITRRQIVKELGNINVPVLTGTGAETKYNRVSQGYEKEHYIDALCAGTTGAKVYIPKKLKPLLIKKERRNNRQMCLVDKYGFPRGKAKGSKIVHGFKTGDIVKAVVLKGKKKGTYKGKVAVRSSGSFNIKVKQGIVEGIGWKNCVMLYRFDGYSYTC

SEQ ID NO: 22091 - protein, 420 aa, Moorena sp.; identical to SEQ ID NO: 2869

SEQ ID NO: 22092 - protein, 412 aa, unidentified
  REGION 1..412: note = Human gut metagenome
MENKMEYCFVVDKSNRPLASTKVNKGWYLVRKGRAKLKNKYPMVIQLEKEIESDKDDESHTVCGIDDGSAYVGLAIVQKCPTKNKVVFKGTIEQRQDVKHLMDVRRSYRRYHRYHKRYRQARFNNRHSSKRSNRLAPSIKQKKDAILRVLYQLNKWVNIQEYYLEDVCIDIRAMTDGYKPYKWQYQKSNRLDENLRKASIIRDGCKCQECGKSNCVLEVHHIRARKYGGANTIENLITLCSGCHQKTEGREQKFEDRYFKIISSKPKRFDYAMHVMQGKSYLRRKISELGLLHLTNGGETANKRIEWNMAKSHSNDAICIADGIPDTCDIKEWIIKPMRRKSKAKTDNVLGIKHRDLVSYTPRGKSSVIGYVTALYPNSYQLSMTSHNKQYKKISARSCMLKWRFNKIYWLE

SEQ ID NO: 22093 - protein, 423 aa, Scytonema sp.
MQNYVFVVDTNKQPLNPVPPARARELLTKQKAAVLRMYPFTIILKHAVENANPRPLTLKFDPGSKFTGIAILDGEDVIWAAELEHRGWQIKNALESRRSLRRSRRNRKTRYREPRFDNRKRKEEWLPPSLMHRVLTIEIWAKRLCRYAPITQLLMELVKFDTQAMQNPEIDGVEYQQGELAGYEVREYLLEKWRRKCAYCDKEGVPLQVEHIDPRSKGGSNRVSNLTISCERCNTKKGVKLIDEFLKKDPVRLMRIKRHAKQPLKDAAVVNAIRWALFRTLKNILPTATGTGGQTKYNRTRLEFPKEHWIDAACVGSVEKLNLITQQPLRIKATGWGTRQMCGTDKYGFPIRHREHKQIHFGFKTGDIVKAIVTSGKKVGEYVGRVLCRKSGSFDIVTGTGRVAGISHKYCKHIHKKDGYSYA

SEQ ID NO: 22094 - protein, 477 aa, Clostridium sp.; identical to SEQ ID NO: 3241

SEQ ID NO: 22095 - protein, 427 aa, unidentified; identical to SEQ ID NO: 5062
  REGION 1..427: note = Human gut metagenome

SEQ ID NO: 22096 - protein, 415 aa, Parasutterella sp.
LMPCSPAKARLLLKEKKAIVKRRTPFTIQLTIATGETKQPVSLGVDTGYKHVGLSASTEKAELYASEVELRQDITDLLSARRALRQSRRNRKTRYRAPRFDNRIRTKRKGWLAPSVENRIDAHLSRIEAVLRLLPVTKITVETASFDLQLLKNPDISGKEYQEGEQLGFWNIREYVLCRDGHVCQHCYGRSKDPVLNVHHLESRRTGGDSPGNLITLCETCHKALHRGEITLKAKRGQSFRTEAFMGIMRWEVLNRLKASHPELEVNNTYGYRTKHARIANDIAKSHCADAFCIAGNLGAERLGEFFFQKQTRRNNRQIHKLSILKGGIRKRNQAPFEVNGFRLFDKVACQGEEGFIFGRRSSGFFDVRKLDGTRISAGISYKKLHLLEKRRTYLTEIRKEEVLPPLPEGRGLRA

SEQ ID NO: 22097 - protein, 515 aa, Diaphorobacter sp.; identical to SEQ ID NO: 8736

SEQ ID NO: 22098 - protein, 470 aa, unidentified; identical to SEQ ID NO: 12303
  REGION 1..470: note = Human gut metagenome

SEQ ID NO: 22099 - protein, 424 aa, unidentified; identical to SEQ ID NO: 4955
  REGION 1..424: note = Human gut metagenome

SEQ ID NO: 22100 - protein, 426 aa, unidentified; identical to SEQ ID NO: 6904
  REGION 1..426: note = coral metagenome

SEQ ID NO: 22101 - protein, 438 aa, unidentified
  REGION 1..438: note = Human gut metagenome
LKDGKAKIVKHNPFTIQLLYDSKTNTQPIEICEDVGYNYIGISVKSQSHEYVSAQYDTLQDEKACHDSCRKLRRTRRNRLRYRKPRFDNRKRGEGWLVPSLRHKKELNVNVVKMYCAVMPITHATVEVGSFDTMLLQAIQKGESKPEGVDYQKGPRYNLATLREAVFYRDNYVCKVCGRKATEGAILHMHHMFYWKGRHGNSLDELLTVCEKCHTPANHQKSGKLYGFGENVKFADLSGAAFMNTVRWQIVNELYAAFGKDFVTVTYGAMTKEKRIALHLEKSHNNDAYAMGEFHPNCRCTFEHYEKVRRNNRILEKFYDSRYIDIRTGEIATGKELFNGRINRNHKKDSENLHKYRGKRLYKGHRALVRKKVNFNPGDLVSLNGEVLVVHGTHTNKKGAVNVEFKTPAKNGRKSANLKKLKIVKAAGSIHPAWEKVS

SEQ ID NO: 22102 - protein, 424 aa, unidentified; identical to SEQ ID NO: 3434
  REGION 1..424: note = Human gut metagenome

SEQ ID NO: 22103 - protein, 427 aa, Moorena sp.; identical to SEQ ID NO: 16540

SEQ ID NO: 22104 - protein, 406 aa, unidentified; identical to SEQ ID NO: 7798
  REGION 1..406: note = Human gut metagenome

SEQ ID NO: 22105 - protein, 431 aa, Moorena sp.; identical to SEQ ID NO: 2933

SEQ ID NO: 22106 - protein, 399 aa, unidentified
  REGION 1..399: note = Human gut metagenome
MVYVLDKNGQPLMPTDRHRKVRLMLQSGQAKVIKRCPFTIQLNYDSGHQTQEISLGIDAGSKHIGVSTTTKIKVLYEVDVELRNDIVDLLSSRRELRRGRRNRKTRYRQAKFNNRRRGNGWLAPSIRQKIGTHLTVVENICKMLPISRIMVETASFDIQKIKNPDIQGAEYQQGDQLEFWNVREYVLFRDGHTCQCCKGKSKDKILNVHHIESRKTGYHKGAVQLPKTVKRGMRFKDAAFMGIMRWAFYEALKQQYEPVGTPVHNTYGYITKHTRIEHNLPKEHYVDARCISGNPEASSNGEYYYQKKVRCHNRQIHKLTVLKGGIRKQNQATYLVKGYRLFDKVSYQGKGYFVFGRRQSGFFDIRTLSGEKVNKGSLSCKKLKFIATRTYYLTERRAV

SEQ ID NO: 22107 - protein, 475 aa, Streptomyces sp.
MPPSDSHLVSLVFPPEPVWVRAAREAVRTLLAAADRRDLADTALLLTSEAVTNSVNACLRSGCSTPVTLFAEWTAPHVLRVLVQDEAPGLPVPRAPASEDEHGRGLARIAAFTAQAGERRGRYSVQLDHRGAVIRKKLAQRAAYRRRRRTSNLRYRAPRFNNRTRPDGWLAPSLQHRVTTTVSWVTRLSRWAPVRAVHVERVAFDTHAISAGRPLEGAEYQHGTLHGTEAREYLLAKFGRACAYCGITEVPLNIDHVHPRSRGGSDRISNLVTACIPCNETKSNRSVQEFVRDKTKLAKILAQAKAPLRDAAAVQSTRWALWRALDQMLPTHIVSGGRTKWNRTRCGLPKSHTLDALDVGKLDTVTETITPILVAGCSGRGQHQRTSPDRHGFPRRTSPRVKAVHGYATGDLVTASVPKGKYTGTHTGRVMIRTTGRFDIRTAHGLAAGIRHTNIRLLQRGDGYTYTHQPEPTCT

SEQ ID NO: 22108 - protein, 379 aa, unidentified
  REGION 1..379: note = Human gut metagenome
KLLYGSAGYKQPITLGVDAGSKHVGLSASTEKRELYREEFTPRNDVVELLSTRRQNRRSRRNRKTRYRAPRFDNRVHSKHKGWLAPSVEVKIQEHITIIKRICKILPISLVRVETAEFDTQRLKAMLAGKPLPVGTDYQLGEMYDEYNVRQYVLKRDNYTCQCCGAHTTAKKLVKLHVHHLESRKTGGNAPSNLVTLCTTCHKNLHKGKVTLDGKERGKPLRDAAFMGVMRKTLMARLKEELPIPVQGTYGYITKMRREKNDIKKSHTNDARCISKHPLAEPCSVCYRTKAIRHHNRQTHKVNFSKGGYRKRSQTPYLVEGYRLWDKVLYKGQECFVSGRRSSGSFALKKLDGTTISEGVTFKKLRLLEPATNYLIERM

SEQ ID NO: 22109 - protein, 416 aa, unidentified
  REGION 1..416: note = Human gut metagenome
MVYVLDKNGQTLMPTDRHRKVRLMLQSGQAKVIKRCPFTIQLNYDSGHQTQEISLGIDAGSKHIGVSATTKIKVLYEADVELRNDIVNLLSSRRELRRGRRNRKTRYRQAKFNNRRRGNGWLAPSIRQKIGTHLTVVENICKILPISRIMVETASFDIQKIKNPDIQGAEYQQGDQLGFWNVREYVLFRDGHTCQCCKGKSKDKILNVHHIESRKTGGNAPNNLITLCETCHTGYHKGTVQLPKAIKRGMRFKDAAFMGIMRWAFYEALKQQYEPVGTPVHNTYGYITKHTRIAYNLPKEHYVDARCISGNPEASSNGEYYYQKKVRCHNRQIHKLTVLKGGIRKQNQATYLVKGYRLFDKVSYQGKGYFVFGRRQSGFFDIRTLSGEKVNKGSLSCKKLKFIATRTYYLTERRAV

SEQ ID NO: 22110 - protein, 416 aa, unidentified
  REGION 1..416: note = Human gut metagenome
MVYVLDKNGQPLMPTDRHRKVRLMLQSGQAKVIKRCPFTIQLNYDSGHQTQEISLGIDAGSKHIGVSATTKIKVLYEADVELRNDIVDLLSSRRELRRGRRNRKTRYRQAKFNNRRRGNGWLAPSIRQKIGTHLTVVENICKILPISRIMVETASFDIQKIKNPDIQGAEYQQGDQLGFWNVREYVLFRDGHTCQCCKGKSKDKILNVHHIGSRKTGGNAPNNLITLCETCHTGYHKGTVQLPKAIKRGMRFKDAAFMGIMRWAFYEALKQQYEPVGTPVHDTYGYITKHTRIAYNLPKEHYVDARCISGNPEASSNGEYYYQKKVRCHNRQIHKLTVLKGGIRKQNQATYLVKGYRLFDKVSYQGKGYFVFGRRQSGFFDIRTLSGEKVNKGSLSCKKLKFIATRTYYLTERRAV

SEQ ID NO: 22111 - protein, 423 aa, Moorena sp.
MRVFVLNKNRQPLDPCKPARARILLSVGKAKVYRRYPFTIILTEEVKQPITHDQQLKIDPGAKISGLAIVQGKRVIWGSELTHRGFQIQEALTSRRQLRRSRRNRKTRYRKPRFLNRTRPKGWLAPSLTSRVQNILTWVKKLIRFCPITGISQELVRFDTQKLQNPELSGIEYQQGTLYGYELREYLLEKWNRKCAYCGATGTQLEIEHIKPKSKGGSNRVSNLTIACHPCNQAKSNQDIELFLSKKPSILKRILSQSLRPLADAASVNSTRCTLYYELKSIGLPVEVGSGGLTKFNRCRQNLPKTHWLDAANVGKVETLIIEVTLPLVITAKGHGTRQLCRTNKYGFPIRHCSRIKFHKGFQTGDIVRAVVTKGKNIGTYVGRVATRKSGSFNISTKSGLVQGISHKYCRFIHRKDGYAYTN

SEQ ID NO: 22112 - protein, 512 aa, unidentified
  REGION 1..512: note = Human gut metagenome
MSTVYVLNKDGKPLMPTTRCGHVRHLLKEQKARVVTSKPFTIQLLYEADDVVQSLYLGIDPGRTNIGVAVVKADGTAVFTAHLETRNKEIPKLMKKRKESRRARRTNGRRCRRQRRAKANGTISKKCVKHDTAQNGSVSKRAKDIGVIKRRLPGCEKDVLCIGIKNKEAKFSNRTRPEGWLTPTANQLLQTHINLVKKIQKFLPISDVVLEINKFAFMRLDNPNVQKWQYQQGPLYQKANLEETVSEMQEHHCLFCKKKIDHYHHVVPQHKNGSNTIDNIIGLCTQHHDLVHKDATWQKRLAKKKTGLNKKYGALSVLNQIIPALTKELSSLFPKHFFVTNGKSTYDYRAAHGVSKDHWLDAYCIACSVLPNDTCDKTINSRVPYELKQFRRHDRRALNNENMSRVYTFNGKMVATNRHKATEQTTDSLEEFRQRQPNDVCKLKVKEHHPEYRNPKRNFPGCVFLVGKHTHVMQGTSGSHNGKADGYYDTNGNSYSSGKCKFVVKNEGIVFT

SEQ ID NO: 22113 - protein, 487 aa, unidentified; identical to SEQ ID NO: 20935
  REGION 1..487: note = Human gut metagenome

SEQ ID NO: 22114 - protein, 451 aa, unidentified; identical to SEQ ID NO: 7445
  REGION 1..451: note = Human gut metagenome

SEQ ID NO: 22115 - protein, 490 aa, unidentified; identical to SEQ ID NO: 6170
  REGION 1..490: note = Human gut metagenome

SEQ ID NO: 22116 - protein, 501 aa, unidentified; identical to SEQ ID NO: 9337
  REGION 1..501: note = Lachnospiraceae bacterium UBA2816

SEQ ID NO: 22117 - protein, 426 aa, Moorena sp.
MSNSSNYVFVLDGSKKPLTPCKPAMARSLLKAGKAKVFKRYPFTIILNKLVDEENQGLQLKIDPGSKQTGFALVTQSEEVIFAMVLIHRGQQIKNALERRRTLRRGRRYRKTRYRKCRFFNRKRKKGWLPPSLRHRVLTVETWVNRLSKLSPVSSLAIELVKFDTQKIQNPEISGVEYQKGELFGYDVREYLLEKWGRSCAYCGATDTPLEIEHIVPRSKGGSNRVSNLAIACHQCNQNKGAMDIREFLENKPSVLTRVLKVAKTPLKDAAAVNSTRTSIFETLKAKGLPMITGSGAGTKYNRRQLNLPKEHWIDAACIGEVEKLTILTNQPLVATAMGHGCRQMVQMDKYGFPRKGYKAKKPVPGWKTGDIINVVKGKNAGLKGVRIKTVRTKGNFDIRDGDKILSVSRNHIQPVHRRDGYNYSF

SEQ ID NO: 22118 - protein, 493 aa, unidentified; identical to SEQ ID NO: 20007
  REGION 1..493: note = Human gut metagenome

SEQ ID NO: 22119 - protein, 403 aa, unidentified
  REGION 1..403: note = Human gut metagenome
LAKVVKRCPFTIQLLYQSTKEIQPVSLGVDAGSKHIGMAATTEKKVVYQEELSARNDVVKLLSARRTLRRTRRNRKTRYRKPRFNNRVHSKHKGWLAPSVEVKIQEHITTIKRICQILPISEIQVETAEFDLQRLKAMEEGRTPPVGTDYQLGEQYDFYNTRQYVLHRDGYTCQCCGTHDNNIKLHVHHIESRQTGGDAPNNLIILCEHCHKALHEGKLELPKGKKRGKSYRDATFMGVMRKTLLERLKKEIDVPVEGTYGYITKYWRERAGLEKSHIHDAVCISQYPYAKPLDIYYLTKTVRHHNRQIHKSNFSKGGIRKRNQAPYLVKGFRLFDKVLYQGKEYFIFGRRATGYFDIRTLDGTKVNKGSISYKKLRIQDTAKAYLKEARAIPHMNKFTCVLA

SEQ ID NO: 22120 - protein, 433 aa, unidentified
  REGION 1..433: note = Human gut metagenome
VKTPSNIGEGSVPRSADREETNLRVFVLNKRGKPLMPCSAAKARILLKEKKAKVKRRTPFTIQLTIATGETTQPVNLGVDAGYEHIGLSASTEKAELYASEIELRQDISELLAARRALRGARRSRKTRYRAPRFDNRKRDKGWLAPSVENRIGAHVSRVVAVLRILPVTKIIVETASFDVQRLKHPDIQGVEYQEGEQLGFWNVREYVLFRDGHECQHCHGKSKDKVLNVHHIESRRTGGDAPNNLITLCETCHKAFHRGEIELKVKRGRSFQAETFMGVMRWSFFERLRASHPEIEVRNTYGYLTKDTRIANKIEKTHCADAFCIAGNLKAKRLGYYFFQKQTRRHNRQIHKLTILKGGVRKRHQTPYEIKGFRLYDKVLYRGKEAFIFGRRSSGYFDIRTLDGERISAAVNSKKLRLLEKRRTFLIELRRN

SEQ ID NO: 22121 - protein, 512 aa, unidentified
  REGION 1..512: note = Human gut metagenome
MSTVYVLNKDGKPLMPTTRGGHVRHLLKEQKARVVRAKPFTIQLLYETNDVVQPLYLGIDPGRTNIGVAVVKANGTAVFTAHLETRNKEIPKLMQDRKKARRARRTNGRRCRRQRRAKANGTISKKCVKQTTAQNGSVSKRAKDIGVIKRCLPGCEKDVLCIGIKNKETKFTNRTRPEGWLTPTANQLLQTHINLVKKIQKFLPISDVVLEVNKFAFMRLDNPNIQKWQYQQGPLYKKESLESAVSEIQEHHCLFCDKPIDHYHHVVPQHKNGSNTIGNIVGLCAKHHDLVHKDSAWEKKLAKKSTGLYKKYGALGVLNQIIPTLTNELSSLFPKHSFVTNGKSTYDYRAAHGVSKDHWLDAYCIACSVLPSNVCDSNINNHMPYVLKQFRRHDRRVLNNENMNRVYTLNNKAVAINRHKAKDQKTVSLEEFRKEHPDDVCKLKVKEHHPTYRNMNRNFPGSVFLVGKQIHVMQGIASSKDGKATKYNDTSATAIAAGKCKFVAKNTGILFV

SEQ ID NO: 22122 - protein, 420 aa, unidentified
  REGION 1..420: note = Human gut metagenome
MQYVYVLNRHGEPLMPCSPGKARLLLKQQKACVVKRTPFTIKLLYGSAGYKQPITLGVDAGSKHVGLSASTEKRELYSEEFTPRSDVVKLLSTRKQNRRSRRNRKTRYRAPRFDNRVHSKHKGWLAPSVEVKIQEHITVIKHICKILPISLVRVETAEFDTQRLKAMLEGKPLPVGTDYQLGEMYDEYNVRQYVLKRDHYTCQCCGAHNTAEKVVKLHVHHLESRKTGGNAPSNLVTLCTTCHKNLHKGKVTLDGKERGKPLRDAAFMGIMRKTLMARLKEELPIPVQGTYGYITKMRREQNDIKKSHTNDARCISKHPLAEPCSVCYRTKAIRHHNRQTHKANFSKKGIRKRSQMPYLVEGLRLWDKVLYKGQECFVSGRRSSGKFALKKLDGTTISEGVTFKKLRLLEPATNYLIERM

SEQ ID NO: 22123 - protein, 443 aa, unidentified; identical to SEQ ID NO: 11672
  REGION 1..443: note = Human gut metagenome

SEQ ID NO: 22124 - protein, 400 aa, unidentified
  REGION 1..400: note = metagenome
MVYVQDIDGKPMMPTTRHGKVRRLLKANKATVVNLCPFTIQLTYKSTDHKQPVTLGIDAGAKHIGFSATTEKEELFACETTLRTDIVDLLSMRLQNRRTRRSRLRYRKSRFNNRGSSKKKGWVAPSVKQRIDSHLNEVNEIHKILPITKIVIEVAQFDTQKMKNHDISGADYQNGEQLGFWNVRKPQGHDTAAGKSKDPVLNVHHLESRKTGGDSPSNLITLCESCHKAFHKGEIELKKKRGKSLRDAAVMGIMKWKLYEELKSRYDNVSMTFGYITKHNRIKYGIEKNHTSDAFVISRNFNAKRIEYQYLKRLVRRHNRQIHKMKILKGGKKKNNQAPFEVFGFRLFDKVLYNNEIFFVYGRRKSGNFNIRDFNGENPKDVSHKKFKLIRGKRHPIILK

SEQ ID NO: 22125 - protein, 477 aa, unidentified; identical to SEQ ID NO: 20932
  REGION 1..477: note = Human gut metagenome

SEQ ID NO: 22126 - protein, 557 aa, Ruminococcus sp.; identical to SEQ ID NO: 18571

SEQ ID NO: 22127 - protein, 414 aa, unidentified; identical to SEQ ID NO: 4252
  REGION 1..414: note = Human gut metagenome

SEQ ID NO: 22128 - protein, 404 aa, unidentified
  REGION 1..404: note = Human gut metagenome
LMPCSPGKARLLLKQQKACVVKRTPFTIKLLHGSAGYKQPVTLGVDAGSKHVGLSASTETHELYCEEFTPRNDVVELLSTRRQNRRSRRNRKTRYRAPRFNNRVHSKHKGWLAPSVEVKIQEHITVIKRICRILPVTLVRVETAEFDTQRLKAMLAGKPLPVGTDYQLGEMYDEYNVRQYVLKRDNYTCQCCGAHTTAKKAVKLHVHHLESRKVGGNAPSNLITLCIACHNNLHKGKVTLDGKKRGKTLRDAAFMGIMRNTLLIRLRNELNIPVQNTYGYITKLLREQNDIKKSHINDARCISKHPLAVPCSVCYCTKAIRHHNRQIYKAKILKGGVRKANQATYIVKGFRLWDKVLYNGQECFISGRRSSGYFALKKLDGTTITNSISFKKIAAIRACNKLLN

SEQ ID NO: 22129 - protein, 415 aa, unidentified
  REGION 1..415: note = Fermentation metagenome
MTSNINNQFSFVIDNKGNKLSPCKINKAWYLIRKGKAIQVNKYPMIIQLKREIKDKEDKSEFISGIDDGSVHVGIAIVQKCKTKNKVIFKGTIELRQDVKHLIDVRRGYRRYKRSHKRYRPARFNNRSSSKKNNRIVPSILQKRQSTLRVINRLNKYVNITEYHLEDVAIDIRALTEGHKLYRWQYQKSNRLDENIRKAVILRDDCKCMECSKSNYKLEVHHITPKRLHGSNTLNNLITLCSSCHQKTEGKEELFIKHYQDMIKGKNIRFDYAQHVMQGKNYLRNELSKLGKLVLTTGGDTANKRINWNIEKSHSNDAIVITDLFVNQNDCNIKDWIIKPMRRQSKGNIKELNGFKYRDLIRYTKRNGESYIGYITSLMPEKKQLSFTTVEGKILKRYGIKSCKLLWRFNKIYWF

SEQ ID NO: 22130 - protein, 426 aa, unidentified
  REGION 1..426: note = Human gut metagenome
AAVIETRNKEIKKLMADRQKSRQASRRGERKARQRLAKRYGSMVKSGMVMRKLPMYAADRFVTCKFIRNTQARFCNRKRCPDWITPTVQHLVQTHLNIIRKISRYLPVTDIAFEVNRFAFMHMENPEAMGVDFQNGPLKGYGDVKEAIRTQQHGKCLMCKKPISHFHHIVPRSRGGSDTIQNLAGLCPECHTKVHTDTAFRKDFDEKKSGQLKKYGALSALNQAVPFICKKLLKEYGEEHVHFCRGLDTSLIRTALGFEKTKKNQMHEVDAYCIGLAALEVNEVETPAFDHTFQIRQFRRQDRSIIHHQTGRSYYQGKEKVTQNRKPGFEQKTTALSQWYKEQVRIHGEKEAEKLRSQLRVEKSCRHYNDMDRFLPGAVFLYEGKRYVLSGRITNGKYLRACGQGMKNFPAAECTFIRHNAGLVFI

SEQ ID NO: 22131 - protein, 424 aa, Anabaena sp.; identical to SEQ ID NO: 17068

SEQ ID NO: 22132 - protein, 499 aa, unidentified
  REGION 1..499: note = Human gut metagenome
MRYVYVLDVDGKPLMPTCRFGKVRRMLKSGQAKAVDTLPFTIQLTYKPRTRILQPVTLGQDPGRTNIGMAAVRFDGKELGRFHCLTRNKEIPKLMADRMATRRASRRGERLARKRLARKLHTTAKHLEGRMLPGCSEPIAVKDIINTESRFNNRLRPEGWLTPTATQLLRTHINLFRKLSGILPVTDVTVELNKFAFIQLDNPEMKKREIDFCHGPLCGTGGLEAAVKEQQDGKCLLCGKESIGHYHHIVPRSRRGSNTIANIAGLCPKCHELVHKDADTAERLTEMKTGLTKKYGGTSVLNQIIPKLVETLADLFPGHFHVTNGWNTKEFREKHHLEKDHDVDAYCIACSHLKPEETLVETEPFEILQFRKHNRAIIHHQTERTYKLDGVTVAKNRKKRMEQKTDSLEDWYVDMAKEHGKTQADAMRSRLAVIKSTRYYNTPGRMMPGTVFLYEGKRYVMTGQITNGKYYRAYDQEKRNFPAVKVRILTKNTGLVFVA

SEQ ID NO: 22133 - protein, 436 aa, Leptolyngbya sp.
SKTNYVFVLDTNRQPLAPCHPARARELLAKGKAAVFRRYPFAIVLNRAVGDVPPESQLKIDPGSQTTGLAVVNGDKLVWGAELQHRGDRIQAKLETRRVCRRNRRNRQTRYRKPRFLNRTRPKGWLPPSLNHRVETTLTWVNRLRKLCPIASISQELVRFDTQKLQNPEISGASYQQGELFGYEVREFLLEKWGRKCAYCRAENVPLEVEHIVPKSKGGSDRVSNLTLSCRPCNQSKGNRDVREFLSGKPSVLERILRQAKTPLKNAAAVNATRWKLYQRLKETGLPVEVGTGGQTKFNRTRLEFPKAHWLDAACVGKTPSLHLATETPMAIASKGHSTRFRTLIDRYGFPRAVRKTKAQVNGLQAGDIVRAIVPNGKYRGQWTGAIAGVRKKRPPALRPFGKKQIDLTAKTQIQIVHKQDGYEYNINPCGHSSRR

SEQ ID NO: 22134 - protein, 398 aa, unidentified
  REGION 1..398: note = Human gut metagenome
VKKRTPFTIQLIYGSSGYTQEVILGVDAGSKTIGMSVSTTKEELLSAEVKPRNDVVDLLSTRREFRRARRNRKTRYRKPRFDNRVRSKHKGWLAPSVEVKIQEHITAIRRVCGILPVSKVVIETAEFDLQLLKAIADGKPVPQGEDYQQGEMYGHYNVRQYVLWRDGYTCQCCGAHATKKKEVRLHVHHLESRKVGGDAPDNQVTLCESCHEKLHKGLIAEKDFKKRKRKSTRDATFMGIMRKTLMQRLCSELPIPVIETRGYITKATREKLLVLPKSHTNDALAIAQGKQGFNVGYLPGIVQINKIYTIRPVRHHNRQLHKATILKGGIRKSNQTEKYVFGYCLFDKVQFNGQDCFIWGRRTTGIFTIKTINGKMIKDGISFKKLKLVEKSTSYLIA

SEQ ID NO: 22135 - protein, 384 aa, unidentified
  REGION 1..384: note = Human gut metagenome
MLVYVLSKNGQPLMPTHRCGFVRRLLNSQKAKVVRRCPFTIQLQYDTDCKTQPVTLGIDAGSKHIGVSATTESKVLYEADIELRNDIVDLLATRRQMRRARRSRKTRYRKARFDNRKRNDKWLAPSIQHKVNCHLEAVRFVHKLLPISKIIVEVASFDIQKIKNPLITSTDYQNGELLDWKNVREYVLFRDSHICQCCKGKSKDPVLQVHHIESRKTGGNAPNNLITLCKTCHNGYHHGTVKLPAKIKRGMKFNDATFMGIMRWGFYNQLKSLYPDVSLTYGYITKDIRISNGLAKTHFIDARCISGNPLATSDNTVYFLKKRRRHNRQIHKFNILKGGRKKRNQAAYLVKGYRLFDKVNYNRKEYFIFGRRASGFFDIRTLSG

SEQ ID NO: 22136 - protein, 393 aa, Moorena sp.; identical to SEQ ID NO: 5287

SEQ ID NO: 22137 - protein, 457 aa, unidentified; identical to SEQ ID NO: 12656
  REGION 1..457: note = Human gut metagenome

SEQ ID NO: 22138 - protein, 431 aa, unidentified
  REGION 1..431: note = Human gut metagenome
MPNKVYVINKHGRPLMPCSPAKARHLLDEGKAKVKKRTPFTIQLVYGSSGYTQEVILGVDAGSKTIGMSASTTKEELLSAEVKPRNDVVDLLSTRREFRRARRNRKTRYRKPRFDNRVRSKHKGWLAPSVEVKIQEHITAIRRVCGILPVSKVVIETAEFDLQLLKAIADGKPVPQGEDYQQGEMYGHYNVRQYVLWRDGYTCQCCGAHATKKKEVRLHVHHLESRKVGGDAPDNQVTLCESCHEKLHKGLIAEKDFKKRKRRSTRDATFMGIMRKTLMQRLCSELPIPVIETRGYITKATREKLLVLPKSHTNDALAIAQGKQGFNVGYLPGIVQINKIYTIRPVRHHNRQLHKATILKGGIRKSNQTEKYVFGYRLFDKVQFNGQDCFIWGRRTTGIFTIKTINGKMIKDGISFKKLKLAEKSTSYLIA

SEQ ID NO: 22139 - protein, 531 aa, unidentified; identical to SEQ ID NO: 16523
  REGION 1..531: note = Human gut metagenome

SEQ ID NO: 22140 - protein, 490 aa, unidentified; identical to SEQ ID NO: 6170
  REGION 1..490: note = Human gut metagenome

SEQ ID NO: 22141 - protein, 439 aa, unidentified
  REGION 1..439: note = Human gut metagenome
LPQMKGKNMVITLDKNKRPLGFMSERRCRILLEKKRAVLYRYFPTIVILKDVDARKLSGLSSYRIKIDPGAKYTGIAIVMDDTNEFMYAMQIEHRGEQIKKNLDTRRGARRNRRSRETGYRRPKWGNRYTAKEQRQSYDSRRDENWLPPSVKSTADNIISRIRRLCRWINITNCSIESVRFDTQLMENPEIEGVEYQQGTLYGYEVKEYLLEKYGHTCQYCGGKSSDPILEWEHMIPRSRGGSDRLKNAALACHNCNQDKGNHTLEEWQTILQDRIPKERGKQKELDQIRQKFVQQVMEGKTPLKGLRYAAWVNSSRRYSQRHLYLRFPELECSSGGRTKYNRNVLKYPKEHHYDALCVGEITEDGFVDRTNGYYLYAKATGRGTRLRGQINQCGVITHKWRDRSKTAFGFQTGDLVVANVPKDTKYKYKGRFVGRVMI

SEQ ID NO: 22142 - protein, 470 aa, unidentified; identical to SEQ ID NO: 15795
  REGION 1..470: note = Human gut metagenome

SEQ ID NO: 22143 - protein, 515 aa, unidentified; identical to SEQ ID NO: 6759
  REGION 1..515: note = Human gut metagenome

SEQ ID NO: 22144 - protein, 281 aa, unidentified
  REGION 1..281: note = Human gut metagenome
SKVVIETAEFDLQLLKAIEEGKPVPQGEDYQQGEMYGHYNVRQYVLWRDGYTCQCCGAHATKKKEVRLHVHHLESRKVGGDAPDNQVTLCESCHEKLHKGLIAEKDFKKRKRRSTRDATFMGIMRKTLMQRLCSELPIPVIETRGYITKATREKLLVLPKSHTNDALAIAQGKQGFNVGYLPGIVQINKIYTIRPVRHHNRQLHKATILKGGIRKSNQTEKYVFGYRLFDKVQFNGQDCFIWGRRTTGIFTIKTINGKMIKDGISFKKLKLVEKSTSYLIA

SEQ ID NO: 22145 - protein, 452 aa, unidentified; identical to SEQ ID NO: 6924
  REGION 1..452: note = Human gut metagenome

SEQ ID NO: 22146 - protein, 393 aa, Moorena sp.; identical to SEQ ID NO: 5287

SEQ ID NO: 22147 - protein, 417 aa, unidentified; identical to SEQ ID NO: 6193
  REGION 1..417: note = Human oral metagenome

SEQ ID NO: 22148 - protein, 430 aa, Desulfobacter sp.
LSVFVLDTNKKPQNPVHPAKARLLLTEGKASVFRQFPFTIILKETVLDVASNPLRIKIDPGSRETGIAVINDDTGEIVFAMELRHRGRQIKNNLESRRAIRRSRRNRKTRYRKPRFDNRTRAKGWLPPSLKSRVHNIETWVNRLCRFCNIQAISMELVRFDMQKIQNPEISGVEYQQGELMGYEVREYLLEKWDRTCAYCGKTDIPLEIEHIVPKSKGGSNRVSNLTLACTACNRKKGNKPLELFLSRKPRMLKRIQKQSKVPLKDAGAVNTTRWDLFRTLKETGLPVETGSGGLTKFNRTTRGLYKTHWLDAAYVGKSTPEKMFQIDKTVLIVKADGHGSRQMCRVNKFGFPRTTAKSTEKKVKGFQTGDIVKAVVTSGKKVGTYIGRVAVRKSGSFNIKTVDKTVQGISWKYCRLLHASDGYSYNTTC

SEQ ID NO: 22149 - protein, 507 aa, unidentified
  REGION 1..507: note = Human gut metagenome
MSEYIYVIGMDGDPQMPTKRKRHVEKLLQTGRARVFRQVPYTIQLTYKNQPVLQPVTIAEDPGRSNIGMAVVSLSGELLSAAVVQTRNKEIVKLMEKRKLHRRASRNGERRARQRLAKRCHTMLKAGFLMRKLPMYRKDKRVKCLVISNTEARFCNRKREDGWLTPSAEHLVRTHINLIHKMQKFLPITDVAIEINRFAFLSLEDPSISGVDFQKGPLKGYDDLNAAVEDLQDGHCLMCNSPIEHRHHIVPRSMQGSNTIGNIAGLCCKCHERVHKDARFEDRLKKKKAGLDKRYAAVSALNQAIPFICKRLEQEFGKEHVHYCSGRDTAMARRSFGYHKTKEEQLHVVDAWCIAVLSLRQIPEKAPEFDHVHEILQFRRQDRSRIKAQTSRAYYYEGKKIAKNRKKAEGQREDSLQEWRKRQVERYGKEQTRKMISQLEVKESIRRYNRLDRLMPGAVFYYQGVRYVMRGQHSNGQYLQAVGMGSKDFPAKKCKIVANNEGLVFVS

SEQ ID NO: 22150 - protein, 432 aa, Moorena sp.
MQPTKQQNWVFQINGDKQPLDMINPGRCRELQNRGKLASFRRFPYVVIQQQTIENPQTKEYILKIDPGSQWTGFAIQCGNDILFRAELNHRGEAIKFDLVKRAGFRRGRRSRNLRYRKKRLNRAKPEGWLAPSIRHRVLTVETWIKRFMRYCPIAWIEIEQIRFDTQKLANPEIDGVEYQQGELQGYEVREYLLQKWGRKCAYCGTENVPLEVEHIQSKSKGGSSRIGNLTLACHVCNVKKGNLDVRDFLAKSPDILNQVLENSTKPLKDAAAVNSTRYAIVKMAKSICENVKCSSGARTKMNRVRQGLEKTHSLDAACVGESGASIRVLTDRPLLITCKGHGSRQSIRVNASGFPAVKNAKTVFTHIAAGDVVRFTIGKDRKKAQAGTYTARVKTPTPKGFEVLIDGARISLSTMSNVVFVHRSDGYGYEL

SEQ ID NO: 22151 - protein, 415 aa, unidentified
  REGION 1..415: note = Human gut metagenome
MVYVLANDGQPLMPTERHGKVCRMLKSGMAKVVKKCPFTIQLQYESERNVQPVSLGVDAGSKHIGISATTKTKVLYESDVELRDDIVKLLATRRQLRRSRRSRKTRYRPVRFDNRKRKEGWLAPSIRQKIESHLTVVANVCKILPINQIIVETASFDIQKIKDPEIQGIEYQQGEQMDFWNIREYVLFRDGHICQCCKGRSKDKILNVHHIESRKTGGNAPNNLITLCETCHKGYHNGTVTLPKNIKRGMKFKDAAFMGIMRWTFYNTLKEQYEPDIPVSMTYGYLTKNTRIEHGLPKEHYIDARCISGNPDAVSDGTYYYQKKVRCHNRQIHIQTILKGGIRKSNQAEYLVKGYRLFDKVRYQGREYFIFGRRKSGFFDIRTLSGEKVNKGSINVKRLTFVDTRKNYLTERRTV

SEQ ID NO: 22152 - protein, 512 aa, unidentified
  REGION 1..512: note = Human gut metagenome
MSTVYVLNKDGKTLMPTTRCGHVRHLLKKQKARVVTSNPFTIQLLYETDDVVQPLYLGIDPGRTNIGVAVVKADGTAVFTAHLETRNKGIPKLMKKRKDSRRARRTNGRRCRRQRRAKANGTISKKCVKQATAQNGSASKRAKKIGVIKRHLPGCEKEVLCIGIKNKEAKFNNRTRPAGWLTPTANQLLQTHINLIKKIQKLLPISDVVLEINKFAFMQLDNPNIQKWQYQQGPLYQKANLEEAVSEMQEHHCLFCKKKIDHYHHVVPQHKNGSNTIDNIVGLCTKHHDLVHKDTAWYEKLTKKKTGLNKKYGALSVLNQIIPALTKGLSSLFQKHFFVTTGKSTYDYRAAHGVSKDHWLDAYCIACSVLPNDVCDSNINSHVPYELKQFRRHDRRALHKENMNRVYTLNGKKVATNRHKAIEQTTDSLEEFRQNHPDDVCKLKVKEHHPEYRNPKRNFPGCVFLVGKRTHVMQGTSGSHNGKADGYYDTNGNSYPSGKCKFVAKNKGIVFA

SEQ ID NO: 22153 - protein, 467 aa, unidentified
  REGION 1..467: note = Human gut metagenome
VSYCKPLINIGKGVIYSSICTDLSLQTYQKRKEVPCMVYVLDIDGQPLMPTSRHGKVRRLLNSHLAKVAKRCPFTIQLLYQSTKETQPVSLGVDAGSRHIGLAATTEQKVVYQEELVPRNDVVKLLSARRALRSSRRSRKTRYRKPRFNNRVHSKHKGWLAPSVEVKIQEHITAIKRICQILPISEIHVETAEFDLQRLKAMEEGRPLPVGTDYQLGEQYDFYNTRQYVLHRDEYTCQCCGTHDNNVKLHVHHIESRQTGGDAPNNLITLCEHCHKLLHAGKTILPKGKKRGKSYRDATFMGIMRKTLLERLKKEIDVPVEGTYGYITKYWRERAGLEKSHINDAICISKHPYARPLETYYLTKAVRHHNRQIHKTKFSKGGIRKRNQAPYLVKGFRLFDKVLYQGESYFIFGRRITGYFDIRTLDGTKVNKGSTSYKKLRIQDTAEAYLTEVRAIPHMNEFTCVLA

SEQ ID NO: 22154 - protein, 423 aa, unidentified; identical to SEQ ID NO: 3951
  REGION 1..423: note = Human gut metagenome

SEQ ID NO: 22155 - protein, 458 aa, Scytonema sp.; identical to SEQ ID NO: 17469

SEQ ID NO: 22156 - protein, 418 aa, unidentified
  REGION 1..418: note = Human gut metagenome
MPCSPAKARLLLKEKKAIVVRRTPFTIQLTIATGEAKQPVSLGVDAGYKHVGLSASTEKAELYASEVELRQDVSDLLSARRALRQCRRNRKTRYRAPRFDNRIRTKRKGRLAPSVENRVNAHLSRIEAVLRLLPITKITVETASFDTQLLKNSDIAGKEYQKGEQLGFWNIREYVLFRDGHVCQHCHGRSKDPVLNVHHLESRRTGGNSPGNLITLCETCHKALHRGDITLKAKRGKSFRAEAFMGIMRWEVHNRLRALHPGIEVSNTYGYRTKHARIANGIAKSHCADAFCIAGNLGAERLCEFFFQKQTRRNHRQIHKLSILKGGIRKRNQAPFEVKGFRLFDKVACQGEEGFIFGRRSSGFFDVRKLDGTRISAGISCKKLHLLEKRRTYLTEIRKEEALPPLPEGRGSAPKCDE

SEQ ID NO: 22157 - protein, 440 aa, Moorena sp.
LVFVLNKNKKPLNPCHFAVARKLLKQGKAVVHKQFPFTIRLKDLKEVNPKGLIIKLDPGAKQTGVALHKFNGEVILLATIEHRADKIKQNLEARRAFRRTRRNRKTRYRVPRFLNRKRPEGWLPPSIQSVVDNVKNFIIKLKKLCYIDTIYIETVRFDTQLMLNPSIEGVDYQQGTLLGYEIREYLLYTYGHTCQYCKGLTKDTKLEIEHKHPKSRGGSNSIRNLTLACRTCNQEKGNNTLDEWVQSLSKSKLDKERVKNISLILKTNKPINLKDTAKVNSSRNAILREMYKLTSNVVVSTGGVTKHNRVKSNLPKTHYYDALCVKETPKIKIHKGLKELYIKSIGRGTRSRTLLNKYGFPRAYLPRQKQFFGYQSGDMVKANIPKGKYMGQYVSNVSCRSTGTFAIYSKKHGKQIDVNHKYLKLIQKGDGYRYELKTLA

SEQ ID NO: 22158 - protein, 470 aa, unidentified
  REGION 1..470: note = Human gut metagenome
MSVFVVGLNGCRLMPTSERKARLLLKQGKAFVEQKVPFTIRLNYKTGSTTQLGYLGIDTESQHIGVSVVREDGTVLHKEEIGLRDSMSKRKLLEAKASLRRGRRYRKTRYRHPKWRPKTKRVYCEVPDRKGRHWQKKKITFTSKRPKGWLPPSLQSKTDHHIRWIKKLQDLLPEGYRLSIELGRFDPARMKNPEIHGDLYQKGPQYDYENVRAYVLDRDRYTCQICKKKGGKLHVHHILYRSHGATDDPQYMVTVCSDCHSAQNHLPGGILYQWMQEQKRFSRGLRDATFMNILRKRLIRAFPEAVFTYGNVTKVDREKLKLPKSHGNDATAIALVKTGITAVKDKESVICIQQVRRKKRSLHEETPRKGRKEPNRTAARNNKNTKAVTVTKRQNKKKVSMTGCLFDRVELNGKKGWISGFTGKSCYVKDADDQYLSTSPKYKQVSLSKLRILHHCGNWIIGAKKTLGKG

SEQ ID NO: 22159 - protein, 413 aa, unidentified
  REGION 1..413: note = Human gut metagenome
MVYVLNENGQPLIPTENHAKVRVLLKQGKAKVVNNCPFTIQLLYSSTNYTQPVTLGVDAGSKHIGLSATTEDRELYAADVELRNDIVKLLAARRASRRSRRNRKTRYRKPRFNNRKRDKGWLAPSIREKIGTHLKVVDDTCKLLPVSKIIVETASFDIQKIKNPDVKSTDYQQGEQLGFWNVREYVLFRDGHKCQCCKGKSKDKILNVHHIESRQTGGNAPNNLITLCETCHTGYHKGTVKLPAKIKRGMKFKDAAFMGIMRWAFYGELKKRYPDVSLTYGYITKNTRIENGLPKEHYVDARCISGHPSAKPLGTVFYIKKVRCHNRQIHKLKILKKGVRKRNQAEYEVYGFRLYDKVSWKGRICFVFGRRSTGRMDLRLLDGTHVNASVSYKNIKLLRMRSNYLIEVKNAIG

SEQ ID NO: 22160 - protein, 416 aa, Anoxybacillus sp.; identical to SEQ ID NO: 21262

SEQ ID NO: 22161 - protein, 483 aa, unidentified
  REGION 1..483: note = Human gut metagenome
MSVFVVGLNGCRLMPTSERKARLLLKQGKAFVEQKVPFTIRLNYKTGSTTQLGYLGIDTGSQHIGVSVVREDGTVLHKEEIGLRDSMSKRKLLEAKASLRRGRRYRKTRYRHPKWRPKTKRVYCEVPDRKGRHWQKKKITFTSKRPKGWLPPSLQSKTDHHIRWIKKLQDLLPEGYRLSIELGRFDPARMKNPEIHGDLYQKGPQYDYENVRAYVLDRDRYTCQICKKKGGKLHVHHILYRSHGATDDPQYMVTVCSDCHSAQNHLPGGILYQWMQEQKRFSRGLRDATFMNILRKRLIRAFPEAVFTYGNVTKVDREKLKLPKSHGNDATAIALVKTGITAVKDKESVICIQQVRRKKRSLHEETPRKGRKEPNRTAARNNKNTKAVTVTKRQNKNTKAVTVTKRQNKKKVSMTGCLFDRVELNGKKGWISGFTGKSCYVKDADDQYLSTSPKYKQVSLSKLRILHHCGNWIIGAKKTLGKG

SEQ ID NO: 22162 - protein, 414 aa, unidentified; identical to SEQ ID NO: 6490
  REGION 1..414: note = Lachnospiraceae bacterium UBA3226

SEQ ID NO: 22163 - protein, 420 aa, unidentified; identical to SEQ ID NO: 18438
  REGION 1..420: note = Human gut metagenome

SEQ ID NO: 22164 - protein, 470 aa, unidentified; identical to SEQ ID NO: 2825
  REGION 1..470: note = Human gut metagenome

SEQ ID NO: 22165 - protein, 418 aa, unidentified; identical to SEQ ID NO: 15678
  REGION 1..418: note = Human gut metagenome

SEQ ID NO: 22166 - protein, 415 aa, unidentified; identical to SEQ ID NO: 3635
  REGION 1..415: note = Human gut metagenome

SEQ ID NO: 22167 - protein, 431 aa, unidentified; identical to SEQ ID NO: 4463
  REGION 1..431: note = Human gut metagenome

SEQ ID NO: 22168 - protein, 415 aa, unidentified; identical to SEQ ID NO: 10904
  REGION 1..415: note = Human gut metagenome

SEQ ID NO: 22169 - protein, 427 aa, Moorena sp.
MVFVLDTKKKPLMPCTPKRARQLLARGRAVVHRVAPFVIRLKDRQVEDSVLQPLALKIDPGSQTTGMTLARVEDRSEGAIHHAVLLAEVQHRGHEVRARKVTQRHARRRRRSANLRHRAARAANRRIARGWLPPSLLSRIGNVVSWTKRLRRFAPVTRVDVECVRFDTQLLQNPEITGVQYQHGELFGWEIRAYLLLKYAYQCVYCGKRDTPFELDHIRPRSRGGSSRITNLALACHDCNRQKGAQTAAEWGHPEVEVQAQTPLRDAAAVNATRHKLVEELGVFGLPVGTWTGGRTRWNRARFGIAKTHAKDALCVGDLAGVREGRLKTVAITATGRGEHCRTNWSKQGFPRGYRLRHKQVKGFKTGDRVRAVVPDKLKTRGIHVGRVQVRKSGSFDIQTHEREVEGVNATYCCLVQRGDGYAYALA

SEQ ID NO: 22170 - protein, 427 aa, Akkermansia sp.
LRVFLLNKRGKPLMPCSPAKARLLLKEKKAIVVRRTPFTIQLTIATGESKQPVSLGVDAGYKHVGLSASTEKAELYASEVELRPDVSDLLSARRTLRQSRRNRKTRYRAPRFDNRIRTKRKGWLAPSVENRINAHLSRIGAILRLLPVTKITVETASFDTQLLKNPDISGKEYQEGEQLGFWNVREYVLFRDGHACQHCHGRSKDPVLNVHHLESRRTGGDSPGNLLTLCETCHKALHRREIKLKTKRGQSFRAEAFMGIMRWEVLNRLKASHPELEVHNTYGYRTKHTRIVNGIDKSHCADAFCIAGNLGAKRLGEFFFQKQTRRNNRQIHKLSILKHGLRKRNQAPFEVKGFRLFDKVVCQGEEGFIFGRRSSGSFDVRKLDGTRISAGISYKKLRLLEKRRTYLKEIRKEEALPPLPEGRSLRA

SEQ ID NO: 22171 - protein, 424 aa, unidentified; identical to SEQ ID NO: 13447
  REGION 1..424: note = coral metagenome

SEQ ID NO: 22172 - protein, 420 aa, unidentified
  REGION 1..420: note = gut metagenome
MQYVYVLNMHGEPLMPCSPRKARLLLKEGKARVVKRTPFTIKLLYGSAGYKQPITLGVDAGSKHVGLSASTEKRELYSEEFTPRNDVVELLSTRRQNRRSRRNRKTRYRAPRFDNRVQSKHKGWLAPSVEVKIQEHITVIKHICRILPVTLVRVETAEFDTQRLKAMLAGKPLPVGTDYQLGEMYDEYNVRQYVLKRDNYTCQCCGAHTTAKKTVKLHVHHLESRKIGGNAPSNLITLCITCHDALHKGKVSLDGKERGKTLRDAAFMGIMRNTLLERLRNELHIPVQNTYGYITKLLREQNDIEKSHVNDARCISKHPLAEPCSVCYRTKAIRHHNRQTHKANFSKGGIRKRSQMPYVVEGYRLWDKVLYKGQECFVSGRRASGSFALRKLDGTVVTSGITFKKLQLLEPATNYLIERM

SEQ ID NO: 22173 - protein, 414 aa, unidentified
  REGION 1..414: note = Eubacterium sp. UBA4343
MAVAVLSSTGKKLMPTSNYHARRLLKKGRAVIVRYKPVFTIRMTDRESGETQPMEYTSDTGYIHVGISVKSQRHEFFHEERNMLSNETERHNNCRKYRWARRNRKRYRKPRFNNRSKKNKELAPSIRHKMECQIRLFDQYCEVLPITTATFEMGKFDTFLMQAAAEGKAKPEGKDYQKGDRYLTKTLRAAVFSRDHYTCQICGKSGIKDHVILHTHHIGFWKGYRSNRVGNLLTVCDKCHTAKNHKQDGKLWGLEPKGTDLAPAAYMNIVRWAMYRAVRDAHPEIEIHIQYGVQTDITRQNRNIEKSHANDAYCIGTMHPKHRCREAVYQKLRRHNRVRTKFYDAEYIDLRDGKKKNGAQLSCGVQNGKKAGGVKRTREFTAVENAEPEAAVSEEKNAKYRPETRCCLTAKSEL

SEQ ID NO: 22174 - protein, 441 aa, unidentified
  REGION 1..441: note = Human gut metagenome
ASVYRKVPFTIKLNYKTGSTVQPGYLGIDTGSQHIGVSVVQKDGTVLHKEEIGLRDSMSKRKLLESRASSRRGRRYRKTRYRHPKWKPKTKRIYNEKADRKGRHWKKQKNTFTSKRQAGWLPPSLQSKTDHHIQWIRKLLDLLPEGYRLSIELGRFDPARMKDPGIHGELYQKGPQYDYENVRAYVLARDGYTCRVCKKKGGKLHVHHILYRSRGASDNPKYMAAVCSKCHTTENHLPGGILYQWMQDQKKFTRGLRDATFMNILKKRLRRAFPDAVFTYGNITKADREKLGLPKSHGNDATAIALVKTEVKSVKDEEPVIHIQQVRRKKRSLHEETPRKGRKEPNRTASRNDKNTRSVTVSKGSGKKKVSMTACLFDRVELDGKKGWITGFTGTSCYVKDKEDNYICTSPKYKQVSISKLRILHHCGNWAIGAEKPLGKG

SEQ ID NO: 22175 - protein, 480 aa, unidentified
  REGION 1..480: note = Human gut metagenome
LYTKPLDNIGEGSLPPSGEINLKGMTFMVYVKSIDGKALMPTSNAKARKLLKQKKAKVVSLRPFVVKLTYKTKTEYIQKLNLGVDSGYSNIGFSVIDAKQEYIAGEVKLLEGMKKRLLEKASYRRIRRSRLRYRKARWNNRVKSKKKGWLAPSLKHKLDTHIKFIDYLKNILPIGKITIEVANFDIQKMKDDLISGIDYQNGDMFGFWNVREFVLHRDGHKCQNPNCKHKDKKEQILKVHHIRYRSKGGSDRPENLITLCSKCHIPANHKKGKFLYDWCVNGKKVRGFKDATFMSVIRWYLVNELKSKHNNVSITYGYITKNHRIQNGIEKSHLNDAFAITKGTNQARTKDRFLVIQDRLKNRSLEKFYDSKIIDIRTGKKVSSGDLSCGRSTRNKNLNTENLRKYRGAKISKGQRRIRKQKYFYQPNDLVKYDGKVYTVKGTQNEGKYIALKEIKKVPKVELLIPYVFKKGLNWSYGLC

SEQ ID NO: 22176 - protein, 420 aa, unidentified
  REGION 1..420: note = Human gut metagenome
MQYVYVLNKHGEPLMPCSPRKARLLLKQKKACVIKRTPFTVKLLHGSAGYKQPVTLGVDAGSKHIGISATTEKHELYREEATPRNDVVDLLSARRAFRRSRRNRKTRYRAPRFDNRVHSKHKGWLAPSVEVKIQEHITLIKHVFRILPVTLVRVETAEFDTQRLKAMLEGKPLPVGTDYQLGEMYDEYNVRQYVLKRDNYTCQCCGAHSTKTKGVKLHVHHIETRRTGGNAPNNLITLCKACHKALHAEKVTLDGKKRGRPLKDAAFMGIMRKTLMERLRKELKIPVQGTYGYITKYLREKNGIPKSHTNDARCISKNPLAIPCDTCYYTKAVRHHNRQLHKATILKGGIRKANQAPYIVKGYRLWDKVSCNGTECFITGRRTSGYFALKELDGTVVSNSISYKKLRLLEAATNYIIERK

SEQ ID NO: 22177 - protein, 414 aa, unidentified
  REGION 1..414: note = Human gut metagenome
MPCSPAKARLLLKEKKAIVKRRTPFTIQLTIATGETKQPVSLGVDAGYKHVGLSASTEKAELYASEVELRQDITDLLSARRALRQSRRNRKTRYRAPRFDNRIRTKRKGWLAPSVENRINAHLSRIEAVLRLLPVTKITVETASFDLQLLKNPDISGKEYQEGEQLGFWNIREYVLCRDGHVCQHCYGRSKDPVLNVHHLESRRTGGDSPGNLITLCETCHKALHRGEITLKAKRGQSFRAEAFMGIMRWEVLNRLKASHPELEVNNTYGYRTKHARIANDIAKSHCADAFCIAGNLGAERLGEFFFQKQTRRNNRQIHKLSILKGGIRKRNQAPFEVNGFRLFDKVACKGEEGFIFGRRSSGFFDVRKLDGTRISAGISYKKLHLLEKRRTYLTEIRKEEVLPPLPEGRGLRA

SEQ ID NO: 22178 - protein, 557 aa, unidentified; identical to SEQ ID NO: 14359
  REGION 1..557: note = Human gut metagenome

SEQ ID NO: 22179 - protein, 431 aa, unidentified
  REGION 1..431: note = Human gut metagenome
MPNKVYVINKHGRPLMPCSPAKARHLLDAGKAKVKKRTPFTIQLVYGSSGYTQEVILGVDAGSKTIGMSASTTKEELLSAEVKPRNDVVDLQSTRREFRRARRNRKTRYRKPRFDNRVRSKHKGWLAPSVEVKIQEHITSIKRVCRILPVSKVVIETAEFDLQLLKAIEEGKPVPQGEDYQQGEMYGHYNVRQYVLWRDGYTCQCCGAHATKKKEVRLHVHHLESRKVDGDAPDNQVTLCESCHEKLHKGLIAEKDFKKRKRKSTRDATFMGIMRKTLMQRLCSELPIPVIETRGYITKATREKLLVLPKSHTNDALAIAQGKQGFNVGYLPGIVQINKIYTIRPVRHHNRQLHKATILKGGIRKSNQTEKYVFGYRLFDKVQFNGQDCFIWGRRTTGIFTIKTINGKMIKDGISFKKLKLVEKSTSYLIA

SEQ ID NO: 22180 - protein, 420 aa, unidentified; identical to SEQ ID NO: 8060
  REGION 1..420: note = Human gut metagenome

SEQ ID NO: 22181 - protein, 425 aa, Nostoc sp.
MQINYVFLVDTNKQPLNPIHPARARELLNKNKAAIYRQFPFTLVLHKAIDNPVVRLLTLKLDPGSKTTGIALLDGENVIWAAELQHRGWSIKDALNSRRSLRRSRRSRKTRYRMARFDNRKRPEGWLPPSLMHRVLTVETWVKRLCRYAPIAQTVMELVKFDTQKMQNPEIDGIEYQQGQLAGYEVRQYLLEKWGRKCVYCDKEGVPLQIEHIHPKSKGGSNRVSNLALSCKRCNLKKGTQLVDEFLKKDAKRLEKIKQQVKKPLKDAAAVNATRWTLFHTLKGILPTTTGTGAQTKYNRTLFQLEKQHWIDAACIGDIKAIKLLTLQPLLIKANGWGTRQMAGTNKYGFPIRHRTRQSLHFGFQTGDIVKAVVLSGKKVGQYVGRVLCRARGSFDIVTKTGRVGDINHRFCKPIHKKDGYSYAF

SEQ ID NO: 22182 - protein, 456 aa, unidentified; identical to SEQ ID NO: 2706
  REGION 1..456: note = Human gut metagenome

SEQ ID NO: 22183 - protein, 462 aa, unidentified; identical to SEQ ID NO: 9356
  REGION 1..462: note = Human gut metagenome

SEQ ID NO: 22184 - protein, 328 aa, unidentified
  REGION 1..328: note = Human gut metagenome
MPCSPAKARLLLKERNAIVVRRTPFTIQLTIATGETKQPVSLGVDAGYKHVGLSASTEKAELYASEIELRQDITDLLSARRELRRARRNRKTRYRGPRFDNRIRTKRKGWLAPSVENRINAHLSRIEAVLRLLPVTKITVETASFDLQLLKNPDISGKEYQEGEQLGFWNIREYVLCRDGHVCQHCYGRSKDPVLNVHHLESRRTGGDSPGNLITLCETCHKALHRGEITLKAKRGQSFRAEAFMGIMRWEVLDRLKASHPELEVQNTYGYRTKHVRIANGIAKSHCADAFCIGGNLGAERLGEFFFQKQTRRNNRQIHKLSILKGAL

SEQ ID NO: 22185 - protein, 521 aa, unidentified; identical to SEQ ID NO: 11204
  REGION 1..521: note = Human gut metagenome

SEQ ID NO: 22186 - protein, 436 aa, Thermodesulfovibrio sp.
MSLGNTMYVAVLNKHGKPLMPCSPRTARVLLKQGKAKVVRCKPFTIQLLYGSSGYKQKLYAFRDRGLTQGICICREDRKVIARMEVQGRTDISERLYERRSYRRSRRYRNTGYRQCRSDNRKRREDWLPPSVERLWYEHEKVRNFLNSLFPITQWAEEVNNFDTHKMWNPEVKGEDYQNGPLKGKKDVRQYVLERDSYRCVLCGDAENLEVHHIIPRAKGGSNRPQNLVTLCANCHRKVTLGEIEIDTVIESYRWAAKLNALNSRFVALSVVKVSPKNVRQKRVELGLEKAHWADALAGITVAFGITPDLSELPPLLTGRFVRTKNRQLHCAKPVKSGYRPKAQANRYLKNKQGVRFMRYDLAKYTHNGKKIIGYLNTLRSSGMVRICDFTGRELANVSVNRLKKLQNRDSVIWEWLFLPSPKGDGSPSHDIYRKK

SEQ ID NO: 22187 - protein, 431 aa, unidentified; identical to SEQ ID NO: 2952
  REGION 1..431: note = Human gut metagenome

SEQ ID NO: 22188 - protein, 378 aa, Caldicellulosiruptor owensensis
LLVYRLCICYNICKGDDKKWQQFITIQLLHGSSGYKQKCIAGIDAGSKNIGIAVTTEDGRVIYKAQVELRQDIKENIETRRRLRRARRSRKKRYRKPRYLNRKRPEGWLPPSVRAKIEAHYNIIKRLSKIIPIAEIKVEVGQFDTQALQNPDIQGIEYQNGEMKGFDSVKEYVKIRDKFKCHYAELRPDISCSDKLTVDHIIPRSRGGTNNPSNLVCCCEAHNIAKGNMSYKEFTGKELPAIEDFRPATFMNVLRDYLVPRLMEIAPTSYTFGLYTRRTRKEWELEKSHINDAIAITGIKPKWQDDVWYCIRQVRKKKRSLHEEIPRRGRKEPNREAKRNSKNTKEIIVNGNKWCLWDKVYIPAINKTGYISGFSNNW

SEQ ID NO: 22189 - protein, 429 aa, Marinobacter sp.; identical to SEQ ID NO: 4415
  SITE 380: note = misc_feature - Xaa can be any naturally occurring amino acid

SEQ ID NO: 22190 - protein, 512 aa, unidentified
  REGION 1..512: note = Human gut metagenome
MSTVYVLNKDGKPLMPTTRGGHVRHLLKEQKARVVRTKPFTIQLLYETDDVVQPLYLGIDPGRTNIGVAVVKADSTAVFTAHLETRNEEIPKLMQGRKKARRARRTNGRRCRRQRRAKANGTISKKCVKQTTAQNGSASKHAKEIGVIKRHLPGCEKDVLCIGIKNKEAKFSNRTRPEGWLTPTANQLLKTHINLVKKIRKFLPISDVVLEINKFAFMRLDNPNIQKWQYQQGPLYQKASLEEAVSEMQEHHCLFCKKSIAHYHHVVPQSENGSNTIGNIVGLCTKHHDFVHKDTAWQKKLAKKKTGLNKKYGALSVLNQIIPALTKELSSLFPKHFFATNGKSTHDYRIAHGVSKDHWLDAYCIACSVLPNDTCDRTINSRVPYELKQFRRHDRRALHKENMSRVYTLNGKSVATNRHKAAEQTTDSLEEFRQRQPNDVCKLKVKEHHPTYRNMNRNYPGSIFLIGKQVHVMQGIAGSKDGEATTYKDTNANSIAAGKCKFVAKNSGILFV

SEQ ID NO: 22191 - protein, 375 aa, Moorena sp.
PVIHKHQVKIDPGSKTTGLAIVQGERVIWGSELTHRGSQIRDNLISRGQLRRSRRNRKTRYRQPRFLNRTKPKGWLAPSLTSRVQNILTWVKKLIRFCPITGISQELVRFDTQKLQNPELSGIEYQQGTLYGYELREYLLEKWNRKCAYCGATGTQLEIEHIKPLSKGGSNRVSNLTIACHSCNQAKSNQDIELFLSKKPSILKRILSQSKRPLADGASVNSTRWKLYHDLKSIGLPVEVGSGGLTKFNRCRQDLPKTHWLDAANVGKVETLIIEVTKPLLITAKGHGTRQLCRTNKYGFPIRHCSRIKFHKGFQTGDIVRAVVTKGKKIGTYVGRVATRKSGSFNISTLGGLVQGISHKYCRFIHRKDGYAYTN

SEQ ID NO: 22192 - protein, 428 aa, Moorena sp.
MQRVFVLDHNKQPLMPCHPARARKLLKKGKAAVYRRYPFTIIMTHRVGGDLQPIEVKFDPGSRTTGIALVGHFNRGLEVIWAGNLNHRGIQIKSHLESRRAIRRSRRNRKTRYRQARFLNRMRPAGWLPPSLRSRVDNVKNGMLKLSSLTPVSQIAVETVKFDMQKIQNPEISGLEYQHGELAGYEVREYLLEKWGRKCAYCGAQNVSLEIEHIRASSKGGSNRVSNLTLACNKCNQKKGNQDIKEFLKSQPDRLRKIQSQALKPLKDAAAVNATRYAISNVLKSFGLPIVFSTGGRTKFNRLKLGYQKDHWIDAACVGESGSQIVIPKTITPLTITAKGRGSRQKCSMNKYGFPRTGPKKAKRVKGFQTGDIVKAVVTKGKKIGTYFGRVAVRASGSFDIGSGEERVGSISYKYCCLLQRSDGYEYT

SEQ ID NO: 22193 - protein, 431 aa, unidentified
  REGION 1..431: note = Groundwater metagenome
MCVFVLDSDRQPLDPCHPARARELLRQGRASVVRHSPCTIILHDRKREDSIVHAHRLKIDPGSKTTGLALLHGGSVFWAAELTHRGQRIKDALASRRALRRNRRQRKTRYRQPRFLNRRRPSGWLPPSLWSRVGNVMTWVERLARSCPITALSQELVRFDTQLMQNAAVSGIAYQQGELAGYEVREYLLEKWHRTCVYCGARQVPLEVEHIVPKACGGSDRISNLTLACAPCNQKKGTQTAAEFGFPQVQAQAKLPLQDTAAVNATRWALYHQLCLTGLPVECGTGGRTKDNRTRLGLHKTHWLDAACVGASTPDTLHVAGIQPLGIRAMGHGTRQMCRTDAHGFPVQHRARQKRYFGMQTGDLVKAVVPSGKYTGTWISRVVVKASGWFDLVIRGKKASVHHKHCTRLWAADGYTYSLPAVAGTAVSSPH

SEQ ID NO: 22194 - protein, 466 aa, Moorena sp.
VRFEINWLIRGQKGDRKMQKLGERNTYTPTNASQVRSSVVVSLNREETLGEHDLKTCPNNLDGNQLSGKREQDLRVPVLNMRGKSLMPARPAKARHLLKEGKAMVVGRSPFTIQLTTATGEAKQDIALGVDCGYSHVGLSAVSRKQELFSAEVILRGDIVKLNSERRQYRRARRSRLWHRQPRFDNRKKDKGWLAPSIQHKLDSYFKLIGKIKEILPIAKINVEVAAFDIAKIKNPDIEGEGYQNGVQKNFWNTREYVLFRDNHTCQACKGKSKDPVLEVHHLESRKTGGDRPDNLIALCNTCHSKVSKGKFYLNVKIPKGFKAETFMNTVRWKLVNRLKELGNSVSHTYGYITKSKRIEIGLEKNHVNDAFVIAGGTTQERCSSFTVSQTRRNNRRLQTNRKGYRPSIRRKRYELQPNDLVRYDNTEKRVKGVFNYGTWVRLDDGVNTNVKNVEVLKYGKGIQFV

SEQ ID NO: 22195 - protein, 189 aa, unidentified; identical to SEQ ID NO: 10469
  REGION 1..189: note = Human gut metagenome

SEQ ID NO: 22196 - protein, 434 aa, Lactobacillus sp.; identical to SEQ ID NO: 10121

SEQ ID NO: 22197 - protein, 466 aa, unidentified
  REGION 1..466: note = Human gut metagenome
MKILVIGRNGLGLAPTTPRKARILLKEKRAEVAYRQPFTIRLKYKTGCAHPKMCLGEDTGSQHIGFAILTEKGQVLDKTEYELRSTMEKRSLLETRKEYRRGRRYRKVRYRHSKFHPTTKRLYVEKPIKYNKHTTHWKKQTNSFDSSRPEGWLPPSIQSKLDHHIRLTSRYKEALPPDTMIRIEVGRFDVAHMKDPTINGKMYQQGPMYESENVKAYVFARDSYTCKCCKAKAGSIRKDGTQVKLKAHHIDFRSKGATDNPERMVSVCDRCHTTAAHQLGGILYQWMIEGKKFSRGYRDPAFMNILRRRMWKAFPEAAFTYGNITAADRKGLLIEKSHANDAVAIAAHGMELIRNSTETTFYKQLRKQKRSLHEATPRKERREPNRTAKRNRKNTCVVKGWYLNDKVTVFGKTGWISGFSGKSSVYIRDCENEYITVPGKNYKLVPISQIKMITHCNNWAVYTKIA

SEQ ID NO: 22198 - protein, 431 aa, Moorena sp.; identical to SEQ ID NO: 2831

SEQ ID NO: 22199 - protein, 317 aa, Sarcina sp.
VQPVGLGVDAGSRHVGLSACTDKTELFASEVLLRGDITKLLSERRAFRHARCSRKTRYREKRFDNWVRSKHRGWLAPSVENRIHAHMRAVEDVRRILPVSRSTVETASFDLQKLKADLAGVSRPRGTDYQQGDMLGFWNASEYVLFRDGHACRCCKGKSKDQRLNVHHIESRQAGGNAPDNLVTLCKTCHDGYHKGTVKLPKDIKREAKTRDAVFMGTMRWTFYRRLKELFGPDMVHMTYGYITKNTCIRHKLKKPHSTDARCISGHPDAEPCGDIILQRKVRRHNRKLHRAKILKGGVRKPNQSRGKSSGSGCSTR

SEQ ID NO: 22200 - protein, 418 aa, unidentified; identical to SEQ ID NO: 15302
  REGION 1..418: note = Human gut metagenome

SEQ ID NO: 22201 - protein, 423 aa, unidentified
  REGION 1..423: note = Human gut metagenome
MVYVLNIDGQPLMPTDRHGKVRHLLKDGRAEVVKRCPFTIRLLYDSTHYTQDIVLGVDAGSKHIGLSGTTETKELYASDVELRNDIVDLISTRRQNRRSRRNRKIRYRKARFQNRVSGKKNWLAPSIRQKVDTHMTVVSRVCMILPVTKIIVETASFDIQKIKDPDISGTGYQQGEQLDFWNVREYVLSRDGHTCQCCKGKSKDPVLNVHHIESRKTGGDAPNNLITLCETCHKSYHSGAVQLPKAIHRGMRFKDAAFMGIMRWAFYNKLKEVYEPQDIEVSMTFGYLTKNTRIRHYLPKEHYIDARCISGHPEAIPSNEVFYQKKVRCHNRQIHKNTILKGGVRKRNQTGYLVKGFRLFDKVAYKGREYFIFGRRQSGFFDLRNLSGCKVNKGSLSYRKIGFLEPRQYYLCERRVMDTQGCA

SEQ ID NO: 22202 - protein, 442 aa, unidentified
  REGION 1..442: note = Human gut metagenome
MVYVLNKKGQPLMPTNRHGKVRRLLKTKKAKVIKSCPFTIQLLYDTANHTQDITLGVDAGSKHIGLSATTEDKVLFEADVELRNDISKLLEARYTFRHSRRNRKTRYRKKRFDNRVSSKHKGWLAPSIEHKIQSHFAMVEKLHRILPVTKIVVETASFDTQLLKAQLEGKLIPEGTDYQNGELAGWNIREYIFHRDNYTCQWCRGKSKDPVLVTHHHAYWKGDHTNKPSSLITLCNTCNDSKYHKKEANRLWGWEPKVTNSYKHAVFMGVMRWTFYNRLKEIYPNVSMTYGYITKNTRIENNLPKAHYVDARCIGGHPKAKSNGEYFYYKKVRCHNRQLHKANTLKGGIRKRNQAEYTVKGFRLFDRVEYQNNEYFVFGRRASGFFDIRTLDGQKVNKGSISFKKLKLKETSKTYLIERRMADTGVSLAPLTTEVTSLRQTG

SEQ ID NO: 22203 - protein, 449 aa, Desulfobacter sp.
MKVYVKSQSGKWLMPTNPANARILLKQGKAKVIQRTPFAIHLLYETTEHIQPVTVGIDDGGINLGIAAVSNGKVLFQQEVVLRSDVKSKLDTRRQYRKSRRNRKTRYRKSRFLNRKSSIPTCKVCGGNAPASQVICRSCLNRADGVHQKYAKIKKSVFRIPPSIKAKKDAIIRVVKQIPLPICRIVLEDLYFDFQAMENPDISGEQYQHGDLLYHKNFKQACLVRDKFRCRVCGAQTKLQCHHICAGAKGGTDKLSNLMTLCDLCHDRHHKEGLKLPKQKSSFYMSAAHVQQGKHYLQAKLSRIAPLRTTFGYITSHFRNNAGIEKSHVNDAVIIADKQASPLDRQIQTKHVQSRKRSLHEATARKGRKTPNRTQKRNNKNVFTLKDFNRWDTVQYKGRVGFISGFTGSSSCYIVDIKGNYIKNPMKTYKQVDLREISLICKNQTIISQ

SEQ ID NO: 22204 - protein, 533 aa, unidentified; identical to SEQ ID NO: 11761
  REGION 1..533: note = Human gut metagenome

SEQ ID NO: 22205 - protein, 419 aa, unidentified
  REGION 1..419: note = Human gut metagenome
MVYMISQDGKPLMPCSNSIARLLLKQSKAKVKKREPFTIKLTYETTNYTQDLTLGVDTGSGTIGTSVSKDNGDIIYMSEVVIRNDITGKMTQRAKYRRNRRNRKARYRKARWLNRANSIKNDRFSPTMQSKLHSHVKEIEYIKFILPITEMVFETGQFDTHLMKNPNLANPKIKHWGYQKGINYGFENTKAMVLNRDNYTCQYYKGKHKDSKLEVHHILFRSQGGSDEESNLITLCHTCHKDLHSGKINPKLSGKVKGNLKYATQMNSIRKQLFKLYPDAVETFGYVTKANRLLLGIDKEHYYDACTIATQGNIFTVKSNLYKKKCISDGDFQKTKGIRSEQPIITDKICGFRKFDKVRYFGNKYFIKGRMSTGYAVLMDIDGNKVDFSAMPKGYKTPKLSNCKRIMARSTEMIQTLVI

SEQ ID NO: 22206 - protein, 230 aa, Moorena sp.
  REGION 199..201: note = misc_feature - Xaa can be any naturally occurring amino acid
VSKNYSDLHLSVQFGSIVQELVRFDLQQLKNPEFSGIEYQQVELPGYKVREYLLNKWERKCAYCGVENIALQVEHIYPRAKGGSNRIYHLCLACHSCNQKKGTKNIEQFLAEKPDIPKWNLAQAKRSVKDATAVNLTRWALFNRLKETGLPVVTGSGGLTKFNRTRLELPKSHWLDVACVGQVELLEVLTNKPLLIKAXXXQICRTDKFGFPSRYVPRNKSVKGFQTVIS

SEQ ID NO: 22207 - protein, 420 aa, Moorena sp.; identical to SEQ ID NO: 2632

SEQ ID NO: 22208 - protein, 435 aa, Moorena sp.
VQKAFVVDRKGEPLMPCHPARARQLLREKRAVVHRRAPFTIRLKNREGGEVQPVRLKIDPGSRVTGMALVREDGNKAEVLHLAELHHRRGISKRMKQRRQYRRRRRSANLRYRPPRFLNRAASRRKGKLAPSLLSRVNHIESWVRRYRGMGPVAAISVELARFDMQKMENAEIKGVEYQQGTLHGYDVWEYLLEKWGRMCAYCGTENVPLEKEHIVPRSRRGSDRVSNLTVSCHECNQRKNNQTAKEFGHPEVEAQALQPLRDAAAVNSTRWATYRVLAATGLPVEVGTGSRTKYNRVRLALPKTHALDALCVGGSTPERVAGLEGTVVLVIGARGRGQYSRTSVDRYGFPRGYRTRKKLMYGFRTGDLVEAVVPRGKYAGRHAGVAVVRRSGYFDIKQNGTRVAQGISWRHFNALQRFDGYGYERGRAALEPHG

SEQ ID NO: 22209 - protein, 409 aa, unidentified
  REGION 1..409: note = Fermentation metagenome
MIYVLNQEGQPLMPTKRHGKVRHLLEKGKAKVVKRTPFTIQLLYKGENYTQDITLGIDAGSKHIGVSASTDTEELYSSEVELRNDIVKLLSSRRALRSSRRNRKTRHRKARFDNRAKGKGWLAPSVRQKIDTHLKVVDDIHKILPITEIVVETAQFDIQKIKNPDISGTEYQEGEQLNSWNIREYVLFRDNHTCHHCKGKSKELVLNTHHIESRKTGGDAPNNLITLCKTCHDKFHKDEIELNIKRGQKFNHATFMGVMRWAFYNVLKEKYPNVKMTFGYITKNTRIENNLQKSHHIDALCIAGHPKAKQLDYYQVKKVRCHNRQIHKLTINKGGTRKNNQAPYIVKGFRLFDKVSYEGKECFIFGRRTTGYFDLRKLDGTTIHKSASYKKLKLIKPKGSYLIERKKVC

SEQ ID NO: 22210 - protein, 442 aa, unidentified
  REGION 1..442: note = Human gut metagenome
MKHENANRVFLLNKDGKPLMPCRPRKARLLLKSGKAFVVKKYPFTIQLKYGSYGYKQKVSLGVDTGQRHIGFAVVSQDKVLHQSEVELRQDVHTNLYTRKIYRRGRRTRKTRYRQARFLNRVHGKRDGLWLPPSVKSKVSHNIAWIKRYLAVLPNPDLHIEVGKFDMAKIVNPDISGKQYQEGSLKDWKNYEYYVLARDEYTCQLCYKHGEGVKLVVHHIVYRSQGGTDRVDNLITLCTNCHTTKNHQPGGKLYKWMKAKKKVTKQLKGATFMNILRKRIMTTFPEASFQYGSQTYVDRKNLLLPKGHFMDAIAISGIKPVGQIPETVTMISQFRKKKRSLHEATARKGRKQPNTSSKRNEKNTKYACGLWLNDYVRVIGNHVKGYVKGFKSNGYYVYLTDGLGNYVLNNGKNYINGQQCRLIMHNGNWQKAEQKLSLYEFK

SEQ ID NO: 22211 - protein, 470 aa, unidentified; identical to SEQ ID NO: 2825
  REGION 1..470: note = Human gut metagenome

SEQ ID NO: 22212 - protein, 279 aa, unidentified
  REGION 1..279: note = Human gut metagenome
VVIETAEFDLQLLKAIEEGKPVPQGEDYQQGEMYGHYNVRQYVLWRDGYTCQCCGAHATKKKEVRLHVHHLESRKVGGDAPDNQVTLCESCHEKLHKGLIAEKDFKKRKRKSTRDATFMGIMRKTLMQRLCSELPIPVVKTRGYITKATREKLLVLPKSHTNDALAIAQGKQGFNVGYLPGILQIDKIYTIRPVRHHNRQLHKATILKGGIRKSNQTKKYVFGYRLFDKVQFNGQDCFIWGRRTTGIFTIKTINGKMIKDGISFKKLKLVEKSTGYLIA

SEQ ID NO: 22213 - protein, 476 aa, unidentified
  REGION 1..476: note = Human gut metagenome
RARVFRQIPFTIQLTYENKPVLQPVTIAEDPGRSNIGMAVVSLSGELLSAAVVQTRNKEIVKLMEKRKQHRRASRNGERKARQRLAKKCHTMIKAGFLMRKLPMYGKDKRVQCNVIRNTEARFCNRKREDGWLTPSAEHLVRTHINLIHKMQKFLPITDVAIEINRFAFLSLEDPSISGVDFQNGPLKGYDDLNAAVEDLQDGHCLMCNSPIEHRHHIVPRSMQGSNTIGNIAGLCCKCHEKVHKDSAFEDSLKKKKAGLNKRYAAVSVLNQAIPFICKRLEQEFGKEHVHYCSGRDSSMVRRSLGYHKTKEEQLHEVDAWCIAVLSLQHVPEKAPEFDHVHEILQFRRQDRSRIKAQTSRAYYYKGKKIAKNRKKAEGQREDSLQEWRKRQVERYGEEQTRKMISQLKVKKSIRRYNRLDRLMPGAVFYYQGVRYVMRGQHSNRQYLQAVGMGSKDFPAKKCKIVVHNEGLVFVS

SEQ ID NO: 22214 - protein, 414 aa, unidentified; identical to SEQ ID NO: 2588
  REGION 1..414: note = Human gut metagenome

SEQ ID NO: 22215 - protein, 420 aa, unidentified
  REGION 1..420: note = Human gut metagenome
MQYVYVLSKHGEPMMPCSPGKARLLLKQQKAYVVRRTPFTIKLLYGSAGYKQPITLGVDAGSKHVGLSASTEKRELYREEFAPRNDVVELLSTRGQNRRSRRNRKTRYRAPRFDNRVHSKHKGWLAPSVEVKIQEHITIIKRICKILPISLVRVETAEFDTQRLKAMLAGKPLPVGTDYQLGEMYDEYNVRQYVLKRDHYTCQCCGTHNTAKKLVKLHVHHLESRKTGGNAPSNLITLCTTCHKNLHKGKVTLDGKERGKPLRDAAFMGIMRKTLMARLKKELPIPVQGTYGYITKMRREQNDIKKSHTNDARCISKHPLAEPCSVCYRTKAIRHHNRQTHKANFSKKGIRKRSQMPYLVEGYRLWDKVLYKEQECFVSGRRSSGSFTLKKLDGTSVSKGVTFKKLRLLEPATNYLIERM

SEQ ID NO: 22216 - protein, 512 aa, unidentified
  REGION 1..512: note = Human gut metagenome
MSTVYVLNKDGKPLMPTTRCGHVRRLLKEQKARAVASKPFTIQLLYETDDVVQPLYLGIDPGRTNIGVAVVKMDGTAVFTAHLETRNKEIPKLMKKRKDSRRARRTNGRRCRRQRRAKANGTISKKCVKHDTAQNGSVSKRAKEIGIIKRHLPGCEKDVLCIGIKNKEAKFSNRTRPEGWLTPTANQLLQTHINLVKKIRKFLPISDAVLEINKFAFMQLDNPNIQKWQYQQGPLYQKANLEEAVSEMQEHHCLFCKKPIAHYHHVVPQSENGSDTIGNIVGLCTKHHDLVHKDTAWQKKLAKKKTGLNKKYGALSVLNQIIPALTKELSSLFPKHFFATNGKSTYDYRSAHGVSKDHWLDAYCIACSVLPNDVCDSGINNRVPYELKQFRRHDRRALNNENMSRVYTLNDNVVATNRHKATKQTTDSLEEFRQNHPDDVCKLKVKEHHPTYRNMNRNYPGSVFLIGKQVHVMQGIAGSKDGEATTYKDTNANSIAAGKCKFVAKNSGILFV

SEQ ID NO: 22217 - protein, 430 aa, unidentified; identical to SEQ ID NO: 6024
  REGION 1..430: note = Spirochaetales bacterium UBA7869

SEQ ID NO: 22218 - protein, 407 aa, Methanohalophilus sp.; identical to SEQ ID NO: 19023

SEQ ID NO: 22219 - protein, 406 aa, unidentified; identical to SEQ ID NO: 2752
  REGION 1..406: note = Human gut metagenome

SEQ ID NO: 22220 - protein, 436 aa, Thermodesulfovibrio sp.; identical to SEQ ID NO: 22186

SEQ ID NO: 22221 - protein, 357 aa, unidentified
  REGION 1..357: note = Human gut metagenome
LKVFVLNMRGQPLMPCSPAKARHLLKAGKAVVKRRTSFTIQLRIATGETKQNVTLGVDAGAKHVGLSAATEKEEVFAPEVELRQDITGLLAARLSLRRERRQRKTRYRAPRFLNRVRSKHNGWLPPSVENRIQAHLSRIDAICGLLPVTKIVIETASFDIQKIKHPDVEGTDYQQGDQLGFWNVREYVLFRDGHVCQHCHGHAKDKILNVHHLESRQTGGDAPNNLITLCERCHKACHAGKIKLKVKRGQSFREEAFIGIMRWTLLDRVRKAHPGLPVENTYGYLTKNTRITLGLPKAHCVDAYCIAGNLKAVRRGVYLHQRQVRKHNRQIHKCTVLSKTLKDGTKIGYRKLNQTPH

SEQ ID NO: 22222 - protein, 424 aa, Moorena sp.
MVVMNVVYVLSPDRVPLMPCSCAIARLLLKQGKAKVVRRTPFTIKMYTQPVDTHTQPLTLGIDTGSAVIGSAVSDECGNILYVSEGEVRNDIAQTMKNRATSRRNRRYRKTRYRPARWLNRRNSLKTGRFSPTMTSKTEAHLREIRFVQSLLPIQSIVLETGTFNPHALKHPAVLQNKWMYQKGINYGLANTKAYVLTRDGYVCQRCKGQSKDRRLEVHHIVFRSQQGSDEEANLLTLCKTCHEGLHAGTVTLKQKGKRKGNLLHATQMNSIRIQLLSRVEAIETWGFVTKEHRLLAGLPKEHIFDAAMIATRGNIPVFQTTEVLLKKCISDGDYQQTKGKHSQQRIPTGKIAGLRKFDKVRYLGVEYFIKGRMSTGYAILMDLSGNKLALKPTPKFDNMKRVSARSSWIINQKAMPSFSSSPT

SEQ ID NO: 22223 - protein, 458 aa, Acidithiobacillus sp.; identical to SEQ ID NO: 13713

SEQ ID NO: 22224 - protein, 471 aa, unidentified
  REGION 1..471: note = Human gut metagenome
MVITLDKRKKPLGFCTERRARKLLEKRRACVYRYYPFTIIIKDIDTRKMDKEDLPAYRMKIDPGSKATGVSIVREKDNTVMLFAQIEHRGQQIKKNMDTRRATRRNRRNRETRYRRCKYKDGGNFDSQRPEGWLPPSVKSIGDNIISWVKRFQKLINIQYVSFEAVRFDTQLMDNPNIQGEEYQQGTLLGYEIREYLLDKYGHTCQYCGGVSQDPILEWEHIQPKSKGGSDSVKNATLACHTCNQDKGNLTLSQWKEKEDAILSNKKASSKRKQLAKARLKGIAAVEYHKPQGIGMRYCAWVNSTRRYVEKHLYESFHSDNVECASGGRTKYNRTKLQLPKDHHYDALCVGQVPEEGYKDKTNGYVMHIKAIGRGSRFRGKINKCGIITTKLKKSPKKRFGFKNGDIVAADVPKGKYAGHHVGRVMTRARGSFDIRRTDGALVGVNYKYCRLLQHDSGYQYKYIKPIPLGN

SEQ ID NO: 22225 - protein, 473 aa, unidentified; identical to SEQ ID NO: 3562
  REGION 1..473: note = uncultured beta proteobacterium

SEQ ID NO: 22226 - protein, 411 aa, Desulfosporosinus sp.
MLTYVLNQNGKPLMPCKSSKARRLLKQSKAKVVKLEPFTLQLLHGSSGYKQEITLGVDAGSKMIGLSATTENNELYSADIQLRNDVVDLLSTRRQNRRTRRNRLRYRKPRFLNRVKSKNKGWLAPSIENKIQTHLTVVRNVYKVLPVSKVIVEVASFDIQKIKNPSISGTDYQQGEQIDFWNIREYVLFRDGHQCHGKKGCNNKILNVHHIESRKVGGDSPSNLITLCEECHNDYHKGKLELNINRGQKFKDATFMGIMRWSFYNRLKELYPIVSLTYGYITKNTRISNSLPKEHRIDALCISGNLMVKRLDYFYFSKKVRCHNRQIHKANILKGDVKKLNQAQFEVKGFRLFDKIQYQGKLYYIFGRRNSGFFDIRTLDGTKVNKGSISCRSFKLIERRKSLLTERRVAG

SEQ ID NO: 22227 - protein, 447 aa, unidentified; identical to SEQ ID NO: 8397
  REGION 1..447: note = Human gut metagenome

SEQ ID NO: 22228 - protein, 439 aa, unidentified
  REGION 1..439: note = Human gut metagenome
AEPAGIRKGDALKVFVLNMRGRPLMPCSPARARHLLKAGKAVVRRRTPFTIQLRIATGETKQSVTLGVDAGAKHVGLSAATEKEEVFASEVELRQDITGLLAARLSLRRDRRHRKTRYRAPRFLNRVRSKHKGWLAPSVENRIQAHMSRIDAVCRLLPVTRIVIETASFDVQKIRNLEVEGTGYQQGDQLGFWNVREYVLFRDGHVCQHCHGHAKDKILNVHHLESRQTGGDAPNNLITLCETCHKACHAGKIKLKVKRGQSFRAEAFMGIMRWTLLDRMRKAHSGLPVENTYGYLTKNTRITLGLPKTHCVDAYCIAGNLKAVRRGVCLHQRQVRKHNRQIHKCTVLSKTLKDGTKIGYRKLNQTPHLVKSFRLFDKVRCLGQTGFIFGRRSSGYFDVRRLDGVKISSCISYRKLTLLEKRSTCLTELRKEDGASSPV

SEQ ID NO: 22229 - protein, 536 aa, unidentified
  REGION 1..536: note = Human gut metagenome
VLRPRYQYPTRWYPSREQGSGNGCLSGEENTDLEQEVSGTLSKGDHSHPGEQDFCVPAITIQGGPAMSVFVVGLNGCRLMPTSERKARLLLKHGKASVYRKVPFTIKLNYKTGSTTQSGYLGIDTGSQHIGVSVVREDGTVLHKEEIGLRDSMSKRKLMQSRASSRRGRRHRKTRYRHPKWRPKAKRVYCKTPDRKGRHWKKRKITFASKRPKGWLPPSLQSKTDHHIRWIKKLQDLLPEGYRLSIELGRFDPARLKDPEIHGELYQKGPQYDYENVRAYVLDRDRYTCQVCGKKGGRLHVHHILYRSHGATDDPQYMATVCSDCHNTENHQQGGILYQWMQKQKKFTRGLRDATFMNILRKRLIEAFPGATFTYGNITKADRERLKLPKSHGNDATAIAIVKTGIMTVKDKEPVIYIQQVRRKKRSLHEETPRKGRKEPNRKASRYDKNTKAVTVTKRKNKKKISITGCLFDRVELNGKKGWISGFTDKSCYVKDENDQYIRTSPKYKQVSLSKLKILHHCGNWAIGARRSLGKG

SEQ ID NO: 22230 - protein, 470 aa, unidentified
  REGION 1..470: note = Human gut metagenome
MSVFVVGLNGCRLMPTSERKARLLLKHGKASVYRKVPFTIKLNYKTGSTTQSGYLGIDTGSQHIGVSVVREDGVVLHKEEIGLRDSMSKRKLMQSRASSRRGRRHRKTRYRHPKWRPKAKRVYCEIPDRNGRHWKKKEITFTSKRPKGWLPPSLQSKTDHHIRWIKKLQDLLPEGYRLSIELGRFDPARLKDPEIHGELYQKGPQYDYENVRAYVLNRDRYTCQVCGKKGGKLHVHHILYRSHGATDDPQYMATVCSDCHNTETHQQGGILYQWMQKQKKFTRGLRDATFMNILRKRLIEAFPGATFTYGNITKADRERLRLPKSHGNDATAIAIVKTGIMTVKDKEPVIYIQQVRRKKRSLHEETPRKGRKEPNRKASRYDKNTKAVTVTKRKDKKKISITGCLFDRVELNGKKGWISGFTDKSCYVKDENDQYIRTSPKYKQVSLSKLKILHHCGNWAIGARRSLGKG

SEQ ID NO: 22231 - protein, 555 aa, unidentified; identical to SEQ ID NO: 9226
  REGION 1..555: note = Lachnospiraceae bacterium UBA7276

SEQ ID NO: 22232 - protein, 430 aa, unidentified
  REGION 1..430: note = Human gut metagenome
LETRNEEIPKLMQGRKKARRARRTNGRRCRRQRRAKANGTISKKCVKQTTAQNGSASKRAKEIGVIKRHLPGCEKDVLCIGIKNKEAKFSNRTRPEGWLTPTANQLLKTHINLVKKIRKFLPISDVVLEINKFAFMRLDNPNIQKWQYQQGPLYQKASLEEAVSEMQEHHCLFCKKSIAHYHHVVPQSENGNNTIGNIVGLCTKHHDLVHKDTTWQKKLAKKKTGLNKKYGALSVLNQIIPALTKELSSLFPKHFFATNGKSTYDYRAAHSVSKDHWLDAYCIACSVLANDVCDSNINSRVPYELKQFRRHDRRALNNENMSRVYTLNGKVVATNRHKATKQTTDSLEEFRQNHSDDVCKLKVKEHHPTYRNMNRNYPGSVFLIGKQVHVMQGIAGSKNGEATTYKDTNANSIAAGKCKFVAKNSGILFV

SEQ ID NO: 22233 - protein, 431 aa, unidentified
  REGION 1..431: note = Human gut metagenome
MPNKVYVINKHGRPLMPCSPAKARHLLDEGKAKIKKRTPFTIQLVYGSSGYTQEVILGVDAGSKTIGVSASTKKEELFAANVIPRNDVVDLLSTRRESRRARRNRKTRYRKPRFDNRVRSKHKGWLAPSVEVKIQEHITSIKRACRILPVSKVVVETAEFDLQLLKAIADGKPVPQGEDYQKGEMYGHYNVRQYVLWRDDYTCQCCGAHATKKKEVRLHVHHLESRKVGGDAPDNQVTLCESCHEKLHKGLITAKDFKKRKRRSTRDATFMGIMRKTLMQMLCSELPIPVVKTRGYITKATREKLLVLPKSHTNDALAIAQGKQGFNVGYLPGIVQINKIYTICPVRHHNRQLHKATILKGGIRKSNQAEKYVFGYRLFDKVQFNGQDCFIWGRRTTGIFTIKTINGKMIKDGISFKKLKPVEKSTSYLIA

SEQ ID NO: 22234 - protein, 420 aa, unidentified; identical to SEQ ID NO: 20119
  REGION 1..420: note = Human gut metagenome

SEQ ID NO: 22235 - protein, 419 aa, unidentified; identical to SEQ ID NO: 7217
  REGION 1..419: note = Wastewater metagenome

SEQ ID NO: 22236 - protein, 431 aa, Moorena sp.
MSYVFVIDQEKRPLDPVHPGRARKLLSSGKAAVYRRFPFVLILKHPVSEAHPQPLRLKIDPGSKTTGLAVLNDTSGQVLWAAELVHRGEEVHQALQKRAGVRRGRRSRHTRYRAARFSNRRRKRGWLAPSLCSRMQNVQTWTRRLMRWCPLGAISYEAVRFDTQAIQNPEIKGVAYQHGTLAGLEVKEYLLLKWRHKCVYCQKGDIPLEVEHIVPKRRGGSDRITNLTLACEACNQQKGSQTAQAFGFPHLQAQALQPLKDAAAVNSTRWALYERLKATGLPIEVSTGGQTKWNRKQRGIPKCHWLDAVCVGPSTPERVQWQHVIPLLITARGRQCRQLCNVDGWGFPRSRPKGPSKVFGFQTGDMVQAVVTRGKRMGTYVGRVAIKTDGYFKITGTHGIVEGIHARYCSPLHRVDGYEYQKGSAALPPQM

SEQ ID NO: 22237 - protein, 507 aa, unidentified
  REGION 1..507: note = Human gut metagenome
MSEYIYVLGMDRNPQMPTKRKRHVEKLLQTGRARIFRQVPFTIQLTYENEPVLQPVTIAEDPGRSNIGMAVVSLSGELLSAAVVQTRNKEIAKLMEKRKQHRRASRNGERKARQRLAKKCHTMFKAGFLMRKLPMYGKDKRVKCHVIRNTEARFCNRKRKDGWLTPSAEHLVRTHINLVHKMQKFLPITDVAVEINRFAFLSLEDPSVSGVDFQNGPLKGYDNLNAAVEDLQDGHCLMCKDPIEHRHHIVPRSIQGSNTIENIAGLCCKCHEKVHKNAAFEKRLKKKKAGLDKQYAAVSVLNQAIPFICKRLEQEFGKEHVHYCSGRETAMVRRSFGYHKTKEEPLHEVDAWCISVLSLQQVPEKAPEFDHVHKIMQFRRQDRSRIKAQTSRTYYYEGKKVAKNRKKAEGQKEDSLQEWRECQITLYGEEQARKMTSQLKVRKSIRRYNRLDRLMPGAVFYYKGTRYVMRGQHGNGRYLQAVGMGNKDFPVKDCKIVIQNEGLVFLS

SEQ ID NO: 22238 - protein, 414 aa, unidentified; identical to SEQ ID NO: 11971
  REGION 1..414: note = Human gut metagenome

SEQ ID NO: 22239 - protein, 544 aa, unidentified
  REGION 1..544: note = Human gut metagenome
MKQKKQKVMVYILNKKGKPLMPTTRCGHVRKLLNSKKAVVVNSNPFTIRLKYDTPNGVQDVFAGIDSGRENIGSGASNEDGDCLYLGELKTSNKSIKLKMTERAGFRKERRRHDRQNKQRKARKDHTEIQNGNADICRTTISCKSVQISYPAAEKSVTHKIIRGKEGKFANRHRDEGWITPSARQLVQMHMNDLKSMCKILPISHVTLERVAFDFQKLENENIKVWEYGKGKLYGYDSPEEYIHDVQDGKCLVCGKPHIDYLHHIIPRSKGGSDKVSNIAGLCYDCHYGPMGVHNCQNTQDRLPELKSEANKQYKVSLLNSVMPVLIEEMDKFCKANSIMFSICEGHDTAKVRDMYDLQKDHCIDGFAISLVDRNVKSVDVMPDRIYQKQRYKKKSKNIIQKRNCREYYDDKKLVAVNRHKGTDQKADSLEEYMNTYAETHTTDECKKHFDSLVVKPARRTYTFHKEWRICPFHIGDKVRYEKKNKIKGNTKVDTFICEGIYFSKDENKAKVEHNKTKSKKMKFCRAIESGCIPYIDYIKLALI

SEQ ID NO: 22240 - protein, 424 aa, unidentified; identical to SEQ ID NO: 3434
  REGION 1..424: note = Human gut metagenome

SEQ ID NO: 22241 - protein, 451 aa, unidentified; identical to SEQ ID NO: 13438
  REGION 1..451: note = Human gut metagenome

SEQ ID NO: 22242 - protein, 512 aa, unidentified
  REGION 1..512: note = Human gut metagenome
MSTVYVLNKNGKPLMPTTRCGRVRHLLKEQKARVVTSNPFTIQLLYETDDVVQPLYLGIDPGRTNIGVAVVKTDGTAVFTAHLETRNKEIPKLMKKRKDFRRARRTNGRRCRRQRRAKANGTISKKCVKQTTAQNGSVSKYAKEIGVIKRHLPGCEKEVLCIAIKNKEAKFSNRTRPEGWLTPTANQLLQTHINLVKKIQKFLPISDVVLEVNKFAFMQLDNPNIQKWQYQQGPLYQKVSLEEAVSEMQEHHCLFCKKPIDHYHHAVPQHKNGSNTISNIVGLCTKHHDLVHKETAWQEKLAKKKTGLSKKYSALSVLNQIIPALTKELSSLFPKHFFATNGKSTYDYRAAHGVSKDHWLDAYCIACSVLQNDVCDSNINSHVPYELKQFRRHDRRALHKENMSRVYTLNGKKVATNRHKAVEQTTDSLEEFRQNHPDDVCKLKVKEHHPEYRNPKRNFPGCVFLVGKHTHVMQGTSGSHNGQADGYYDTNGNSYSSGKCKFVAKNEGIVFA

SEQ ID NO: 22243 - protein, 341 aa, unidentified
  REGION 1..341: note = Human gut metagenome
ARSAFRRRRRSQNFRCRSPRFLNRVKPKGWLPPSLRHRVETTLSFVRRMCRYLPVSGIATELVKFDSQKLQNPEVSGVKYQQGTLFEYEVREYLLEKFGRKCVYCGAEGVPLNIDHVVPRAKGGSNRVSNLVLACVSCNQKKGARSLEDFLKGKPEVLARVRRELKTPLRDAAAVNATRWVLFNELKATGLPVETGSGALTKLNRHAFGVEKEHWLDALCVGRLNGVVTRKGLNVLEIRCMGRGSRQRTRLTKYGFPRGYLMRQKCVHGFATGDMVEANVPKGKKAGLWRGRVAVRVSGSFNIQTPKGVIQGVGWKHCRLISHNDGYGYAWLGHAPHSSPA

SEQ ID NO: 22244 - protein, 427 aa, unidentified
  REGION 1..427: note = Human gut metagenome
LRVFVLNKRGKPLMPCSPAKARLLLKEKKAIVVRRTPFTIQLTIATGESKQPLSLGVDVGYKHVGLSASTEKAELYASEVELRKDITDLLSARRALRQSRRNRKTRYRAPRFDNRIRTKRKGWLAPSVENRINAHLSRIEAVLRLLPITKITVETASFDMQRLKNPDISGKEYQEGEQLGFWNVREYVLFRDGHVCRHCHGRSKDPVLNVHHLESRRTGSDSPDNLITLCVTCHKALHRGEITLKAKRGQSFRAQAFMGIMRREVLNRLKASYPELKVHETYGYLTKHARIANGIVKSHGADAFCIAGNLGAERLGEFFFQKQTRRNNRQIHKLSILKGGIRKRNQAPFEAKGFRLFDKVACQGEEGFIFGRRSSGSFDVRKLDGTRISAGINCKKLRLLEKRRTYLTEIRKEEALPPLPEGRGLRA

SEQ ID NO: 22245 - protein, 397 aa, unidentified
  REGION 1..397: note = metagenome
IVKRRTPFTIQLTIATGETKQPVSLGVDAGYKHVGLSASTEKAELYASEVELRQDITDLLSARRALRQSRRNRKTRYRAPRFDNRIRTKRKGWLAPSVENRINAHLSRIETVIRLLPVTKISVETTSFDMQLLKNSDIAGKEYQEGEQLGFWNVREYVLFRDGHVCQHCHGRSKDPVLNVHHLESRRTGSDSPDNLITLCETCHKALHRGEITLKAKRGQSFRAQAFMGIMRREVLNRLKASYPELKVHETYGYLTKHARIANGIVKSHGADAFCIAGNLGAERLGEFFFQKQTRRNNRQIHKLSILKGGIRKRNQAPFEAKGFRLFDKVACQGEEGFIFGRRSSGSFDVRKLDGTRISAGISCKKLRLLEKRRTYLTEIRKEETLPPLPEGRGLRA

SEQ ID NO: 22246 - protein, 421 aa, unidentified; identical to SEQ ID NO: 6517
  REGION 1..421: note = Human gut metagenome

SEQ ID NO: 22247 - protein, 304 aa, unidentified
  REGION 1..304: note = Human gut metagenome
LAGALCGGQDPGAYHQYQAGFELLPIGKVVVETAEFDLQLLKSIADGMPVPQGEDYQKGEMYGFYNVRQYVFFRDGYTCQCCGAHGKGIKFHTHHLESRKTGGNAPDDLVTVCDKCHKAFHAGLITDAKLKKRRRKSTRDAAFMGIMRKTLLQRLRAELPIPVVETRGYITKATRERLLKLPKSHTNDALAIAMGRHGFGIKEVTYMPQSDRIYQIKPVRHHNRQLHKAIPKKGGRRQRSQGPKYVQGFRRFDKVLYRGQECFIWGLRTRGYFQLKLLNGTKVHESAKASELILLEHRSGYLIA

SEQ ID NO: 22248 - protein, 425 aa, Moorena sp.; identical to SEQ ID NO: 3655

SEQ ID NO: 22249 - protein, 461 aa, unidentified; identical to SEQ ID NO: 4910
  REGION 1..461: note = Human gut metagenome

SEQ ID NO: 22250 - protein, 431 aa, unidentified; identical to SEQ ID NO: 8350
  REGION 1..431: note = Human gut metagenome

SEQ ID NO: 22251 - protein, 442 aa, unidentified; identical to SEQ ID NO: 2834
  REGION 1..442: note = Human gut metagenome

SEQ ID NO: 22252 - protein, 427 aa, unidentified; identical to SEQ ID NO: 5062
  REGION 1..427: note = Human gut metagenome

SEQ ID NO: 22253 - protein, 451 aa, unidentified; identical to SEQ ID NO: 5203
  REGION 1..451: note = Human gut metagenome

SEQ ID NO: 22254 - protein, 325 aa, unidentified
  REGION 1..325: note = Human gut metagenome
LRVFVLNKRGKPLMPCSPAKARLLLKEKKAIVVRRTPFTIQLTIATGETKQPVGLGVDAGYKHVGLSASTEKAELYASEVELRQDITDLLSARRALRQSRRNRKTRYRAPRFDNRIRTKRKGWLAPSVENRINAHLSRIEAVLRLLPITKITVETASFDMQRLKNPDISGKEYQEGEQLGFWNVREYVLFRDGHVCRHCHGRSKDPVLNVHHLESRRTGSDSPDNLITLCETCHKALHRGEITLKAKRGQSFRAQAFMGIMRREVLNRLKASYPELKVHETYGYLTKHARIANGIVKSHGADAFCIAGNLGAERLGEFFFHKHTR

SEQ ID NO: 22255 - protein, 421 aa, unidentified
  REGION 1..421: note = Human gut metagenome
MKVFVKNMRGQALMPCSERKARILLKQKKAKIVGYKPFTIQLCYATGEAKQEVTIGIDEGAKHIGIAIVSQDKVLAKGEVELRQDVHSLLLTRAQYRRGRRFRKTRYRKARFLNRRKPKDWLPPSIRAKLDANFNWINKFCSLVPSPKLRIEVGKFDVAKMINPDIQGVDYQHGQTYGYYNVRYFVFARDEYTCQVCKKKNKVLHTHHIVYRSEGGTDRADNLITVCTDCHTSENHKPGGILYKWMKEHKKTKQYKEPPFMNVLRKRTFQQYPEAKITYGSETSSKRKKLNLEKTHYNDAIAITGIELIKENPKEYFLIKQFRKKKRSLHEAIPRKGRKSKNIESKRNNKNVKQLRGWFLNDEVICFDQRGWISGFAGTSSAYIININGEYIQIPNKSYKQVTLSSLKLISHNANWQYIAT

SEQ ID NO: 22256 - protein, 512 aa, unidentified
  REGION 1..512: note = Human gut metagenome
MSTVYVLNRDGKPLMPTTRCGHVRHLLKEQKARVVTSKPFTIQLLYETDDVVQPLYLGIDPGRTNIGVAVVKADSTAVFTAHLETRNEEIPKLMQGRKKARRTRRTNGRRCRRQRRAKANGTISKKCVKQTTAQNGSVSKRAKEIGVIKRHLPGCEKDVLCVGIKNKEAKFSNRTRQEGWLTPTANQLLQTHINLVKKIQKFLPISDVVLEVNKFAFMQLDNPNIQKWQYQQGPLYQKANLEEAVSEMQEHHCLFCKKPIAHYHHVVPQSENGSNTIGNIVGLCTKHHDLVHKDTEWQKKLAKKKTGLNKKYGALSVLNQIIPALTKELSSLFPKHFFATNGKSTYDYRAAHSVSKDHWLDAYCIACSVLANDVCDSNINSRVPYELKQFRRHDRRALNNENMSRVYTLNGKVVATNRHKATKQTTDSLEEFRQRQPNDVCKLKVKEHHPTYRNMNRNYPGSVFLIGKQVHVMQGIAGSKDGEATTYKDTNANSIAAGKCKFVAKNSGILFV

SEQ ID NO: 22257 - protein, 445 aa, Petrotoga sp.; identical to SEQ ID NO: 7625

SEQ ID NO: 22258 - protein, 419 aa, unidentified
  REGION 1..419: note = Human metagenome
LSKRMTKTLTKQTTQACVLDQQGKPLMPTTRLGKVYRLLKTQKAHIVSYELFTIQLDYEPDTHIIQPMTLGVDSGAIHSGYSVANEHREYYSAEVIARDDISKHLSDRRMYRQNRRSRKTRYRKPRFNNRKNKKKGWLPPSLEQKVTVQLNEIDHLHHYFPIQKIIVEVAEFDIQKIKNPDISGIEYQQGTLQGYNIRNYLLEKHGRKCFYCGKSVSKFEVEHMIPKTRGGSNRIDNLTLSCHDCNQKKDTLTAEEFIRQTLPAKKAAAKLKQLPNENRLFKYMTQMNATRWALYNAINEKYANVKMTYGYITKYNRIKAGLLKAHHIDAKCITGFSNVPSMDQIVVKIKMRRHNRQLHRATFSKGHVRKAACLPTVVFGFQLYDHVLFDNHHYYIKGRRSSGKFALVSIEGLKDTDRN

SEQ ID NO: 22259 - protein, 427 aa, unidentified; identical to SEQ ID NO: 4946
  REGION 1..427: note = Human gut metagenome

SEQ ID NO: 22260 - protein, 443 aa, unidentified
  REGION 1..443: note = Human gut metagenome
NIGEGSQPVERPRRQNLRVFVLNKRGKPLMPCSPAKARLLLKEKKAIVVRRTPFTIQLTIATGESKQPVSLGVDAGYKHVGLSASTEKAELYASEVELRKDITDLLSARRALRQSRRNRKTRYRAPRFDNRIRTKRKGWLAPSVENRINAHLSRIEAVLRLLPITKITVETASFDMQRLKNPDISGKEYQEGEQLGFWNVREYVLFRDGHVCRHCHGRSKDPVLNVHHLESRRTGSDSPDNLITLCETCHKALHRGEITLKAKRGQSFRAQAFMGNMRREVLNRLKASYPELKMHETYGYLTKHARIANGIVKSHGADAFCIAGNLGAERLGEFFFQKQTRRNNRQIHKLSILKGGIRKRNQAPFEAKGFRLFDKVACQGEEGFIFGRRSSGSFDVRKLDGTRISAGISCKKLRLLEKRRTYLTEIRKEEALPPLPEGRGLRA

SEQ ID NO: 22261 - protein, 442 aa, unidentified; identical to SEQ ID NO: 16204
  REGION 1..442: note = Human gut metagenome

SEQ ID NO: 22262 - protein, 465 aa, unidentified; identical to SEQ ID NO: 3856
  REGION 1..465: note = Human gut metagenome

SEQ ID NO: 22263 - protein, 427 aa, unidentified; identical to SEQ ID NO: 2980
  REGION 1..427: note = Cyanobacteria bacterium UBA11366

SEQ ID NO: 22264 - protein, 519 aa, Moorena sp.
MRQHHGIVTVAVVDKNGHPLMPTNSYRARHLKKSGRAVTYAHRPVYTIQMLDVEFDPEKNMVQEIEVTCDTGYEHIGVSVCSEKHEYLQREYDLLTDETEKHNDSRKYRRTRRNRKRHRAKMSRNRKGVIVKDGFAPSLRNKRDRHIDIITSLCFVMPITDVHVEMGEFDTQALKAIEEGKPLPQGTDYQQGEQYGYLTLRAAVFSRDNHTCQCCGRNAFSDKAMLHEHHIGFWKGDRTNRMANLLTVCEQCHTPKNHKPGGTLYGLEPKLKGLKGATFMTSVRWNMVNKLKEALPGISVHITYGAATKQSRQQLRLRKTHANDAYAMGNFHPKHRAHLEHFKKRRRNNRVLEKFYDAVYIDTRDGTEKMGSQLGCNRTKRNIPRNNPNNERKYRGEKKAKGHRSIRKQHYTLSPGDKVWCSTDKKMYIVNGMQNNGATVQLRTTKVVPLDKLQPMKKKGKTIPIAANQKLALISAKEKHTVLSVDEGTNTAVMRWFKGVNPSTLTRVSSYKTGWERIK

SEQ ID NO: 22265 - protein, 370 aa, unidentified
  REGION 1..370: note = Human gut metagenome
LSKVKTMRVFVFNMRGRPLMPCSQRKARLLLRENKAMIYKYHPFTIQLTYTTGETKQDCHIGIDTGSKYIGAAVRSEDKVFWKGEIELRQDIRSNLDTKRIYRRSRRNRKTRYRKPRFLNRKRRDEWLPPSLQSRINHTFHWIDTLSSLVPNPILHIEVGKFDVAKMINPEIHGVDYQHGQTYGFFDERYFVFARDNYTCQCCGKSKNKILNTHHIIYRSNGGTNRVDNLITVCTDCHTSQNHRKGGIFYQWQEQHKKVKQYKEPPFMNTLRKRIFVAYPDAEITYGSETTPKRKAMKLDKTHYNDAIVISGINEIKENPEEWLLIKQFRKKKRSLHEATARKGRKKPNRNQTRNSKNTPYYKGFYLNDK

SEQ ID NO: 22266 - protein, 413 aa, unidentified; identical to SEQ ID NO: 7541
  REGION 1..413: note = Human gut metagenome

SEQ ID NO: 22267 - protein, 460 aa, unidentified; identical to SEQ ID NO: 7594
  REGION 1..460: note = Human gut metagenome

SEQ ID NO: 22268 - protein, 427 aa, unidentified; identical to SEQ ID NO: 9882
  REGION 1..427: note = coral metagenome

SEQ ID NO: 22269 - protein, 536 aa, unidentified
  REGION 1..536: note = Human gut metagenome
VLRPRYQCPTRWYPSREQGSGNGCLSGEENTDLEQEVSGTLSKGDHSHPGEQDFCVPAITIQGGPAMSVFVVGLNGCRLMPTSERKARLLLKHGKASVYRKVPFTIKLNYKTGSTTQSGYLGIDTGSQHIGVSVVREDGAVLHKEEIGLRDSMSKRKLMQSRASSRRGRRHRKTRYRHPKWRPKAKRVYCEIPDRKRRHWKKKEITFTSKRPKGWLPPSLQSKTDHHIRWIKKLQDLLPEGYRLSIELGRFDPARLKDPEIHGELYQKGPQYDYENVRAYVLNRDRYTCQVCGKKGGKLHVHHILYRSYGATDDPQYMATVCSDCHNTENHHQGGILYQWMQKQKKFTRGLRDATFMNILRKRLIEAFPGATFTYGNITKADRERLRLPKSHGNDATAIAIVKTGIMTVKDKEPVIYIQQVRRKKRSLHEETPRKGRKEPNRKASRYDKNTKAVTVTKRKNKKKISITGCLFDRVELNGKKGWISGFTDKSCYVKDENDQYIRTSPKYKQVSLSKLKILHHCGNWAIGARRSLGKG

SEQ ID NO: 22270 - protein, 487 aa, unidentified; identical to SEQ ID NO: 5522
  REGION 1..487: note = Human gut metagenome

SEQ ID NO: 22271 - protein, 310 aa, Scytonema sp.; identical to SEQ ID NO: 18184

SEQ ID NO: 22272 - protein, 488 aa, unidentified
  REGION 1..488: note = Human gut metagenome
MIIALDKYKRPLGFLTERRCRILMERKRAVLYRVFPTVVILMDVDARTIPDLPSFRIKIDPGSKYTGIAIIRNDTDEFVYAMQIEHRGDAVRAALNKRKNARRNRRSRKLRRTRKQILPEAGYRRAKWGNRCLSEKDKRSYDSSREDGWLPPSIRSAADNVISWVRRLGRWINLTECSFEAVRFDTQLMEDPDIEGEEYQHGTLFGLEIKEYLMEKFGHTCQYCGGKSGDPVLEWEHMRPKSRGGSDRVKNALLSCSSCNKDKGNRTPEEWLEQIKARLPREKGKRKELDEERVKLIQKVIDGKPQGSALRYAAWVSSSRRYLEKALFGIFGDVECSSGGRTKYNRTELGYPKEHHYDALCVGTVPEKGYHDRTNGYYLYAKAAGRGTRLRGHLNKCGVIATKWTDRKKGFFGFQTGDIVVAEVPHKTPKPYKYEGRFVGRVMVRATGSFDIKTTDGKLVTVKEQYCRLLQANSGYHYTMKRAIPLGH

SEQ ID NO: 22273 - protein, 406 aa, unidentified; identical to SEQ ID NO: 2967
  REGION 1..406: note = Human gut metagenome

SEQ ID NO: 22274 - protein, 456 aa, unidentified; identical to SEQ ID NO: 3956
  REGION 1..456: note = gut metagenome

SEQ ID NO: 22275 - protein, 487 aa, unidentified
  REGION 1..487: note = Human gut metagenome
LLKEQKARVVQSNPFTIQLLYETNDVVQPLYLGIDPGRTNIGVAVVKADGTAVFAAHLETRNKKIPKLMQDRKKARRARRTNGRRCRRQRRAKANGTISKKCVKQDTAQSKNPSKRAKEIGVIKRHLPGCKKDVLCVGIKNKEAKYTNRARLEGWLTPTANQLLQTHINLVKKIQKFLPISDVVLEVNKFAFMRLDNPNIQKWQYQRGPLYQKGSLENAVSEMQEHHCLFCEKPIEHYHHVVPKSENGSNTIANIVGLCAEHHNLVHKDVAWQEKLVEEKTGLNKKYGALSVLNQIIPALTKELSFLFPKHSFMTNGKSTHDYRAAHGISKDHWLDAYCIACSVLPIDVCDSTINNCVPYELKQFRRHDRRALNNENMNRVYTLNDKVVATNRHKATEQEAASLEEFRKEHPNDVCKLKVKEHHPTYRNMNRNYPGSVFLVGKQIHVMQGIASSKDGKATKYNDTRATTIAAGKCKFVAKNSGILFV

SEQ ID NO: 22276 - protein, 430 aa, unidentified; identical to SEQ ID NO: 4817
  REGION 1..430: note = Human gut metagenome

SEQ ID NO: 22277 - protein, 411 aa, unidentified; identical to SEQ ID NO: 6901
  REGION 1..411: note = Human gut metagenome

SEQ ID NO: 22278 - protein, 442 aa, unidentified; identical to SEQ ID NO: 2834
  REGION 1..442: note = Human gut metagenome

SEQ ID NO: 22279 - protein, 400 aa, unidentified; identical to SEQ ID NO: 15552
  REGION 1..400: note = Human gut metagenome

SEQ ID NO: 22280 - protein, 419 aa, unidentified; identical to SEQ ID NO: 6954
  REGION 1..419: note = Human gut metagenome

SEQ ID NO: 22281 - protein, 436 aa, Leptolyngbya sp.; identical to SEQ ID NO: 22133

SEQ ID NO: 22282 - protein, 426 aa, unidentified; identical to SEQ ID NO: 3614
  REGION 1..426: note = Human gut metagenome

SEQ ID NO: 22283 - protein, 416 aa, unidentified; identical to SEQ ID NO: 4565
  REGION 1..416: note = Human gut metagenome

SEQ ID NO: 22284 - protein, 455 aa, unidentified
  REGION 1..455: note = Human gut metagenome
MVFVLDRHHKPLMPCHPARARRLLGKGRARIHKLYPFTIRLVDRELKDSTVQPVVLKLDPGSKETGMALVREDETKTHHALYFVNLKHRGSEIKQSLLQRSSFRRSRRSRNLHYRAPRFLNRTRPQGWLAPSLQHRVDTTLSWVERLRKLAPVATLEMELVKFDTQKMQNPEIDGVAYQQGKLAGFEVREYLLEKFGRKCIYCGAKGVPLNIDHIVPKSAGGSNRVSNLVLACVDCNQKKNNLPFEVFLKGDKAKINRIRSQLKTPLKDAASVNTTRWQLFEALKLTGLSLTTATGARTKYNRHQFGVPKEHWLDALCVGKVAAIRGWQTLDVLVVKCTGRGAYKRTRLTKDGFPRGYLTRTKRFFGFGTGDMVVATVFAGKKKGSYKGRVAVRKSGSFAIQTASRKVDGISYRYCRLLSRADGYGYSWHSSKSLINSTKETALLPRINTQVSAP

SEQ ID NO: 22285 - protein, 416 aa, unidentified; identical to SEQ ID NO: 10531
  REGION 1..416: note = Human gut metagenome

SEQ ID NO: 22286 - protein, 423 aa, unidentified; identical to SEQ ID NO: 4062
  REGION 1..423: note = Human gut metagenome

SEQ ID NO: 22287 - protein, 431 aa, unidentified; identical to SEQ ID NO: 4463
  REGION 1..431: note = Human gut metagenome

SEQ ID NO: 22288 - protein, 395 aa, Oscillochloris sp.
MVFVLATDRTPLDPTTFHRADHLLRCGRASVFRTYPFTIIVHDRTAVASVTHPHRLKLDPGSKTTGIAVVAEESGRVVWAGELTHRGQQIRDRLLTRRASRRSRRQRKTRYRQPRFLNRRRPEGWLAPSLQHRVETTLTWVNRLRRFVPITAISTELVRFDTQFMQDAEISGVAYQQGTLAGYEVREYLMEKWGRRCAYCGAKEIPLQIEHIVPRARGGSDQVSNLALACEPCNIRKGTQTAAEFGHLDIQAQARRPLKDAAAVNATRWVLYQRLTATGLLVEVGTGGRTKYNRTRLGLAKTHWHDAACVGASTPHGLEVRGVQPLLIRATGHGSRQACRMDKYGFPRTGPKGARVVKGFKTGDMVRAVVTTGTKVGVYVGRVAVRTTGSFNITT

SEQ ID NO: 22289 - protein, 438 aa, Clostridium sp.; identical to SEQ ID NO: 4933

SEQ ID NO: 22290 - protein, 431 aa, Escherichia sp.; identical to SEQ ID NO: 6926

SEQ ID NO: 22291 - protein, 451 aa, unidentified; identical to SEQ ID NO: 6577
  REGION 1..451: note = Human gut metagenome

SEQ ID NO: 22292 - protein, 490 aa, unidentified; identical to SEQ ID NO: 6170
  REGION 1..490: note = Human gut metagenome

SEQ ID NO: 22293 - protein, 549 aa, unidentified
  REGION 1..549: note = Human gut metagenome
LRSPLSLDDGQFTQYVYVVDKHGKALMPTTRYRHVRKLLKSGKAVAICNKLFTIRLKYESSTYTQDLWEGIDTGRQNIGDAVSNEKGENVYLADVRTNNKSIKSNMQDRAGFRRERRRHDRQSKQRKAKHDGTEIQNGDDDTVRTKHSCKSIKISYPTADEPVIHKVIRGKEGKFANRKRPEGWITPSARQVIQITMNEIRQTARILPVNHINLERVSFDFQKLENQDIRRWEYGKGALYGYKTYKDYIWDEQHGKCACCGKPITQYHHIIHRAEGGIDSVKNIIGLCNGCHNKIHASKDAEDKLKELKEGVRQRYYVGLLNSVIPALIEEVSAYCDEHGIEFTVTDGKTTAETREKYGLSKDHCTDAYAISLADRDVKSVSVSDRIYEKRRFKKKSGNIIAKRNQRVYKFDGKIIAYNRHKATNQKDDSFEEYMTKYAETHTDKECRQHVAQIEIIPAKRTYTYHKQGLVAPCHAGDIVRYEKHNKIKGNTKKDTFVATSVEMNGEGHIKYGDACGSRKIKFCRPIDSGCLQAVHNYQADEYLRKIAE

SEQ ID NO: 22294 - protein, 749 aa, unidentified
  REGION 1..749: note = Human gut metagenome
LKVFVLNMRGQPLMPCSPAKARHLLKAGKAVVKRRTPFTIQLRIATGETKQNVTLGVDAGAKHVGLSATTEKEEVFASEVELRQDITGLLAARLSLRRDRRHRKTRYRAPRFLNRVRSKHKGWLAPSVENRIQAHMSRIDAVCRLLPVTKIVIETASFDIQKIKDPSVEGTDYQQGDQLGFWNVREYVLFRDGHVCQHCHGRSKDKILNVHHLESRQTGGDAPNNLITLCETCHKAYHAGKIKLKVKRAHSFRAEAFMDIVRWTLLDRVRKAHPGLPVENTCGYLTKNTRITPGLPKAHCVDACCIAGNLKAVRRGVCLHQRQMRKHNRQIHKCTILLQTLEDGTKIGYRKLNQTPHMVKNFRLFDKVRCLGQTGFIFGRRSSGCFDVRRLDGVKLSSGISYRKLTLLEKRGTHLTELIKEDGASSSVRRQRFLRRVSMNKPCTYLLSALMASAVLAPVAALAVDKSELEVRMEAAQKVLADRSYYERWSPEAALKTVEDAKAANEAGSARQKEIDGALDVMKDWCHTRFLVNACIKDARDLHHEREKEIRSVRLKADEMIRLDRVEQRRARQESQKQNVKQPMKLGGSTESPESRSESRAEEVKTKQSRAEERRALEEANVRAYEEKQARAARKAEERHDPIRVKSRVKAPSSPIEGHLGRTAADVEAGRAEAAERMAQEDANIAAFNAKQAEAKKRLEEAEATAAERKASREARQANFNKTLEERRAAQKRYEESRENKDSGLKKYF

SEQ ID NO: 22295 - protein, 419 aa, unidentified
  REGION 1..419: note = Human gut metagenome
MVYVISQDGKPLMPCSDPIARLLLKQGKAKVKKREPFTIKLTYETTNYTQGLTLGVDTGSGTIGTAVSKDNGDIVYMSEVVVRNDITDKMTQRAKYRRNRRNRKTRYRKARWLNRASSIKKDRFSPTMQSKLHSHVREIEYIQSILPVTEMVFETGQFDMQLMKNPSLANPKVRPWGYQKGANYGFENTKAMVLNRDNYTCQCCKGKHKDSKLEVHHIVFRSQGGSDEESNLLTLCHTCHKDLHSGKINPKLSGKLKGNLKYATQMNSIRKQLFRFYPNAIETFGYVTKANRLHLGVDKEHYYDACTIATQGNAFNVKSNLYKKKCVSDGDFQKTKGIRSEQPIVTDKICGFRKFDKVRYFGNDYFIKGRMSTGYAIFMDIDGNKIDFSTMPRGYKTPKLSNCKRITARSTVMTQVKVV

SEQ ID NO: 22296 - protein, 465 aa, unidentified; identical to SEQ ID NO: 7667
  REGION 1..465: note = Human gut metagenome

SEQ ID NO: 22297 - protein, 512 aa, unidentified; identical to SEQ ID NO: 5549
  REGION 1..512: note = Human gut metagenome

SEQ ID NO: 22298 - protein, 497 aa, unidentified
  REGION 1..497: note = Human gut metagenome
LVGNVQAPWDVDPSPTLCGLCLKVLRGRNGDADKKPIPTLTKDENRPSGRTTGLRAEQAEPAGIRKGDTLKVFVLNMRGKPLMPCSPAKARHMLKAGKAFVVRRTPFTIKLTIATGETKQDVTLGVDAGARHVGISATTEKEEVFASEVALRQDITGLLADRLAFRRARRNRKTRYRAPRFNNRVRSKHKGWLAPSVENRIQAHMSRIDAVCRLLPVTKIVIETASFDIQKIRNPEVEGTGYQQGDQLGFWNVREYVLFRDGHICQHCRGRSKDPILNVHHLESRKTGGDAPNNLITLCETCHKAYHAGKIKLKVKRGQSFRAEAFMGIMRWTLLDRVRKAHPGLPVENTYGYLTKHTRITHGLPKTHCVDAYCIAGNLKAVRRGVYLHQRQMRKHNRQIHKFTVLSKRLEDGTKIGYRKLNQSPYLVHGFRLFDKVRCLGQIGFIFGRRSSGYFDVRRLDGVKLSSGISYRKLTLLEKRSTYLTELRKQDGASSPV

SEQ ID NO: 22299 - protein, 431 aa, unidentified; identical to SEQ ID NO: 15618
  REGION 1..431: note = Human gut metagenome

SEQ ID NO: 22300 - protein, 431 aa, unidentified
  REGION 1..431: note = Human gut metagenome
MQNKVYVINKHGRPLMPCSPAKSRHLLDDGKAKVKKRTPFTIQLIYGSSGYTEEVILGVDAGSKTIGLSASTKQEELFAANVTPRNDVVDLLSTRREFRRTRRSRKTRHRKARFNNRVHSKHKGWLAPSVDVKIQEHITCIKRVCNILPISKVVVETAEFDFQLLKAIDEGKPVPQGEDYQKGEMYGHYNVRQYVLWRDGYTCQCCGAHSTNRKDVRLHVHHLESRKTGGDAPSNQITICEDCHKKLHKGLIPDKNLKKRKRRSARDAAFMGIMRNTLVQRLHSELPIPVVETRGYITKATREKLLVLPKSHTNDALAIAQGKHGFNVDYFPNIVQVDKIYTICPVRHHNRQLHKATILKGGMRKANQAAKYVFGFRLYDKVRYNDIECFVWGRRNRGTFLLRNLDGEKVKDGASYRDLELLERSQGYLIA

SEQ ID NO: 22301 - protein, 417 aa, unidentified
  REGION 1..417: note = Human gut metagenome
MPCSPAKARLLLKEKKAIVKRRTPFTIQLTIATGEAKQPITLGVDSGYKHIGLSATTEKAELHASQVELRQDITDLLSARLALRRSRRSRKTRYRAPRFDNRVASKRKGWLAPSVENRITAHMSRVEAVMRVLPVTAITVETAAFDTQLLKNPDIAGEAYQQGEQLGFWNVREYVLFRDGHVCQHCRGKYKDPILNVHHIESRRTGGDAPNNLITLCETCHKAFHRGEIKLKVKRGKSFKAETFMGIMRWTLFERLKKAHPELSVRNTYGYLTKHKRISHGIAKSHCADAYCIADNLGAKRLEGFFFQKQTRKHNRQIHKLSILKGGLRKKNQAPYEVKGFRLFDKVICKGKEAFIFGRRTSGSFDVRRLDGTRISAGISYKKLRLLEPRTTYLTEFRKEAALPPLHKCRGFRAEFL

SEQ ID NO: 22302 - protein, 469 aa, Moorena sp.; identical to SEQ ID NO: 4014

SEQ ID NO: 22303 - protein, 442 aa, unidentified
  REGION 1..442: note = Human gut metagenome
MSTTVFVLDKKHRPLMPCRPARARRLLRAGRARVVKRFPFVIRLVDRTVEQSEVQPVLIKLDPGSRETGAAVVRDDGKKRHHALAFFVIKHRGGAIRDALKARSAFRRRRRSQNLRCRSPRFLNRVKPKGWLPPSLRHRVETTLSFVRRMCRYLPVSGIATELVKFDSQKLQNPEVSGVKYQQGTLFEYEVREYLLEKFGRKCVYCGAEGVPLNIDHVVPRAKGGSNRVSNLVLACVSCNQKKGARSLEDFLKGKPEVLARVRRELKTPLRDAAAVNATRWVLFNELKATGLPVETGSGALTKFNRHAFGVEKEHWLDALCVGRLNGAVTRKGLNVLEIRCMGRGSRQRTRLTKYGFPRGYLMRQKCVHGFATGDMVEANVPKGKKAGLWRGRVAVRVSGSFNIQTPKGVIQGVGWKHCRLISHNDGYGYAWLGHAPHSSPA

SEQ ID NO: 22304 - protein, 431 aa, unidentified; identical to SEQ ID NO: 5274
  REGION 1..431: note = Human gut metagenome

SEQ ID NO: 22305 - protein, 424 aa, Enterococcus sp.; identical to SEQ ID NO: 8879

SEQ ID NO: 22306 - protein, 418 aa, Anoxybacillus sp.; identical to SEQ ID NO: 7935

SEQ ID NO: 22307 - protein, 438 aa, unidentified
  REGION 1..438: note = Human gut metagenome
MDTGYIHVGTSVKSEKHEYLAEQIDTLTDEKARHDACRMYRRQRRSRKRYRHPRFNNRKRNDRWIAPSLEHKKSIHIQAILRICKVMPVTDITLEMGNFDTQVLKAREEGKPLPHGADYQHGERYGIATLREAVFTRDDYKCQCCGMTIKDGAILHVHHIKYRSQGGTNRMSNLITVCDKCHTPANHKQGGKLYNWKPKIASFKGATYMTTIRWKLYNEVKALFPDIDIHITYGAETKERRRALDIDKSHVNDAFVMGQFHPKHRSKPICYKKKRRNNRCLEKFYDAKYIDSRDGKKRSGQELFNGRISRNHKKDSENLHQYRLQKVTPGRRAIRRQHYPIQPHDIIVYNGNKIEVSGCQHKVQESFFPKLKSQYRYQKLNYLNTLAVIPNQCLINRKGGSRRNVKPRIPPPPDCETRNIVSTSDGVPCAKKDGFRAI

SEQ ID NO: 22308 - protein, 419 aa, Moorena sp.
MQNYVFIIDTKKRPLNPISPKKARRLLKKGKAAVFRMYPFTIILKTAIDDPTISPCQIKIDPGSKVTGFALVQNGQVIWAMELQHRGGLIKKKLESRRAVRSGRRNRHTRYRKPRFLNRRRPQGWLPPSLEHRILTTQTWVKRLIKFCPVNEIWVERVKFDTQKMQNPEISGVEYQQGELAGYEVREYLLEKWERECTYCGKQNVPLQIEHIHPKSKGGSDCVRNLCLACEKCNQRKGNKPIEDFLKNKPSLLQKIKTKAKQPLKDAAAVNATRTKLVKMLQSVRPVVTGTGAQTKYNRMKLRLPKQHWIDAACVGDIETLTLITSQPLLVTCFGQGGRQKAALNKYGYPIRHNPLKPIKGWVTGDIAKHQKLGIGKVTPRSKGSFGFTSLGMKGYKSCKPQDISAIHRKDGYTYGFCQ

SEQ ID NO: 22309 - protein, 442 aa, unidentified; identical to SEQ ID NO: 2834
  REGION 1..442: note = gut metagenome

SEQ ID NO: 22310 - protein, 438 aa, unidentified
  REGION 1..438: note = Human gut metagenome
MPSSEYRARKLLKSGKAVKYSYHPFTIQLTKRKTGYAQPIELCMDTGYIHIGISVKSEKHEYLAEQIDTLTDEKTKHGACRMYRTLRRGRKRYRQPRFNNRKRDKDWIAPSLEHKKDIHVQAISRINKVMPLTDITMEMGNFDTQVLKAKEEGKPLPQGADYQHGERYGIATLREAVFSRDGYKCQCCGRTISDGAILHVHHIKYRSQGGTNSMTNLATVCDKCHTPKNHKPGGKLYNWKPKLPDFKGATFMTTIRWQLYNEVKSLFPDINVHITYGAATKEQRRELNIDKSHVNDAFAMGKFHPKHRTNAALYKKKRRNNRCLEKFYDAKYIDSRDGSKRTGQELFNGRINRNHKKDSENLHRYRLQKITAGKRTVRKRHYNIQPHDIVMYENRKRETSGCQSNGTRVILLSDKKSVAVKKVKIYKYAGGYFKSAFN

SEQ ID NO: 22311 - protein, 378 aa, Moorena sp.; identical to SEQ ID NO: 12580

SEQ ID NO: 22312 - protein, 423 aa, unidentified; identical to SEQ ID NO: 3951
  REGION 1..423: note = Human gut metagenome

SEQ ID NO: 22313 - protein, 430 aa, unidentified; identical to SEQ ID NO: 21800
  REGION 1..430: note = Human gut metagenome

SEQ ID NO: 22314 - protein, 460 aa, unidentified
  REGION 1..460: note = Human gut metagenome
MWTNRPQGLAYNILRKEAASVVYVLNKDGKPLMPTNRCGHVRKLLKSGKAIVVKRKPFTIKLTYDTPDCVQPISLGVDTGYTHVGVSAVTDTQEVYAAQVELLTGQKKRLDDRRKYRRTRRNRLRHRPPRFNNRRRNPGWLPPSLQHKVDSHIRIVEGIKAILPITEVHFEIGNFDTHKMKKPSIRPWQYTEGEMKGFDSVKEYVKNRDNYTCQLCGKQHKDGKGLVVHHFLYWKGRRSNNPNEMVILCDTCNSVANHEKSGPLWGWEPKQLRQLQQATFMNALAVRLMTVYPDADFLYGELTGERREEYNIPKSHTNDAFIIAGGKSQLRFDFPFNVEQRRRNNRSLEKFYDAKYIDSRDGSKQSGKALSSIRVKRKMPPKDSGFRQFRQSKVSKGKRYIRKKRHFYQPGDLVITPLGKAIVKGTICSGNSIQFYNFSRTFAPSKVEPIKFGKGFCFQT

SEQ ID NO: 22315 - protein, 414 aa, unidentified
  REGION 1..414: note = Human gut metagenome
MVYVINKQGQALMPTERFGKVRRLLKNSLAHVVCRIPFTIQLDYDTTDYTQPVSLGIDAGSKHIGISATTSEKELYAADVELRNDIVDKLSTRRELRRTRRSRLRYRKARFNNRVSSKRKGWLAPSVENKIQTHLTVVEKIHKFLPITNIVVETASFDIQKINNPSISGSEYQQGEQLDFFNVREYVLFRDNHTCQHCKGKSKDKVLNVHHIESRKTGGDSPNNLITLCETCHKAYHRGDFELNVKRGKSFRDAAFMGIMRWSFYDRLKNIYPNVSMTFGYITKNTRITNNLPKEHYVDARCISGNPTAKPLGYYFYQKKVRCQNRQIHKANFLKGGRKKLNQAPFLVKGFRLFDLVEYQKELYYIFGRRSNGSFDIRKLDGTKVNKGSINCKYLRLINKRKSILTEKRMQVNL

SEQ ID NO: 22316 - protein, 553 aa, unidentified; identical to SEQ ID NO: 14287
  REGION 1..553: note = Mouse gut metagenome

SEQ ID NO: 22317 - protein, 413 aa, unidentified
  REGION 1..413: note = Human gut metagenome
MPCSPAKARLLLKEKKAIVKRRTPFTIQLTIATGETKQPVGLGVDAGYKHVGLSASTDKAELYASQVELRQDITDLLSARRALRRARRNRKTRYRAPRFDNRIRTKRKGWLAPSVENRINAHLSRIEAVLRLLPVTKITVETASFDMLLKNPDIAGKEYQEGEQLGFWNVREYVLFRDGHVCQHCYGRSKDPVLNAHHLESRRTGGDSPGNLITLCETCHKALHRGEITLKAKRGQSFRAQAFMGIMRREVLNRLKASHSELEVNNTYGYRTKHARIVNGIDKSHCADAFCIAGNLGAERLCEFFFQKQTRRNNRQIHKLSILKGGIRKRNQAPFEAKGFRLFDKVACKGEESFIFGRRSSGYFDVRKLDGTRISAGISYKKLRLLEKRRTYLTEIRKEEALPPLPEGRGLRA

SEQ ID NO: 22318 - protein, 408 aa, unidentified; identical to SEQ ID NO: 21203
  REGION 1..408: note = Human gut metagenome

SEQ ID NO: 22319 - protein, 427 aa, unidentified; identical to SEQ ID NO: 5062
  REGION 1..427: note = Human gut metagenome

SEQ ID NO: 22320 - protein, 518 aa, unidentified; identical to SEQ ID NO: 7410
  REGION 1..518: note = gut metagenome

SEQ ID NO: 22321 - protein, 353 aa, Arthrospira sp.; identical to SEQ ID NO: 3451

SEQ ID NO: 22322 - protein, 415 aa, unidentified
  REGION 1..415: note = Human gut metagenome
MENKIEYCFVIDKNNKPLTPTKVNKGWYLIRKGRAKLKSKYPMVIQLEKEVKSDEYDESHMVCGIDDGSTHVGLAIVQKCLTKNKVVFKGTIEQRQDVKRLMDVRRGYRRYHRYHKRYRQARFNNRSSSKRTCRLAPSIKQKKDSILRVLYQLNKWVNIQEYYLEDVCIDIRAMTDDYKPYRWQYQKSNRLDENLRKATILRDGCRCQECGKSNCILEVHHIRARRYGGANTIGNLITLCKKCHDKTESREKDFEERYFNMIKSKPKRFDYAMHVMQGKTYLREKISELGILHLTNGGETANKRIEWDIVKSHSNDAICIADGIPDTCDIKEWIIKPMRRKSKAKTDNVLGIKHRDLVSYTYKSGETHTGYVTALYPEQLALNFQSKTKHCKKVNARKCRLLWKFNKIYWLEQCV

SEQ ID NO: 22323 - protein, 417 aa, Moorena sp.
MPCSPAKARLLLKEKKAIVKRRTPFTIQLTIATGEAKQPVTLGVDSGYKHIGLSATTEKVELYASEVELRQDITDLLSARLALRRSRRSRKTRYRVPRFDNRVASKRKGWLAPSVENRITAHMSRVEAVMRVLPVTAITVETAAFDTQLLKNPDITGAAYQQGEQLRFWNVREYVLFRDGHVCQHCRGKSKDPILNVHHIESRRTGGDAPNNLITLCETCHKAFHRGKIKLKVRRGKSFKAETFMGIMRRTLFERLKKAHPELNVHNTYGYLTKHKRISHGIAKSHCADAYCIADNLGAKRLKGFFFQKQTRKHNRQIHKLSILKGGLRKKNQAPYEVKGFRLFDKVICKGEEAFIFGRRTSGSFDVRRLDGTRISAGISYKKLRRLEPRTTYLTEFRKEAALPPLHECRGFRAEFL

SEQ ID NO: 22324 - protein, 447 aa, unidentified; identical to SEQ ID NO: 4640
  REGION 1..447: note = Human gut metagenome

SEQ ID NO: 22325 - protein, 470 aa, unidentified; identical to SEQ ID NO: 2825
  REGION 1..470: note = Human gut metagenome

SEQ ID NO: 22326 - protein, 408 aa, unidentified; identical to SEQ ID NO: 17908
  REGION 1..408: note = Human gut metagenome

SEQ ID NO: 22327 - protein, 323 aa, unidentified
  REGION 1..323: note = Human gut metagenome
TRYRAPRFDNRIRTKRKGWLAPSVENRINAHLSRIETVIRLLPVTKITVETTSFDMQLLKNSDIAGKKYQEGEQLGFWNVREYVLFRDGHVCQHCHARSKDSVLNVHHLESRRTGGDSPGNLITLCETCHKALHRGEITLKAKRGQSFRAETFMGIMRWEVLDRLKASHSKLEVQNTYGYRTKHARISNGIAKSHCADAFCIAGNLGAERLGEFFFQKQTRRNNRQIHKLSILKHGLRKRNQVPFEVKGFRLFDKVACKGEEGFIFGRRSSGYFDVRKLNGTHISAGISCKKLRLLEKRQTYLTEIRKEKALPPLPEGRGLRA

SEQ ID NO: 22328 - protein, 427 aa, Mastigocoleus sp.; identical to SEQ ID NO: 18901

SEQ ID NO: 22329 - protein, 489 aa, unidentified
  REGION 1..489: note = Human gut metagenome
LVWNVQAPWDVYPSPTLCGLCLKVLRGRNGDADKKPIPTLTKDENRPSGRTTGLRAEQAEPAGIRKGDTLKVFVLNMRSKPLMPCSPAKARHMLKAGKAVVERRTPFTIKLTIATGETKQDVTLGVDAGAKHVGLSATTEKEEVFASEVELRQDITGLLADRLAFRRARRNRKTRYRAPRFNNRVRSKNKGWLAPSVENRIQAHISRIEAVCRVLPITKIVIETASFDIQKIKNSEVEGSGYQQGDQLGFWNVREYVLFRDGHVCQHCRGRSKDPILNVHHLESRKTGGDTPNNLITLCETCHKAYHAGKIKLKARRGTSFRAEAFMGIMRWTLLDRVRRAHPELPVENTYGYLTKHNRIALALPKTHCADAFCIAGNLNALRRGDFLFQRQTRTHNRQIHKCSILKGGVRKLNQAPFLVKGFRLFDKVKCKGGIGFVYGRRSSGFFDVRTLDGVRLSAGISYKKLMLVEKRTTFLTQLKKEHGASSPS

SEQ ID NO: 22330 - protein, 412 aa, unidentified; identical to SEQ ID NO: 14665
  REGION 1..412: note = Human gut metagenome

SEQ ID NO: 22331 - protein, 393 aa, Moorena sp.; identical to SEQ ID NO: 6115

SEQ ID NO: 22332 - protein, 417 aa, unidentified
  REGION 1..417: note = Human gut metagenome
MPCSPAKARLLLKEKKAIVKRRTPFTIQFTIATGEARQPVTLGVDSGYKHIGLSATTEKDELYASEVELRQDITDLLSARLALRRSRRSRKTRYRAPRFDNRVASKREGWLAPSVENRIAAHMSRVEAVMRVLPVTAITVETAAFDTQLLKNPDIAGEAYQQGEQLGFWNVREYVLFRDGHVCQHCRRKSKDPILNVHHIESRRTGGDAPNNLITLCETCHKAFHRGEIKLKVKRGKSFKAETFMGIMRWTLFERLKKAHPELRVRNTYGYLTKHKRISHGIAKSHCADAYCIADNLGAKRLEGFFFQKQTRKHNRQIHKLSILKGGLRKKNQAPYEVKGFRLFDKVICKGEEAFIFGRRTSGSFDVRRLDGTRISAGINYKKLRLLEPRTTYLTEFRMEAALPPLHECRGFRAEFL

SEQ ID NO: 22333 - protein, 420 aa, unidentified; identical to SEQ ID NO: 2812
  REGION 1..420: note = Human gut metagenome

SEQ ID NO: 22334 - protein, 420 aa, unidentified; identical to SEQ ID NO: 3685
  REGION 1..420: note = Human gut metagenome

SEQ ID NO: 22335 - protein, 465 aa, unidentified; identical to SEQ ID NO: 12082
  REGION 1..465: note = Human gut metagenome

SEQ ID NO: 22336 - protein, 414 aa, unidentified
  REGION 1..414: note = Human gut metagenome
MPCSPAKARLLLKEKKAIVVRRTPFTIQLTIATGETKQPVSLGVDAGYKHVGLSASTEKAELYASEVELRQDITDLLSARRALRQSRRNRKTRYRAPRFDNRIRTKRKGWLAPSVENRINAHLSRIETVIRLLPVTKITVETASFDTQLLKNSDIAGKEYQKGEQLGFWNVREYVLFRDGHVCQHCHGRSKDPVLNVHHLESRRTGGNSPGNLITLCETCHKALHRGEIKLKAKRGQSFRAEAFMGIMRWEVLNRLKASHPELEAQNTYGYRTKHARIANGIAKSHCADAFCIAGNLGAERLGEFLFQKQTRRNNRQIHKLSIFKGGIRKRNQAPFEVKGFRLFDKVACKGEEGFIFGRRSSGFFDVRKLDGTHVSAGISYKKLRLLEKRQTYLTEIRKEEALPPLREGRGLRA

SEQ ID NO: 22337 - protein, 349 aa, unidentified
  REGION 1..349: note = Human gut metagenome
MPRNDVVENLSTRREFRRARRNRTTRYRKPRFNNRVHSKNNGWLAPSVEVKIQEHITSIKRVCAILPISKIVVETAEFDLQLLKAVQDGKPVPEGEDYQKGEMYGSYDVRQYVLWRDNYTCTCCGVKGTDKKPVKLHVHHFESRKHGGNAPDNYGTLCEDCHKKLHLGIITDISLKTRKRPSTRDAAFMGIMRKTLMQRLITGLSIPVAETKGYITKAAREEILKLPKTHTNDALAIAQGRHGFGIREQAYVKPTNRIYTVRPVRHHNRQLHKATMLKGGIRKLNQASKYIFGFRLYDKVLYQGGECFVWGRRRSGSFLLRTIDGTKVKDGVGYRNLTLLERSTNYLIA

SEQ ID NO: 22338 - protein, 417 aa, unidentified
  REGION 1..417: note = Human gut metagenome
MPCSPAKARLLLKEKKAIVKRRTPFTIQLTIATGEAKQPVALGVDSGYKHIGLSATTEKAELYASEVELRQDITDLLSARLALRRSRRSRKTRYRAPRFDNRVASKRKGWLAPSVENRIAAHMSRVEAVMRVLPVTAITVETAAFDTQLLKNPDIAGEAYQQGEQLGFWNVREYVLFRDGHVCQHCRGKYKDPILNVHHIESRRTGGDAPNNLITLCETCHKAFHRGEIKLKVKRGKSFKAETFMGIMHWTLFERLKKAHPELRVRNTYGYLTKHKRISHGIAKSHCADAYCIADNLGAKRLEGFFFQKQTRKHNRQIHKLSILKGGLRKKNQAPYEVKGFRLFDKVICKGEEAFIFGRRTSGSFDVRRLDGTRISAGISCRKLRLLEPRTTYLTEFRKEAALPPLHECRGFRAEFL

SEQ ID NO: 22339 - protein, 277 aa, unidentified; identical to SEQ ID NO: 16282
  REGION 1..277: note = metagenome

SEQ ID NO: 22340 - protein, 477 aa, Blautia sp.; identical to SEQ ID NO: 2707

SEQ ID NO: 22341 - protein, 480 aa, unidentified
  REGION 1..480: note = Human gut metagenome
LYTKPLDNIGEGSLPPSGEINLKGMTFMVYVKSIDGKALMPTSNAKARKLLKQKKAKVVSLRPFVVKLTYKTKTEYTQKLNLGVDSGYSNIGFSVIDAKQEYIAGEVKLLEGMKKRLLEKASYRRIRRSRLRYRKARWNNRVKSKKKGWLAPSLKHKLDTHIKFIYYLKNILPIGKITIEVANFDIQKMKYDLISGVDYQNGDMFGFWNVREFVLHRDGHKCQNPNCKHKDKKEQILKVHHIRYRSEGGSDRPENLITLCSKCHTPANHKKGKFLYDWCVNGKKVRGFKDATFMSMIRWYLVNDLKSKHNNVSITYGYITKNHRIQNGIEKSHLNDAFAIAKGTNQARTKDRFLVIQDRLKNRSLEKFYDSKIIDIRTEKKVSGGDLNCGRSTKNKNLNTENLRKYRGAKISKGQRRIRKQKYFYQPNDLVKYDGKVYTVKGTQNEGKYIALKEIKKVPKVELLIPYVFKKGLNWSYGLC

SEQ ID NO: 22342 - protein, 456 aa, unidentified; identical to SEQ ID NO: 6026
  REGION 1..456: note = Human gut metagenome

SEQ ID NO: 22343 - protein, 418 aa, Anoxybacillus sp.; identical to SEQ ID NO: 10474

SEQ ID NO: 22344 - protein, 355 aa, unidentified
  REGION 1..355: note = Human gut metagenome
AELYASEVELRQDVSDLLSARRALRQSRRNRKTRYRAPRFNNRLRTKCKGWLAPSVENRINAHLSRIEAVLRLMPVTKITVETASFDMQLLKNPDIAGKEYQEGEQLGFWNVREYVLFRDRHVCQHCYGRSKDPVLNVHHLKSRRTGGDSPDNLITLCETCHKALHRGDITLKAKRGKSFRAEAFMGIMRWEVHNRLRALHPGIEVSNTYGYRTKHARIANGIAKSHCADAFCIAGNLGAERLCEFFFQKQTRRNNRQIHKLSILKGGIRKRNQAPFEVKGFRLFDKVACQREESFIFGRRSSGVFDVRKLDGTRISAGISCKKLHLLEKRRTYLTEIRKEEALPPLPEDRGLRA

SEQ ID NO: 22345 - protein, 425 aa, Nodularia sp.; identical to SEQ ID NO: 3165

SEQ ID NO: 22346 - protein, 475 aa, Ferroplasma sp.; identical to SEQ ID NO: 12108

SEQ ID NO: 22347 - protein, 456 aa, Halomonas sp.; identical to SEQ ID NO: 8448

SEQ ID NO: 22348 - protein, 472 aa, Lactobacillus sp.
MGNNANPNWVSWFGRVAGITVSYITEKEKNMKHENANRVFLLNRDGKPLMPCRPRKARLLLKSGKAFVVKKYPFTIQLKYGSYGYKQKVSLGVDTGQRHIGFAIVSQNKVLYQSEVELRQDVHKNLYTRKIYRRSKRNRKTRYRQARFLNRVHGKRDGLWLPPSVKGKVNHNIAWIKRYLAVLPNPDLHVEVGKFDMAKMLNPQISGKQYQEGSLKDWKNYEYYVLARDEYTCQLCHKHGEGVKLVVHHIVYRSQGGTNRVDNLITLCTDCHTTKNHQPGGKLYKWMKVKKKVTKQLKGATFMNILRKRIMTAFPEASFQYGSQTYVDRKNLLLPKGHFMDAIAISGIKSVGQMPDTVTLISQFRKKKRSLHEATARKGRKQPNTSSKRNEKNTNHARGLWLNDYVRVIGNHAKGYVKGFKSNGYYVYLTNGLGNYVLNNGKNYINGQQCRLIMHNGNWQKAEQKLSLNEFK

SEQ ID NO: 22349 - protein, 450 aa, Clostridium sp.; identical to SEQ ID NO: 10471

SEQ ID NO: 22350 - protein, 494 aa, unidentified
  REGION 1..494: note = Human gut metagenome
MDMVYVLNKDGKPLMATTRGGRVRYLLKEKKARVVSSTPFTIQLNYDTPDATQDLILGIDPGRTNIGVAVVKEDGQCVFSAHLETRNKDVPLLMKKRAAFRRNHRTLDRRRKRQRRAKAAGTTIADGSAERLLPGYEKPIVCHYIRNKKARFNNRKCPQGWLTPTANHLLQTHINLIAKVAKFLPITKVVVELNRFAFMAMDNPNIRRWEYQQGSLYGLGSVEDAVYAQQDGHCLFCKKPIDHYHHVVPRRKNGSETLANRCGLCAKHHALVHTDKAWAGKLVTQKEGMNKKYHALSVLNQIIPSLMEYLGDEMLYDVYATDGRSTKGFRIAKNLPKEHYTDAYCIACSILDTNIKVSAPVEPFELKQFRRHDRQACHQQRVDRKYYLDGKQVATNRHKAIEQKSNSLEEFRETYGDAAVSQLTVKPHPPQYKDMTRIMPGAVMNFCGAVGILLGSDGFHNGKPDYYKSTKEEKVRMRRCALLAQNAGMVFIPA

SEQ ID NO: 22351 - protein, 341 aa, unidentified
  REGION 1..341: note = Human gut metagenome
LLSTRRESRRARRNRKTRYRKSRFNNRVRSKHKGWLAPSVEVKIQEHITSIKMVCRILPVSKVVVETAEFDLQLLKAIEEGKPVPQGEDYQQGEMYGHYNVRQYVLWRDNYTCQCCGAHLTKKKEVRLHVHHLESRKVGGNAPGNLVTLCDSCHEKLHKGLITEKDLKKRKHRSTRDATFMGIMRKTLMQRLCSELPIPVAETRGYITKATREKLLVLPKSHTNDALAIAQGKHGFNVGYLPGIEQIDKIYTIRPVRHHNRQLHKAAILKGGIRKSNQAGKYVFGYRLFDKVQFNGQDCFIWGRRTSGYFVVKTIDGKVIHNSASFKKLRLVERASNYLIA

SEQ ID NO: 22352 - protein, 390 aa, unidentified
  REGION 1..390: note = Human gut metagenome
VVRRTPFTIQLTIATGESKQSVSLGVDAGYKHVGLSASTEKAELYASEVELRKDITDLLSARRALRQSRRNRKTRYRAPRFDNRIRTKRKGWLAPSVENRINAHLSRIETILRLLPVTKITVETASFDMQLLKNPDISGKEYQEGDQLGFWNVREYVLFRDGHVCQHCHGRSEDPVLNVHHLESRRTGGDSPSNLITLCETCHKALHRGEITLKAKRGQSFRAEAFMGIMRREVLNRLKASHPELEVHNTYGYRTKHARIANGIDKSHCTDAFCIAGNLGAKRLGEFLFQKQTRRNNRQIHKLSILKGGLRKRNQAPFEIKGFRLFDKVACKGEESFIFGRRSSGYFDVRKLDGTRISAGISYKKLRLLEKRRTYLTEIRKEEAIPNSPA

SEQ ID NO: 22353 - protein, 447 aa, Moorena sp.
MVFVLDKHKKPLMPCTPKRARLLLSQKRAVVHRLSPFTIRLKDREVASCTLQPVVLKVDPGSQATGMALTRVETTSEGEVHHALHLAELAHRGHEVVGLLHKRATRRRRRRQANLRYRPARFANRRRPKGWLPPSLRSRIGNVLTWARRYQRSVPVRRMDIERVKFDTQLLQNPEIDSVEYQRGELAGWEVRSYLLEKFGRQCVYCGRKDTAFELDHLHPKSRGGSKCVSNLVLSCHECNVAKGDQTASEFGHPEVQAQAKRPLRDAAAVNATRYALCDALSALEMPITTWSGGRTRWNRARFGITKAHCLDALCVGSLVGVEKGRHRTLQITAKGRGQYRRTNVDEAGFPVGYLMRQKQVMGFKTGDRVVAVVPEGFAAHGTHVGRIVVRAKKHFRMGKVQSIPARFCRKLQLADGYDYAVVETTLHLRAILPLASRKERLLPPYV

SEQ ID NO: 22354 - protein, 415 aa, unidentified
  REGION 1..415: note = Human gut metagenome
MVYVLDKNGQPLMPTDRHRKVRLMLQSGQAKVIKRCPFTIQLNYDSGHQTQEISLGIDAGSKHIGVSTTTKIKVLYEVDVELRNDIVDLLSSRRELRRGRRNRKTRYRQAKFNNRRLGNGWLPPSIRQKIGTHLTVVENICKMLPISRIMVETASFDIQKIKNPDIQGAEYQQGDQLEFWNVREYVLFRDGHTCQCCKGKSKDKILNVHHIESRKTGGNAPNNLITLCETCHTGYHKGTVQLPKAIKRGMRFKDAAFMGIMRWAFYEALKQQYEPVALVHNTYGYITKHTRIEHNLPKEHYVDARCISGNPEASSNGEYYYQKKVRCHNRQIHKLTVLKGGIRKQNQATYLVKGYRLFDKVSYQGKGYFVFGRRQSGFFDIRTLSGEKVNKGSLSCKKLKFIATRTYYLTERRAV

SEQ ID NO: 22355 - protein, 442 aa, Sutterella sp.
MSTSVFVLDKKHRPLMPCRPARARRLLRAGRARVVKRFPFVIRLVDRTVEQSEVQPVLIKLDPGSRETGAAVVRDDEKKRHHALAFFVIKHRGGAIRDALKAQSAFRRRRRSQNFRCRSPRFLNRVKPKGWLPPSLRHRVETTLSFVRRMCRYLPVSGIATELVKFDSQKLQNPEVSEVKYQQGTLFEYEVREYLLEKFGRKCVYCGAEGVPLNIDHVVPRAKGGSNRVSNLVLACVSCNQKKGARSLEDFLKGKPEVLARVRRELKTPLRDAAAVNATRWVLFNELKATGLPVETGSGALTKLNRHAFGVEKEHWLDALCVGRLNGVVTRKGLNVLEIRCMGRGSRQRTRLTKYGFPRGYLMRQKCVHGFATGDMVEANVPKGKKAGLWRGRVAVRVSGSFNIQTPKGVIQGVGWKHCRLISHNDGYGYAWLGHAPHSSPA

SEQ ID NO: 22356 - protein, 427 aa, Cylindrospermum sp.
MCKVLLIDTNKKPLDPIHSAQARQLLRNQKASIFRRFPFTLILKESHPDSVVSVLRLKIDPGAATTGIALVNDATGEVVFAAELKHRGFAIRDSLTSRRQLRRSRRARITRYRQPRFLNRTRTLGWLAPSLQSRVDNIKTWVEKLRFFAPIGAITQELVRFDMQLMRNPDIQGKEYQQGTLAGFETREYLLEKWNRECAYCGVKNVPLQIEHIQPKAKGGSNSITNLSLSCEKCNIKKGTKDIKDFLKKEPTRLQKILSQARKPASDAAAVNTTRFALLEVLTTTGLPVETGSGGLTKFNRSQQNIPKSHWADAAAVGKSTPLLNIKGVKPLLVKANGHGSRQSCRTDKYGFPCRYVPRFKFVNGFQTGDIVKAVVPKGKKIGKYIGRIAVRTSGSFNISTASGLAQGISHKNCKHIHKKDGYEYGK

SEQ ID NO: 22357 - protein, 451 aa, Anoxybacillus sp.
LHITSIYNMVEENMTCFMQRKGENPMVFVLDTNKRPLAPCHEAVARKLLKQGKAAIYGRFPFTIILKKSVDESEIKATYRLKIDYGSRHTGLAILRGQEVVWLGQLDHRTDIKERIDKRRAFRRARRNRKTRYRKPRFLNRKRKEGWLPSSLESRVQNIQTWVNRLKKLCPIGYISYENAKFDTQLMRNPEINGVEYQQGTLQGYEVREYLLEKFGRKCCYCGKENVPLEVEHIIPKSRGGTDRVDNLCLACHDCNQRKGSKTAEEFGYPHIQKQVKESLKDASAINSTRWKAYEVLKQTGLDVECGTGARTKMNRIRLDLPKTHYFDACCVGESTTNHLYFKTKEVLFIKAKGRGSRSRTNLDRYGFPRGYLARQKFFFGFQTGDMVKAVVPRGKYQGVWFGEVACRKTGSFDIKGKDGKRIAQGINYRYVQVIQRFDGYAYGKGVAELA

SEQ ID NO: 22358 - protein, 451 aa, unidentified
  REGION 1..451: note = metagenome
VTTILKTCFAAFNLAKVVVLMDAWDIIVVLNKRGKPLMPCSPAKARLLLKEKKAIVKRRTPFTIQLTIATGETKQPVSLGVDAGYKHVGLSASTEKAELYASEVELRQDITDLLSARRALRQSRRNRKTRYRAPRFDNRIRTKRKGWLAPSVENRINAHLSRIEAVLRLLPVTKITVETASFDMQLLKNPDIAGKEYQEGEQLGFWNVREYVLFRDGHVCQHCHGRSKDPVLNVHHLESRRTGGDSPGNLITLCETCHKALHRGDITLKAKRGKSFRAEAFMGIMRWEVHNRLRALHPGIEVSNTYGYRTKHARIANGIAKSHCADAFCIAGNLGAERLCEFFFQKQTRRNNRQIHKLSILKGGIRKRNQAPFEVKGFRLFDKVACQGEEGFIFGRRSSGYFDVRKLDGTRISAGISCKKLHLLEKRRTYLTEIRKEEALPPLPEGRGLRA

SEQ ID NO: 22359 - protein, 406 aa, unidentified; identical to SEQ ID NO: 6526
  REGION 1..406: note = Human gut metagenome

SEQ ID NO: 22360 - protein, 512 aa, unidentified
  REGION 1..512: note = Human metagenome
MSTVYVLNKDGKPLMPTTRGGHVRHLLKEQKARVVRTNPFTIQLLYETDNLVQPLYLGIDPGRTNIGVAVVKTDGTAVFTAHLETRNKEIPKLMQGRKKARRARRTNGRRCRRQRRAKANGTISKKCVKQTTAQNGSVSKRAKKIGVIKRHLPGCEKEVLCIGIKNKEAKFSNRARPEGWLTPTANQLLQTHINLVKKIQKFLPISDVVLEINKFAFMRLDNPNVQKWQYQQGPLYQKASLEEAVSEMQEHHCLFCKNTIDHYHHVVPQHKNGSNTIGNIVGLCAKHHDLVHKDTSWQEKLAKKKTGLNKRYGALSVLNQIIPALTKELSSLFPKHFFATNGKSTYDYRAAHGVSKDHWLDAYCIAGSVLPNDACDNNINSHVPYELKQFRRHDRRALHKENMSRVYTLNGKSVATNRHKAIKQTTDSLEEFRQRQPNDVCKLKVKEHHPEYRNPKRNFPGCVFLVGKHTHVMQGTSGSHNGKADGYYDTNGNSYSSGKCKFVAKNKGIVFA

SEQ ID NO: 22361 - protein, 671 aa, Clostridium sp.; identical to SEQ ID NO: 13815

SEQ ID NO: 22362 - protein, 427 aa, Moorena sp.; identical to SEQ ID NO: 9614

SEQ ID NO: 22363 - protein, 455 aa, Moorena sp.; identical to SEQ ID NO: 20167

SEQ ID NO: 22364 - protein, 421 aa, unidentified
  REGION 1..421: note = Human gut metagenome
MRGQPLMPCSPAKARHLLKAGKAVVKRRTPFTIQLRIATGETKQNVTLGVDAGAKHVGLSATTEKEEVFASEVELRQDITGLLAARLSLRRDRRHRKTRYRAPRFLNRVRSKHKGWLAPSVENRIQAHMSRIDAVCRLLPVTKIVIETASFDIQKIKDPSVEGTDYQQGDQLGFWNVREYVLFRDGHVCQHCHGRSKDKILNVHHLESRQTGGDAPNNLITLCETCHKAYHAGKIKLKVKRGQSFRAEAFMGIMRWTLLDRMRKAHSGLPVENTYGYLTKNTRITLGLPKTHCVDAYCIAGNLKAVRRGVCLHQRQVRKHNRQIHKCTVLSKTLKDGTKIGYRKLNQTPHLVKSFRLFDKVRCLGQTGFIFGRRSSGYFDVRRLDGVKFSSGISYRKLTLLEKRSTYLTELRKEDGASSPV

SEQ ID NO: 22365 - protein, 317 aa, unidentified
  REGION 1..317: note = Human gut metagenome
LSTRRELRRTRRNRLRYRKPRFDNRIKSKRPGWVAPSVKYKIDAHIRVIDNVCSILPISRIVIEVAQFDTQKIKNPNISGKEYQEGDQLGFWNVREYVLARDGHKCQYCKGKSKDAILNVHHIESRKTGGDSPSNLITLCETCHKEYHKGNIDLKIKRGSSLRDAAVMGIMKWKLYEELRSRYDRVFMTFGYITKHNRIKYGIEKSHTSDAFVISMNINAKRIERQYLKRLIRRHNRQMHKMKILKGGKKKNNQAPFEVFGFRLFDKVLYNNKIFFVYGRRKSGSFNIRDFNGENSKDVSRKKFKLIRGKRHPIILK

SEQ ID NO: 22366 - protein, 424 aa, unidentified
  REGION 1..424: note = Human gut metagenome
MRVFVFNMRGRPLMPCSQRKARLLLRENKAMIYKYHPFTIQLTYTTGETKQDCHIGIDTGSKYIGAAVRSEDKVFLKGEIELRQDIRSNLDTKRIYRRSRRNRKTRYRKPRFLNRKRRNEWLPPSLQSRINHTFHWIDTLSSLVPNPILHIEVGKFDVAKMINPEIHGVDYQHGQTYDFFDERYFVFARDNYTCQCCGKSKNKILNTHHIIYRSNGGTNRVDNLITVCTDCHTSQNHRKGGIFYQWQEQHKKVKQYKEPPFMNTLRKRIFVAYPDAEITYGSETTPKRKAMKLDKTHYNDAIVISGINEIKENPEEWLLIKQFRKKKRSLHEATARKGRKKPNRNQTRHSKNTPYYKGFYLNDKVSVFGKSGYITGFTSNAAYIKDENNDYITLPNKTYKQVSINKMKLECHNNNWQYIIKNAV

SEQ ID NO: 22367 - protein, 443 aa, unidentified
  REGION 1..443: note = Human gut metagenome
NIGEGSQPVERPRRQNLRVFVLNKRGKPLMPCSPAKARLLLKEKKAIVVRRTPFTIQLTIATGESKQPVSLGVDAGYKHVGLSASTEKAELYASEVELRKDITDLLSARRALRQSRRNRKTRYRAPRFDNRIRTKRKGWLAPSVENRINAHLSRIEAVLRLLPITKITVETASFDMQRLKNPDISGKEYQEGEQLGFWNVREYVLFRDGHVCRHCHGRSKDPVLNVHHLESRRPGSDSPDNLITLCVTCHKALHRGEITLKAKRGQSFRAQAFMGIMRREVLNRLKASYPELKVHETYGYLTKNARIANGIVKSHGADAFCIAGNLGAKRLGEFFFQKQTRRNNRQIHKLSILKGGIRKRNQAPFEAKGFRLFDKVACQGEEGFIFGRRSSGSFDVRKLDGTRISAGISCKKLRLLEKRRTYLTEIRKEEALPPLPEGRGLRA

SEQ ID NO: 22368 - protein, 420 aa, unidentified; identical to SEQ ID NO: 3089
  REGION 1..420: note = Human gut metagenome

SEQ ID NO: 22369 - protein, 451 aa, unidentified
  REGION 1..451: note = Human gut metagenome
MTTFVFVLDRKGRSLMPCHPARARKLLKKGRARVHKVFPFTIRLTDRELENSSVQPMLIKIDPGSKETGIALLREEKNKGHHALYFINLQHRGQQIRNALHKRRCLRRSRRSRNLRYRSPRFLNRRRAEGWLAPSLQHRADSILSWVSRLRKITPVERISQELVKFDTQLIQNSKIEGIEYQQGELAGYELREYLLEKFGRKCIYCGADNVPLNIDHVIPKSKGGSNRVSNLVLACVQCNQKKGSRSIEEFLKDKPEVLRQIKNQLKQPLKDAASVNATRWKLFNKLKSTGFPFEVGSGALTKFNRKKFGILKAHWLDALCVGNVPSVTNWRNLNVLNIKCCGRGAYQRTRTDKYGFPRGICMRQKKVYGFSTGDMVKAIIPKGKKKGVYVGKVAVRKTGSFNLQTSGQTIQGISYRYCRLITHSDGYSYSWKSCPIPPRLETRGILGEVR

SEQ ID NO: 22370 - protein, 430 aa, unidentified; identical to SEQ ID NO: 5683
  REGION 1..430: note = Human gut metagenome

SEQ ID NO: 22371 - protein, 282 aa, unidentified
  REGION 1..282: note = Human gut metagenome
TELVKFDSQKLQNPEVSGVKYQQGTLFEYEVREYLLEKFGRKCVYCGAEGVPLNIDHVVPRAKGGSNRVSNLVLACVSCNQKKGARSLEDFLKGKPEVLARVRRELKTPLRDAAAVNATRWVLFNELKATGLPVETGSGALTKLNRHAFGVEKEHWLDALCVGRLNGAVTRKGLNVLEIRCMGRGSRQRTRLTKYGFPRGYLMRQKCVHGFATGDMVEANVPKGKKAGLWRGRVAVRVSGSFNIQTPKGVIQGVGWKHCRLISHNDGYGYAWLGHAPHSSPA

SEQ ID NO: 22372 - protein, 420 aa, unidentified
  REGION 1..420: note = Human gut metagenome
MQYVYVLSKHGEPLMPCSPGKARLLLKEKKARVVRRTPFTIKLLYGSAGYKQPITLGVDAGSKHVGLSASTKKHELYREEFTPRNDVVKLLSKRKQYRRSRRNRKTRYRAPRFNNRVHSKHKGWLAPSVEVKIQEHITVIKRICRILPISLVRVETAEFDTQRLKAMLEGKSLPVGTDYQLGEMYDEYNVRQYVLKRDNYTCQCCGAHTTKKKTVKLHVHHLEGRQVGGNAPNNLITLCVDCHKALHAGKVKLDGKKRGKSFKDAAFMGIMRKTLMARLRDELPIPVQGTYGYITKMRREQNDIKKSHVNDARCISKHPLAEPCSVCYRTKAIRHHNRQTHKANFSKGGTRQRSQMPYVVEGYRLWDKVLYKGQECFVSGRRASGSFTLKKLDGTCISKGVTFKKLRLLEPATNYLIERM

SEQ ID NO: 22373 - protein, 386 aa, unidentified; identical to SEQ ID NO: 19656
  REGION 1..386: note = Human gut metagenome

SEQ ID NO: 22374 - protein, 535 aa, Streptomyces sp.; identical to SEQ ID NO: 19283

SEQ ID NO: 22375 - protein, 425 aa, Planktothrix sp.
MSNYVFVIDTNKQPQNPVHPAQARLLLNQGQAAVYRRYPFTIILKESKPESEIEQITLKIDPGSKTTGITLVQGNKVIWGAELTHRGQTIKMSLESRRLLRRSRRNRKTRYRQARFLNRTRQKGWLAPSLQHRVETTLTWVNKLIRLVPISSIVQELVRFDLQQLENPEISGIEYQQGELQGYEVRQYLLEKWSRKCAYCGVENVPLEVEHIHPKSQGGTDRISNLTMACHDCNQKKGNQDIQDFLSGKPDLLQRILKQAKQPLKDATVVNSTRWSLFNRLKETGKPVSTGSGGLTKFNRTRLNLPKTHWLDAACVGKITTLKVLTNKPLLIKATGHGSRQMCRTDKLGFPSRYVPRFKFVNGFQTGSIVKAIVTKGKKIGTYIGRIAVRSSGSFNISSKGVLIQGISYKYCTTIHKKDGYLYAT

SEQ ID NO: 22376 - protein, 427 aa, unidentified; identical to SEQ ID NO: 2980
  REGION 1..427: note = Cyanobacteria bacterium UBA11367

SEQ ID NO: 22377 - protein, 477 aa, unidentified; identical to SEQ ID NO: 12969
  REGION 1..477: note = Human gut metagenome

SEQ ID NO: 22378 - protein, 515 aa, unidentified; identical to SEQ ID NO: 21109
  REGION 1..515: note = Human gut metagenome

SEQ ID NO: 22379 - protein, 477 aa, unidentified
  REGION 1..477: note = Human gut metagenome
MIIALDKYKRPLGFLTERRCRILMERKRAVLYRVFPTVVILMDVDARTIPGLPSFRIKIDPGSKYTGIAIIRNDTDEFVYAMQIEHRGDAVRAALNKRKNARRNRRSRETGYRRAKWGNRCLSEKDKRSYDSSREDGWLPPSIRSAADNVISWVRRLGRWINLTECSFEAVRFDTQLMEDPDIEGEEYQHGTLFGLEIKEYLMEKFGHTCQYCGGKSGDPVLEWEHMRPKSRGGSDRVKNALLSCSSCNKDKGNRTPEEWLELIKARLPREKGKRKELDEERVELIQKVIDGKPQGGALRYAAWVSSSRRYLEKALFGIFGNVECSSGGRTKYNHTELGYPKEHHYDALCVGTVPEKGYHDRTNGYYLYAKAAGRGTRLRGHLNKCGMIVTKWTDRKNGFFGFQTGDIVVAEVPHKTPKPYKYEGRFVGRVMVRATGSFDIKTTDGKLVTVKEQYCRLLQANSGYQYTMKRAIPLGH

SEQ ID NO: 22380 - protein, 418 aa, Anoxybacillus sp.
KRPLAPCHEAVARKLLKQGKAAIYRRFPFTIILKKSVDESEIKATYRLKIDYGSRHTGLAILRGQEVVWLGQLDHRTDIKERIDKRRAFRRARRNRKTRYRKPRFLNRKRKEGWLPSSLESRVQNIQTWVNRLKKLCPIGYISYENAKFDTQLMRNPEINGVEYQQGTLQGYEVREYLLEKFGRKCCYCGKENVPLEVEHIIPKSRGGTDRVDNLCLACHDCNQRKGSKTAEEFGYPHIQKQVKETLKDTSAINSTRWKAYEVLKQTGLDVECGTGARTKMNRIRLDLPKTHYFDACCVGESTTNHLYFKTKEVLFIKAKGRGSRSRTNLDRYGFPRGYLARQKFFFGFQTGDMVKAVVPRGKYQGVWFGEVACRKTGSFDIKGKDGKRIAQGINYRYVQVIQRFDGYAYGKGVAELA

SEQ ID NO: 22381 - protein, 416 aa, unidentified; identical to SEQ ID NO: 21452
  REGION 1..416: note = Human gut metagenome

SEQ ID NO: 22382 - protein, 236 aa, unidentified; identical to SEQ ID NO: 5916
  REGION 1..236: note = Human gut metagenome

SEQ ID NO: 22383 - protein, 431 aa, unidentified
  REGION 1..431: note = Human gut metagenome
MPNKVYVINKHGRPLMPCSPAKARHLLDAGKAKVKKRTPFTIQLVYGSSGYTQEVILGVDAGSKTIGMSASTTKEELLSAEVKPRNDVVDLLSTRREFRRARRNRKTRYRKPRFDNRVRSKHKGWLAPSVEVKIQEHITAIRRVCGILPVSKVVVETAEFDLHLLKAIADGKPVPQGEDYQKGEMYGHYNVRQYVLWRDNYTCQCCGTHPSKKKEVRLHVHHLESRKVGGDAPDNQVTLCESCHKKLHKGLIEAKDFKKRKRRSTRDATFMGIMRKTLMQRLCSELPIPVVKTRGYITKATREKLLVLPKSHTNDALAIAQGKRGFNVGYLPEIAQIDKIYTIRPVRHHNRQLHKATILKGGIRKSNQTEKYVFGYRLFDKVQFNGQDCFIWGRRTTGIFTIKTINGKMIKDGISFKKLKLLEKSTSYLIA

SEQ ID NO: 22384 - protein, 451 aa, unidentified
  REGION 1..451: note = Human gut metagenome
VTTILKTCFAAFNLAKVVVLMDAWDIIVVLNKRGKPLMPCSPAKARHLLKEKKAAVVRRTPFTIQLTIATGESKQPVSLGVDAGYKHVGLSASTEKAELYASEVELRQDITDLLSARRALRQSRRNRKTRYRAPRFDNRIRTKRKGWLAPSVENRINAHLSRIETVIRLLPVTKISVETTSFDMQLLKNSDIAGKEYQEGEQLGFWNVREYVLFRDGHVCQHCHGRSKDPVLNVHHLESRRTGSDSPDNLITLCETCHKALHRGEITLKAKRGQSFRAQAFMGIMRREVLNRLKASYPELKVHETYGYLTKHARIANGIVKSHGADAFCIAGNLGAERLGEFFFQKQTRRNNRQIHKLSILKGGIRKRNQAPFEAKGFRLFDKVACQGEEGFIFGRRSSGSFDVRKLDGTRISAGISCKKLRLLERRRTYLTEIRKEEALPPLPEGRGLRA

SEQ ID NO: 22385 - protein, 512 aa, unidentified; identical to SEQ ID NO: 7153
  REGION 1..512: note = Human gut metagenome

SEQ ID NO: 22386 - protein, 512 aa, unidentified; identical to SEQ ID NO: 3493
  REGION 1..512: note = Human gut metagenome

SEQ ID NO: 22387 - protein, 420 aa, unidentified; identical to SEQ ID NO: 8221
  REGION 1..420: note = gut metagenome

SEQ ID NO: 22388 - protein, 427 aa, Moorena sp.; identical to SEQ ID NO: 18169

SEQ ID NO: 22389 - protein, 451 aa, unidentified
  REGION 1..451: note = Human gut metagenome
MSVAVMSKTGMRLMPTSEYRARKLLKSKKATVYGHHPFTIQLTERKTGDVQPVELCMDTGYLHIGTSVKSEKHEYFGVQIDTLTDEKQKHDACRMYRRQRRSRKRYRQSRFNNRKRSDGWIAPSLEHKKDIHIQTISRICNAMPITNITLEMGNFDTQVLKALEENRPLPQGTDYQHGERYGIATLREAVFARDKYTCQCCRKTIADGAILHVHHIIYRSRGGTNRMSNLATVCDRCHTPANHKPGGRLYNWKPKIASFKGATFMTAVRWKMYNEVKSKFSDINIHITYGAETKEQRRAFDITKSHVNDALVMGQFHPKHRSRPVCYKKKRRNNRCLEKFYDAKYIDSRDGKKRSGQELFNGRINRNHKKDSENLHQYRQQKVSAGRRTIRKQHYSIQPHDIIVFNRQQFETSGCHCNGARAILLPQKKSVAIKKLSIHKYAGGYFKSDFT

SEQ ID NO: 22390 - protein, 373 aa, unidentified
  REGION 1..373: note = Human gut metagenome
LGVDAGYKHVGLSASTEKAELYASEVELRQDVSDLLSARRALRQSRRNRNTRYRAPRFDNRIRTKRKGWLAPTVENRINVHLSRIETVLRLLPVTKITVETASFDTQLLKNPDIAGKEYQEGEQLGFWNVREYVLFRDGHVCQHCHGRSKDPVLNVHHLESRRTGGDSPGNLITLCETCHKALHRGEIKLRAKRGQSFRAETFMGIMRWGVLNRLKASHPKLEVHNTYGYRTKHARIANGIAKSHCADAFCIAGNFGAKRLGEFFFQKQTRRNNRQIHKLSILKGGIRKRNQAPFEVKGFRLFDKVACQGEEGFIFGRRSTGYFDVRKLDGTCISAGISYKKLHLLEKRRTYLTEIRKEEALPPPPEGRGLRA

SEQ ID NO: 22391 - protein, 410 aa, unidentified
  REGION 1..410: note = Human gut metagenome
MFVDMVYVQDIDGKPMMPTTRHGKVRRLLKDKKAVVVNLCPFTIRLTYVTSDYKQEIVLGVDAGTKHVGLSATTKSKELYSSEVILRNDIVDLLSTRRELRRTRRNRLRYRKPRFDNRIKSKRPGWVAPSVKYKVDAHIRVIENICSILPISRIVIEVAQFDTQKINNPNISGKEYQEGNKLGFWNVREYVLARDGHKCQYCKGKSKSKILNVHHLESRKTGGDSPSNLITLCETCHKEYHKGNIDLKIKRGSSLRDAAVMGIMKWKLYEELRSRYDRVSMTFGYVTKYNRIKYGIEKSHTSDAFVISKNINAKRIGCQYLKRLIRRHNRQIHKMKILKGGKKKNNQAPFEVFGFRLFDKVLYNNKICFVYGRRKSGSFNIRDFNGENSKDVSRKKFKLIRGKRHPIILK

SEQ ID NO: 22392 - protein, 414 aa, unidentified; identical to SEQ ID NO: 4492
  REGION 1..414: note = Human gut metagenome

SEQ ID NO: 22393 - protein, 431 aa, unidentified; identical to SEQ ID NO: 4306
  REGION 1..431: note = Human gut metagenome

SEQ ID NO: 22394 - protein, 411 aa, unidentified; identical to SEQ ID NO: 3917
  REGION 1..411: note = Human gut metagenome

SEQ ID NO: 22395 - protein, 376 aa, unidentified; identical to SEQ ID NO: 14786
  REGION 1..376: note = Human gut metagenome

SEQ ID NO: 22396 - protein, 390 aa, unidentified
  REGION 1..390: note = Human gut metagenome
ISKKCVKQTTAQNGSVSKRAKDIGVIKRHLPGCEKEVLCIGIKNKEAKFSNRTRPEGWLTPTANQLLQTHINLVKKIQKFLPISDVVLEINKFAFMRLDNPNVQKWQYQQGPLYQKASLEEAVSEMQEHHCLFCKNTIDHYHHVVPQHKNGSNTIGNIVGLCAKHHDLVHKDSAWEKKLAKKSTGLYKKYGALGVLNQIIPTLTNELSSLFPKHSFVTNGKSTYDYRAAHGVSKDHWLDASCIACSVLPSNVCDSNINNHMPYVLKQFRRHDRRVLNNENMNRVYTLNNKAVAINRHKAKDQKTVSLEEFRKEHPDDVCKLKVKEHHPTYRNMNRNFPGSVFLVGKQIHVMQGIASSKDGKATKYNDTSATAIAAGKCKFVAKNTGILFV

SEQ ID NO: 22397 - protein, 420 aa, unidentified; identical to SEQ ID NO: 6017
  REGION 1..420: note = Human gut metagenome

SEQ ID NO: 22398 - protein, 416 aa, unidentified
  REGION 1..416: note = Human gut metagenome
MVYVLDKNGQPLMPTDRHRKVRLMLQSGQAKVIKRCPFTIQLTYNTGHQAQEISLGIDAGSKHIGVSATTKTRVLYEADVELRNDIVDLLSSRRELRRGRRNRKTRYRPARFDNRRREDGWLAPSIRQKIGTHLTVVENICKILPISRITVETASFDIQKIKNPDIQGAEYQQGDQLGFWNNREYVLFRDNHTCQCCKGKSKDKILNVHHIESRKTGGNAPNNLITLCEICHTGYHKGAIQLPKTVKRGMRFKDAAFMGIMRWAFYEALKQQYEPVGTPVHNTYGYITKHTRIAYNLPKEHYVDARCISGNPEASSNGEYYYQKKVRCHNRQIHKLTVLKGGIRKQNQATYLVKGYRLFDKVSYQGKGYFVFGRRQSGFFDIRTLSGEKVNKGSLSCKKLKFIATRTYYLTERRAV

SEQ ID NO: 22399 - protein, 460 aa, unidentified
  REGION 1..460: note = Human gut metagenome
MVAVVDLFGKPLMPTNEYRARKLLKQKKAKIFGYRPFTIQLTERKSTEIQPIELCMDTGYIHIGISAKSERHEYLGMQIDTLTDEKLKRDDKRQYRRQRRNRKRYRTPRFDNRRRKEGWIAPSLEHKKEIHIDAIQRICKVMPITDITLEMGNFDTHVLKAVEEGKPLPQGSDYQHGERYGIATLREAVFLRDGYKCQCCEKSVKDGAILHVHHIKYRSQGGTNRMSNLITVCDKCHTPKNHKPGGKLWNWKPKLAEFKGASYMTSIRWMLYNEVTALLPNSSVHITYGAKTKESRRKLDIKKSHVNDAYVMGLFCPKHRTKPVYFKKKRRNNRVLEKFYDAKYIDSRDGKKQSGQELFNGRISRNHRKDSENLHLYRKRKVTKGRRSIRSRHYPIQPHDILLYQKKKYETAGCHNNGSRAILLPEKKSVALKQLTMYQYAGGYYRVPYESNKKEERTGS

SEQ ID NO: 22400 - protein, 504 aa, unidentified; identical to SEQ ID NO: 3854
  REGION 1..504: note = Human gut metagenome

SEQ ID NO: 22401 - protein, 420 aa, unidentified
  REGION 1..420: note = Human oral metagenome
MFVYVLDKNGQPLMPTQRFGKVRRMLRDRKAKVVKRCPFTIRLLYEPKTKIVQDVVLGVDTGSKHVGVACVGNDKVLYQSQVELRDDIKRKMDSRRMYRRSRRNRKTRYRKARFLNRGNSIKKGRHCPTIVSKYYGHEREIEFCKKIIPVKDTVLETGKFDTQLMEKPWLQQYKWAYQRGVNYGYANAKEHALVRDKYTCQCCGKKNCRVEAHHIVFRSKNGSNDLENYITLCEDCHKAVHLGEIELKLNGKRKSDLRHATQMSIIRSMLLKKYQDAIETYGFVTKANRENLNIDKEHYLDACVIASGGLAFEPLDVLYRKRCVPTQNRCLSQGIRAEKKIPTGKVHGFKRYDKVKYLGVICFVSARRTRGDFVLMGIDNNTIDFRDIGGVQNPSYKFIKRLNARRSVLCMLQRIEKGGW

SEQ ID NO: 22402 - protein, 460 aa, unidentified; identical to SEQ ID NO: 20487
  REGION 1..460: note = Human gut metagenome

SEQ ID NO: 22403 - protein, 456 aa, unidentified; identical to SEQ ID NO: 4485
  REGION 1..456: note = Human gut metagenome

SEQ ID NO: 22404 - protein, 427 aa, Nostoc sp.; identical to SEQ ID NO: 2670

SEQ ID NO: 22405 - protein, 423 aa, Moorena sp.
MRVFVLNKNRQPLDPCKPARARIILSTGKAKVYRRYPFTIILTEEIEEPITHTHQLKIDPGAKTSGLAIVQNSRVVWGGELTHRGFQIRDALTSRRQLRRARRNRKTRYRKPRFLNRPWSEGWLAPSLMSRVYNILTWVKKLTRLCPITGFSQELVRFDTQKLQNPEISGFEYQQGTLYGYELREYLLEKWNRKCAYCGTTDTQLEIEHIKPLSKGGSDRVSNLAIACHSCNQAKSNQEVEHFLSGKPDVLKRVKAQAKRPLADAASVNATRWKLYHELKSIGLPVKVGSGGLTKFNRCRQNLPKTHWLDAANVGKIETLVIEVTHPLIITAKGHGTRQLCRTNKYGFPIRYCSRTKVHKGFQTGDIVRAVVTKGKKIGTYVGRVATRKSGSFNISTKSGLVQGISHKYCQFIHRKDGYAYTI

SEQ ID NO: 22406 - protein, 421 aa, unidentified; identical to SEQ ID NO: 11759
  REGION 1..421: note = Fermentation metagenome

SEQ ID NO: 22407 - protein, 424 aa, unidentified; identical to SEQ ID NO: 8297
  REGION 1..424: note = Human gut metagenome

SEQ ID NO: 22408 - protein, 294 aa, Parasutterella sp.; identical to SEQ ID NO: 13141

SEQ ID NO: 22409 - protein, 480 aa, unidentified; identical to SEQ ID NO: 7001
  REGION 1..480: note = Human gut metagenome

SEQ ID NO: 22410 - protein, 414 aa, unidentified; identical to SEQ ID NO: 2588
  REGION 1..414: note = Human gut metagenome

SEQ ID NO: 22411 - protein, 411 aa, unidentified; identical to SEQ ID NO: 5658
  REGION 1..411: note = Human gut metagenome

SEQ ID NO: 22412 - protein, 420 aa, unidentified; identical to SEQ ID NO: 3546
  REGION 1..420: note = Human gut metagenome

SEQ ID NO: 22413 - protein, 456 aa, unidentified; identical to SEQ ID NO: 13627
  REGION 1..456: note = Human gut metagenome

SEQ ID NO: 22414 - protein, 412 aa, unidentified; identical to SEQ ID NO: 6276
  REGION 1..412: note = Human gut metagenome

SEQ ID NO: 22415 - protein, 408 aa, unidentified; identical to SEQ ID NO: 20775
  REGION 1..408: note = Human gut metagenome

SEQ ID NO: 22416 - protein, 515 aa, unidentified
  REGION 1..515: note = Human gut metagenome
MTALEERLSKTEYIYVLSFDGKPQMPTRRKRHVLKLLKTGRARIAEDIPFTIRLAYRNAPVLQPVTLAEDPGRTNIGAAVLSPLGDLLFAAVIETRNKEIKKLMADRKKSRQASRRGERKARQRLAKRYGSMLKSGMIMRKLPMYAADKFVTCKFIRNTQARFCNRKRCPDWITPTVQHLVQTHLNIIRKISRFLPVTDIAIEVNRFAFIHMENPEAVGVDFQNGPLKGYDDVKEAIRTQQHGKCLMCKKPIGHFHHIVPRSRGGSDTIQNLAGLCPECHTKVHTDTAFRKDFNRKKTGQLKKYGALSALNQAVPFICKKLLEEYGEEHVHFCRGLDTSLIRTALGFEKTKKNQMHEVDAYCIGLAALEVNEVETPAFDHTFQIRQFRRQDRSIIHHQTGRSYYQGKEKVAQNRKPGFEQKTTALSQWYEEQVRIHGEKEAEKLRSQLRVEKSCRHYNEMDRFLPGAVFLYEGKRYVLSGRITNGKYLRACGQGMKNFPAAECTFIRHNAGLVFI

SEQ ID NO: 22417 - protein, 462 aa, unidentified
  REGION 1..462: note = Human gut metagenome
MSVLVIGRNGRALMPTNPRKARLLLKKKTASVVCRHPFTIQLLYKTGCATQKGSIGIDTGSQHIGVGITCGDKVILKDEHALRSSMEKRSLLATRAVMRRGRRYRKVRYRKPKWRHHTKRMYFEKANRRGQHWRKVKTTTQSPRSKGWLPPSLQSKCDHHFRIIDRYLKYLPDPITRNLVIETGRFDMARMNDPTIHGEMYQRGPMYDAENLRAYIFARDNYQCACCKAKAGTTRKADGTTVKLVAHHILFRSRGATDNPKYIISVCDHCHTTKAHQPGGILYSWMENNKKVARGLRDATFMNILRKRLFARYPQAAFTYGNITAADRKKLRLPKSHANDAVAISLFGKEASTVKNICQTMHYKQIRKSKRSLHEAIPRKGRKNPNTKAVRNKKNTTQVNGFKLWDSVLANGKKLFICSFTGTSAYLIDKNGCYISQPGKTYKQWPLSKLKRLHPNGNWLMA

SEQ ID NO: 22418 - protein, 420 aa, unidentified; identical to SEQ ID NO: 3089
  REGION 1..420: note = Human gut metagenome

SEQ ID NO: 22419 - protein, 449 aa, unidentified
  REGION 1..449: note = Human gut metagenome
MSSVLTGNPRCRPVLSPLGDLLFAAVIETRNKEIKKLMADRQKSRQASRRGERKARQRLAKRYGSMVKSGMVMRKLPMYAADKFVICKFIRNTQARFCNRKRCPDWITPTVQHLVQTHLNIIRKISRYLPVTDIAFEVNRFAFMHMENPEAMGVDFQNGPLKGYGDVKEAIRTQQHGKCLMCKKPITHFHHIVPRSRGGSDTIQNLAGLCTECHTKVHTDTAFRKDFDEKKSGQLKKYGALSALNQAVPFICKKLLEEYGEEHVHFCRGLDTSLIRTAFGFEKTKKNQMHEVDAYCIGLAALEVNEVETPAFDHTFQIRQFRRQDRSIIHHQTGRSYYQGKEKVAQNRKPGFEQKTTALSQWYKEQIRIHGEKEAEKLRSQLRVEKSCRHYNDMDRFLPGAVFLYEGKRYVLSGRITNGKYLRACGQGMKNFPAAECTFIRHNAGLVFI

SEQ ID NO: 22420 - protein, 393 aa, Moorena sp.; identical to SEQ ID NO: 5287

SEQ ID NO: 22421 - protein, 431 aa, unidentified
  REGION 1..431: note = Human gut metagenome
MPNKVYVINKHGRPLMPCSPAKARHLLDAGKAKVKKRTPFTIQLVYGSSGYTQEVILGVDAGSKTIGMSASTTKEELLSAEVKPRNDVVDLLSTRREFRRARRNRKTRYRKPRFDNRVRSRHKGWLAPSEEVKIQEHITAIKMVCRILPVSKVVVETAEFDLQLLKAIADGKPVPQGEDYQKGEMYGHYNVRQYVLWRDGYTCQCCGAHTTKKKEVRLHVHHLESRKTGGDAPGNLVTLCDSCHEKLHKGLITEDDFKKRKRRSTRDATFMGIMRKTLMQRLCSELPIPVIETRGYITKATREKLLVLPKSHTNDALAIAQGKHGFNVGYLPGIAQIDKIYTIRPVRHHNRQLHKATILKGGIRKSNQAEKYVFGYRLFDKVQFNGQDCFIWGRRTTGIFTIKTINGKMIKDGISFKKLKPVEKSTSYLIA

SEQ ID NO: 22422 - protein, 384 aa, unidentified
  REGION 1..384: note = Human gut metagenome
MSKRKLMQSRASSRRGRRHRKTRYRHPKWRPKAKRVYCEIPDRKGRHWKKKEITFASKRPKGWLPPSLQSKTDHHIRWIKKLQDLLPEGYRLSIELGRFDPARLKDPEIHGELYQKGPQYDYENVRAYVLDRDRYTCQVCGKKGGRLHVHHILYRSHGATDDPQYMATVCSDCHNTENHQQGGILYQWMQKQKKFTRGLRDATFMNILRKRLIEAFPGATFTYGNITKADRERLKLPKSHGNDATAIAIVKTGIMTVKDKEPVIYIQQVRRKKRSLHEETPRKGRKEPNRKASRYDKNTKAVTVTKRKNKKKISITGCLFDRVELNGKKGWISGFTDKSCYVKDENDQYIRTSPKYKQVSLSKLKILHHCGNWAIGARRSLGKG

SEQ ID NO: 22423 - protein, 279 aa, unidentified
  REGION 1..279: note = Human gut metagenome
VVVETAEFDLQLLKAIADGKPVPQGEDYQKGEMYGHYNVRQYVLWRDNYTCQCCGAHATKKKEVRLHVHHLESRKVGGDAPDNQVTLCESCHEKLHKGLIAEKDFKKRKRKSTRDATFMGIMRKTLMQRLCSELPIPVVKTRGYITKATREKLLVLPKSHTNDALAIAQGKRGFNVGYLPEIAQIDKIYTIRPVRHHNRQLHKATILKGGIRKSNQAGKYVFGYRLFDKVQFNGQDCFIWGRRTTGIFTIKTINGKMIKDGISFKKLKPVEKSTSYLIA

SEQ ID NO: 22424 - protein, 431 aa, unidentified; identical to SEQ ID NO: 4832
  REGION 1..431: note = Human gut metagenome

SEQ ID NO: 22425 - protein, 431 aa, unidentified
  REGION 1..431: note = Human gut metagenome
MDAWDIIVILNKRGKPLMPCSPAKARLLLKEKKAIVVRRTPFTIQLTIATGEAKQPVSLGVDAGYKHVGLSASTEKAELYASEVELRQDVSDLLSARRALRQSRRNRKTRYRAPRFDNRIRTKRKGWLAPSVENRINAHLSRIEAVLRLLPVTKITVETASFDMQLLKNPDISGKEYQEGEQLGFWNIREYVLCRDGHVCQHCYGRSKDPVLNVHHLESRRTGGDSPGNLITLCETCHKALHRGEITLKAKRGQSFRAEAFMGIMRWEVLNRLKASHPELEVNNTYGYRTKHARIANDIAKSHCADAFCIAGNLGAERLGEFFFQKQTRRNNRQIHKLSILKGGIRKRNQAPFEVNGFRLFDKVACKGEEGFIFGRRSSGYFDVRKLDGTRISAGISYKKLHLLEKRQTYLIEIRKEEAFPPLPEGRGLRA

SEQ ID NO: 22426 - protein, 400 aa, unidentified
  REGION 1..400: note = Human gut metagenome
KKAIVVRRTPFTIQLTIATGESKQPVSLGVDAGYKHVGLSASTEKAELYASEVELRQDITDLLSARRALRQSRRNRKTRYRAPRFDNRIRTKRKGWLAPSVENRINAHLSRIETVIRLLPVTKISVETTSFDMQLLKNSDIAGKEYQESEQLGFWNVREYVLFRDGHVCQHCHGRSKDPVLNVHHLESRRTGGDSPGNLITLCETCHKELHRGEITLKAKRGQSFRAETFMGIMRWEVLDRLKASHPKLEVQNTYGYRTKHARIVNGIAKSHCADAFCIAGNLGAERLGEFLFQKQTRRNNRQIHKLSILKGGIRKRNQVPFEVKGFRLFDKVACKGEEGFVFGRRSSGYFDVRKLDGTRISTGISYKKLRLLEKRQTYLTEIRKEEALPPLPEGRGLRA

SEQ ID NO: 22427 - protein, 493 aa, unidentified; identical to SEQ ID NO: 18934
  REGION 1..493: note = Human gut metagenome

SEQ ID NO: 22428 - protein, 430 aa, unidentified
  REGION 1..430: note = Human gut metagenome
MPKVYVLNRHGRPLMPCTPAKARHLLDAGKAKVRHRTPFTIQLLYGSTGYTQEVILGVDAGSKTIGLSAATETEELFSAEVKPRNDVVELMSARRQFRRARRNRTTRYRKPRFDNRVRSKHKGWLAPSVEVKIQEHMTAIRRACAILPVSKVVVETAEFDLQLLKAVAEGKPVPQGEDYQKGEMYGHYNVRQYVLWRDSYTCCICGVHGSVRKGVPLHVHHLESRRVGGDAPDNLVTLCTACHDKLHKGIIMAADIKKRKRRSTRDATFMGIMRMTLLRRLREQLPVPVVETRGYITKATRENLLVLPKSHTNDALAIAHGPQGFRAEYLPNIRQADRLYTIRPVRHHNRQLHKATILKGGVRKANQAEKYICGFRLYDKVLYNGIECFVWGRRTSGSFLLRQLNGEKVKDGVSYKHIKLLERSQSYLVA

SEQ ID NO: 22429 - protein, 430 aa, unidentified
  REGION 1..430: note = Human gut metagenome
MPKVYVLNRHGRPLMPCTPAKARHLLDAGKAKVRHRTPFTIQLLYGSTGYTQEVILGVDAGSKTIGLSAATETEELFSAEVKPRNDVVEMMSARRQFRRARRNRTTRYRKPRFDNRVRSKHKGWLAPSVEVKIQEHMTAIRRACAILPVSKVVVETAEFDLQLLKAVAEGKPVPQGEDYQKGEMYGHYNVRQYVLWRDSYTCRICGMHGSVRKGVPLHVHHLESRRVGGDAPDNLVTLCTACHDKLHKGIIMAADIKKRKRRSTRDATFMGIMRMTLLRRLREQLPVPVVETRGYITKATRENLLVLPKSHTNDALAIAHGPQGFRAEYLPNIRQADQLYTIRPVRHHNRQLHKATILKGGVRKANQAEKYICGFRLYDKVLYNGIECFVWGRRTSGSFLLRQLNGEKVKDGVSYKHLKLLERSQSYLVA

SEQ ID NO: 22430 - protein, 403 aa, unidentified
  REGION 1..403: note = Microbial mat metagenome
LARNLLNNGKAAVFKRYPFTIILKIEVTATQKSITLKIDPGSKTTGIALVQGENVIFGAELTHRGQTITASLESRRSLRRGRRNRHTRYRQARFFNRTRQKGWLAPSLQHRVETTLTWVNKFIRLAPIGSIVQELVRFDLQQLENPEISGVEYQQGELAGYEVREYLLNKWDRKCAYCGVENVPLQIEHIHPKAKGGSDRISNLCLACENCNTRKGTQGIEQFLSKKPEILKRILSQAHRPLKDATAVNSTRWALFNRLRMTGLPVSTGSGGLTKFNRTRLNLAKTHWLDAACVGNIGALEILTNKPLLIKATGHGTRQICRTDKFGFPSRYVPRFKFVKGFQTGDIVKAVVTSGKKIGTYIGRVAVRTTGSFNISTVGGLMQGINQKYCSLLHRKDGYSYAA

SEQ ID NO: 22431 - protein, 508 aa, unidentified
  REGION 1..508: note = Human gut metagenome
LTFVSIYVQRVYGRTRRFFQSAALHSGRQARGNIYPAGQTAGVLQKEVRTMAAVYVISASGKPLMPTTRCGHIRGLLNAGKARVVEREPFTIQLKYETPDVTQPLYLGIDPGRTNVGSAVVREDGECVFTAQLTTRNKDVPKLMKARKQFRMAHRRLKRRCKRQRRAKAAETLSQKGEFQRLLPGYEEPILCKGIRNKEARFNNRQRPAGWLTPTANHLLLTHLNMVKKLQKLLPITDVVLEVNRFAFMAMETPSIRRWQYQQGPLYGKGSVEDAVYAQQDGHCLFCGKPIAHYHHVVPQHKNGSETPENRVGLCNEHHDLVHKDRAWDAKMKETKAGLNKKYHALSVLNQIIPALTEQLTAMFPQHAFVTTGKDTADFREDYGIAKEHHLDAYCIACSVLAEPTKVAAPTGKPHRLMQFRRHDRQVCHKENIKRVYLSEGKAVATNRHKAIEQKDDSLEEFRKTHTQQEVSALTVKDHQPVYKDMRRFMPGGVFLFNGKVHTLHRSH

SEQ ID NO: 22432 - protein, 420 aa, unidentified; identical to SEQ ID NO: 6219
  REGION 1..420: note = Human gut metagenome

SEQ ID NO: 22433 - protein, 511 aa, Ruminococcus sp.; identical to SEQ ID NO: 10153

SEQ ID NO: 22434 - protein, 470 aa, unidentified; identical to SEQ ID NO: 2825
  REGION 1..470: note = Human gut metagenome

SEQ ID NO: 22435 - protein, 406 aa, unidentified; identical to SEQ ID NO: 18587
  REGION 1..406: note = Human gut metagenome

SEQ ID NO: 22436 - protein, 434 aa, Anoxybacillus sp.; identical to SEQ ID NO: 5674

SEQ ID NO: 22437 - protein, 417 aa, Petrotoga sp.; identical to SEQ ID NO: 14528

SEQ ID NO: 22438 - protein, 447 aa, unidentified; identical to SEQ ID NO: 5316
  REGION 1..447: note = Human gut metagenome

SEQ ID NO: 22439 - protein, 414 aa, unidentified
  REGION 1..414: note = Mouse gut metagenome
MPCSPAKARLLLKEKKAIVKRRTPFTIQLTIATGETKQPVSLGVDAGYKHVGLSASTEKAELYASEVELRQDITDLLSARRELRRARRNRKTRYRAPRFDNRISTKRKGWLAPSVENRIDAHLSRIEAVLRLLPVTKITVETASFDMQLLKNPDIAEKEYQEGEQLGFWNVREYVLFRDGHVCQHCHGRSKDPVLNVHHLESRRTGGDSPGNLITLCETCHKALHHGEITLKTKRGQSFRAETFMGIMRWEVLNRLKASHSKLEVNNTYGYLTKHARIKSGITKSHCSDAFCIAGNLGAKRLGEFLFQKQTRRNNRQIHKLSILKGGIRKRNQAPFEVNGFRLFDKVACKGEEGFIFGRRSSGSFDVRKLDGTRISAGISYKKLRLLEKRQTYLTEIRKEEALPPLPEGRGLRA

SEQ ID NO: 22440 - protein, 423 aa, Moorena sp.
VLDTTKKPLTPCQPARARALLRDGKAAVWRTVPFTIILKVAMPDAIVKPISCKIDPGSKQTGLALVDSDGRVVFAAVLEHRGNAIKAGLESRRSIRRGRRARNTRYRQARFLNRIRPEGWLPPSLQHRVETTLTWVNRFRRLCGIVEIAVERVKFDMQLMRNPEISGVEYQQGTLLGFTVREYLLEKWGRKCAYCAVENVPMQIEHIHPKANGGSNAVSNLALACEPCNKKKGTLDIKVFLKNKPELLKKVVAQAKQSLSDAAAMNATRNKLFVELLNTGLPVETGTGAQTKFNRTRLDYPKEHWIDAACVGESGATVTLNPELKPLLIKATGHGTRQMCTTDKFGFPRRAAKGGKAVNSVSTGDYARIVQPKGKYIGSYVGRISSINTTTNFVTMKVFGKTISFNSKLVTIIQKADGYAYVH

SEQ ID NO: 22441 - protein, 500 aa, unidentified
  REGION 1..500: note = Sediment metagenome
MTSPLREEQTFGRSGYRQVRASLPLYRSVSCRGVWGHFEGAEHKKPSRLGEANFTAARRDSNGGNYMQRVLVLSSTRKPLMPCHPARARQLLRQGKAAIFRRYPFTIILKDREDGATQTIEVKIDPGSKTTGIALTAEFDRGKTVVWASEIEHRGQQVKKALEARSNVRRSRRNRKTRYRPARFNNRLRPEGWLPPSIMSRVHNVNTWALRIKNFAPVYSFVVETARFDTQKMQNPEISGVEYQQGDLLGYEVREYLLEKWQRRCTYCDKTGVSLEVEHIVPKSRGGSDRVSNLTLACRPCNEKKGNLTASEFGYPKVQTQAKQPLKDAAAINATRYAIGNMLKKHGLPISFWTGGRTKHNRTKQNYPKAHWIDAACTGETGSAVNLDPNMQILRIAAKGHGNRCMCATDKYGFPSRYRTNQKRHFGFQTGDIVRAKVPKGKYPGIREDRVTIRASGNFTIKTANKKVQEINHRYCSIIHRADGYQYLTVQKYLKQTGGG

SEQ ID NO: 22442 - protein, 415 aa, unidentified; identical to SEQ ID NO: 9067
  REGION 1..415: note = Human gut metagenome

SEQ ID NO: 22443 - protein, 448 aa, unidentified
  REGION 1..448: note = Fermentation metagenome
MSVYVINQRKQLLMPTTEQKARLLIKQGKAKVIKIKPFIIQLLYATGETKQPITLGIDSGYNNIGFSAITDKKELIVGELKLLQNIKERLLERATYRRQRRSRLRYRKPRWNNRIKSKQKGWLAPSLQHKLNSHIKFIDSLYKILPITKCIIEIANFDIQKIKNPNIKGIEYQQGDMLGFWNLREYVLYRDGHKCQNLNCKNKDKNPILEVHHIKYKSFGGTNNPNNLITLCTKCHTSDNHKKGKFLYKWCQKGKKVREFKDATFMSIIRWYLVNQLKEKYNNVSFTYGYITKNHRIEYKIEKSHYNDAFCIAKGINQIRNNKIWQLQQCRRNNRSLEKFYDAKYIDIRTGHKVSGSELNNGRRTRNKNKNSENLKVYRGQKLSKGQRRIRKSKYFYQPNDLIKYEGKIYTVKGTQNGGKYVALKEIKKVPKVELIKPYKFQKGIVWN

SEQ ID NO: 22444 - protein, 461 aa, unidentified
  REGION 1..461: note = Human gut metagenome
VQPLYLGIDPGRTNIGVAVVKANGTAVFTAHLETRNKEVPKLMQDRKKARRARRTNGRRCRRQRRAKANGTISKKCVKQDTAQSKNPSKRAKEIGIIKRRLPGYKKDVLCIGIKNKEAKYTNRTRPEGWLTPTANQLLQTHINLVRKIQKFLPISDVVLEVNKFAFMRLDNPDIQKWQYQQGPLYQKGSLENAVSEMQEHHCLFCDKPIDHYHHVVPQSENGSNTIANIVGLCAEHHNLVHKDAAWQKKLAEEKVGLNKKYGALSVLNQIIPALTNKLSVLFPKHFFVTAGKSTHDYRATHGVSKDHWLDAYCIACSVLPSDVCDSNINNHMPYELKQFRRHARRALNNENMNRVYTLNDKAVAINRHKATEQEAASLEEFRKEHPNDVCKLKVKEHHPTYRNMNRNYPGSIFLVGKHVHIMQGIAGSKDGKATTYKDSNANSITASKCKFVAKNSGILFV

SEQ ID NO: 22445 - protein, 536 aa, Anaerostipes sp.; identical to SEQ ID NO: 8340

SEQ ID NO: 22446 - protein, 460 aa, unidentified; identical to SEQ ID NO: 18004
  REGION 1..460: note = Human gut metagenome

SEQ ID NO: 22447 - protein, 436 aa, unidentified
  REGION 1..436: note = Human gut metagenome
VQHPRVAAKGVTMRVFVKNMRGEPLMPCTQRKARLLLKAGKARICKYHPFTIQLDYATGETKQECTVGIDTGSKNIGIAVRSEDKVLFKGEVELRQDVKSNLDTRRIYRRSRRNRKTRYRKPRFLNRKRPDTWLPPSLENRIRHTFRWIDAFYLLVPSPCLHIEVGKFDTAKMIDPKIQGVDYQHGQTYGYYDVRYFVFARDHYTCQVCGKSRDKILQTHHIRYRSNGGTDRADNLITVCTDCHTGRNHQKGGILYQWQEENKKVRSYKEPPFMNILRQRIFQRYPYAHITYGSETTQRRKELCLGKTHYNDAIAISGIQTITEDPEEWLLIRQSRKKKRSLHEANPRKGRKKPNRTQERSSKNTPSYRNLYLNDKVSVLGRTGYISGFTNGGCYVKDTDGQYITLPGKTYKQVGIANVHRICHNNNWQYITKRAL

SEQ ID NO: 22448 - protein, 518 aa, unidentified
  REGION 1..518: note = Human gut metagenome
MANLKLIDELLEKTEYIYVLGIDGKPQMPTNRKVRVRSLFKSGMAKIVDTVPFTMQLLYENKPVLQPITIAEDPGRTNIGAAVLTQLGDLVFSAVVETRNKSIKKLMSDRKAHRQASRHGERKARQRLAKKYKSMIKAGMIMRKLPQYAADKFVACKVIKNTEARFCNRKRMPDWLTPTVNHLVQTHINLIKKVEKYLPITDVAIEVNRFAFMQMENPDASGVDFQNGPLKGFDDVKAAIREQQHGKCLMCKNDIEHFHHIIPRSKGGSNTIQNQVGLCKKCHAKVHTDAEFQAKLKDKKEGLIKKYGALSALNQAVPFICKELLKIYGAEHVHFCTGKDTSLIRSSLGYEKTKDNQMHEVDAYCIGLAAIGADKAKRPDFNNVFKIKQFRRQDRQLVHYQKERTYYLDGKKIATNRNPRFEQKGDALSDWYKEQIKIYGQYEAEKMRSRLTVKKSKRSYNTTKRLMPGCVFYYDGQRHVMTGQSSYGRYLRAYNCGTKDFPASKCQVIQFNAGLVFV

SEQ ID NO: 22449 - protein, 341 aa, unidentified
  REGION 1..341: note = Human gut metagenome
LRVFVLNKRGKPLMPCSPAKARLLLKEKKAIVVRRTPFTIQLTIATGESKQPVSLGVDAGYKHVGLSASTEKAELYASEVELRKDITDLLSARRALRQSRRNRKTRYRAPRFDNRIRTKRKGWLAPSVENRINAHLSRIEAVLRLLPITKITVETASFDMQRLKNPDISGKEYQEGEQLGFWNVREYVLFRDGHVCRHCHGRSKDPVLNVHHLESRRTGSDSPDNLITLCETCHKALHRGEITLKAKRGQSFRAQAFMGIMRREVLNRLKASYPELKVHETYGYLTKHARIANGIVKSHGADAFCIAGNLGAERLGEFFFQKQTRRNNRQIHKLSILKGGI

SEQ ID NO: 22450 - protein, 318 aa, Parasutterella sp.; identical to SEQ ID NO: 12461

SEQ ID NO: 22451 - protein, 413 aa, unidentified; identical to SEQ ID NO: 12499
  REGION 1..413: note = Human gut metagenome

SEQ ID NO: 22452 - protein, 425 aa, unidentified; identical to SEQ ID NO: 7553
  REGION 1..425: note = Human gut metagenome

SEQ ID NO: 22453 - protein, 406 aa, unidentified
  REGION 1..406: note = Human gut metagenome
LDANNKQLTPIKEQKAWFLIRKKRATLVSKYPMVIQLKKKIPDKEICKDEVRCGIDDGGLHVGVALVQKCQTRNKVVFKGVIEQRNDVKHLIDVRCGYRRYHRYHKRYRSARFNNRNSSKREERIAPSILQKRQATIRVINQLNKWINITNYWLEDVAIDIRALTDGYKPYRWQYQKSNRLDENIRKAVILRDGCKCMECGKSNCRLEVHHIKPRRLKGSSTLDNLITLCTKCHQKTESVEELYMDRYFALLNSSDNKNLNYAQHVMIGKKWLREQLSNLGMLYLTNGGDTANKRIDWDIAKSHSNDAICITDLRPDTCEIKEWAIKPMRRQSKAKTDNVLGIKHRDLVEYTFRNGETHRGYVTALYPEQNAINFQSPTKHCKKVNAKKCKVLWKYSKIYWLDNVG

SEQ ID NO: 22454 - protein, 420 aa, unidentified
  REGION 1..420: note = Human gut metagenome
LKVFVLNMRGKPLMPCSPAKARHMLKAGKAVVVRRTPFTIKLTIATGETKQDVTLGVDAGARHVGISATTEKEEVFASEVKLRQDITGLLADRLAFRRARRNRKTRYRSPRFNNRVRSKHKGWLASSVENRIQAHMSRIEAVCRLLPVTKIVIETASFDIQKIRNPEVEGTGYQQGDQLGFWNVREYVLFRDGHVCQHCHGRSRDKILNVHHLESRKTGGDAPNNLITLCETCHKAYHAGKIKLKVKRGQSFRAEAFMGIMRWTLLDRVRKTHPKLPVENTYGYLTKHKRIALGLPKTHCADAFCIAGNLKALRRGDFLFQQQTRKHNRQIHKCSILKGGVRKLNQTPFLVKGFRLFDKVKCKGRIGFIFGRRSFGYFDVRTLDGVRLSAGVSFKKLMLVEKRTTFLTQLRKECGASSPS

SEQ ID NO: 22455 - protein, 470 aa, unidentified; identical to SEQ ID NO: 2825
  REGION 1..470: note = Human gut metagenome

SEQ ID NO: 22456 - protein, 434 aa, Moorena sp.
MKVFVLNMHGDPLMPCNPRKARILLRDKKAVVAKQMPFTIRLLYGSSGYKQPISIGVDAGSKHIGIAATTQKEVLFAEELRPRNDVVNLLSTRRQNRRARRNRKTRYRAPRFSNRVHSKHKGWLAPSVEVKIQEHITAIKRIQRILPITEVHVETAEFDAQRLKAMEEGKPLPVGTDYQLGEMHDSYNVRQYVLKRDNYTCQCCGKHGDNVKLHVHHLETRKTGGNSPGNLITLCEDCHKAIHAETKVLPVNKAKRRISLMRDAAFMGIMRKTLLERLRAELNIPVTGTYGYITKLYRDLYHIEKSHINDAIVISKNFTAAVDDVWYYAKAVRHHNRQIHKLTILKGGIRKRNQAPHVVRGCRLFDTVKYQNDLYFVFGRRTSGGMNIRTLDGNKVNNGYLSIKRFHILYSNAGTLLERRKAIPPMDESTGFLA

SEQ ID NO: 22457 - protein, 436 aa, unidentified
  REGION 1..436: note = Human gut metagenome
VQHPRVAAKGVTMRVFVKNMRGEPLMPCTQRKARLLLKVGKARICKYHPFTIQLDYATGETKQDCTIGIDTGSKNIGIAVRSEDKVLFKGEVELRQDVKSNLDTRRIYRRSRRNRKTRYRKPRFLNRKRPDTWLPPSLENRIRHTFRWIDAFYLLVPSPCLHIEVGKFDTAKMIDPKIQGVDYQHGQTYGYYDVRYFVFARDHYTCQVCGKSRDKILRTHHIRYRSNGGTDRADNLITVCTDCHTGRNHQKGGILYQWQEENKKVRSYKEPPFMNILRQRIFQRYPYAHITYGSETTQRRKELCLGKTHYNDTIAISGIQTITEDPKEWLLIRQSRKKKRSLHEANPRKGRKKPNRTQERSSKNTPSYRNLYLNDKVSVLGRTGYVSGFTNGGCYVKDTDGQYITLPGKTYKQVGIANVHRICHNNNWQYITKRAL

SEQ ID NO: 22458 - protein, 406 aa, unidentified; identical to SEQ ID NO: 8741
  REGION 1..406: note = Human gut metagenome

SEQ ID NO: 22459 - protein, 462 aa, unidentified
  REGION 1..462: note = Human gut metagenome
MSVLVIGRNGRALMPTNPRKARLLLKKKTASVVCRHPFTIQLLYKTGCATQEGCIGIDTGSQHIGVGITCGDRVILKDEHALRSSMEKRSLLATRTVMRRGRRYRKVRYRKPKWRHHTKRMYFEKANRRGQHWRKVKTTTQSPRLKGWLPPSLQSKCDHHFRIIDRYLKYLPDPITRNLVIEAGRFDMARMNDPTIHGEMYQRGPMYDAENLRAYIFARDNYQCACCKAKAGTTRKADGTTVKLVAHHILFRSRGATDNPKYIISVCDHCHTTKAHQPGGILYSWMENTKKVARGLRDATFMNILRKRLFARYPQSAFTYGNITATDRKQLRLPKSHANDAVAISLFGKEASTVKNICQTMHYKQIRKSKRSLHEAIPRKGRKNPNTKAVRNKKNTTQVNGFKLWDSVLADGKKLFICSFTGTSAYLIDKNGCYISQPGKTYKQWPLSKLKRLHPNGNWLMA

SEQ ID NO: 22460 - protein, 431 aa, Phormidium sp.; identical to SEQ ID NO: 8638

SEQ ID NO: 22461 - protein, 393 aa, unidentified
  REGION 1..393: note = Human gut metagenome
LQFYRKEHGIMQYVYVLNKHGEPLMPCSPGKARLLLKQQKACVVKRTPFTIKLLFGSAGYKQPITLGVDAGSKHVGLSASTEKRELYSEEFTPRSDVVELLSTRRQNRRSRRNRKTRYRVPRFDNRVHSKHKGWLAPSVEVKIQEHITVIKHICKILPISLVRVETAEFDTQRLKAMLAGKPLPVGTDYQLGEMYDEYNVRQYVLKRDHYTCQCCGTHNTAKKVVKLHVHHLESRKTGGNAPSNLVTLCTTCHKNLHKGRVTLDGKERGKPLRDAAFMGIMRKTLMVRLKEELPIPVQGTYGYITKMRREQNDIKKSHVNDARCISKHPLAEPCSVCYRTKAIRHHNRQTHKANFSKGGIRKRSQMPYVVEGYRLWDKVLYKGQECFVSGRRA

SEQ ID NO: 22462 - protein, 520 aa, Moorena sp.
MMVLVQNKDGTLLSSCHPARARILLKKGMAKVVATYPFTIKLTYRVKNPVFLPTRVILDDGKTCGLGVVQENRTHNLVLCKAEMKTRGEEISDNLKDRRTCRAQRRNRRNKKRGREDEIKIRYRKKKQEYPASIRADVEAKINAVKRLMKMYPVTEIVLEPVKLDIVKVINPTVKGKDYQRGLSYGIEADSRNRKRRLAILKRDGYRCLYCGSPVTGENAHVHHFVQRKHGGSKRYDIQGTLCEKCHTSVITGELALAFDLEKYPSVRAAGRAMHGRYLLERELKKLGVPVAIRYGYETKELRERFGLPKSHGDDAVVLGCNPEKKLVDRSTVYKIKLHARHGGRKLFDANPGVAAYRGQADRQPHVDRSHMAVDDHDHETNRRNRSYRRHVRNKYYKKLKAEGKFNYELLPGKTRLNEIFTVNRAILLTESGPVLVKNQRIRKWRYPYPWPERGRVIERYDLVKTQKGDIGIVTSLMSDCTVRVDFVRKREGYKTNFSFYKPEMLTIIQKGSSQTWVIQ

SEQ ID NO: 22463 - protein, 411 aa, unidentified; identical to SEQ ID NO: 3917
  REGION 1..411: note = Human gut metagenome

SEQ ID NO: 22464 - protein, 418 aa, unidentified; identical to SEQ ID NO: 7605
  REGION 1..418: note = metagenome

SEQ ID NO: 22465 - protein, 417 aa, unidentified; identical to SEQ ID NO: 9081
  REGION 1..417: note = Human gut metagenome

SEQ ID NO: 22466 - protein, 434 aa, unidentified
  REGION 1..434: note = Human gut metagenome
MGFLTTWARRKILPKGKVAEMPKIKKYAFVLDAKRKQLDPTIEQNAWRLVRQYKARLVSKFPMIIQLNKVMDNPNNDEIRCGIDDGANHVGMALVQKCQTRNKVLFKGTIEQRKDVKHLLTVRRGYRRYHRYHKQYRSARFLNRASSRRSGRLMPSIIQRKQAILRVIDRLRQWVRIDGYWLEDVKIDIRALTDGYKPYRWQYQKSNRLDNNLRLAAIHRDGCKCVECGKTKTRFEVHHITPRKTGGADTISNLITLCPKCHAKTFGRESQFADRYYALIGSTGHVEGLDDAQRVMQGKHWFREQLQQRGSLVLTTGGNTANKREDWDIAKTHSNDAVCITDLKPENIDIEEWTIKPMRRKNKAGVDEVCGFHHRDYVTYTYRNGETHTGYVTAMYPDKNQLNFQSPTKHCKRVNALKARLLWRYDKIYWFKCA

SEQ ID NO: 22467 - protein, 437 aa, unidentified
  REGION 1..437: note = IscB polypeptide
LRAFVLDMHKNPLMPCHQARARKLLKSKKAKVFRMFPFTIILQQETTNQVQKVEIKIDPGSKTTGVALVSNQKVIWACNLSHRGSLIKKALLQRRQVRRSRRFRKTRYRQARFLNRKRISEWLPPSLMSRVDNVSTWVQKLNSLVRLTSACIETVRFDTQKMQNPEISGIEYQQGELVGYEVREYLLEKFNRKCVYCGAENIPLEIEHLHPRSLGGSDKISNLALACHKCNQKKSNTPLELFVKDKTNLAKIKATAKAPLADTAAVNATRYAIGRAVKEIILDTSFWSGGRTKCNRTKQNYQKDHWIDAACVGTTGENIWLDPNDNILLVQAAGRGNRQKCLVNKFGFPCSKPRTIKRVFDFSSGDICRLDKSKGKDAGRYVGKISVRVRGDFDIQVPKEKNKTGKVGANWQFFKLVQRADGFAYQMAGTTARAATT

SEQ ID NO: 22468 - protein, 425 aa, Nodularia sp.; identical to SEQ ID NO: 2911

SEQ ID NO: 22469 - protein, 526 aa, unidentified
  REGION 1..526: note = Human gut metagenome
MLWKFYRLIGRTSVRPISLAYRKKELFMRPVYVLDMNGKPLMPTCRFGKVRRMSKSGEVKVVDTLPFTVQLDRPTKTHVVQSVTLGCDPGRTNIGLAAVRSDGTDLYRSHCETRNKEIVDLMDARRAARRASRRGERLARKRLAAKHETATTFPDGRKLPGYEKPIMLKDIINTEARFNNRVRPAGWLTPTATQLLRTHLNLIKRISRIFPVSDIALEINKFAFMQLDEPDKNKWNIDFQHGPLYGTGGLKAAVRQLQNDTCLLCQENVIEHFHHLIPRSKRGDNTINNIAGLCQKCHEAVHKSADTAEKLSTLKKGQTKRYGGTAVLNQIIPKLVEELGKTYHEHLHLTYGWQTKEFRTKHKLEKTHDTDAYCIAAGTMQTVNPNIRTDVYEIKQFRRHNRANIHHQTERTYKLNGQTVAKNRRKRTDQKTDSLAEWFENTVKQYGQQKAEHLRAELKVRKSTRYYNSKDRMMPGAVFQYEGNRYVVTGQLSGGQYFRAYGKGNRNFPAKKIRIISLNRGLVYVA

SEQ ID NO: 22470 - protein, 423 aa, unidentified; identical to SEQ ID NO: 4062
  REGION 1..423: note = metagenome

SEQ ID NO: 22471 - protein, 430 aa, unidentified; identical to SEQ ID NO: 8226
  REGION 1..430: note = Human gut metagenome

SEQ ID NO: 22472 - protein, 453 aa, unidentified; identical to SEQ ID NO: 12227
  REGION 1..453: note = Human gut metagenome

SEQ ID NO: 22473 - protein, 481 aa, unidentified
  REGION 1..481: note = Human gut metagenome
MWTTVLRDEKPYGRSSALPVRECVSITKKRGHRMVAVLSKTGIRLMPTSSYRARKLLAKKKAVICGYRPFTIRLTERETGDVQPVELAVDTGYFHVGNSLKTAKHELAAVEIRTLMDEKQRYDDRRQYRRMRRSRLRYRAPRFDNCRRPEGWLAPSIQGRMEQNLAFLRRVLSVVPVTRIVMEMGQFDTQVLKAVEEGRPLPEGTDYQQGERYGIATLREAVFTRDNYTCQCCEKTVHDGVILHVHHIVYRSQGGTNRMGNLITVCEKCHTPKNHKPGGKLYKWNPTVKSFKGATFMTAVRWIMYRSVKESFPDVDVRITYGAKTKLQRRTLDITKSHVNDAYVMGDFHPKHRARPVILQKKRRNNRILEKFYDAKYIDARDGSKKTGQQLFNGRTNRNHNTDTENLRLYRGMKLSKGKRAIRTTRYKIQPHDILVYQGQEMEASGCHNKGTRVMTTAKKSLPIGKVRVRRYSGGYYAVAE

SEQ ID NO: 22474 - protein, 512 aa, unidentified; identical to SEQ ID NO: 3720
  REGION 1..512: note = Human gut metagenome

SEQ ID NO: 22475 - protein, 412 aa, unidentified
  REGION 1..412: note = Human gut metagenome
MVYVISQNGQPLMPTENHAKVRILLKNKKAKVIKKCPFTIQLAYDSTNYTQDITLGVDSGSKHIGLSATTEDKVLFESDVELRNDIVNLISTRRQNRRTRRNRKTRYRKPRFNNRKRNNGWLAPSIQNKVNSHLTVVRKVHEILPITKIIVEVASFDIQKIKNTAISGEEYQKGEQLDFWNVREYVLFRDGHTCQCCKGKSKDKVLNVHHIESRKTGGNAPNNLITLCETCHTGYHKGIVKLPKTIHRGMSFKDATFMGIMRWAFYNKLKEIYPNVNLTYGYITKNTRIKNNLPKEHYIDARCISKHPNAVSDGTVYYQKKVRCHNRQIHKSTILKGGYRKRNQAPYTVMEFRLYDKVMWKGQKCFIFGRRSTGRMDIRLLNGTKINTSVGHKNLRLIEMRKNYLIEQRKVG

SEQ ID NO: 22476 - protein, 469 aa, unidentified
  REGION 1..469: note = IscB polypeptide
MLRTKSLQVELKNTLQDAPLVLNSVSPVLNREETLSVQDKVLVCNSPEVDLLQHAGGQNLRVSDNMHVFVLNKRKEVLMSTSCRNARLLLKSGKAVVIKRFPFIIQLTYTTGENKQKITCGVDSGYSNIGFSCITSTKELIRGTVKLDNFTSKHLCEKRMYRRNRRNKLRYRSPRFLNRRRSDNWLPPSIKRRYQTHINLINKLKQFLPISHVTIEIGNFDIQKFNNPDINGKGYQQGNLYNYSNLKSFVLSREKHICQLCNKSDLKNDKWKLHHIILKSHGGTDKADNIALLHEKCHKKLHKQNLHDKLKKNKQYKESTFMNIIKSRFKNSLNCKLVFGYETYCRRNELKLKKSHSNDSFVIAGGTNQKKSMKYSIKQRRRNNRTLQLNRKGFKPSIRRKRYKLQPYDLVKIDNNIYDVIGTHCLGKRVKVKSEKNRKNEISIKKIDWHFNNNSLIWKIERSGNSSRP

SEQ ID NO: 22477 - protein, 512 aa, unidentified; identical to SEQ ID NO: 17474
  REGION 1..512: note = Human gut metagenome

SEQ ID NO: 22478 - protein, 408 aa, unidentified; identical to SEQ ID NO: 4810
  REGION 1..408: note = Human gut metagenome

SEQ ID NO: 22479 - protein, 412 aa, unidentified; identical to SEQ ID NO: 4932
  REGION 1..412: note = Human gut metagenome

SEQ ID NO: 22480 - protein, 440 aa, Clostridium sp.; identical to SEQ ID NO: 5468

SEQ ID NO: 22481 - protein, 431 aa, unidentified; identical to SEQ ID NO: 4377
  REGION 1..431: note = uncultured cyanobacterium

SEQ ID NO: 22482 - protein, 340 aa, unidentified; identical to SEQ ID NO: 21471
  REGION 1..340: note = Human gut metagenome

SEQ ID NO: 22483 - protein, 417 aa, unidentified
  REGION 1..417: note = Human gut metagenome
MPCSPAKARLLLKEKKAIVKRRTPFTIQLTIATGESKQPVTLGVDSGYKHIGLSATTEKAELYASQVELRQDITDLLSARLALRRSRRSRKTRYRAPRFNNRVASKRKGWLAPSVENRIAAHMSRVEAVMRVLPVTAITVETAAFDTQLLKDPDIAGGAYQQGEQLGFWNVREYVLFRDGHVCQHCSGKSKDPVLNVHHIESRRTGGDAPNNLITLCETCHKAFHRGEIKLKVKRGKSFKAETFMGIMRWTLFERLKKAHPELSVRNTYGYLTKHKRISHGIAKSHCADAYCIADNLGAKRLEGFFFQKQTRKHNRQIHKLSILKGGLRKKNQAPYEVKGFRLFDKVICKDEEAFIFGRRSSGSFDVRRLDGTRISAGISYKKLRLLEPRTTYLTEFRKEAALPPLHKCRGFRAEFL

SEQ ID NO: 22484 - protein, 423 aa, Arthrospira sp.; identical to SEQ ID NO: 3221

SEQ ID NO: 22485 - protein, 435 aa, Moorena sp.
MQNYVFVIDTNKQPLNPISPKKARRLLDKGKAAVFRMYPFTIILKTAIRQSRRCANANPTISPCQIKIDPGSKVTGFALVQDDQVIWGMELEHRGGLIKKKLESRSAVRRGRRNRNTRYRKPRFLNRKRPEGWIAPSLEHRVLTIETWVKRLIKFCPINEIWVERVKFDTQKMQNHEINGIEYQQGDLAGYEVREYLLEKWGRECAYCGKQNIPLQIEHIHPKSKGGSDSAKPTLRERVNNLCLACEKCNQRKGNRPIEEFLKKKPGLLQKIKNKAKQPLSDAAAVNTTRNRIVKVLKEVKPVVTGTGAQTKYNRTKLGLSKQHWIDAACVGDIKTLVLRTSQPLLVTCKGQGGRQKAALNKYGYPIRHNPLKPIKGWSSGDIAKNLLTGEFGRVNPRSKSNSFNYTAPGKKAISLHLKNLLRVHRKDGYSYGFC

SEQ ID NO: 22486 - protein, 456 aa, unidentified
  REGION 1..456: note = Human gut metagenome
MSTCVCVLSNSGERLMPTFRFGKVRRLLKDGKAKIVKHHPFTIQLLYDSKANTQPIEICEDVGYNYIGISVKSESHEYVSAQYDTLQDEKEHHDDCRKYRRTRRNRLRYRKPRFDNRKRSEGWLAPSLEHKKQLNIRLIERYVSVIPITRATVEVGSFDTMLLQAIQKGESKPEGVDYQKGPRYNLATLREAVFYRDNYTCQVCGRKIADGAILHMHHMFYWKGRHGYQLDELVTACEKCHTPANHQKGGKLYGFGKDKKFANLSGAAFMNAVRWQIVDALHATYGKEFVTITYGAMTKEKRIALQLEKTHNNDAYAMGDYHPACRCKFRHYQKRRRNNRVLEKFYDATYIDARTGNKAKGKELFNGRISRNHKKDSENLHKYRSKKVSKGRRSIRRQRYAIQPYDTVRLENKTYITSGCHNKGTRLLIPANGKSKSVAISKVQVVCHAGAWIQII

SEQ ID NO: 22487 - protein, 416 aa, unidentified
  REGION 1..416: note = metagenome
MVYVLDKNGQPLMPTDRHRKVRLMLQSGQAKVIKRCPFTIQLTYNTGHQAQEISLGIDAGSKHIGVSATTKIKVLYEADVELRNDIVNLLSSRRELRRGRRNRKTRYRQAKFNNRRRGNGWLAPSIRQKIGTHLTVVENICKMLPISRIMVETASFDIQKIKNPDIQGAEYQQGDQLEFWNVREYVLFRDGHTCQCCKGKSKDKILNVHHIESRKTGGNAPNNLITLCEPCHTGYHKGTVQLPKAIKRGMRFKDAAFMGIMRWAFYEALKQQYEPVGTPVHNTYGYITKHTRIAYNLPKEHYVDARCISGNPEASSNGEYYYQKKVRCHNRQMHKLTILKGGIRKQNQATYLVKGYRLFDKVSYQGKGYFVFGRRQSGFFDIRTLSGEKVNKGSLNCKKLKFIATRTYYLTERRAV

SEQ ID NO: 22488 - protein, 406 aa, unidentified; identical to SEQ ID NO: 2866
  REGION 1..406: note = Human gut metagenome

SEQ ID NO: 22489 - protein, 407 aa, Bacillus sp.; identical to SEQ ID NO: 16579

SEQ ID NO: 22490 - protein, 414 aa, unidentified; identical to SEQ ID NO: 5310
  REGION 1..414: note = metagenome

SEQ ID NO: 22491 - protein, 413 aa, unidentified
  REGION 1..413: note = Human metagenome
LKVFVLNMRGKPLMPCSPAKARHMLKAGKAFVVRRTPFTIKLTIATGETKQDVTLGVDAGARHVGISATTEKEEVFASEVALRQDITGLLADRLAFRRARRNRKTRYRSPRFNNRVRSKHKGWLASSVENRIQAHMSRIDAVCRLLPVTKIVIEAASFDVQKIKNPTIEGTDYQQGDQLGFWNVREYVLFRDGHICQHCRGRSKDPILNVHHLESRKTGGDAPNNLITLCETCHKAYHAGKIKLKVKRGQSFRAEAFMGIMRWTLLDRVRKTHPKLPVENTYGYLTKHKRIALGLPKTHCADAFCIAGNLKALRRGDFLFQQQTRKHNRQIHRCSILKGGVRKLNQAPFLVKGFRLFDKVRIGGQIGFVFGRRVRGTFNIRRLDKTVIGTDINCKKLSLLETRKTFLTELRKE

SEQ ID NO: 22492 - protein, 464 aa, unidentified; identical to SEQ ID NO: 6574
  REGION 1..464: note = Human gut metagenome

SEQ ID NO: 22493 - protein, 451 aa, unidentified; identical to SEQ ID NO: 2593
  REGION 1..451: note = Human gut metagenome

SEQ ID NO: 22494 - protein, 413 aa, unidentified
  REGION 1..413: note = Mouse gut metagenome
MTNYAFVLDANGKQLSPTKEQKAWFLIRKKRAILISKYPMVIQLNREILDDKVCKDEIRCGIDDGGLHVGVALVQKCKTKNKTIFKGTMEQRNDVKYLMEVRKGHRCHHRYYKRYRQARYNNRISSKRKGRVAPSILQKKQAIIRVINQLNKWINITNYWLEDVAIDIRALTDGYNPYRWQYQKSNRLDENIRKAVILRDGCKCKECGKSKCRLEVHHIKPRRLNGSNTLDNLITLCEKCHQNTEGREELFMKKYFSLLNSSDNKNLNYASHVMIGKNWLREQLSNFGILYLTNGGDTGNKRIDWNIGKSHCNDAVCITNLNPDTCDVKEWIMKPMRRQSKAKTDNVLGIKHKDLVEYTYKNGETHRGYVTALYPKQEALNFQSSRKHCKKVNAKKCRLLWKYQKIYWLESET

SEQ ID NO: 22495 - protein, 396 aa, unidentified; identical to SEQ ID NO: 4508
  REGION 1..396: note = Human metagenome

SEQ ID NO: 22496 - protein, 415 aa, unidentified; identical to SEQ ID NO: 16389
  REGION 1..415: note = Human gut metagenome

SEQ ID NO: 22497 - protein, 408 aa, unidentified; identical to SEQ ID NO: 4079
  REGION 1..408: note = gut metagenome

SEQ ID NO: 22498 - protein, 417 aa, unidentified
  REGION 1..417: note = Human metagenome
MFVYVISKDGQPLMPTIRFGKVRRLLRDKKAKVIRSCPFTIKLLYEPESLVVQEVILGQDTGSKHVGTACVANNKVLYQSEVVLRDDIKKKMDRRRTFRRSRRQRKTRYRKPRFLNRTNSAKKDRLSPSARSKVQSHIDEIEFCKKILPVSKIVLEVSQFDTHLMKNPALINEKVKRWGYQQGFNYEYSSRREAILNRDSYTCQCCGKKHVRLEVHHIIFRSLGGTDDERNLITLCEKCHKAIHDGILILTKKPKKLNLKHATQMSIIRSQLLKIYPDAIETFGFVTKENRNNLYLQKGHFIDACVIASGGKEFKQSNWLFRKRRVAKQNRQLCKGVRGEKKIPAGKVFGFKRFDKVKYLKEICFIKGRRNNGAFALMDIDNNAIDFRSKGGRKEPSYKLLERLNAKRSALCINQRI

SEQ ID NO: 22499 - protein, 413 aa, unidentified
  REGION 1..413: note = Human gut metagenome
MRGKPLMPCSPAKARHMLKAGKAFVVRRTPFTIKLTIATGETKQDVTLGVDAGARHVGISATTEKEEVFASEVALRQDITGLLADRLAFRRARRNRKTRYRAPRFNNRVRSKHKGWLAPSVENRIQAHISRIEAVCRLLPVTKIVIETASFDIQKIRNPEVEGTGYQQGDQLGFWNVREYVLFRDGHICQHCRGRSKDPILNVHHLESRKTGGDAPNNLITLCETCHKAYHAGKIKLKARRGTSFRAEAFMGIMRWTLLDRVRRAHPELPVENTYGYLTKHNRIALALPKTHCADAFCIAGNLNALRRGDFLFQRQTRTHNRQIHKCSILKGGVRKLNQAPFLVKGFRLFDKVKCKGGIGFVYGRRSSGFFDVRTLDGVRLSAGISYKKLMLVEKRTTFLTQLKKEHGASSPS

SEQ ID NO: 22500 - protein, 267 aa, unidentified
  REGION 1..267: note = Human gut metagenome
MVYVQDIDGKPMMPTTRHGKVRRLLKDNKAVVVNTCPFTIKLTYKTSDYKQEIVLGVDAGTKHVGLSATTKSKELYSGEVILRNDVVELLSTRRESRRARRNRLRYRKPRFENRVKSKRLGWVAPSVRHKVDAHIRVIDNICSTLPISRIIVEIAQFDTQKIKNPDISGNEYQEGDQLGFWNVREYVLARDGHKCQHCKGKSKDPILNVHHIESRKTGGDSPSNLITLCETCHKEYHKGNIDLKVKRGKSLRDAAVMGIMNGSCTRS

SEQ ID NO: 22501 - protein, 406 aa, unidentified; identical to SEQ ID NO: 9317
  REGION 1..406: note = Human gut metagenome

SEQ ID NO: 22502 - protein, 444 aa, Desulfotomaculum sp.
MRTAKDYETQNRVFVLDKHHRPLMPCHPARARELLRKGKAVVHKLYPFTIRLKDKTGGATGPLRLKIDPGSKTTGLAIIRESDGYILWAADLHHKQFVTVNKDGKPVTVVGKRASLRRSRRSRKTRYRPRRINNRRRSEGWLPPTVRAKADCVLGWVEKLLRLCPITAISIETARFDTQKLQNPEISGVEYQQGTLFGYEVREYLLAKYGRECQYCHGKSKDPVLEIDHIVPRSRGGSDRVSNLTLACRTCNLDKGNKTAEEYGHPEVQAEAKKPLKDAAHVNAARWYIWERLKAISSASGLELEMGTGGRTKHNRTIQGLPKAHYLDAACVGASTPELKNTYIKPLEIRAVGRGNRRMARVDAYGFPKGHRSRKKVHFGFQTGDIVKAIVTKGKYSGVYKGTVAVRASGYFDIKDVHGKVIVQGINYKYMRLLQRADGYTYAI

SEQ ID NO: 22503 - protein, 494 aa, unidentified; identical to SEQ ID NO: 12763
  REGION 1..494: note = Human gut metagenome

SEQ ID NO: 22504 - protein, 386 aa, unidentified
  REGION 1..386: note = Human gut metagenome
YGSSGYTQEVILGVDAGSKTIGMSTSTKKEEVFAADVTPRNDVVDLLSTRREFRRARRNRKTRYRKPRFNNRVRSKHKGWLAPSVEVKIQEHITSIKMVCRILPVSKVVVETAEFDLQLLKAIEEGKPVPQGEDYQQGEMYGHYNVRQYVLWRDNYTCQCCGAHLTKKKEVRLHVHHLESRKVGGNAPGNLVTLCDRCHEKLHKGLITEKDLKKRKHRSTRDATFMGIMRKTLMQRLCSELPIPVAETRGYITKATREKLLVLPKSHTNDALAIAQGKHGFNVGYLPGIAQIDKIYTIRPVRHHNRQLHKATILKGGIRKSNQAEKYVFGYRLFDKAQFNGQDCFIWGRRTSGYFVVKTIDGKVIHNSASFKKLRLVERASNYLIA

SEQ ID NO: 22505 - protein, 469 aa, unidentified
  REGION 1..469: note = Human gut metagenome
MYKGELSTMSVLVIGRNGRPLMPTTRRKARILLKENKASVICRNPFTIHLWYKTGCATQEGSIGVDTGSQNIGIVVTAGDRQILKAEHILRSSMEKRELIEARAAFRRSRRYRNTRYRRPKWKHHTKRVYNEVPDSKGRHWRKVKISTQSPRPEGWLPPSLQSKCDHHTGIIDRYLAFLPDCISKNLVIEAGRFDMARMQDPSIHGEMYQRGPMYDAENLKAYVFARDGYRCTCCGQKAGSIRKDGTAVKLLVHHVLFRSRGATDNPKYLASVCDACHTAAAHRPGGKLHQWMLEAKEFTRGLRDATFMNILRRRLFTKYPEAAFTYGNITAADRKRLLLEKSHANDAVAISLFGKDVSSVKGTCQTLHYRQVRRYKRSLHEANPRKGRKAPNTKAVRNAKNTSEVKGFHLWDTVKAGGQKLYITGFTGTSAYLTDQYKNYVSPPGKNYRQWTLSKITRLHPNGGWIMF

SEQ ID NO: 22506 - protein, 453 aa, Moorena sp.; identical to SEQ ID NO: 11367

SEQ ID NO: 22507 - protein, 327 aa, unidentified
  REGION 1..327: note = Marine metagenome
MAIFVLDKKKQPLMPCSEKRARLLLARGRAVVHKRYPFTIRLKNRVGGEAQPLRLGIDPGSKTTGLALIREPDSQQRHVLCLFELIHRGFQIKKALQQRAAFRRRRRSANLRYRAPRFNNRIKPKGWLAPSLQHRVDTVMAWVNRLSKSAPITGISQELVRFDTQKLESPEISGVEYQQGTLLGYEVREYLLEKWGRECAYCGTADTPLEIEHVVPRSRGGSNRVSNLTLSCHPCNAEKDSQTLTDFFATNKGLKKRLKANGLSADAQLERVQRQLKQPMRDASAVNATRWALFSALKTTDLPVAVSSGGRTKYNRQRLNIPKTHAL

SEQ ID NO: 22508 - protein, 363 aa, unidentified
  REGION 1..363: note = Human gut metagenome
MPDKVYVISRLGHPLMPCSPAKARHLLDDKKAKVVKRMPFTIRLLYGSTKYIQPIILGVDAGSKTIGLSASTAKEEVFAAEVMPRNDVVENLSTRREFRRARRNRTTRYRKPRSDNRVRSNHERWLAPSVKVKIQEHITSIKRVRTILPISKVVIETAEFDLQLLKAIQEGKPIPEGEDYQKGEMYGSYNVCQYVLWRDNYTCICCGVRGTPKNPVRLHVHHFESRKYGGNAPDNHGTLCDDCHKKFHLGIITDVKLKTRRRQSTRDAAFMGIMRKTLMWRLRTELFIPVAETKGYITKATREKLLVLPKSHTRDALAIAQGRHGFGIKEYAYVEPANHIYTVRCWRSWVWKTMRTITKKLFP

SEQ ID NO: 22509 - protein, 515 aa, unidentified
  REGION 1..515: note = Human gut metagenome
MIPNERRHLMPYIYVIGMDGKPQMPTKRRRHVQKLLDTGKARITERVPFTIQLLYDNDPVLQPVILAEDPGRTNIGLAALDLKGNLLLSAAVETRNKEIAKLMEKRRQCRRASRNGERKARQRLAKKYGTMIRGGMRMRKLPQYAADAFITCKVIRNTQARFCNRRRPDGWLTPSARHLVQTHINLVHKVQKYLPVTDVVIEVNRFAFMQLEDPAICGVDFQTGPLKGYDDRDAAVYDLQDGKCLMCKHEITQYHHIVPRSRNGSNTIGNIAGLCDQCHDRVHKDADFAEQMKEKKEGMDKKYGALSVLNQAIPFICKQLETEFGRGHVHYCTGRETSLVRRSTGYQKTKKNQLHEVDAWCIGALALAEIPENVPDFKEVHLIQQFRRQNRSLVNAQTERVYKLGGRMVAKNRKKRTGQETDALEDWYNRQVETYGKQEADCMRSRLKVTKSERRYNNPGRMMPGAVFLYEGVRYVMRGQHCNGAYLQAVGMGSRDFPARKCKILTRNTGLVFVS

SEQ ID NO: 22510 - protein, 427 aa, Moorena sp.; identical to SEQ ID NO: 3550

SEQ ID NO: 22511 - protein, 451 aa, Moorena sp.; identical to SEQ ID NO: 4938

SEQ ID NO: 22512 - protein, 442 aa, unidentified
  REGION 1..442: note = Human gut metagenome
MSTSVFVLDKKHRPLMPCHPARARRLLRAGRARVVKRFPFVIRLVDRTVEQSEVQPVLIKLDPGSRETGAAVVRDDGKKRHHALAFFVIEHRGGAIRDALKARSAFRRRRRSQNLRCRSPRFLNRVKPKGWLPPSLRHRVETTLSFVRRMCRYLPVSGIAAELVKFDSQKLQTPEVSGIEYQQGTLFEYEVREYLLEKFGRKCVYCGAEGVPLNIDHVVPRAKGGSNRVSNLVLACVSCNQKKGARSLEDFLKGKPEVLARVRRELKTPLRDAAAVNATRWVLFNELKATGLPVETGSGALTKFNRHAFGVEKEHWLDALCVGRLNGAVTRKGLNVLEIRCMGRGSRQRTRLTKYGFPRGYLMRQKCVHGFATGDMVEANVPKGKKAGLWRGRVAVRVSGSFNIQTPKGVIQGVGWKHCRLISHNDGYGYAWLGHAPHSSPA

SEQ ID NO: 22513 - protein, 416 aa, unidentified
  REGION 1..416: note = Human gut metagenome
MPCSPAKARHLLDEGKAKVKKRTPFTIRLVYGSSGYTQEVILGVDAGSKTIGMSASTTKEELLSAEVKPRNDVVDLLSTRREFRRARRNRKTRYRKPRFDNRVRSKHKGWLAPSVEVKIQEHITAIRRVCGILPVSKVVVETAEFDLQLLKAIADGKPVPQGEDYQQGEMYGHYNVRQYVLWRDNYTCQCCGAHPTKKKEVRLHVHHLESRKVGGNAPGNLVTLCDRCHEKLHKGLITEKDLKKRKHRSTRDATFMGIMRKTLMQRLCSELPIPVVETRGYITKATREKLLVLPKSHTNDALAIAQGKHGFNASYLPGIVQSDKIYTIRPVRHHNRQLHKAAILKGGIRKSNQAEKYVFGYRLFDKVQFNEQDCFIWGRRTTGIFTIKTINGKMIKDGISFKKLKLLEKSTSYLIA

SEQ ID NO: 22514 - protein, 408 aa, unidentified
  REGION 1..408: note = Human gut metagenome
MVYVQDIDGKPMMPTTRHGKVRRLLKANKATVVNLCPFTIRLTYATSGYKQEIVLGVDAGTKHVGLSATTKSKELYSSEVILRNDIVELLSTRRELRRTRRNRLRYRKPRFNNRIKSKRTGWVAPSVRHRIDAHIRVIDNICSTLPISRVIVEVAQFDTQKIKNPDISGDEYQEGDQLGFWNVREYVLARDGHKCQHCKGKSKDPILNVHHIESRKTGGDSPSNLITLCETCHKEYHKGKIDLRVKRGKSLRDAAVMGIMKWKLYEELKSRYDNVSMTFGYITKYNRIKYGIEKYHISDAFVISKNFNALRLEYHYKVRLVRRHNRQIHKQKVLKGGAKKPNQSPFEVFGFRLFDRVMFEGNYYFIFGRRKSGSFNIRDINGGNQRNVTYKKLKLSIGKRFMIQKEMN

SEQ ID NO: 22515 - protein, 380 aa, unidentified
  REGION 1..380: note = Human gut metagenome
LVSKYPMVIQLMKEIPENEICQDEIRCGIDDGGLHVGIALVQKCKTKNKVVFKGTMEQRNDVKHLMEVRRGYRRYHRYHKRYRQARFDNRKSSKREGRIAPSILQKRQATIRVIHWLNKWINITNYWLEDVSVDIRALTDGYQSYRWQYQKSNRLDENIRKAAILRDGGKCMECGKSNCRLEVHHIKPKRRNGSNTLDNLITLCESCHQKTEGQEELYMDRYFSLLKSSDNKNLNYAQHVMIGKMWLRKQLSGLGVLYLTSGGDTANKRIDWNIEKSHTNDAVCITDLQPDTCDIKEWAIKPMRRQSKAKTDHVLGIHHRDLVEYTFKNGETHRGYVTALYPEQKAINFQSPTKHCKKVNARKCKLLWNYSKIYWFENAS

SEQ ID NO: 22516 - protein, 419 aa, Moorena sp.; identical to SEQ ID NO: 2828

SEQ ID NO: 22517 - protein, 568 aa, unidentified
  REGION 1..568: note = Human gut metagenome
VLALLQVLVILRVQVQLIRLYSDISSEMIYNLVPTRERSFMKQKKQKVMIYILNKKGKPLMPTTRCGHVRKLLNSKKAVVVNSNPFTIRLKYDTPNGVQDVFAGIDSGRENIGSGASNEDGDCLYLGELKTSNKSIKLKMTERAGFRKERRRHDRQNKQRKARKDHTEIQNGNADICRTTISCKSVQISYPAAEKSVTHKIIRGKEGKFANRHRDEGWITPSARQLVQMHMNDLRSICKILPISHVTLERVAFDFQKLENENIKVWEYGKGKLYGYDSPEEYIHDVQNGKCLVCGKPHIDYLHHIIPRSKGGSDKVSNIAGLCYDCHYGPMGVHNCQNTQDRLPELKSEANKQYKVSLLNSVMPVLIEEMDKFCEANSIIFSICEGHDTAKVRDMYDLQKDHCIDGFAISLVDRNVKSVDVMPDRIYQKQRYKKKSKNIIQKRNCREYYDDKKLVAVNRHKGTDQKADSLEEYMNTYAETHTTDECKKHFDSLTVKPARRTYTFHKKGCICPFHIGDKVRYEKKNKIKGNTKVETFICESIHFYKDENKAKVEHNKTKSKRMKFCRVL

SEQ ID NO: 22518 - protein, 265 aa, unidentified
  REGION 1..265: note = Human gut metagenome
VTDVSTVYVLNKDGKPLMPTTRCGHVRYLLKEKKARVVKTKPFTIQLLYETNDVVQPLYLGIDPGRTNIGVAVVKADGTAVFTAHLETRNKEIPKLMKKRKDSRRARRTNGRRCRRQRRAKANGTISKKCVKQTTAQNGSVSKRAKKIGVIKRHLPGCEKEVLCIGIKNKEAKFSNRTRPEGWLTPTANQLLQTHINLVKKIQKFLPISDVVLEINKFAFMRLDNPNVQKWQYQQGPLYQKASLEEAVSEMQEHHCLFCKKKIDH

SEQ ID NO: 22519 - protein, 412 aa, unidentified
  REGION 1..412: note = IscB polypeptide
MQKTYIQNKDGEPLMPTTRCGAVRRWLRDNKAVVIHLCPFTIRLNFDCENNTQEVIIGLDTGAVNVGCSAVSNNKCLYASETKLRTDISNKMQRRAMYRRSRRTRNTRYRQPRFDNRKSKRQLPPSLQSKTDSTVKVVRQLAKILPISKVIVEIAKFDTQKLQNPDIKGKEYQKGVTEGYDNVRAYVFERDKYTCQICKKQGGILQTHHIKQRKDGGTDRPENLATVHKDCHTDFHLGQIEYKFRKPKEYCMATQITILKNFIVKELKKDFDVKVTFGHITKRNRMRLNLPKSHWSDAVAICSPKKIERINTMFKRVCISRGRYQQTKGIRSEKKLPSGKVFGFSIWDKVELPDKRIGFIKGRRIRGDFEICDINGKKFEKSFKYSNLNIIQYARGGVSIPHTTKVMCTLET

SEQ ID NO: 22520 - protein, 388 aa, unidentified
  REGION 1..388: note = Human gut metagenome
KKCVKQATAQNGSVSKRANEIGVIKRHLPGCEKNVLCIGIKNKEAKFSNRTRPEGWLTPTANQLLQTHVNLVKKIQKFLPISDVVLEVNKFAFMRLDNPNVQKWQYQQGPLYQKASLEEAVSEMQEHHCLFCKNTIDHYHHVVPQHKNGSNTIGNIVGLCAKHHDLVHKDTSWQEKLAKKKTGLNKRYGALSVLNQIIPALTKELSSLFPKHFFATNGKSTYDYRAAHGVSKDHWLDAYCIAGSVLPNDACDNNINNRVPYELKQFRRHDRRALHKENMSRVYTLNGKSVATNRHKAIKQTTDSLEEFRQRQPNDVCKLKVKEHHPEYRNPKRNFPGCVFLVGKHTHVMQGTSGSHNGKADGYYDTNGNSYSSGKCKFVVKNEGIVFT

SEQ ID NO: 22521 - protein, 465 aa, unidentified
  REGION 1..465: note = Human gut metagenome
MSTCVCVLGNNGERLMPTIRLGKVRHLLKDGKAKIVKHHPFTIQLLYDSETNVQPIEICEDVGYNYIGISVKSESHEYVSAQYDTLQDEKEHHDDCRMHRRTRRNRLRYRKRRFDNRKRDKGWLAPSLGHKKQLNISLIEQYVSVIPITHATVEVGSFDTMLLQAIQKGEAKPEGVDYQKGPRYNLATLREEVFYRDDYTCQVCGRKITDGAILHMHHMFYWKGRHGNSLSELITVCEKCHTPANHQKGGKLYGFGEDIKFANLSGAAFMNTVRWQIVNVLYAAFGKPFVTFTYGAMTKEKRIALHLEKSHNNDAYAMGSFHPVNRCAFEHYEKVKRNNRILEKFYDSQYIDTRTGELTNGKSLFNGRISRSHKKDSENLHKYRGKRICKGHRALRRKKVALNPGDLVSLNGEILVVYGTHTKKNGSVNVEFKTPSRDGKKSASLKKLKIVKTSNLMHSAWTKVS

SEQ ID NO: 22522 - protein, 429 aa, Allochromatium sp.
MNRVFVLTNNRQPLMPCHPARARTLLRTRKAAVYRMQPFTIILLERAEGDTQPVEVKLDPGSKTTGIALVADFPRGRTVIWAANLHHRGQAIRSALTDRRAFRRGRRARKTRYRAPRFLNRTRPAGWLPPSLRARVENVRHLTAKLQARAPMASAAVETVRFDTQALQNPEISGVEYQQGELAGYEVREYLLEKWNRTCAYCGARDVPLEVEHIVPRSRGGSDRVSNLTLACRPCNERKGSQPIEEFLKGKPEVLRRIQAQARTPLKDAAAVNATRYAIGEAVKSVGLPTTFWSGGRTKRNRVSQGYAKDHWIDAACVGESGAAVRIPEGMVALEIKAMGRGRRRVHGNDRYGFPKGAPRSAKRVHGFQTGDLAKLTCTTGKSAGVHVGRIASIRARGWFVLAKHDRPAREFRLLQRADGYDYMTATNS

SEQ ID NO: 22523 - protein, 430 aa, unidentified
  REGION 1..430: note = Human gut metagenome
MPKVYVLNRHGRPLMPCTPAKARHLLDAGKAKVRHRTPFTIQLLYGSTGYTQEVILGVDAGSKTIGLSAATETEELFSAEVKPRNDVVELMSARRQFRRARRNRTTRYRKPRFDNRVRSKHKGWLAPSVEVKIQEHMTAIRRACAILPVSKVVVETAEFDLQLLKAVAEGKPVPQGEDYQKGEMYGHYNVRQYVLWRDSYTCCICGVHGSVRKGVPLHVHHLESRRVGGDAPDNLVTLCTACHDKLHKGIIMVADIKKRKRRSTRDATFMGIMRMTLLRRLWEQLPVPVVETRGYITKATREKLLVLPKSHTNDALAIAHGPQGFRAEHLPNIRQADRLYTIRPVRHHNRQLHKATILKGGVRKANQAEKYICGFRLYDKVLYNGIECFVWGRRTSGSFLLRQLNGEKVKDGVSYKHLKLLERSQSYLVA

SEQ ID NO: 22524 - protein, 279 aa, unidentified
  REGION 1..279: note = metagenome
VVVETAEFDLQLLKAIADGKPVPQGEDYQKGEMYGHYNVRQYVLWRDGYTCKCCGAHTTKKKEVRLHVHHLESRKVGGDAPDNQVTLCESCHEKLHKGLIAEKDFKKRKRKSTRDATFMGIMRKTLMQRLCSELPIPVVKTRGYITKATREKLLVLPKSHTNDALAIAQGKRGFNVGYLPEIAQIDKIYTIRPVRHHNRQLHKATILKGGIRKSNQTEKYVFGYRLFDKVQFNGQDCFIWGRRTTGIFTIKTINGKMIKDGISFKKLKPVEKSTGYLIA

SEQ ID NO: 22525 - protein, 471 aa, Streptomyces sp.; identical to SEQ ID NO: 14708

SEQ ID NO: 22526 - protein, 453 aa, Moorena sp.
MTYVYVLSRSGRPLMPTARCGHVRILLKEKKARVVCGRPFTVQLLYDTDEAEPYLYGGTDPGRTNIGNAVVTEDGECVYRDKVETRNDEVAKGMSDRKKNRQARRRGERLVRKRRAKRCGTLSTKLGSGRLIPGTKKPTLVKDIINQEARFRNRKKRQLITPSVKQLVDTHLNHVDQIRKILPVKGWCLEANRFAFMKLEDGSVRGIDFQNGRLKGYASVDDFVYERQKGKCFCCGAPIEHYHHVKEQNDNGFDGPENKVGLCNSCHTKIHIGELELDVEGFGKKYQALSVLNQAIPYIYLGLVERFDEENVFICAGYDTKEIREAAGLDKDHDIDALCIASMATGVIPKQPEEQAFSVKQYRRHDRAKINNQPERTYKLDGKTVARNRKPRIDQKGLALSQWYEKQVRLCGRKEADRMLSRLKVRKSYRRYNNLYRVMPGAIVRHDGRIEVM

SEQ ID NO: 22527 - protein, 414 aa, unidentified; identical to SEQ ID NO: 8876
  REGION 1..414: note = Candidatus Thiomargarita nelsonii

SEQ ID NO: 22528 - protein, 442 aa, Sutterella sp.; identical to SEQ ID NO: 3791

SEQ ID NO: 22529 - protein, 371 aa, unidentified
  REGION 1..371: note = Human gut metagenome
VDAGSKFIGLSASTDKAELYASEVELRTDVVDLLSSRRELRRARRNRKTRYRAPRFNNRVHSKNKGWLAPSVENKINAHLSRVDAVRQLLPVTKIVVETASFDIQKIKNPDIEGADYQWGEQLGFWNVREYVLFRDGHRCCHCHGKSKAPILNVHHLESRKTGGDAPNNLITLCETCHKAYHAGKIVLKAKRGQAFRDAAFMGIMRWTFFNRLKAQCPELDVRNTYGYLTKNTRIRHGLDKSHHTDAFCIAGNLGAKRLGEYFFQKQTRKHNRQIHKMSILKGGVRKRQQAPYEVKGFRLFDKVRYGSREAFIFGRRNSGYFDIRLLKGEKVSPAISYKYLQLLESRKTFLTQLIKKDAIPPATEVAGFLA

SEQ ID NO: 22530 - protein, 490 aa, unidentified
  REGION 1..490: note = bioreactor sludge metagenome
MAVFVLDRSGKPLMPCSEKRARKLLAAGRARVHRVMPFVIRLVDRRVQDSALQPLRVKIDPGSKTTGLALVREAESIDAASGEVRRELFVLNLFELVHRGRQISEALTGRRAFRRRRRGANLRYRAPRFLNREKGRGWLAPSLRHRIETTLAWVRRLQRWAPVIALSQELVRFDMQKMENAEIAGVGYQQGTLAGYELREYLLEKFNRTCCYCDAKDVPLNIEHIHPKAQGGTNRVSNLAIACIPCNTKKGARSIETFLAKDPARLARIRAQLKRPLKDAAAVNATRWALFEALKATGLPVETGSGGLTKFNRTRFTLPKGHALDAACVGQVNAIHAWSRPTLQIKCTGRGSYQRTRLTQYGFARGYLMRTKSVKGFRTGDLVRASVTAGKKLGEYIGRVAVRATGSFNIQAVDAVVQGISHKYCRIVQRGDGYGYAWSKTPSNTGKNNFPASSRLLERGRCRVHQPGGRLRLNVATQQASQGGGIHRSI

SEQ ID NO: 22531 - protein, 413 aa, unidentified
  REGION 1..413: note = Human gut metagenome
MTNYAFVLDANNKQLTPTKEQKAWFLIRKKRATLVSKYPMVIQLKKKIPDKEICKDEVRCGIDDGGLHVGVALVQKCQTRNKVVFKGVIEQRNDVKHLIDVRCGYRRYHRYHKRYRSARFNNRNSSKREERIAPSILQKRQATIRVINQLNKWINITNYWLEDVAIDIRALTDGYKPYRWQYQKSNRLDENIRKAVILRDGCKCMECGKSNCRLEVHHIKPRRLKGSSTLDNLITLCTKCHQKTESVEELYMDRYFALLNSSDNKNLNYAQHVMIGKKWLREQLSNLGMLYLTNGGDTANKRIDWDIAKSHSNDAICITDLRPDTCEIKEWAIKPMRRQSKAKTDNVLGIKHRDLVEYTFRNGETHRGYVTALYPEQNAINFQSPTKHCKKVNAKKCKGLWKYSKIYWLDNVG

SEQ ID NO: 22532 - protein, 418 aa, unidentified
  REGION 1..418: note = Human metagenome
GKPLMPTTRLGKVYRLLKTKKAHIVSYEPFTIQLDYQPDTHVIQPMTLGVDSGAIHSGYSVANEHREYYNAEVIARNDISNRLSDRRMYRRNRRYRKTRYRQPRFNNRKNKKKGWLPPSLEQKVAVQVNEINHIHRYFPIETIIVETAEFDIQKIKNPDISGIEYQQGTLQGYNIRNYLLEKHGRKCFYCGKTVSGFEVEHMLPKSKGGSNCIDNLTLSCHECNEKKGTLTAEEFIQQTLPVKKATAKLKQLPNEKRLFKYMAHMNTTRWTLYDAIKERYPNVKMTYGYITKYNRIQAGLPKAHHIDAKCITGFATVPSMSQTVVKVKMRRHNRQLHRATFSKGHVRKAACLPTTVFGFQLYDLVCFNNHRYYIKGRRSSGAFALVSVEGLKNEERMYKKLTLLAHTNAYLTNQYVNA

SEQ ID NO: 22533 - protein, 441 aa, unidentified
  REGION 1..441: note = Human gut metagenome
MSVSVFVQDRKHRPLMPCRPARARRLLKSGRARVVKRFPFTIRLVDRFLEDSSVQPVLVKIDPGSRHSGFVVVRADEQGHHHGLFFIDIVHRGESIRDALTARRNCRRRRRGNLRHRAPRFLNRTKPQGWLPPSLQHRVDTVTSWVSKLTGLVPVTGLVEELVKFDAQKLQNPEISGTEYQQGTLFEYEVREYLLEKFGRRCVYCGAENVPLNIDHVVPKARGGSNRISNLVLACVDCNEKKGSQPVEVFLKNRPEVLDRIKRRLKTSLAHAATVNATRWSLFNALKAFGLPVETGSGALTKFNRHTFGVPKEHWLDALCAGRVNGVHYPEGMGILQVRCTGRGNYQRTRVDKYGFPRGYLTRQKRVHGFATGDMVEVVVPSGKKAGTYRGRVAVRKSGYFNIQTPEGVIQGIGWRHCRLLSFNDGYGYAWLRPAPHSSPV

SEQ ID NO: 22534 - protein, 414 aa, unidentified
  REGION 1..414: note = Human gut metagenome
MPCSPAKARLLLKEKKAIVKRRTPFTIQLTIATGEAKQPVSLGIDAGYKHVGLSASTEKAELYASEVELRQDITDLLSARRALRQSRRNRKTRYRAPRFDNRIRTKRKGWLAPSVENRINAHLSRIEAVLRLLPVTKITVETASFDMQLLKNPDISGKEYQEGEQLGFWNIREYVLCRDGHVCQHCYGRSKDPVLNVHHLESRRTGGDSPGNLITLCEMCHKALHRGEITLKAKRGQSFRAEAFMGIMRWEVLNRLKASHPELEVNNTYGYRTKHARIANDIAKSHCADAFCIAGNLGAERLGEFFFQKQTRRNNRQIHKLSILKGGIRKRNQAPFEVNGFRLFDKVACKGEEGFIFGRRSSGFFDVRKLDGTRISAGISYKKLHLLEKRRTYLTEIRKEEVLPPLPEGRGLRA

SEQ ID NO: 22535 - protein, 456 aa, Halomonas sp.; identical to SEQ ID NO: 16180

SEQ ID NO: 22536 - protein, 423 aa, unidentified; identical to SEQ ID NO: 7434
  REGION 1..423: note = Cyanobacteria bacterium UBA11148

SEQ ID NO: 22537 - protein, 429 aa, unidentified
  REGION 1..429: note = Human gut metagenome
LLTFRKAHGIMYVYVLNKHGEPLMPCSAHKARVLLKNKKACVVKRTPFTVKLLYGSAGYKQPITLGVDAGSKHAGLSASTETHELYREQFTPRNDVVDLLSTRREFRRARRNRKTRYRAPRFNNRVHSKHKGWLAPSVEVKIQEHITVIKHVCQIMPILLVRVETAEFDTQRLKAMLEGKPLPVGTDYQLGEMYDEYNVRQYVLKRDNYTCQCCGAHATKTKQVKLHVHHLESRKTGGNAPSNLITLCPTCHKAIHEGKKTLGTKKRGKPLRDAVFMGIMRKTLLARLHKELSIPVQQTYGYITKMLREKNNLPKSHMNDALCIAKHPKAAPCENCYRSKAVRHHNRQIHKATILKGGIRKNNQAPYIVKGFRLWDKVRYDGQECFISGRRATGYFALRKLDGAIVTNSASYKKLRLLETAKNYLRERM

SEQ ID NO: 22538 - protein, 433 aa, unidentified
  REGION 1..433: note = Human gut metagenome
AKIVKHHPFTIQLLYDSKTNTQPIEICEDVGYNYIGISVKSKSHEYVSAQYDTLQDEKEHHDDCRKYRRTRRNRLRYRKPRFDNRKRSEGWLAPSLEHKKQLNIRLIERYVSVIPITRATVEVGSFDTMLLQAIQKGESKPEGVDYQKGPRYNLATLREAVFYRDNYVCKVCGRKATEGAILHMHHMFYWKGRHGNSLDELLTVCEKCHTPANHQKSGKLYGFGENVKFADLSGAAFMNTVRWQIVNELYAAFGKDFVTVTYGAMTKEKRIALHLEKSHNNDAYAMGEFHPNCRCTFEHYEKVRRNNRILEKFYDSRYIDIRTGEIATGKELFNGRINRNHKKDSENLHKYRGKRLYKGHRALVRKKVNFNPGDLVSLNGEVLVVHGTHTNKKGAVNVEFKTPAKNGRKSANLKKLKIVKAAGSIHPAWEKVS

SEQ ID NO: 22539 - protein, 351 aa, unidentified
  REGION 1..351: note = metagenome
ASEVELRQDVSDLLSARRTLRQSRRNRKTRYRAPRFDNRIRTKRKGWLAPSVENRINAHLSRIGAILRLLPVTKITVETASFDTQLLKNPDISGKEYQEGEQLGFWNVREYVLFRDGHACQHCHGRSKDPVLNVHHLESRRTGGDSPGNLLTLCETCHKALHRREIKLKTKRGQSFRAEAFMGIMRWEVLNRLKASHPELEVHNTYGYRTKHTRIVNGIDKSHCADAFCIAGNLGAKRLGEFFFQKQTRRNNRQIHKLSILKHGLRKRNQAPFEVKGFRLFDKVVCQGEEGFIFGRRSSGSFDVRKLDGTRISAGISYKKLRLLEKRRTYLKEIRKEEALPPLPEGRSLRA

SEQ ID NO: 22540 - protein, 429 aa, Streptomyces sp.; identical to SEQ ID NO: 16882

SEQ ID NO: 22541 - protein, 454 aa, unidentified; identical to SEQ ID NO: 5322
  REGION 1..454: note = Human gut metagenome

SEQ ID NO: 22542 - protein, 450 aa, Moorena sp.; identical to SEQ ID NO: 2935

SEQ ID NO: 22543 - protein, 428 aa, Oscillochloris sp.
MVFVLATDRTPLDPTTLHRADQLLNRGRASVFRKYPFTIILHDRTAAESITHPHRVKLDPGSKTTGIAVVAEATGQVVFGAELTHRGQAIRDALRSRRASRRSRRQRTTRYRQPRFLNRRRPAGWLAPSLQHRVDTTLTWITRLRRSIPLTTISMELVRFDTQLMENAEISGVAYQQGTLAGYEVREYLLEKWGRRCVYCGASNTPLQVEHIVPRARGGSDRVANLTLACEPCNTRKGTQTAIEFGHPDVQAQARRPLKDATAVNTTRWAMYQRLVATGLPVEVGTGGRTKYNRTRLGLAKAHWHDAACVGASTPEYLDTRWVRPLLITATGHRSRQMCRMDRYGFPRTGPKGTRVVKGFKTGDMVRAVVTTSTKQGVYRGRVAVRASGWFNITTSTRTIQGIHARFCRHLHRADGYTYPEGVASSHP

SEQ ID NO: 22544 - protein, 517 aa, unidentified
  REGION 1..517: note = Human gut metagenome
MTALEERLSKTEYIYVLGFDGKPQMPTRRKRHVLKLLKTGRARIAEDIPFTIRLTYRNAPVLQPVTLAEDPGRTNIGAAVLSPLGGLLFSAVIETRNKEIKKLMADRKKSRQASRRGERKARQRLAKRYGSMVKSGMVMRKLPMYAADKFVTCKFIRNTQARFCNRKRCPDWITPTVQHLVQTHLNIIRKISKYLPVTDIAFEVSRFAFMHMENPKAMGVDFQNGPLKGYDDVKEAIRTQQHGKCLMCKKPIAHFHHIVPRSRGGSDTIQNLAGLCPECHTKVHTDTAFRKDFDRKKSGQLKKYGALSALNQAVPFICKKLLEEYGEEHVHFCRGLDTSLIRTALGFEKTKKNQMHEVDACCIGLAALEINEVETPAFDHTFQIRQFRRQDRSIIHHQTGRSYYQGKEKVAQNRKPGFEQKTTALSQWYEEQVRIHGEKEAEKLRSQLRVEKSCRHYNDMDRFLPGAVFLYEGKRYVLSGRITNGKYLRACGQGMKNSLLQSVRSSGIMQDWFLFDI

SEQ ID NO: 22545 - protein, 465 aa, unidentified
  REGION 1..465: note = Human gut metagenome
MSTCVCVFSNNGERLMPTIRLGKVRHLLKDGKAKIIKHHPFTIQLLYDSKTNTQPIEICEDVGYNYIGISVKSESHEYVSAQYDTLQDEKKHHDDCRKYRRTRRNRLRYRKPRFDNRKRDDGWLAPSLEHKKELNVNVIKMYCEVMPITHAIVEVGSFDTMLVKAIEEGKATPESADYQKGPRYKLATLREAVFYRDNYTCQVCGRKANEGAILHVHHMFYWKGRHGNSLSELITVCEKCHTPANHQKGGKLYGFGEDIKFANLSGAAFMNTVRWQIVNVLNAAFGKPFVTFTYGAMTKEKRIALHLEKSHNNDAYAMGSFHPVNRCAFEHYEKVKRNNRILEKFYDSQYIDIRTGEIATGKELFNGRISRSHKKDSENLHKYRGKRICKGHRALRRKKVALNPGDLVSLNGEILVVHGTHTKKNGSVNVEFKTPSRGGKKSASLKKLKIVKTSNLMHSAWTKVA

SEQ ID NO: 22546 - protein, 458 aa, Scytonema sp.; identical to SEQ ID NO: 6085

SEQ ID NO: 22547 - protein, 431 aa, unidentified
  REGION 1..431: note = Human gut metagenome
MPNKVYVINKHGRPLMPCSPAKARHLLDEGKAKVKKRTPFTIQLVYGSSGYTQEVILGVDAGSKTIGMSASTTKEELLSAEVKPRNDVVDLLSTRREFRRARRNRKTRYRKPRFDNRVRSKHKGWLAPSVEVKIQEHITSIKRVCRILPVSKVVIETAEFDLQLLKAIADGKPVPQGEDYQKGEMYGHYNVRQYVLWRDDYTCQCCGAHATKKKEVRLHVHHLESRKVGGDAPDNQVTLCESCHEKLHKGLIAEKDFKKRKRRSTRDATFMGIMRKTLMQRLCSELPIPVVKTRGYITKATREKLLVLPKSHTNDALAIAQGKRGFNVGYLPEIAQIDKIYTIRPVGHHNRQLHKATILKGGIRKSNQTEKYVFGYRLFDKVQFNGQDCFIFGRRTSGYFVVKTIDGKVIHNSASFKKLKLVERASNYLIA

SEQ ID NO: 22548 - protein, 431 aa, Moorena sp.; identical to SEQ ID NO: 2933

SEQ ID NO: 22549 - protein, 408 aa, unidentified
  REGION 1..408: note = Human gut metagenome
MVYVQDIDGKPMMPTTRHGKVRRLLKANKATVVNLCPFTIRLTYATSGYKQEIVLGVDAGTKHVGLSATTKSKELYSSEVILRSDIVELLSTRRELRRTRRNRLRYRKPRFGNRVKSKHHGWVTPSVRHKVDAHIRVIDNICSTLPISRIIVEIAQFDTQKIKNPDISGNEYQEGDQLGFWNVREYVLARDGHKCQHCKGKSKDPILNVHHIESRKTGGDSPSNLITLCETCHKEYHKGNIDLKVKRGKSLRDAAVMGIMKWKLYEELKSRYPNVSMTFGDITKYNRIKYGIEKYHISDAFVISKNFNALRLEYHYKVRLVRRHNRQIHKQKVLKGGAKKPNQSPFEVFGFRLFDRVMFEGNYYFIFGRRKSGSFNIRDINGGNQRNVTYKKLKLSIGKRFMIQKEMN

SEQ ID NO: 22550 - protein, 462 aa, unidentified; identical to SEQ ID NO: 10670
  REGION 1..462: note = Human gut metagenome

SEQ ID NO: 22551 - protein, 461 aa, Moorena sp.
MNKVFVIDTKFQPLAPCHPAKARRLLRAGQAAVHRTYPFTIVLLRTVEEPVAPPLRVKIDPGSHVTGIAIVHDATGEIVWAAELDHRGQMIVASLLTRRGGRRGRRSRKTRYRQARFLNRRRQAGWLPPSLASRVANVVTWVRRLRRVCPIQALSMELVRFDTQALQNPEISGVEYQQGTLAGIETKEYLLAKWGRQCAYCDAQGVPLEVEHIVARDQGGSHRLSNLTLACVPCNQKKSNRHVREFLTHDPSRLAHILSQAKAPLKDAAAVNSTRWALYEALQATGLPVEVGSGGRTKWNRTTRGLPKTHWLDAACVGANTPETLWTSERLHPLTIRATGHGSRQMCTMDKYGFPRTRAKQAKHVHGFQTGDIVKAVVPSGKHQGVYVGRVAVRATGSFNIRTASALVQGISHRYCRLLHRVDGYAYQSKVEAHADTGRAFSAPRPSSQGSSSWASGRYSL

SEQ ID NO: 22552 - protein, 262 aa, unidentified
  REGION 1..262: note = Human gut metagenome
LTHQFKKRVPVMVYVLDKNGQPLMPTDRHRKVRLMLQSGQAKVIKRCPFTIQLNYDSGHQTQEISLGIDAGSKHIGVSATTKIKVLYEVDVELRNDIVDLLSSRRELRRGRRNRKTRYRPARFDNRRREDGWLAPSIRQKIGTHLTVVENICKILPISRITVETASFDIQKIKNPDIQGAEYQQGDQLGFWNNREYVLFRDNHTCQCCKGKSKDKILNVHHIESRKTGGNAPNNLITLCEICHTGYHKGAIQLPKTVKRGMR

SEQ ID NO: 22553 - protein, 406 aa, unidentified
  REGION 1..406: note = Human gut metagenome
MVYVQDIYGRPLMPTTRHGKVRRLLKSKKATVVNLCPFTIRLLYDTTGYKQEITLGVDTGTKHVGLSATTKSKELYASEVILRSDVVDLLSTRRELRKIRRYRLRYRKPRFMNRIKSKKRGWIAPSIRQKIDSHIRIIGFVYSILPVSKLIIEVAQFDTQKIKNPEISGKEYQEGEQLGFWNVREYVLAMDEHKCQHCKGKSKDPVLNVHHIESRKTGGDSPSNLITLCKTCHKEFHKGNIKLKVNRGESLRDAAVMSIMKWELYDELKSLYPNVKMTFGYITKYNRINHGIEKSHVSDAFVISRNFDSERLGYYYKRKLVRRHNRQIHKMKAPKGGNKRMNQSPFKVFGFRLFDKVMFQGKERFIYARRLRGIFNIRDINGENKKDISYKKLEYVSHGLISIVAG

SEQ ID NO: 22554 - protein, 425 aa, Moorena sp.; identical to SEQ ID NO: 3008

SEQ ID NO: 22555 - protein, 424 aa, Moorena sp.
MSNHVLVLDTNYKPLTPCKSSTARRLLNVGKAAVFRRHPFTIILKKEVNEVGQPCQIKIDSGSKTTGIALLKGNQLVWGAELTHRGQQIKNALESRRSIRRNRRNRKTRYRQPRFLNRTRATGWLAPSLEHRVLTTMTWVKRIMRFCAVDAVAQELVRFDTQKMQNFEISGKEYQQGTLYQYETREYLLEKFNRTCVYCGAKNVPLEVEHIRPKSKGGSNRISNLTITCVPCNQAKSNLSIEEFLSDKPSLKERILRKVKAPLKDAAAVNSTRWALWRSLNALGIKLTTGTGGQTKYNRCRLGLPKTHWLDAACVGVVEALEVLTNQPLLIKATGHGKRQMCGTDKYGFPKRHCSNKVVHFGFKTGDIVRADVPKGKNQGVHVGRVTIRAKGSFNLKTATGMVQGVNQKYCNIIHKKDGYSYAF

SEQ ID NO: 22556 - protein, 432 aa, Moorena sp.
MFVFVLNSSRKPLNPTHPARARKLLKTGKAAVFKRYPFTIILKEEVAEPNNQQLRIKIDPGAKTTGIAILRNESVLWGAELTHRGDQIRSALTSRRQLRRSRRNRKTRYRQPRFNNRCRQEGWLPPSLISRVENILTWVKRLWRLSPIAHISTELVRFDTQLIQNPEISGIEYQQGTLAGYELREYMLEKWHRRCVYCGATDTKLEIEHIVAKSKGGSNRLSNLTLSCRKCNQKKGNKPIEQFLENNPLLLKSILSQAKRSLADTAAVNATRSRSVANGEWKLFNGLKELGIPVETGTGGRTKYNRCRQNLPKTHWLDAANVGYSTPDTLKILVSRPMRIKATGHGNRQMCGTNAFGFPIRHRSNTKKHFGFQTGDIVKAVVTKGKKVGSYIGRVLCRATGSFDITTATGRVAGISHKYCSFVHRSDGYSYQ

SEQ ID NO: 22557 - protein, 394 aa, unidentified; identical to SEQ ID NO: 10869
  REGION 1..394: note = Human gut metagenome

SEQ ID NO: 22558 - protein, 507 aa, unidentified
  REGION 1..507: note = Human gut metagenome
VLNKDGKPLMPTTRGGHVRHLLKEQKARVVRTKPFTIQLLYETDDVVQPLYLGIDPGRTNIGVAVVKTDGTAVFTAHLETRNKEIPKLMKKRKDSRRARRTNGRRCRRQRRAKANGTISKKCVKQDTAQNGSVSKRAKEIGVIKRHLPGCEKEILCIGIKNKEAKFNNRTRPEGWLTPTANQLLQTHVNLVKKIQKFLPISDVVLEINKFAFMQLDNPNIQKWQYQQGPLCQKANLEEAVSEMQEHHCLFCKNPIDHYHHVVPQHKNGSNTIDNIVGLCTKHHDLVHKETAWQEKLAKKKTGLNKKYGALSVLNQIIPALTKGLSSLFQKHFFVTTGKNTYDYRAAHSVSKDHWLDAYCIACSVLPNDVCDNSINSRVPYELKQFRRHDRRALNNENISRVYTLNDRKVAINRHKAVEQTADSLEEFRQNHPDDVCKLKVKEHHSTYRNMNRNYPGSVFLVGKQVHIMQGIAGSKDGKSTKYNDTNATTIAAGKCKFVAKNSGILFV

SEQ ID NO: 22559 - protein, 425 aa, unidentified; identical to SEQ ID NO: 9663
  REGION 1..425: note = Human gut metagenome

SEQ ID NO: 22560 - protein, 439 aa, Ktedonobacter sp.
VSFVFLVDTNRQPLSPVHPGRARLLLKAGKAAVLKRYPFTLILKAAIEQPQVQPLRLKLDPGSRISGIAIVDNASGQVLFAAELAHRSQQIKKALDDRRAVRRRRRARHTRYRKPKFQNRSRPPGWLVPSLQSRVCNIATWVKRLRKLCPVTAISMELVRFDLHLMQNPEISGIQYQQGTLAGYECREYLLAKWGRACSYCGKQNVPLEIEHIVARANGGTDRISNLCLACAPCNKRKGTQDIAVFLAKKPDLLKQIQAQAKTPLKDATAVNSTRWALFELLQELGLPIECGSGGMTKYNRELRNLPKTHWVDAACVGASTPLVLQVKQIKPLAITANGHGSRQMCLMNEFGFPRTKPKAKHFSHPFHTGDIVKAVVPAHLKNSGAHTGRVSVKAKGAFTISTNKGKVTDIGKKYCQVLQKADGYAYSQKGEAAFPPVP

SEQ ID NO: 22561 - protein, 429 aa, Parasutterella sp.; identical to SEQ ID NO: 7275

SEQ ID NO: 22562 - protein, 451 aa, unidentified; identical to SEQ ID NO: 7526
  REGION 1..451: note = Human gut metagenome

SEQ ID NO: 22563 - protein, 420 aa, unidentified; identical to SEQ ID NO: 3288
  REGION 1..420: note = Human gut metagenome

SEQ ID NO: 22564 - protein, 506 aa, unidentified
  REGION 1..506: note = Human gut metagenome
MPYIYVLGMDGKPQMPTTRRRHVQRLLDTGRARIVSHVPFTIQLLYKNDPVLQPVTLAEDPGRINIGLAAFSLKGDLLFSAKVETRNKEIAKLMDKRRQSRRASRNGERKARQRLARKFGTMLKAGMLMRKLPQYAADKFITCHVIRNTQARFSNRKRPDGWLTPSARHLVQTHINLVRKMGRYLPVTDVALEVNRFAFMQMEDPSISGVDFQNGPLKGFDDLHAAVRDLQDGKCLLCKKEIEHFHHIVPRSRHGSNTIGNIAGLCTKCHEKVHKDEKAGKRLKDKKKGLDKKYGALSVLNQAIPFICKELETEFGKEHVHYCTGRETSLVRRSLGYHKTKEEQYHEVDAWCIGALFLDSIPEKAPAFEEVHTIMQFRRQDRALIKAQTSRSYKLDGETVAWNRKKRTDQKNDSLEDWYQKQVQLHGQKEAGRMRSRLTVKISQRRYNNPERMLPGAVFLYKGKRYVMKGQHCNGVYLQAVGMGSRDFPVKECTIIKRNQGLVFLS

SEQ ID NO: 22565 - protein, 456 aa, unidentified
  REGION 1..456: note = Marine metagenome
MAVFVLDKKKQPLMPCSEKRARLLLARGRAVVHKRYPFTIRLKNRVGGEAQPLRLGIDPGSKTTGLALMREPDSQQRHVLCLFELIHRGFQIKKALQQRAAFRRRRRSANLRYRAPRFNNRIKPKGWLAPSLQHRVDTVMAWVNRLSKSAPITGISQELVRFDTQKLESPEISGVEYQQGTLLGYEVREYLLEKWGRECAYCGTADTPLEIEHVVPRSRGGSNRVSNLTLSCHPCNAEKDSQTLTDFFATNKGLKKRLKANGLSADAQLERVQRQLKQPMRDASAVNATRWALFSALKTTDLPVAVSSGGRTKYNRQRLNIPKTHALDAACVGAFGKLYDWTVPTLTIKAMGRGSYQRTRLTKHGFPRGYLMRQKQVHGFQTGDMVRAIVPTGKKAGTHTGRVAIRKTGSFNIQAEYGAVQGISHKYCTLIQRSDGYGYYVTLFSNLTGEAGRAVA

SEQ ID NO: 22566 - protein, 413 aa, unidentified; identical to SEQ ID NO: 3220
  REGION 1..413: note = Human gut metagenome

SEQ ID NO: 22567 - protein, 512 aa, unidentified; identical to SEQ ID NO: 5651
  REGION 1..512: note = Human gut metagenome

SEQ ID NO: 22568 - protein, 464 aa, unidentified; identical to SEQ ID NO: 3972
  REGION 1..464: note = Human gut metagenome

SEQ ID NO: 22569 - protein, 425 aa, unidentified; identical to SEQ ID NO: 14294
  REGION 1..425: note = Human gut metagenome

SEQ ID NO: 22570 - protein, 420 aa, Moorena sp.
MQNYVFVIDTNFQPLNPIPPKKARRLLDKGKAAVFRMYPFTIILKTSVMNPTISPCQLKIDPGSKVTGFALVQNNQVIWGMELEHRGGLIKKKLESRRAVRRGRRNRHTRYRKPRFLNRKRPEGWLPPSLEHRILTIQTWVKRLIKFCPIKEIWVERVKFDTQKMENPEIKGVQYQQGERRGYEVREYLLEKWGRECTYCGKQSVPLQIEHIHPKSLGGSNRVSNLCLACEKCNQRKGNKPIEEFLKKKPNLLQKIKNKAKQPLKDAAAVNATRNKLVKVLQSIKSVVTGTGAQTKYNRNKFGFPKEHWIDAACVGDIETLVLRTSQPLLVNCKGHGGRQKAALNKYGYPIRHNPLKPIKGWCSGDIAKNLLTGEFGRVNPRSKSNSFNYTIPGEKAISLHVKNLVRVHKKDGYTYGFCQ

SEQ ID NO: 22571 - protein, 375 aa, unidentified
  REGION 1..375: note = Human gut metagenome
VSLGVDAGYKHVGLSASTEKAELYASEVELRQDVSNLLSARRALRQSRRSRNTRYRAPRFDNRIRTKRKGWLAPTVENRINVHLSRIETVLRLLPVTKITVETASFDTQLLKNPDIAGKEYQEGEQLGFWNVREYVLFRDGHVCQHCHGRSKDPVLNVHHLESRRTGGDSPGNLITLCETCHKALHRGEIKLRAKRGQSFRAETFMGIMRWGVLNRLKASHPKLEVHNTYGYRTKHARIANGIAKSHCADAFCIAGNFGAKRLGEFFFQKQTRRNNRQIHKLSILKGGIRKRNQAPFEVKGFRLFDKVACQGEEGFIFGRRSTGYFDVRKLDGTCISAGISYKKLHLLEKRRTYLTEIRKEEALPPPPEGRGLRA

SEQ ID NO: 22572 - protein, 424 aa, Ruminococcus sp.; identical to SEQ ID NO: 2430

SEQ ID NO: 22573 - protein, 420 aa, unidentified
  REGION 1..420: note = Human gut metagenome
MQYVYVLNKHGEPLMPCSPRKARLLLKQKKACVIKRTPFTIKLLYGSTGYKQPVTLGVDAGSKHIGISATTEKYELYREEATPRNDVVDLLSARRAFRRSRRNRKTRYRAPRFDNRVHSKHEGWLAPSVEVKIREHITLIKRVCRILPITLVRVETAEFDTQRLKAMLEGKPLPVGTDYQLGEMYDEYNVRQYVLKRDNYTCQCCGAHPTKTKAVKLHVHHIETRRTGGNAPNNLITLCTVCHKALHAEKVTLDGKKRGKPLKDAAFMGIMRKTLMERLRKELKIPVQGTYGYITKYLREKNGILKSHTNDARCISKNPLAIPCDTCYYTKAVRHHNRQLHKATILKGGIRKANQAPYIVKGYRLWDKVAYNGTECFITGRRTSGYFALKKLDGTVVSNSISYKKLRLLEVATNYITERK

SEQ ID NO: 22574 - protein, 231 aa, unidentified
  REGION 1..231: note = Human gut metagenome
YTCQCCGAHATKKKEVRLHVHHLESRKTGGDAPRNLITLCDSCHKKHHDGLITEDDFKKRKRRSTRDATFMGIMRKTLIQRLRAELTIPVAETRGYITKATREKLLVLPKSHTNDALAIAQGKHGFNVGYLPGILQIDKIYTIRPVRHHNRQLHKATILKGGIRKSNQAEKYVFGYRLFDKVQFNGQDCFIWGRRTSGYFVVKTIDGKVIHNSASFKKLRLVERASNYLIA

SEQ ID NO: 22575 - protein, 289 aa, Parasutterella sp.; identical to SEQ ID NO: 15206

SEQ ID NO: 22576 - protein, 415 aa, unidentified
  REGION 1..415: note = Human gut metagenome
MVYVVANDGQPLMPTERHGKVCRMLKSGMAKVVKKCPFTIQLQYESERNVQPVSLGVDAGSKHIGISATTKTKVLYESDVELRDDIVKLLATRRQLRRSRRSRKTRYRPVRFDNRKRKEGWLAPSIRQKIGSHLTVVANACKILPINQIIVETASFDIQKIKDPEIQGIEYQQGEQMDFWNIREYVLFRDGHICQCCKGRFKDKILNVHHIESRKTGGNAPNNLITLCETCHKGYHNGTVILPKNIKHGMQFKDAAFMGIMRWTFYNTLKEQYEPDIPVSMTYGYLTKNTRIEHGLPKEHYIDARCISGNPDAVSDGTYYYQKKVRCHNRQIHKQTILKGGIRKSNQAEYLVKGYRLFDKVRYQGREYFIFGRRKSGFFDIRTLSGEKVNKGSINVKRLTFVDTRKNYLTERRTV

SEQ ID NO: 22577 - protein, 427 aa, Moorena sp.
MNRVFVLTNTKQPLMPCRPARARKLLKKGRAAVYRFAPFTILLKDRAAGDVQPLEVKVDPGSKTTGLSLVALFERGREVIWAANLYHRGQAIRAALADRRSFRRGRRARHTRYRAPRFLNRTRPEGWLPPSLRSRVENICALVAKLQVRAPITGAAIETVRFDTQLMQNPGISGVDYQQGTLAGYEVREYVLHKWNRTCAYCGVKDVPLEIEHIVPRSRGGSNRPSNLTLACRPCNGKKGNQPVEVFLASSPDRLKRIKAQARAVLKDAAAINATRYAIGAAIKGLGLPTTFWSGGRTKMNRIAQGYAKDHWIDAACVGETGAAVRIPPAMQALEIKAMGRGRRRVMGNDKYGFPKGTPRTHKRVQGFQTGDLARITCTKGKSAGTHIGRIASIRARGWFVLNKHDRPAREFQLLQRADGYAYGAAA

SEQ ID NO: 22578 - protein, 420 aa, unidentified; identical to SEQ ID NO: 7360
  REGION 1..420: note = Human gut metagenome

SEQ ID NO: 22579 - protein, 413 aa, unidentified
  REGION 1..413: note = Human gut metagenome
MTNYAFVLDADGKQLAPTKEQKAWFLIRKKRAILVSKYPMVIQLKKEIPDKEICKNEIRCGIDDGGLHIGVALVQKCQIRNKVIFKGVIEQRNDVKHLMDVRRGYRRYHRYHKRYRPARFNNRKSSKREGRIAPSILQKRQATIRIINQLNKWINITNYWLEDVAIDIRALTDGYKPYRWQYQKSNRLDENIRKAVILRDGCKCMECGKSNCRLEVHHIKPRRLKGSSTLDNLITLCTKCHQKTEGVEELYMDRYFALLNSSDNKNLNYAQHVMIGKKWLREQLSNLGILYLTNGGDTANKRIDRDIAKSHSNDAICITDLRPDTCEIKELTIKPMRRQSKAKTDSVLGIKHRDLVEYTFRNGETHRGYVTALYPEQNALNFQSPTKHCKKVNASKCRLLWKYSKIYWLDNVS

SEQ ID NO: 22580 - protein, 547 aa, unidentified
  REGION 1..547: note = Human gut metagenome
MFLVLDSAEPAPSLRKHFICCAQAYHRCRDTVISAILHSYKKGKNMSEYIYVLGMDGRPQMPTRRKRHIDRLLSTGKAKVVEYVPFTVQLLYENHPVLQPVILAEDPGRTNIGVAAVSQKGELLFSAVVETRNKEITKFMEKRRKARQRLAKRCHTMIKAGQVMRKLPMFGEEKYITCRYIRNTESRFCNRRRKDGWLTPSAEQLVRTHINLVHRIQGFLPVTDVALEVNRFAFMQLEDPYITGVDFQNGPLKGYDDRKAAVYDQQDGQCLLCNKKPIEHYHHIVPVAKRGSDTLANIAGLCCRCHEKVHKDAGAARRLQNKKQGLTKKYGALSVLNQAIPFICKRLEEEFGEHVHYCSGRDTSRLRQSFGFHKTKDEPLHEVDAWCIGVLSLREIPEKCPDFTKVYQIKQFRRQNRRRINHQTERRYYLDGKLVAVNRKKRMGQTGRKDNQTKDSLADWFTKMVHLYREKEAEHLRSRLTVKKSQHSYNDLKREMPGAEFIYENQRYILSGQLTNGKYYRAVGSTQNFPAAKCRIRRHNRGLVFVS

SEQ ID NO: 22581 - protein, 463 aa, unidentified
  REGION 1..463: note = Human gut metagenome
LPGKYKYKGGQLMSVAVINKTGERLMPTSEHRARKLLKSGKAIKHNYHPFTIQLTERESGDVQPIELCMDTGYIHVGTSVKSEKHEYLAEQIDTLTDEKARHDACRMYRRQRRSRKRYRHPRFNNRKRNDRWIAPSLEHKKSIHIQAILRICKVMPVTDITLEMGNFDTQVLKAREEGKPLPHGADYQHGERYGIATLREAVFTRDDYKCQCCGMTIKDGAILHVHHIKYRSQGGTNRMSNLITVCDKCHTPANHKQGGKLYNWKPKIASFKGATYMTTIRWKLYNEVKALFPDIDIHITYGAETKERRRALDIDKSHVNDAFVMGQFHPKHRSKPICYKKKRRNNRCLEKFYDAKYIDSRDGKKRSGQELFNGRISRNHKKDSENLHQYRLQKVTPGRRAIRRQHYPIQPHDIIVYNGNKIEVSGCQHKGTRVVFSKTKKSVQISKIKLFKYAGGYSKSVFN

SEQ ID NO: 22582 - protein, 431 aa, Escherichia sp.; identical to SEQ ID NO: 3801

SEQ ID NO: 22583 - protein, 455 aa, unidentified; identical to SEQ ID NO: 8131
  REGION 1..455: note = Human gut metagenome

SEQ ID NO: 22584 - protein, 465 aa, unidentified
  REGION 1..465: note = Human gut metagenome
SIKPLINIGEGVIYSSICTGLSLQTYQKRKEVPYMVYVLDIDGQPLMPTTRHGKVRRLLNSHLAKVVKRCPFTIQLLYQSTKETQPVSLGVDAGSKHIGMAATTEKKVVYQEELSPRNDVVKLLSARRTLRRTRRNRKTRYRKPRFNNRAHSKHKGWLAPSVEVKIQEHITAIKRICQILPISEIHVETAEFDLQRLKAMDEGSPLPVGIDYQLGEQYDFYNTRQYVLHRDGYTCQCCGTHDNNIKLHVHHIESRQTGGDAPNNLIILCEHCHKALHEGKLELPKGKKRGKSYRDATFMGVMRKTLLERLKKEIDVPVEGTYGYITKYWRERAGLEKSHIHDAVCISKYPYAKPLDIYYLTKTVRHHNRQIHKSNFSKGGIRKRNQAPYLVKGFRLFDKVLYQGKEYFIFGRRATGYFDIRTLDGTKVNKGSISYKKLRIQDTAKAYLKEARAIPHMNKFTCVLA

SEQ ID NO: 22585 - protein, 211 aa, unidentified; identical to SEQ ID NO: 16182
  REGION 1..211: note = Human gut metagenome

SEQ ID NO: 22586 - protein, 409 aa, unidentified
  REGION 1..409: note = Human gut metagenome
MVYVQNIEGKPLMPTTRHGKVRRLLKTKQAVVVNLCPFTIRLTYISDSYKQEITLGVDAGTKHVGLSATTKSKELYASEVTLRSDMVDLLSTRRELRRTRRSRLRYRKPRFDNRIKSKREGWLAPSVQNKIDAHIRVIQNVYSILPITRLVIEVAQFDTQKIKNPDIEGKLYQEGEQLGFWNVREYVLYRDGHKCCHCKGKSKNKVLNVHHIESRKTGGDSPSNLITLCETCHDYYHKGKIDLKVRRGKSLRDAAVMGIMRWRLYDCLKGLYPNVFMTYGYVTKHNRIVHNINKSHTSDAFVISKNFEAERSNYLYRIKLIRRHNSRIHKSKILKGGKKKMNQSPFEVFGFRLFDKVLYNNKIMFIYGRRKTGSFNIRDIEGNNPKDVSYRKFKLYRGKRNPICIKENE

SEQ ID NO: 22587 - protein, 372 aa, unidentified
  REGION 1..372: note = Human gut metagenome
LSKVKTMRVFVFNMRGRPLMPCSQRKARLLLRENKAMIYKYHPFTIQLTYTTGETKQDCHIGIDTGSKYIGAAVRSEDKVFWKGEIELRQDIRSNLDTKRIYRRSRRNRKTRYRKPRFLNRKRRDEWLPPSLQSRINHTFHWIDTLSSLVSNPILHIEVGKFDVAKMINPEIHGVDYQHGQTYGFFDERYFVFARDNYTCQCCGKSKNKILNTHHIIYRSNGGTNRVDNLITVCTDCHTSQNHRKGGIFYQWQEQHKKVKQYKEPPFMNTLRKRIFVAYPDAEITYGSETTPKRKAMKLDKTHYNDAIVISGINEIKENPEEWLLIKQFRKKKRSLHEATARKGRKKPNRNQTRNSKNTPYYKGFYLNDKVS

SEQ ID NO: 22588 - protein, 472 aa, unidentified
  REGION 1..472: note = Human gut metagenome
MTALEEKLSKTEYIYVLGFDGKPQMPTRRKRHVLKLLKTGRARIAEDIPFTIRLTYRNAPVLQPVTLAEDPGRTNIGAAVLSPLGDLLFAAVIETRNKEIKKLMADRQKSRQASRRGERKARQRLAKRYGSMVKSGMVMRKLPMYAADKFVICKFIRNTQARFCNRKRCPDWITPTVQHLVQTHLNIIRKISRYLPVTDIAFEVNRFAFMHMENPEAMGVDFQNGPLKGYGDVKEAIRTQQHGKCLMCKKPITHFHHIVPRSRGGSDTIQNLAGLCTECHTKVHTDTAFRKDFDEKKSGQLKKYGALSALNQAVPFICKKLLEEYGEEHVYFCRGLDTSLIRTAFGFEKTKKNQMHEVDAYCIGLAALEVNEVETPAFDHTFQIRQFRRQDRSIIHHQTGRSYYQGKEKVAQNRKPGFEQKTTALSQWYKEQIRIHGEKEAEKLRSQLRVEKSCRHYNDMDRFLPGAVFLYE

SEQ ID NO: 22589 - protein, 413 aa, unidentified; identical to SEQ ID NO: 3587
  REGION 1..413: note = Human gut metagenome

SEQ ID NO: 22590 - protein, 542 aa, unidentified
  REGION 1..542: note = Human gut metagenome
MSRLTPDAEVPFFCETALQQKTKEASELTALEELLSKTEYIYVIGTDGRPQMPTKRKRHVLKLLNTGKARIAEKVPFTIQLKYDNIPVLQPIILAADPGRTNIGVTALSPFGDLMFAAVIETRNKEIKKLMADRKSHRQASRRGERKARQRLAKKYGTMIKAGMIMRKLPQYAADKFVTCNVIRNTEARFCNRKRCSDWLTPTVNHLAQTHLNVIKKISRYLPVTDIAIEVNRFAFMQMENPNASGVDFQNGPLRGFDDVKAAIREQQNGKCLMCKNDIEHFHHMVPLSKGGSDTIQNQVGLCPKCHAKAHTEQTFKKKLKDKKSGLLKKYGALSALNQSIPFICKDLLAEYGKEHVHFCTGKETSLIRTSLGYEKTKDNQMHEVDAYCIGLASLELEDIKLQSFVNTYKIKQFRRQDRSIIHHQTERSYYLDEQKIVTNRKPRFEQTGNALSDWYKKQVKACDKAKADKMLNTLKVKKSARSYNSEGRLMPGAVFSYNGQRHVMSGQLTGGRYLRAYGDTKTNYPASKCNISRSNEGLVFI

SEQ ID NO: 22591 - protein, 441 aa, unidentified
  REGION 1..441: note = Human gut metagenome
RRLLKDGKAKIIKHHPFTIQLLYDSKMNTQPIEICEDVGYNYIGISVKSQSHEYVSAQYDTLQDEKACHGSCRKLRRTRRNRLRYRKPRFDNRKRGEGWLAPSLRHKKELNVNVVKMYCAVMPITHATIEVGSFDTMLVKAIQEGKAIPEGADYQKGPRYNLATLREAVFYRDNYTCQVCGRKVADGAILHMHHMFYWKGRHGDSLNELLTVCEKCHTPANHQKGGKLYGFGENVKFADLSGAAFMNTVRWQIVNELYAAFGKDFVTVTYGAMTKEKRIALRLEKSHNNDAYAMGEFHPNCRCTFEHYEKVRRNNRILEKFYDSRYIDIRTGEIATGKELFNGRINRNHKKDSENLHRYRGKRTYAGHRALLRKKVNLNPGDLVSLNGEVLVVHSTHTNKKGAVNVEFKTPGKSGQKSASLKKLKIVKAADSMHSAWEKIS

SEQ ID NO: 22592 - protein, 441 aa, Anoxybacillus sp.
MVFVLDTNKRPLAPCHEAVARKLLKQGKAAIYRRFPFTIILKKSVDESEIKATYRLKIDYGSRHTGLAILRGQEVVWLGQLDHRTDIKERIDKRRAFRRARRNRKTRYRKPRFLNRKRKEGWLPSSLESRVQNIQTWVNRLKKLCPIGYISYENTKFDTQLMRNPEINGVEYQQGTLQGYEVREYLLEKFGRKCCYCGKENVPLEVEHIIPKSRGGTDRVDNLCLACHDCNQRKGSKTAEEFGYPHIQKQVKESLKDASAINSTRWKAYEVLKQTGLDVECGTGARTKMNRIRLDLPKTHYFDACCVGESTTNHLYFKTKEVLFIKAKGRGSRSRTNLDRYGFPRGYLARQKFFFGFQTGDMVKAVVPRGKYQGVWFGEVACRKTGSFDIKGKDGKRIAQGINYRYVQVIQRFDGYAYGKGGRNLRKVQFLPVPKGRGFLA

SEQ ID NO: 22593 - protein, 308 aa, unidentified
  REGION 1..308: note = Human gut metagenome
MPCSPAKARHLLDDGKAKVKKRTPFTIQLVYGCSGYTQEVILGVDAGSKTIGMSASTNKEELFAANVTPRNDVVDLLSTRREFRRSRRNRTTRYRQPRFNNRVRSKHKGWLAPSVEVKIQEHITAIKRVCNILPVSKVVVETAEFDLQLLKAIEEGKPIPQGEDYQRGEMYGHYNVRQYVLWRDGYTCQCCRAHSTNKKEVRLHVHHLESRKTGGDAPSNQITLCESCHKRFHKGLLTDKNLKKRKRRSTRDATFMGLLRATLMRRLRAELTIPVVETRGYITKATREKLLILPKSHTNDALSAVGSR

SEQ ID NO: 22594 - protein, 425 aa, unidentified
  REGION 1..425: note = Human gut metagenome
MVYTLNKDGQPLMPTDRHGKVKHLLKDGKAKVVKRCPFTIKLLYESTTHTQNLTLGVDTGSGTVGAAVSKDNGDIVYMSEVVVRNDITDKMTQRSKYRRNRRNRKTRYRKARWLNRKNSIKPDRFSPTMISKFHSHIKEIEYIRSILPITTMVFETGQFDTHLMKNPSLADPDIRHWGYQKGSNYGFENTKAMVLNRDGYTCQYCKDRHKDRKLEVHHIMFRSKGGSDEESNLITLCRTCHKDLHSGKIRPDFKGKTKGTLKYATQMNSIRKQLFRSYPEAAETFGYITKANRLAIGVAKGHYYDACTIATQGKPFIVKTSLYKKKCVSDGDFQKTKGTRSEQPIVTDKICGFRKFDKVQYFGKEYFIKGRMSTGYAILMNIDGKKADFSTMPKGCKIPKMTKLKRVEARTTWMVTAVEVTPNIA

SEQ ID NO: 22595 - protein, 431 aa, unidentified; identical to SEQ ID NO: 20431
  REGION 1..431: note = Human gut metagenome

SEQ ID NO: 22596 - protein, 375 aa, unidentified
  REGION 1..375: note = Human gut metagenome
LGVDAGSKTIGMSASTTKEELLSAEVKPRNDVVDLLSTRREFRRVRRNRKTRYRKPRFDNRVRSKHKEWLAPSVEVKIQEHITSIKRVCRILPVSKVVIETAEFDLQLLKAIADGKSVPQGEDYQKGEMYGHYNVRQYVLWRDNYTCQCCGAHATKKKEVRLHVHHLESRKVGGDAPSNLITLCDSCHEKFHKGIITAANLKKRKRRSMRDATFMGIMRKTLIQRLRAELTIPVAETRGYITKTTREKLLVLPKSHTNDALAIALGKHGFNVGYLPEIAQIDKIYTIRPVRHHNRQLHKVTILKGGIRKSNQAEKYVFGYRLFDKVQFNGQDCFIWGRRTTGIFTIKTINGKMIKDGISFKKLKPVEKSTSYLIA

SEQ ID NO: 22597 - protein, 414 aa, unidentified
  REGION 1..414: note = Human gut metagenome
MPCSPAKARLLLKEKKAIVVRRTPFTIQLTIATGESKQPVSLGVDAGYKHVGLSASTEKAELYASEVELRQDVSDLLSARRALRQSRRNRKTRYRAPRFDNRIRTKRKGWLAPSVENRINAHLSRIETVIRLLPVTKITVETTSFDMQLLKNSDIAGKEYQESEQLGFWNVREYVLFRDGHVCQHCHGRSKDPVLNVHHLESRRTGGDSPGNLITLCETCHKALHRGEITLKAKRGQSFRAEAFMGIMRWEVLNRLKASHPEQEVQNTYGYRTKHARIENGIAKSHCADAFCIAGNLGAERLGEFFFQKQTRRNNRQIHKLSILKGGIRKRNQAPFEVNGFRLFDKVACKGEEGFIFGRRSSGFFDVRKLDGTRISAGISYKKLHLLEKRRTYLTEIRKEEALPPLPEGRGLRA

SEQ ID NO: 22598 - protein, 411 aa, unidentified
  REGION 1..411: note = Human gut metagenome
MIYVRSKEGRVLMPTERCGKIGYILRHGKAHVVSRVPFVVQLDYDSTTYTQDVNLGVDAGSKHIGVSASSEKKELFAAQVELRSDIVKLLSTRRELRRNRRNRKTRYRKARFDNRKKKDGWLAPSVEQKIESHLKVIRLVHKLLPVTKTTIEVAQFDTQKIKTPDIKGDEYQQGEQMGFWNVREYVLARDGHKCVHCKGKSKDPILNVHHLESRKTGGNSPSNLVTLCETCHKAYHRGEFDLKIKRGSSLRDAAVMNIMRWAVYERAKKEFGNVHLTYGYITKHTRIENGITKTHAADAFCIAKNVHATRLGDFFLCRCVPRHTRILHVANPKKGGIRRSCIASHKIGKSRFQRYDMVQWKGMNCFIFGSTHGRPILRYIEGLQVANQPSVNIKTIKFLRRMRCSILVKCP

SEQ ID NO: 22599 - protein, 292 aa, unidentified; identical to SEQ ID NO: 2733
  REGION 1..292: note = Human gut metagenome

SEQ ID NO: 22600 - protein, 497 aa, unidentified
  REGION 1..497: note = Human gut metagenome
LVWNVQAPWDVYPSPTLCGLCLKVLRGRNGDADKKPIPTLTKDENRPSGRTTGLRAEQAEPAGIRKGDTLKVFVLNMRGQPLMPCSPAKARHLLKAGKAVVRRRTPFTIQLRIATGETKQSVTLGVDAGAKHVGLSAATEKEEVFASEVELRQDITGLLAARLSLRRDRRHRKTRYRAPRFLNRVRSKHKGWLAPSVESRIQAHMSRIDAVCRLLPVTKIVIETASFDIQKIRNPEVEGTGYQQGDQLGFWNVREYVLFRDGHICQHCRGRSKDPILNVHHLESRKTGGDAPNNLITLCETCHKAYHAGKIKLKVKRGQSFRAEAFMGIMRWTLLDRVRKAHPGLPVENTYGYLTKNTRITLGLPKAHCVDAYCIAGNLKAVRRGVCLHQRQVRKHNRQIHKCTVLSKTLKDGTKIGYRKLNQTPHLVKNFRLFDKVRCLGQTGFIFGRRSSGYFDVRRLDGVKLSPSISWRKLTLLEKRSTYLTELRKEDGASSPV

SEQ ID NO: 22601 - protein, 456 aa, Moorena sp.
MLTYVLAADGSPLMPTYNIRKVRRMLKDGRAVMTGHKPGFTIRLTYALPDQKTPHTQKVELCEDTGYQHIGISAKSAKHEFVHLQVDTLADEKGHHDAQRRYRRARRGRLRYRAPRFDNRTYSKKPGWLAPSLQHKADIHVRLVSTFQRVLPIRDVYLEVGTFDTQALEAKEKGLPIPEGSDYQHGIRYGIATLREAVFYRDGYKCQCCGKGIKDGRILRVHHIGYWKTPSDHTDRMSNLITVCTKCHTAANHKRGGKLYGWQPKMKPLTGAAFMNTVRWKIVQAVKDLDSSLTVHTTYGAYTKLSRRDRSIGKTHANDAYCMGAFQPKHRATEQLLKKKRRNNRVLSKFYDAKYIDIRDGTKHSGSELSCGRTNRSEPRNGERNLRIFHGKKVSKGRIAVRKQRYPIQPGTVVLYHKRKIAVIGTHGNGTKVMLPTKKDVSPHKVAVVYHAGAFV

SEQ ID NO: 22602 - protein, 455 aa, unidentified; identical to SEQ ID NO: 10285
  REGION 1..455: note = Human gut metagenome

SEQ ID NO: 22603 - protein, 462 aa, Moorena sp.
MKKLSKRNTYTPINASQVGCNCDLLLNRVDTLSVIDSKTLDNRSEVNQSEHRKQDLRVPVYVLNMRGQPLMPTKPAKAKHLLKNGKAKVVKRTPFTIQLKYATGETKQEIVLGIDSAFKIIGYSARTITAELISGEVLLRTDIPDKLKEKQMYRRGRRNRNTHYRKPRFLNRNIPKGWFAPSIGHKINSHLELIKRIKKLLPVTEIEIEVATFDTQKIQNPEISGIEYHQGELQDYEIREYLLEKFQRKCAYCKKTDIPLEIEHVIPSSRGGSDRVSNLTIACHKCNQKKGNKTAIEFGHPEIEEQCRKPLKAAAFMNTVRWELVKRLKELYGEVAVNHTYGYITKKLRKDLGLEKSHVNDAFAISKGTDQERCRPHVVKQNRRNNRSLQTNRNGFKPSIRRERYKFQPNDIVRYKGQTYPVKGVFNYGAWIRLQNENEKDINSNIKNVELITYGKGLQFGF

SEQ ID NO: 22604 - protein, 408 aa, unidentified
  REGION 1..408: note = Human gut metagenome
MVYVQDINGKPMMPTTRHGKVRRLLKDKKAIVVNLCPFTIKLMYVTSDYKQEIVLGVDAGTKHVGLSATTKSKELYSSEVILRNDIVDLLSTRRELRRSRRNRLRYRKPRFDNRIKSKRPGWVAPSVKYKVDAHIRVIDNVCSILPISRIVIEVAQFDTQKINNPNISGKEYQEGDQLGFWNVREYVLAKDGHKCQHCKGKSKDPVLNVHHIESRKTGGDSPSNLITLCETCHKEYHKGNIDLKIKRGKSLRDAAVMGIMKWRLYEELKSKYDNISMTFGYVTKYNRIKHGIEKSHVFDAFVISKNFDAIRLGYYYKVRLVRRHNRQIHKQKIQKGGIKRLNQSPFEVFGFRLFDRVMFENSYYFIFARRKTGSFNIRDIDGKNQRDITYKKLKLSRCKRFMVQKEMD

SEQ ID NO: 22605 - protein, 479 aa, unidentified
  REGION 1..479: note = Acidobacteria sp.
  REGION 207..224: note = misc_feature - Xaa can be any naturally occurring amino acid
MNVVYVLSPERAPLMPCSCVIARLLLKQGKAKVVRRTPFTIQLLARPENAYTQPLTLGVDTGSSVMGSAVADENGNVLYLSEVEIRNDIAQTMKERAASRRHRRHRKTRYRKARWLNRKNSTRTGRFSPTMTSKIDAHLREIRLVQWVLPITSIVLETGTFDPHALKNPEVLQNKWLYQKGINYGYANTKAYVLTRDGYTCQHCKGXXXXXXXXXXXXXXXXXXNLLTLCKTCHDGLHAGTVTLKQRGKRKGNLLHATQMNSIRNQLLQRVQAEETWGFVTKEHRLLAGLPKAHIFDAAMIATRGTKPVFQTSSVLRKKCVPDGDYQQTKGVRSEQRIPTGKISGFRKFDKVRYLGHEYFIKGRMATGYAILMDIFGNKLALKPIPKLEQMKQVSARSSWILQQRPIPSASAGRSYKADLKHHFWKEPFRVMATSIGRLAMPARRPFVTLLSTKAKRQRFIHEAEDLVVFSPSFYKIHS

SEQ ID NO: 22606 - protein, 416 aa, Parasutterella sp.; identical to SEQ ID NO: 10114

SEQ ID NO: 22607 - protein, 204 aa, unidentified; identical to SEQ ID NO: 14204
  REGION 1..204: note = Human gut metagenome

SEQ ID NO: 22608 - protein, 423 aa, unidentified
  REGION 1..423: note = Human gut metagenome
MVYVLNIDGQPLMPTDRHGKVRHLLKDGRAEVVKCCPFTIRLLYDSTHYTQDIVLGVDAGSKHIGLSGTTETKELYASDVELRNDIVDLISTRRQNRRFRRNRKTRYRKARFLNRLSDKKDWLAPSIRQKVDTHMTVVSRVCMILPVTKIIVETASFDIQKIKDPDISGTGYQQGEQLDFWNVREYVLSRDGHTCQCCKGKSKDPVLNVHHIESRKTGGDAPNNLITLCETCHKSYHSGAVQLPKAIHRGMRFKDAAFMGVMRWNFYNKLKEIYELQGIEIRMTFGYLTKNTRIRHHLPKEHYIDARCISGHPEAIPSNEVFYQKKVRCHNRQIHKNTILKGGIRKRNQAGYLVKGFRLFDKVAYKGREYFIFGRRQSGFFDLRNLSGCKVNKGSLSYRKIGFLEPRQYYLCERRVMDTQGYA

SEQ ID NO: 22609 - protein, 434 aa, unidentified; identical to SEQ ID NO: 7534
  REGION 1..434: note = Human gut metagenome

SEQ ID NO: 22610 - protein, 532 aa, unidentified
  REGION 1..532: note = Freshwater metagenome
MLTRVSSPRSDRPSEGNSVATSVHDRLRGASSAPDSRTAPCRHAGSGTKRGRGDRRVAPFPRGVSGMVSSAPLRPSAQANGQLGRGNPSPYVLVLDERHQPLMPCHPARARVFFRQGRAVVVRHSPFTIRLRDRVGGDRQPVLLGIDPGSKCTGLAVVRQAGETRHALWLGELHHRGEQIRQKLAQRRAYRQRRRTANLRYRAPRFQNRRRPAGWLPPSLYHRVETTIQWVTRLQRWIPISEIAMELVRFDTQALQEPEISGVEYQRGTLWGYEIREYLLEKWGRHCVYCRTTSISLQVEHIIPRSRGGSSRVSNLTLACERCNQRKGNQTAKEYGFPQVQAQAQRPLHDATVVNSTRWTLYHALQTFGLPVAVGSGGRTKWNRLRFGISKRHALDALCVGEVEGVRRWLVPSLIITATGRGAYQRTRVTRHGFPRGILMRRKESHGFRTGDLVRAIVPTGRNSGTHVGRLAVRASGSFNLKTVVRTVQGISHRYCRLLMRADGYTYHWSLTPHKDAPPPRPKGKDLRREAS

SEQ ID NO: 22611 - protein, 415 aa, unidentified; identical to SEQ ID NO: 10543
  REGION 1..415: note = Human gut metagenome

SEQ ID NO: 22612 - protein, 442 aa, Lactobacillus sp.; identical to SEQ ID NO: 5193

SEQ ID NO: 22613 - protein, 465 aa, unidentified
  REGION 1..465: note = Human gut metagenome
MSTCVCVLSNNGERLMPTIRLGRVRHLLKDGKAKIIKHHPFTIQLLYDSKTNTQPIEICEDVGYNYIGISVKSQSHEYVSAQYDTLQDEKACHDSFRKLRRTRRNRLRYRKPRFDNRKRGEGWLAPSLKHKKELNVNVVKMYCTVMPITHATVEVGSFDTMLVKAIQEGKVIPEGADYQKGPRYNLATLREAVFYRDNYVCKICGRKATEGTILHMHHMFYWKGRHGNSLNELLTVCEKCHTPANHQKSGKLYGFGEKIKFADLSGAAFMNTVRWQIVNELYVAFGKPFVTITYGAMTKEKRIALQLEKSHNNDAYAMGEFHPNLRCMFEHYEKARRNNRILEKFYDSRYIDIRTGEIATGKELFNGRINRNHKKDSENLHKYRGKRTYAGHRALLRKKVNLNPGDLVSLNGENLIVHSTHTKKNGAVNVEFETPAKSGQKSESLKKLKIVKAANSIHPAWKKIS

SEQ ID NO: 22614 - protein, 413 aa, unidentified
  REGION 1..413: note = Human gut metagenome
MTNYAFVLDANNKQLTPTKEQKAWFLIRKKRATLVSKYPMVIQLKKKIPDKEICKDEVRCGIDDGGLHVGVALVQKCQTRNKVVFKGVIEQRNDVKHLIDVRCGYRRYHRYHKRYRSARFNNRNSSKREERIAPSILQKRQATIRVINQLNKWINITNYWLEDVAIDIRALTDGYKPYRWQYQKSNRLDENIRKAVILRDGCKCMECGKSNCRLEVHHIKPRRLKGSSTLDNLITLCTKCHQKTESVEELYMDRYFALLNSSDNKNLNYAQHVMIGKKWLREQLSNLGMLYLTNGGDTANKRIDWDIAKSHSNDAICITDLRPDTCEIKEWAIKPMRRQSKAKTDNVLGIKHRDLVEYTFRNGKTHRGYVTALYPEQNAINFQSPTKHCKKVNAKKCKVLWKYSKIYWLDNVG

SEQ ID NO: 22615 - protein, 462 aa, unidentified; identical to SEQ ID NO: 2823
  REGION 1..462: note = Human gut metagenome

SEQ ID NO: 22616 - protein, 442 aa, unidentified; identical to SEQ ID NO: 3234
  REGION 1..442: note = Human gut metagenome

SEQ ID NO: 22617 - protein, 416 aa, unidentified
  REGION 1..416: note = Human gut metagenome
MVYVLGQDGHPLMPTCRHGKVKRMLKSGMAKVVKKCPFTIQLQYESTTHTQKINLGIDAGSKTIGVSATTESKVLYESEVVLRNDIVELLSGRRALRNSRRSRKTRYRKPRFDNRKKPDGWLAPSIRQKIETHVTVVGNVMKILPVTKIIVETASFDIQKIKNPEIEGAEYQHGEQLDFWNVREYVLFRDGHTCQCCKGKSKDNILNVHHIESRKTGGNAPNNLITLCETCHKAYHKGIITLPKEIHRGMRFRDAAFMGVMRWAFYDRLKELYNLLGVEVINTYGYITKNTRITYDLPKEHYVDARCISGNPAAKPMDYYYLQKKVRCHNRQIHKCKINKGGTRKRNQAAYEVKGFRLYDQVLWKGQKCFIFGRRSTGRMDLRLLDGTHVNASVGYKNLKLLSMRKNYLIEQRKAG

SEQ ID NO: 22618 - protein, 455 aa, unidentified
  REGION 1..455: note = Human gut metagenome
VSFTVRYVLAYRFKHIKKERKVPCMVYVLDINGQPLMPTTRHGKVRRLLNSHLAKVVKRCPFTIQLLYQSTKEIQPVSLGVDAGSRHVGLSATTEREVVYQEELVPRNDIVKLLSARRALRRSRRNRKTRYRRVRFNNRVHSKHKGWLAPSVEVKIQEHITATKRICQILPIFDIHVETAEFDLQRLKAMEEGRLLPAGTDYQLGEQYDFYNTRQYVLHRDEYTCQCCGTHDNNVKLHVHHVESRQTGGEAPNNLITLCEHCHKSIHAGKMMLPKGKKRGKSYRDAAFMGIMRNTLLERLRKEVNVPVTMTYGYITKYWREKAGLEKSHINDAICISKHPYARPLETYYLTKAVRHHNRQIHKTKFSKGGIRKRNQAPYLVKGFRLFDKVLYQGESYFIFGRRITGYFDIRTLDGTKVNKGSTSYKKLRIQDTAEAYLTEVRAIPHMNEFTCVLA

SEQ ID NO: 22619 - protein, 424 aa, Moorena sp.; identical to SEQ ID NO: 13637

SEQ ID NO: 22620 - protein, 480 aa, unidentified
  REGION 1..480: note = Human gut metagenome
LYTKPLDNIGEGSLPPSGEINLKGMTFMVYVKSIDGKALMPTSNAKARKLLKQKKAKVVSLRPFVVKLTYKTKTEYTQKLNLGVDSGYSNIGFSVIDAKQEYIAGEVKLLEGMKKRLLEKASYRRIRRSRLRYRKARWNNRVKSKKKGWLAPSLKHKLDTHIKFIDYLKNILPIGKITIEVANFDIQKMKDDLISGVDYQNGDMFGFWNVREFVLHRDGHKCQNPNCKHKDKKEQILKVHHIRYRSEGGSDRPENLITLCSKCHTPANHKKGKFLYDWCVNGKKVRGFKDATFMSMIRWYLVNELKSKHNNVSITYGYITKNHRIQNGIEKSHLNDAFAIAKGTNQARTKDRFLVIQDRLKNRSLEKFYDSKIIDIRTEKKVSGGDLNCGRSTRNKNLNTENLRKYRGVKISKGQRRIRKQKYFYQPNDLVKYDGKVYTVKGTQNEGKYIALKEIKKVPKVELLIPYVFKKGLNWSYGLC

SEQ ID NO: 22621 - protein, 412 aa, unidentified; identical to SEQ ID NO: 4932
  REGION 1..412: note = Human gut metagenome

SEQ ID NO: 22622 - protein, 457 aa, unidentified; identical to SEQ ID NO: 3236
  REGION 1..457: note = Human gut metagenome

SEQ ID NO: 22623 - protein, 443 aa, Anoxybacillus sp.; identical to SEQ ID NO: 12144

SEQ ID NO: 22624 - protein, 420 aa, unidentified
  REGION 1..420: note = Human gut metagenome
MQYVYVLNKHGEPLMPCSPGKARLLLKQQKACVVKRTPFTIKLLFGSAGYKQPITLGVDAGSKHVGLSASTEKRELYSEEFTPRSDVVELLSTRRQNRRSRRNRKTRYRVPRFDNRVHSKHKGWLAPSVEVKIQEHITIIKRICKILPISLVRVETAEFDTQRLKAMLAGKPLPVGTDYQLGEMYDEYNVRQYVLKRDNYTCQCCGAHTTAKKLVKLHVHHLESRKTGGNAPSNLVTLCTTCHKNLHKGKVTLDGKERGKPLRDAAFMGIMRKTLMVRLKEELPIPVQGTYGYITKMRREQNDIKKSHTNDARCISKHPLAEPCSVCYRTKANRHHNRQTHKANFSKKGIRKRSQMPYLVEGFRLWDKVLYKGQECFVSGRRSSGSFALKKLDGTSISKGVTFKKLRLLEPATNYLIERM

SEQ ID NO: 22625 - protein, 416 aa, Moorena sp.; identical to SEQ ID NO: 14767

SEQ ID NO: 22626 - protein, 344 aa, unidentified; identical to SEQ ID NO: 11841
  REGION 1..344: note = Human gut metagenome

SEQ ID NO: 22627 - protein, 418 aa, unidentified; identical to SEQ ID NO: 6784
  REGION 1..418: note = Human gut metagenome

SEQ ID NO: 22628 - protein, 442 aa, unidentified
  REGION 1..442: note = Human gut metagenome
MVYVLNKDGQPLMPTNRHGKVRRLLKTKKAKVIKRCPFTIQLLYDTTNHTQDITLGIDAGSKHIGLSATTKNKVLFEADVELRNDISKLLEARHTFRCSRRNRKTRYRKKRFDNRVSSKHKGWLAPSIEHKIQSHFAMVEKVHRILPVTKIVVETASFDTQLLKAQLEGKPIPQGTDYQNGELAGWNIREYIFHRDNYTCQWCRGKSKDPVLVTHHHAYWKGDHTNKPSSLITLCNTCNDSKYHKKGANRLWGWEPKITNSYKHAAFMGVMRWTFYNRLKEIYPNVSMTYGYITKNTRIENNLPKAHYVDARCISGHPEAKSSGEYFYYKKVRCHNRQLHKANTLKGGIRKRNKAEYIVKGFRLFDRVEYQNNEYFVFGRRASGFFDIRTLDGQKVNKGSISFKKLKLKETSRTYLIERRMADTGVSLAPLTTEVTSLRQTG

SEQ ID NO: 22629 - protein, 431 aa, unidentified; identical to SEQ ID NO: 4463
  REGION 1..431: note = Human gut metagenome

SEQ ID NO: 22630 - protein, 419 aa, Geobacillus sp.; identical to SEQ ID NO: 4579

SEQ ID NO: 22631 - protein, 554 aa, Acidithiobacillus sp.; identical to SEQ ID NO: 7890

SEQ ID NO: 22632 - protein, 461 aa, unidentified
  REGION 1..461: note = Human gut metagenome
VQPLYLGIDPGRTNIGVAVVKADGTAVFTAHLETRNKEIPKLMKKRKDSRRARRTNGRRCRRQRRAKANGTISKKCVKQTTAQNGSVSKRAKEIGVIKRHLPGCEKDVLCIGIKNKEAKFSNRTKSEGWLTPTANQLLQTHINLVKKIRKFLPISDVVLEINKFAFMQLDNPNVQKWQYQQGPLYQKANLEEAVSEMQEHHCLFCKKPIAHYHHVVPQSENGSNTIGNIVGLCTKHHDLVHKDTAWQKKLAKKKTGLNKKYGALSVLNQIIPALTKELGSLFPKHFFATNGKSTYDYRAAHGVRKDHWLDAYCIACSVLPNDVCDKNINSRVLYELKQFRRHDRRALNNENMSRVYTLNENVVATNRHKATKQTTDSLEEFRQNHPDDACKLKVKEHHPTYRNMSRNYPGSVFLVGNQVHVMQGVAGSKDGKATTYKDTNANSIAAGKCKFVAKNSGILFV

SEQ ID NO: 22633 - protein, 493 aa, unidentified; identical to SEQ ID NO: 10490
  REGION 1..493: note = Human gut metagenome

SEQ ID NO: 22634 - protein, 442 aa, unidentified; identical to SEQ ID NO: 6360
  REGION 1..442: note = Human gut metagenome

SEQ ID NO: 22635 - protein, 431 aa, unidentified
  REGION 1..431: note = Human gut metagenome
MDAWDIIVILNKRGKPLMPCSPAKARLLLKEKKAIVVRRTPFTIQLTIATGEAKQPVSLGVDAGYKHVGLSASTEKAELYASEVELRQDVSDLLSARRALRQSRRNRNTRYRAPRFDNRIRTKRKGWLAPTVENRINVHLSRIETVLRLLPVTKITVETASFDTQLLKNPDIAGKEYQEGEQLGFWNVREYVLFRDGHVCQHCHGRSKDPVLNVHHLESRRTGGDSPGNLITLCETCHKALHRGDITLKAKRGKSFRAEAFMGIMRWEVHNRLRALHPGIEVSNTYGYRTKHARIANGIAKSHCADAFCIAGNLGAERLGEFFFQKQTRRNNRQIHKLSILKGGIRKRNQAPFEVKGFRLFDKVACQGEEGFIFGRRSSGFFDVRKLDGTRISAGISCKKLHLLEKRRTYLTEIRKEEALPPLPEGRGLRA

SEQ ID NO: 22636 - protein, 510 aa, unidentified
  REGION 1..510: note = Human gut metagenome
TVYVLNKDGKPLMPTTRCMHVRHLLKNGKARVVKSKPFTIQLLYETDDVVQPLYLGIDPGRTNIGVAVVKADGAAVFTAHLETRNKEVPKLMKKRKESRCARRTNGRRCRRQRRAKTNGTISKKCVKQTTAQNGSVSKRAKEIGVIKRHLPGCEKDVLCIGIKNKEAKFTNRARPEGWLTPTANQLLQTHINLVKKIQKFLPISDVVLEVNKFAFMQLDNPNIQKWQYQQGPLYQKGSLENAVSEMQEHHCLFCEKPIEHYHHVVPKSENGSNTIANIVGLCTEHHNLVHKDATWQKKLAKEKVGLVKKYSALSVLNQIIPALTKEMNSLFPKHFFVTNGKSTYDYRTAHGVSKDHWLDAYCIACSVLPNDVCDSNINSHVPYELKQFRRHDRRVLHKANMSRVYTLNGKTVATNRHKAIKQTTDSLEEFRQSHPGDVCKLKVKEHHPAYRNLNRNYPGSVFLVDGQVHVMQGVSGSHNGKADGYYNTNGNAYPYYKCKFVVKNEGIVFA

SEQ ID NO: 22637 - protein, 420 aa, unidentified
  REGION 1..420: note = Human gut metagenome
MQYVYVLNKHGEPLMPCSPRKARLLLKQKKACVVKRTPFTIKLLYGSTGYKQPITLGVDAGSKHIGISAATEKYELYCEEATPRNDVVDLLSARRAFRRSRRNRKTRYRAPRFNNRVHSKHKGWLAPSVEVKIQEHITLIKRVCRILPVTFVRVETAEFDTQRLKAMLEGKPLPVGTDYQLGEMYDEYNIRQYVLKRDNYTCQCCGAHPTKTKAVKLHVHHIETRRTGGNAPNNLITLCTACHKALHAGKVTLDGKKRGRSLKDAAFMGVMRKTLMERLLKELKIPVQGTYGYITKYLREKHSIPKSHTNDARCISKNPLAIPCDTCYYTKAIRHHNRQLHKATILKGGIRKANQAPYTVKGYRLWDKVSYNGSECFITGRRTSGYFALKKLDGTVVSNSASYKKMRLLEVATNYITERR

SEQ ID NO: 22638 - protein, 426 aa, Anoxybacillus sp.
MVFVLDTNKRPLAPCHEAVARKLLKQGKAAIYRRFPFTIILKKSVDESEIKATYRLKIDYGSRHTGLAILRGQEVVWLGQLDHRTDIKERIDKRRAFRRARRNRKTRYRKPRFLNRKRKEGWLPPSLESRVQNIQTWVERLRKICPIEHISYENAKFDTQLMRNPEINGVEYQQGTLQGYEVREYLLEKFGRKCCYCGKENVPLEVEHIIPKSRGGTDRVDNLCLACHDCNQRKGSKTAEEFGYPHIQKQVKESLKDTSAINSTRWKAYEVLKQTGLDVECGTGARTKMNRIRLDLPKTHYFDACCVGESTTNHLYFKTKEVLFIKAKGRGSRSRTNLDRYGFPRGYLARQKFFFGFQTGDMVKAVVPRGKYQGVWFGEVACRKTGSFDIKGKDGKRIAQGINYRYVQVIQRFDGYAYGKGVAELA

SEQ ID NO: 22639 - protein, 431 aa, Thiorhodovibrio sp.
MNRVFVLDTNKRPLMPTSPTRARRLLRDKKAAVYRMHPFTIILKYSVEPTPQPIEAKFDPGSKTTGIALVAEFPQQGRVVLWAANLNHRGDSIRKRLADRRAIRRGRRNRKTRYRQMRVLNRKRPQGWLPPSLQSRVDNVENWLKKLLDRAPLVTVAVETVRFDTQAMQNPEISGVEYQQGELAGYELREYLLEKWNRTCAYCDAQHVPLEIEHIVSRSKGGSDRVSNLTLACRDCNQKKGNQPLEVFLAHDPKRLARIKAHAKAPLKDAAAINAIRYAIGNALKKFGLAVSFWSGGRTKKNRVSQGYTKDHWIDAACVGETGAEVHIPDGMRPLTITATGRGQRQVTRTDRHGFPRGKAGRVKRVNGFQTGDFVKLIQPKGKYAGVHVGRLAGIRSTGTFDIAANVGKFSANWKNFVLIQRGDGYAYAYA

SEQ ID NO: 22640 - protein, 470 aa, unidentified; identical to SEQ ID NO: 2825
  REGION 1..470: note = Human gut metagenome

SEQ ID NO: 22641 - protein, 351 aa, unidentified
  REGION 1..351: note = Human gut metagenome
TTEKHELYREEATPRNDVVDLLSARRAFRRSRRNRKTRYRAPRFNNRVHSKHKGWLAPSVEVKIQEHITLVEHVCRILPVTLVRVETAEFDTQRLKAMLEGKPLPVGTDYQLGEMYDEYNVRQYVLKRDNYTCQCCGAHSTKTKGVKLHVHHIETRRTGGNAPNNLITLCTACHKALHAGKVTLDGKKRGKPLKDAAFMGIMRKTLMERLRKELKIPVQGTYGYITKYLREKNGIPKSHTNDARCISKNPLVIPCDTCYYTKAVRHHNRQLHKATILKGGIRKANQAPYIVKGYRLWDKVSCNGTECFITGRRTSGYFALKKLDGTVVSNSISYKKLRLLEAATNYIIERK

SEQ ID NO: 22642 - protein, 350 aa, Moorena sp.
MSKVFVLDTNFTPLNPIHSAQARQLLRNKKAAIFRQFPFTIILKKSRPDSRISSLRLKIDPGAKFTGMALVNDSTSEVVFAAELKHRGFAIRDALTSRRQLRRSRRARKTRYRQPRFLNRTRLEGWLAPSLQSRVDNIKTWVKKLLNFAPIQAISQELVRFDMQLMANPDIQGQEYQQGTLAGYETREYLLEKWGRQCAYCGVKDVPFQVEHIHPRAKGGSNSITNLTLSCEKCNTKKGTKDIKDFLKKDFSKPLLITANGHGSRQSCRIDKYGFPNRHVPREKIHFGFQTGDIAKAVVTAGKKIGTYVGKVAIRSTGSFNISNKNGLIQGISHKFCKRIHAKDGYSYAV

SEQ ID NO: 22643 - protein, 431 aa, Escherichia sp.; identical to SEQ ID NO: 3801

SEQ ID NO: 22644 - protein, 411 aa, unidentified
  REGION 1..411: note = Human gut metagenome
MVYVQDIDGKPMMPTTRHGKVRRLLKDNKAVVVNTCPFTIKLTYKTSDYKQEIVLGVDAGTKHVGLSATTKSKELYSGEVILRNDIVELLSTRRESRRTRRNRLRYRKPRFENRVKSKRLGWVAPSVRHRIDAHIRIINNVCSILPVSRVIVEVAQFDTQKIKNPEISGKEYQEGDQLGFWNVREYVIARDGHKCQHCKGKSKDPILNIHHIESRKTGGDSPSNLITLCETCHKEFHKGNIKLKVKRGKSLRDAAVMGIMKWRLYDKLKSLYPNVRMTFGYITKYNRINHGIEKSHVSDAFVISRNFDSERLGYYYKLKLVRRHNRQIHKMKIPKGGKKRMNQSPFKVFGFKLFDKVMFQGEERFIYARRLSGQFKIKDIDGNNERNISYKKLRYVSHGLVSVKTNLFLSQ

SEQ ID NO: 22645 - protein, 214 aa, unidentified
  REGION 1..214: note = Human gut metagenome
AHNTAKKVVKLHVHHLESRKTGGNAPSNLVTLCTTCHKNLHKGKVTLDGKERGKPLRDAAFMGIMRKTLMARLKEELPIPVQGTYGYITKMCREQNDIKKSHTNDARCISKHPLAEPYSVCYRTKAIRHHNRQTHKANFSKKGIRKRSQMPYLVEGFRLWDKVLYKGQECFVSGRRSSGSFALKKLDGTSISKGVTFKKLRLLEPATNYLIERM

SEQ ID NO: 22646 - protein, 423 aa, unidentified; identical to SEQ ID NO: 3951
  REGION 1..423: note = Human gut metagenome

SEQ ID NO: 22647 - protein, 424 aa, unidentified
  REGION 1..424: note = uncultured cyanobacterium
MSNYALVLDTNKQPLSPCHPSVARKLLDSGKAAVFRMYPFTIILNKSCSDVVNQAIELKIDPGSKTTGIALVQGEKIIFGAELSHRGSAIKASLESRRSLRRGRRNRHTRYRQARFLNRTRTKNWLAPSLQHRVETTLTWVKKLIKFAPITRISQELVRFDLQQIDNPEISGIEYQQGTLSGYEVREYLLEKWQRKCAYCGIENVPLQVEHIHPKARGGTNRISNLCLACQKCNIKKSTQDIEKFLAKKPDLLKCILAQAKRPLKDAAAVNSTRWALFSRLQETGLPVSTGSGGQTKFNRTRLKFPKTHWLDAACVGQIGELEILINKPLLIKATGHGTRQMCRTDKFGFPSRYVPRIKFVKGFQTGDIVKAIVTTGKKIGKYIGRVAVRATGSFNISASKLVQGISYKYCKIIHRKDGYDYAF

SEQ ID NO: 22648 - protein, 391 aa, unidentified
  REGION 1..391: note = Human gut metagenome
MVYVINKQGQALMPTERFGKVRRLLKNSLAHVVCRIPFTIQLDYDTTDYTQPVSLGVDAGSKHIGISVTTSEKELYAADVELRNDIVDKLSTRREQRRTRRSRLRYRKARFNNRASSKRKGWLAPSIENKIQTHLTVVEKIHKFLPITNIVVETASFDIQKINNPSISGSEYQQGEQLDFFNVREYVLFRDNHTCQHCKGKSKDKVLNVHHIESRKTGSDSPKNLITLCETCHKAYHRGEFELNVKRGKSFRDAAFMGIMRWSFYDRLKNIYPNVSMTFGYITKNTRITNNLPKDHYVDARCISGNPVAKPLGYYFYQKKVRCQNRQIHKANFLKGGRKKLNQAPFLVKGFRLFDLVEYQKELYYIFGRRSSGSFDIRKLDGTKVNKGSIN

SEQ ID NO: 22649 - protein, 432 aa, Moorena sp.; identical to SEQ ID NO: 6011

SEQ ID NO: 22650 - protein, 281 aa, unidentified
  REGION 1..281: note = Human gut metagenome
SKVVIETAEFDLQLLKAIEEGKPVPQGEDYQQGEMYGHYNVRQYVLWRDDYTCQCCGAHATKKKEVRLHVHHLESRKTGGDAPRNLITLCDSCHKKHHDGLITEDDFKKRKRRSTRDATFMGIMRKTLIQRLRAELTIPVAETRGYITKATREKLLVLPKSHTNDALAIAQGKRGFNVGYLPGIIQTDKIYTIRPVRHHNRQLHKATILKGGIRKSNQAEKYVFGYRLFDKVQFNGQDCFIWGRRTSGYFVVKTIDGKVIHNSASFKKLRLVERASNYLIA

SEQ ID NO: 22651 - protein, 226 aa, unidentified
  REGION 1..226: note = Human gut metagenome
LKRDHYTCQCCGAHNTAEKVVKLHVHHLESRKTGGNAPSNLVTLCTTCHKNLHKGKVTLDGKERGKPLRDAAFMGIMRKTLMARLKEELPIPVQGTYGYITKMRREQNDIKKSHTNDARCISKHPLAEPCSVCYRTKAIRHHNRQTHKANFSKKGIRKRSQMPYLVEGFRLWDKVLYKGQECFVSGRRSSGSFALKKLDGTSISKGVTFKKLRLLEPATNYLIERM

SEQ ID NO: 22652 - protein, 398 aa, unidentified
  REGION 1..398: note = Human gut metagenome
NRLHKVREHLYRSCRQRDPGSRETGAAVVRDDGKKRHHALAFFVIEHRGGAIRDALKARSAFRRRRRSQNLRCRSPRFLNRVKPKGWLPPSLRHRVETTLSFVRRMCRYLPVSGIAAELVKFDSQKLQTPEVSGIEYQQGTLFEYEVREYLLEKFGRKCVYCGAEGVPLNIDHVVPRAKGGSNRVSNLVLACVSCNQKKGARSLEDFLKGKPEVLARVRRELKTPLRDAAAVNATRWVLFNELKATGLPVETGSGALTKFNRHAFGVEKEHWLDALCVGRLNGAVTRKGLNVLEIRCMGRGSRQRTRLTKYGFPRGYLMRQKCVHGFATGDMVEANVPKGKKAGLWRGRVAVRVSGSFNIQTPKGVIQGVGWKHCRLISHNDGYGYAWLGHAPHSSPA

SEQ ID NO: 22653 - protein, 432 aa, unidentified
  REGION 1..432: note = Human gut metagenome
MVVYVLSKNKEPLMPTKHFGKVRHLLKDGKARVVKSCPFTIQLLYETTTYTQDLTLGVDTGSGEIGCSVTTENVDKNGQKHILYKSNVEVRNDIKSKMDRRRKYRRTRRSRKLYRPVRFQNRKNSKRTDRFSPTMISKIHSHVKEIEFIQKILPITKIVLETGQFDTHLMQNPNLSNSNVKHWGYQKGPNYGFANTKARVLNRDGYQCQYCKTKKKGTRLDVHHIIFRSHGGSDDAENLITLCHSCHVALHKGQIQPNFKGKKKGNLNYATQMNSIRIQLLRYYPDAIETFGYITKENRQKLGLPKDHYIDACVIATGGVSFIDDTNLVYYKKSVAKGDYQQTKGSRSEVKLPTGKIYGFKKFDKVLYRGHEYFIKGRMSNGYCILMDIHGNKIDFSNQPKGFKTPKFENLKRIGGRTSCLVIAEVDTLNIV

SEQ ID NO: 22654 - protein, 413 aa, unidentified; identical to SEQ ID NO: 3476
  REGION 1..413: note = Human gut metagenome

SEQ ID NO: 22655 - protein, 544 aa, unidentified
  REGION 1..544: note = Human gut metagenome
MKQKKQKVMVYILNKKGKPLMPTTRCGHVRKLLDSKKAVVVNSNPFTIRLKYDTPNGIQDVFAGIDSGRENIGSGASNEDGDCLYLGELKTSNKSIKIKMAERTGFRRERRRHDRQSKQRKAKKDHTEIQNGNDDICRTTISCKSVQISYPVAEESVTHKIIRGKEGKFANRHRDEGWITPSARQLVQMHMNDLKSMCKILPINHVTLERVAFDFQKLENENIKTWEYGKGKLYGYDSPEEYIHDVQDGKCLVCGKPHIDYLHHIIPRSKGGSDKVSNIAGLCYDCHYGPMGVHNCQDTQNRLPELKNEANKQYKVSLLNSVMTVLIEEMDKFCKANSIIFSICEGHDTAKVRDMYDLQKDHCFDGFAISLVGRNVESVDVIPDRIYQKQRYKKKSKNIIQKRNCREYYDGKKLVAVNRHKGTDQKADSLEEYMNTYAETHTADECKKHFDSLTVKPARRTYTFHKKGCICPFHIGDKVRYEKKNKIKGNTKVETFICESIHFYKDKNKAKVEHNKTKSKRMKFCRVLEAGCTPYIDYRKLALM

SEQ ID NO: 22656 - protein, 423 aa, unidentified; identical to SEQ ID NO: 4062
  REGION 1..423: note = Human gut metagenome

SEQ ID NO: 22657 - protein, 518 aa, unidentified
  REGION 1..518: note = Human gut metagenome
MTHYERRHLMPDTNYIYVLGTDGKPQMPTKRKRHVKRLLNTGKARIACHVPYTIQLLYKNEPVLQPVMLAEDPGRTNIGLAVLSRKGELLLSAVAETRNREIVKLMADRKKARRASRNGERKARQRLAKRFGTMFEAGMLMRKLPMYAADKFVTCNYIKNTESRFCNRKRPDGWLTPTANQLLKTHINLIHKIQKYLPVMDVAIEVNRFAFMSLENPAISGVDFQNGPLKGFDSLHDAVNDLQHGKCLLCGGKIEHYHHIVPRSQRGSNTIGNIAGLCMECHNKVHKNIEYQKELKDLKKGLDKRYGALSALNQAMPFICKSLESEFGKAHVSYCTGRDTAKMRNSFGFQKTKENQLHEVDAWCIGILARNSAPDRLPDFEQTHYIRQFRRQDRSLIRCQTERTYKLDGKTVAKNRKKRTDQKDDSLEDWYNKQIALHGKKIAECMLSRLTVKKSKRHYNDLTRTLPGAVFIYNGKCYVLSGRLSNGKYFRTVGDPKTNYPVGKCRIVKQNEGLVFIY

SEQ ID NO: 22658 - protein, 415 aa, unidentified; identical to SEQ ID NO: 3582
  REGION 1..415: note = Human gut metagenome

SEQ ID NO: 22659 - protein, 415 aa, unidentified; identical to SEQ ID NO: 6534
  REGION 1..415: note = Human gut metagenome

SEQ ID NO: 22660 - protein, 413 aa, unidentified; identical to SEQ ID NO: 16495
  REGION 1..413: note = Human gut metagenome

SEQ ID NO: 22661 - protein, 418 aa, Moorena sp.
MVYVLNKNGGPLMPTERHGKVRRLLRDGKAHVVRLVPFTIQLDYSSEGVVQEVSLGVDAGSKHIGVSATTEERELLAMQVEERNDIVELIASRRETRRTRRSRKLRYRASRFDNRRRKDGWMTPSTEYRISAHLRMIHLVCSILPITKTTIEVAQFDAQKIKNDKITGVEYQQGEQLGFWNVREYVLARDGHVCQHCKGKSKDKILNVHHIESRKTGGNAPNNLITLCETCHKAYHDGEITLKLRRGTSLRDAAAMSIMRWEVYNRAKQEFKNVHLTYGYVTKHARIHNNIAKTHCADALCISGNVGAERLSWFYGVRLTRRHNRSLHLFKPKKGGFRPGNLASHWIGKSRLQQYDYVEWKGQRAFVSGSSNGRPYLKNFDDKYIMTPKASVNAKMVKFIRRKRGSMIIDKINQTKIS

SEQ ID NO: 22662 - protein, 400 aa, unidentified
  REGION 1..400: note = Human gut metagenome
LYDTTNHTQDITLGIDAGSKHIGLSATTKNKVLFEADVELRNDISKLLEARHTFRCSRRNRKTRYRKKRFDNRVSSKHKGWLAPSIEHKIQSHFAMVEKVHRILPVTKIVVETASFDTQLLKAQLEGNPIPQGTDYQNGELAGWNIREYIFHRDNYTCQWCKGKSKDPVLVTHHHAYWKGDHTNKPSSLITLCNTCNDSKYHKKEANRLWGWEPKITNSYKHAVFMGVMRWTFYNRLKEIYPNVSMTYGYITKNTRIENNLPKAHYVDARCISGHPEAKSSGEYFYYKKVRCHNRQLHKANTLKGGIRKRNQAEYTVKGFRLFDRVEYQNNEYFVFGRRASGFFDIRTLDGQKVNKGSISFKKLKLKETSRTYLIERRMADTGVSLAPLTTEVTSLRQTG

SEQ ID NO: 22663 - protein, 415 aa, unidentified; identical to SEQ ID NO: 15716
  REGION 1..415: note = Fermentation metagenome

SEQ ID NO: 22664 - protein, 499 aa, unidentified
  REGION 1..499: note = Human gut metagenome
MRYVYVLDQEGKPLMPTCRFGKVRRMLKSGQAKAVSTLPFTIRLTYKPKTQSRQAVVVGFDPGRTNIGLAAVREDGTCLYRAHCTTRNKEIAKLMKDRLASRRASRRGERLARKRLAKKFHTTAKKLLKRILPGCKEPLAVKDIINTEARFNNRLRPQGWLTPSATQLLRTHLNLLKKIQKILLVTDVVAELNRFAFMQLDTPGVCKKNIDFTHGALYGTDGLHAAIREQQQGRCLLCGYREIEHFHHIIPRSKLGSNTIANLAGLCEKCHELVHKNAAAAEKLQEFKSGLEKKYGGTSVLNQIIPALMRTLSERFSGHAYATTGWQTKQFREDHELEKDHDIDAYCIAASILQQITTNISVESYEILQFRKHSRANIHHQTERTYKLGKELVAKNRHKRMDQKTDSLQEWYEDMFAKYGEKQANKLRSKLTVQKSTRHYNSKERLLPGTIFSYEGSRYVLTGQLTGGAYYRAYGQEKKNFPAKKVSIQCQNEGLVYVS

SEQ ID NO: 22665 - protein, 390 aa, Moorena sp.
MITAFVIQLNYHAPEYTQPIAAKLDAGFKRGGVALQSNGKITFRGEIIHRRYVNQPTKGQVMVVRRQRRRARRYRIRYRAPRFDNRRRPEGWLPPTIKARADAQVNVLKVLARYAPVTRAIIEVGSFDAHKMQNPDVKPEGYQNGRQKGFKNTKAYIKARDRRCVNCGAEIEEVHHLKQRVKGGADNPDNLVGLCKKCHRLATMGKLKLNLTPGRELKGAAFINAAKNYIVSQVRRFAPEVCAQEGWWTKQERERWNLSKSHINDAISMGTAHLSVLYIPPGLNPMEIRPRQRAVRQQYFSEPRKGGVFKRYRHPWQSISGIKRGDLCRDKKTNQLIRVDTLLSNGKLNARVLKTGQRLVNIIPDRLQIVERGKGITFIPRKEAEPALLP

SEQ ID NO: 22666 - protein, 420 aa, unidentified; identical to SEQ ID NO: 6017
  REGION 1..420: note = Human gut metagenome

SEQ ID NO: 22667 - protein, 426 aa, unidentified
  REGION 1..426: note = metagenome
LAKDHYRSIDREETNLRVYVLNKRGEPLMPCSAAKARILLKEKKAKVKRRTPFTIQLTIATGETTQPVNLGVDAGYEHIGLSASTEKAELYASEIELRQDIPELLAARRALRGARRSRKTRYRAPRFDNRKRDKGWLAPSVENRIGAHVSRVEAVLRILPVTKIIVETASFDVQRLKHPDIQGVEYQEGEQLGFWNVREYVLFRDGHECQHCHGKSKDKVLNVHHIESRRTGGDAPNNLITLCETCHKAFHRGEFELKVKRGRSFQAEAFMGVMRWTFFERLRARHPEIEVRNTYGYLTKDTRIANKIEKSHCADAFCIAGNLKAKRLGYYFFQKQTRRHNRQIHKLTILKGGVRKRHQTPYEIKGFRLYDKVLYRGKVAFIFGRRSSGYFDIRTLDGERISASVSYKKLRLLEKRRTYLIELRRN

SEQ ID NO: 22668 - protein, 413 aa, unidentified
  REGION 1..413: note = Human gut metagenome
MTNYAFVLDVNGKQLAPTKEQKAWFRIRKKRATLISKYPMVIQLKKEISDEQICKDEICCGIDDGGLYVGVALVQKCKTKNKVVFKGTIEQRNDVKHLMEVRKGYRGYHRFHKRYRQARFNNRKSSKRKERIAPSILQKRQATIRVIKQLNKWINIANYLLEDVAIDIRALTDGYKLYRWQYQQSNRLDENIRKTVILRDDCKCMECGKSNCRLEVHHIKPRRLNGSNTLDNLISLCETCHQRTEGQEELYMDRYFSILNSTDNKNLNYAQHVMIGKKWLREQLSELGTLILTTGGDTANKRIDWNIEKSHSNDAICITGLQPDTCNVKEWTIKPMRRQSKAKTDNVLGIKHRDLVEYTFRNGETHRGYVTALYPEQNALNFQSPTKHCKRVNAKKCKLIWKYSKIYWLDNVS

SEQ ID NO: 22669 - protein, 426 aa, Methanosarcina sp.
MLVFVINQNKKPLMPCKPSKARKLLQAGKAKVVRNTPFTIKLLFRSSGYTQPVTAGMDTGSKVVGCAAIANGKVLYQSEIYLRENVSKKMEQRKMYRRTRRSRKTRYRPARFDNRGNSKKEGRLAPSIRSKLEAHFREKRFVESLLPVTEWKVELASFDIHKITNPEVSGIGYQEGDLKGFYNIKAYVLDRDGYTCQHCRGKSKDSRLHCHHIVFRSQKGTDAPENLITLCETCHKALHNGEFKLSGKKSKTKHATEVGIIKSQIRKSGWNFAETFGYETKYRREQVLKLLKTHYFDAVAICCRDEQKVEVEESVFLKRNVSKGDYQQRTGKRSEKKIHTGKLFNLRKFDLVKTSKGIGFVKGKRSSGFFAISDMFGNKISDSVNVKKICERLRARTSTLIQQSRTGKFTHSSPELKTQGFHAEGL

SEQ ID NO: 22670 - protein, 441 aa, unidentified
  REGION 1..441: note = Human gut metagenome
ERLMPTSEYRARKLLKSGKAIKHSYHPFTIQLTERETGDIQPIELCMDTGYIHIGISVKSEKHEYLAEQIDTLTNERSRHDACRMYRRQRRSRKRYRQARFNNRKRDQGWIAPSLEHKKKIHIQAISRINNVMPITDITLEMGNFDTQVLKAKEEGKPLPHGADYQHGGRYGIATLREAVFSRDGYKCQCCGRTIKDGVILHIHHIKYRSQGGTNSMSNLATVCDKCHTPKNHKPGGKLYNWKPKLSSFKGATFMTAIRWQLYNEVKALFPDIDIHITYGAATKERRRKLDIDKSHVNDAFVMGQFHPKHRIKAILCKKKRRNNRCLEKFYDAKYIDSRDGKKRSGQELFNGRINRNHKKNSENLHQYRLQKVTAGKRTVRKQHYKIQPHDIVIYESRKREATGCHCSGTRVMLLPDKKSVSIKKIKIYKYAGGYFKSAFN

SEQ ID NO: 22671 - protein, 350 aa, Microcoleus sp.; identical to SEQ ID NO: 19626

SEQ ID NO: 22672 - protein, 453 aa, Moorena sp.; identical to SEQ ID NO: 4156

SEQ ID NO: 22673 - protein, 414 aa, unidentified; identical to SEQ ID NO: 4924
  REGION 1..414: note = Human gut metagenome

SEQ ID NO: 22674 - protein, 354 aa, Moorena sp.
LCYLTGKYTQDIELGIDAGYSAIGFSATTDKRELISGELILRKRISKLIEQKRNYRKGRRNKLWHRKLRFNNRSKPEGWFAPSIQHKLETHLRLIEKLKKILPITKITIEVAKFDQQKMNKTEIKGVEYRQGELQGYEVREYLLEKWKHKCAYCGKNNLPLEIEHIIPKIRGGTNRVSNLTIACHKCNQKKGDKTAAEFGYPEIQKKAKQTLKATAFMNIVRWRLVNTLECGWTYGYITKHDRIKLGLEKSHVNDAFVIAGGTTQSRSKLYMATQTRRNNRSIQTNRVGFKPSIRRQRYELQPNDLVKYKKILCKVKGGFSYGKWVRLVTKAGKIINTNVKKVELVKYGKGIQF

SEQ ID NO: 22675 - protein, 416 aa, unidentified
  REGION 1..416: note = Human gut metagenome
MVYVLGQDGHPLMPTCRHGKVKRMLKSGMAKVVKKCPFTIQLQYESTTHTQKINLGIDAGSKTIGVSATTETKVLYESEVALRNDIVELISGRRALRSSRRNRKTRYRKPRFDNRKRPDGWLAPSVRQKIETHITVVENVMKILPVTKIIVETASFDIQKIKNPEIEGVGYQHGEQLDFWNVREYVLFRDGHTCQCCKGKSKDNILNVHHIESRKTGGNAPNNLITLCETCHKAYHKGIITLPKEIHRGMRFRDAAFMGIMRWAFYDRLKELYTPFGVTVVNTYGYITKNTRIEYGLPKEHYVDARCISGNPAAKPLDHYYFQKKVRCHNRQIHKNTILKGGYRKRNQVEYEVKGFRLYDQVLWKGQKCFIFGRRSTGRMDLRLLDGTHVNASVGYKNLKLLSMRKNYLIEQRKAG

SEQ ID NO: 22676 - protein, 425 aa, Ktedonobacter sp.; identical to SEQ ID NO: 6721

SEQ ID NO: 22677 - protein, 396 aa, unidentified
  REGION 1..396: note = Human gut metagenome
VRRTPFTIKLTIATGETKQDVTLGVDAGARHVGISATTEKEEVFASEVKLRQDITGLLADRLAFRRARRNRKTRYRAPRFNNRVRSKHKGWLASSVENRIQAHMSRIDAVCRLLPVTKIVIETASFDIQKIRNPEVEGTGYQQGDQLGFWNVREYVLFRDGHVCQHCHGRSRDKILNVHHLESRKTGGDAPNNLITLCETCHKAYHAGKIKLKVKRGHSFRAEAFMGIMRWTLLDRMRKAHSGLPVENTYGYLTKNTRITLGLPKAHCVDAYCIAGNLKAVRRGVCLHQRQVRKHNRQIHKFTVLSKRLEDGTKIGYRKLNQSPYLVHGFRLFDKVRCLGQIGFIFGRRSSGYFDVRRLDGVKLSPSISWRKLTLLEKRSTYLTELRKQDGASSPV

SEQ ID NO: 22678 - protein, 431 aa, unidentified; identical to SEQ ID NO: 4133
  REGION 1..431: note = Human gut metagenome

SEQ ID NO: 22679 - protein, 396 aa, unidentified
  REGION 1..396: note = Human gut metagenome
LDKRKRPLGHCTTKRARQLIEKGRACVYRYYPFTIIIKDLDVRKIEVHHDYRIKPDPGAGYTGISIIEDDRVIAYFELQHRGSEIVDRLQTRRNSHRNRRSRETGYRRCKFPKNGVYETSREKGWLPPSQMSILNNVLNFVRRLEKLLGPCKISIELVKFDMQLLENLDIKGEDYQHVELYNYELKTYLLEKYQHTCQYCANETGDHRLEKEHMVPKSRGGSDSLKNLILACHTCNQKKADRTPEEWLDALKAKKNAGDMDKKRFECLEKVVEGKKVGQELRYAAWTNSMRWRLYNALRELSADGTVSVGTGGRTAYNRNKLGIPKAHHLDALCCTKDVPENGYRNAVQPCLVVKATGRGGRLLGTINDCGIITTKFYQRNKRVNGIQTGDIVQAV

SEQ ID NO: 22680 - protein, 435 aa, unidentified; identical to SEQ ID NO: 11554
  REGION 1..435: note = Fermentation metagenome

SEQ ID NO: 22681 - protein, 428 aa, Moorena sp.
MNKVFVLDTHQQPLAPCHPAKARKLLRAGQAAVYRAYPFTIILLRAVAEPVAPPLRLKIDPGSKVSGLAIVNDASGEIVWAAEVAHRGEPIRTALAQRASVRGNRRSRKTRYRPPRFLNRRRRAGWLPPSVASRVANVMTWVRRLCQLCPIQALALELARFDTQALQNPEISGVEYQQGELWGYEVKQYVLEKWGRQCAYCDATQVPLEVDHIVARDRGGSHRVSNLTLACVLCNQKKSNHDIRDFLAHDPARLARLLAQAKAPLKDAAVLNSTRWALYEALVATGLPLEVGTGGRTKWNRSTRGLPKTHWLDAACVGASTPEVLWTSGTLRPLQIRATGHGSRQMCAMDKHGFPRTRAKGAKRVQGFQTGDIVKAIVPTGKKQGTYVGRVAVRASGSFNIRTAGGLVEGISYRYCRLLHRVDGYSYS

SEQ ID NO: 22682 - protein, 426 aa, Moorena sp.
MVFVLSSDEQPLDPCHEARARKLLKAGRAVVWRTYPFTLRLKDRTTAESEVHDHRLKIDPGSQTTGIAIVQEGTDRVVWAGELTHRGGQVRDALLARRAVRRSRRQRHTRYRTARFLNRRRKDGWLAPSLHHRILTTLTWVRRLRHLCPIAATSMELVRFDTQLMENAEISGATYQQGELAGYEVREYLLHKWGRTCAYCGKGNRPLQVEHLIPKMRGGSNRVSNLTIACGPCNQEKGNRTASEFGFAHLMAQAKAPLKDAAATNSVRWALWRSLSALGLPLEAGTGGRTKWNRTRLGWEKAHWRDAAAVGASTPETLRVAVGSVLLIVAKGHRSRQSCRTNKHGFPIRHVPRRKRWFGFRTGDLVRAVVPGGKHAGVHVGRVAIRVTGKFNIATAQGLKQGISYRHLRIVQRADGYAYGYRKESA

SEQ ID NO: 22683 - protein, 460 aa, unidentified
  REGION 1..460: note = Human gut metagenome
VQLRQSDAGQSFVLCCLSDNQKGRHNHMYVYVINKHGQPVMPCRPRMARVLLQKHKATVVKQVPFTIRLLYGSSGYKQPVSLGMDAGSRHIGIAATTEKKVLYAEELKPRNDVVKLLSVRRQNRRARRSRKIRYRQARFDNRVSSKPKGWIAPSVEVKIQEHISAVMRIQKMLPVSEIHVETAEFDTQRLKAMEEGKPVPVGTDYQKGEMYDQYNVRQYVLFRDGYRCQCCGKHGDGVKLHVHHKESRQTGGNAPNNLITLCEDCHKALHAGTVQLPDGRAKRGRSHRDAAFMGIMRKAMVSQLRDIVDIPVTETYGYITKYYRELYHVEKSHISDAIMISRNFKAEPDDTYYASKAVRHHNRQLHKNTILKGGVRKRNQAPHVVRGFRLFDLVRYESSVYYVFGRRKSGFMDIRTLDGRKINKGSISNKRLKFVSTSKGMLVERRMAIPLADKSASFLA

SEQ ID NO: 22684 - protein, 414 aa, unidentified
  REGION 1..414: note = Human gut metagenome
RGFARYKGLNTGKEKKAIVVRRTPFTIQLTIATGEAKQPVSLGVDAGYKHVGLSASTEKAELYASEIELRQDITDLLSARRELRRARRNRKTRYRAPRFDNRIHTKRKGWLAPSVENRINAHLSRIEAVLRLLPVTKITVETASFDMQLLKNPDISGKEYQEGEQLGFWNVREYVLFRDGHVCQHCHGRSKDPVLNVHHLESRRTGGDSPGNLITLCETCHKALHRGEITLKAKRGQSFRAEAFMGIMRWEVLNRLKASHPELEVNNTYGYRTKHARISNGIAKSHCADAFCIAGYLGAKRLGKFFFQKQTRRNNRQIHKLSILKHGLRKRNQAPFEIKGFRLFDKVASKGEEGFIFGRRSSGYFDVRKLDGTRISAGISYKKLHLLEKRQTYITEIRKEKALPPLPEGRGLRA

SEQ ID NO: 22685 - protein, 451 aa, unidentified
  REGION 1..451: note = Human gut metagenome
MSVAVISKTGERLMPTSEYRARKLLKSGKAIKYSYHPFTIQLTERKTGNIQPIELCMDTGYIHIGISVKSEKHEYLTEQIDTLTDERSRHDACRMYRRQRRNRKRYRQPRFNNRKKNKGWIAPSLEHKKNMHIQAISRINNVMPLTDITMEMGNFDTQVLKAKEEGNPLPQGADYQHGERYGIATLREAVFTSDDYKCQCCGRTIKDGAILHVHHIKYRSQDGTNSMSNLATVCDKCHTPKNHKPGGKLYGWKPKLPSFKGATFMTTIRWQLYNEAKALFPDIDIHITYGAATKERRRELNIDKSHINDAFVMGQFHPRHRIKAVLYKKKRRNNRCLEKFYDAKYIDSRDGKKRSGQELFNGRISRNHKKDSENLHQYRLQKVTAGKRAVRKQHYSIQPHDIIVYENRKRETTGCHCSGTRAMLLPDKKSVSIKKIKIYKYAGGYFKSAFN

SEQ ID NO: 22686 - protein, 418 aa, unidentified
  REGION 1..418: note = Human gut metagenome
MVTVQQSTHHLPFGRVFIRRNLFMVYVISQDGKPLMPCSDPIARLLLKQGKAKVKKREPFTIKLTYETTNYTQGLTLGVDTGSGTIGTAVSKDNGDIVYMSEVVVRNDITDKMTQRAKYRRNRRNRKTRYRKARWLNRASSIKKDRFSPTMQSKLHSHVREIEYIQSILPVTEMVFETGQFDMQLMKNPSLANPKVRPWGYQKGANYGFENTKAMVLNRDNYTCQCCKGKHKDSKLEVHHIVFRSQGGSDEESNLLTLCHTCHKDLHSGKINPKLSGKLKGNLKYATQMNSIRKQLFRFYPNAIETFGYVTKANRLHLGVDKEHYYDACTIATQGNAFNVKSNLYKKKCVSDGDFQKTKGIRSEQPIVTDKICGFRKFDKVRYFGNDYFIKGRMSTGYAILMDIDGNKIDFSTMPRGY

SEQ ID NO: 22687 - protein, 431 aa, unidentified
  REGION 1..431: note = Human gut metagenome
MPDKVYVISRLGHPLMPCSPAKARHLLDDKKAKVVKRMPFTIRLLYGSTKYIQPIILGVDAGSKTIGLSASTAKEEVFAAEVMPRNDVVENLSTRREFRRARRNRTTRYRKPRSDNRVRSNHERWLAPSVKVKIQEHITSIKRVCTILPISKVVIETAEFDLQLLKAIQEGKPIPEGEDYQKGEMYGSYNVCQYVLWRDNYTCICCGVRGTPKNPVRLHVHHFESRKYGGNAPDNHGTLCDDCHKKFHLGIITDVKLKTRRQQSTRDAAFMGIMRKALMWRLRTELFIPVAETKGYITKATREKLLVLPKSHTRDALAIAQGRHGFGIKEYAYVEPANHIYTVRPVRHHNRQLHKASILKGGIRKRNQASKYVFGFRLYDKVLYQGKACFVWGRRTSGTFLLRTIDGIKVKDGVSYRNLTLLERSSNYLIA

SEQ ID NO: 22688 - protein, 450 aa, Clostridium sp.; identical to SEQ ID NO: 10358

SEQ ID NO: 22689 - protein, 411 aa, unidentified
  REGION 1..411: note = Human gut metagenome
MVYVQDIDGKPMMPTTRHGKVRRLLKDNKAVVVNTCPFTIKLTYKTSDYKQEIVLGVDAGTKHVGLSATTKSKELYASEVILRSDVVDLLSTRRGLRRTRRSRLRYRKQRFNNRVKSKKDGWIAPSVRHKIDSHVRIISFVYSILPVSKLIIEVAQFDTQKIKNPEISGKEYQEGEQLGFWNVREYVLARDGHKCQHCKGESKDPILNIHHIESRKIGGDSPSNLITLCETCHKEFHKGNIKLKVSRGKSLRDAAVMGIMKWKLYEELRSRYDNVSMTFGYITKYNRINHGIEKSHVSDAFVISRNFNSCRLGYYYKRKLVRRHNRQIHKMKILKGGIRKRNQAPFKVFGFRLFDKVMFQGEEHFIYARRLSGQFNIRDINGENKKDVSCKKLKYVSHGLVSVKTNLFLSQ

SEQ ID NO: 22690 - protein, 477 aa, unidentified; identical to SEQ ID NO: 14838
  REGION 1..477: note = Human gut metagenome

SEQ ID NO: 22691 - protein, 412 aa, unidentified; identical to SEQ ID NO: 4932
  REGION 1..412: note = Human gut metagenome

SEQ ID NO: 22692 - protein, 417 aa, unidentified; identical to SEQ ID NO: 6596
  REGION 1..417: note = Human gut metagenome

SEQ ID NO: 22693 - protein, 421 aa, unidentified; identical to SEQ ID NO: 4757
  REGION 1..421: note = Human gut metagenome

SEQ ID NO: 22694 - protein, 416 aa, unidentified
  REGION 1..416: note = Human gut metagenome
MVYVLDKNGQPLMPTDRHRKVRLMLQSGQAKVIKRCPFTIQLNYDSGHQTQEISLGIDAGSKHIGVSATTKIKVLYEADVELRNDIVDLLSSRRELRRGRRNRKTRYRQAKFNNRRRGNGWLAPSIRQKIGTHLIVVENICKILPISRIMVETASFDIQKIKNPDIQGAEYQQGDQLEFWNVREYVLFRDGHTCQCCKGKSKDKILNVHHIESRKTGGNAPNNLITLCETCHTGYHKGTVQLPKAIKRGMRFKDAAFMGIMRWAFYEALKQQYEPVGTPVHNTYGYITKHTRIEHNLPKEHYVDARCISGNPDAFPNGEYYYQKKVRCHNRQMHKLTILKGGIRKQNQATYLVKGYRLFDKVSYQGKGYFVFGRRQSGFFDIRTLSGEKVNKGSLSCKKLKFIATRMYYLIERRAV

SEQ ID NO: 22695 - protein, 392 aa, unidentified
  REGION 1..392: note = Marine metagenome
MAVFVLDKKKQPLMPCSEKRARLLLARGRAVVHKRYPFTIRLKDRVGGETQPLRLGIDPGSKTTGLALMREPDSQQRHVLCLFELIHRGFQIKKALQQRAAFRRRRRSANLRYRAPRFNNRTKPKGWLAPSLQHRVDTVMAWVNRLSRLAPVTAISQELVRFDTQKLDNPEISGVEYQQGTLLGYEVREYLLEKWGRECAYCGTGDTPLEIEHVVPRSRGGSNRVSNLTLSCHPCNQSKDALSLVDFFATDKGLKKRLKANGHTANARLERVQRQLKQPLRDASAVNATRWALFSALNATGLPVTVASGGRTKYNRQRLNIPKSHALDAACVGAFEKLHDWTVPTLTIKAMGRGSYQRTRLTKYGFPRGFLMRQKQVHGFQTGHGACDSTHR

SEQ ID NO: 22696 - protein, 470 aa, unidentified
  REGION 1..470: note = Human gut metagenome
MSVFVVGLNGCRLMPTSERKARLLLKQGKAFVGQKVPFTIRLNYKTGSTTQLGYLGIDTGSQHIGVSVVREDGTVLHKEEIGLRDSMSKRKLLEAKASLRRGRRYRKTRYRHPKWRPKTKRVYCEVPDRKGRHWQKKKITFTSKRPKGWLPPSLQSKTDHHIRWIKKLQDLLPEGYRLSIELGRFDPARMKNPEIHGDLYQKGPQYDYENVRAYVLDRDRYTCQICKKKGGKLHVHHILYRSHGATDDPQYMVTVCSDCHSAQNHLPGGILYQWMQEQKRFSRGLRDATFMNILRKRLIRAFPEAVFTYGNVTKVDREKLKLPKSHGNDATAIALVKTGITAVKDKESVICIQQVRRKKRSLHEETPRKGRKEPNRTAARNNKNTKAVTVTKRQNKKKVSMTGCLFDRVELNGKKGWISGFTGKSCYVKDADDQYLSTSPKYKQVSLSKLRILHHCGNWIIGAKKTLGKG

SEQ ID NO: 22697 - protein, 442 aa, unidentified; identical to SEQ ID NO: 2903
  REGION 1..442: note = Human gut metagenome

SEQ ID NO: 22698 - protein, 477 aa, Blautia sp.; identical to SEQ ID NO: 2707

SEQ ID NO: 22699 - protein, 769 aa, unidentified
  REGION 1..769: note = IscB polypeptide
VVVRPQGKLDHIPIPKPERGGITIRSENVLGIDFGPEHVGLALVRREPAGEQVLYAASITLRDLSPVMKERRALRRQRRSESWYRQPRVPQRGGGSARGAGAQEDEQAVEGVPEEEEDRSRARSAPEYRRAQGCNKPKRKCKYVDPKTGEVCGANTPRKEKVRDLLLWDICQHLPVEPEQRLAILSYVNQVNIVRPEVLACLALEERALLENHRALARASKSKPLPQLLCELKIKKQLQSQILAIASGDPERKAADLKGRMPFCRKHFLLHHEQTRIPKPSAWLPPSIRCRHADLERVCREEVAPRWPVHRIRLERAQFDLQAIQRDPQGRGKDWDPEEWQRGPCWGRRNIYSAKRHEQGNRCAYCGKNPKKENRLELEHVKPGGGNTWDNLVLACRKCNQRKGKADAPGAGLEFSVDPDTGVSLAPRGLGESVVARYMTQTDQGYRELVARLQQLFPDAQIEYRYGYQTDHIRKRWIGSAQFAETALSLGYKQSPPRPKKRRKQWTELAHLKRKPRRHSDPLKSHVMDAVAIASALELDSPPQLCPAEKIILRPSRRQLFDTNPLQRGSDDKFYQRVKICGTQGGLAFDKLKHVVDDSKRAILERVRDRLIEQAKVIEQPKGNKESPPSAFTPDAAQLIPFTSVRLAKRDASKTNTRRLKGGHWYKVAGGPNWATVVYRLGVREQVIVIRNPAVFPDDSAELPKGAQVLFSFRKGELVSFEQDGQTTRARITKNNSNGTLTVERLDDGREVTRSARCFRPVPLLAPNA

SEQ ID NO: 22700 - protein, 460 aa, Moorena sp.; identical to SEQ ID NO: 3859

SEQ ID NO: 22701 - protein, 450 aa, Desulfobacter sp.
MKVFVLNKHGKPLMPTTPRKARLLLKEEKAKIVSHSPFTIRLLYGSSGYKQKVKLGIDAGYKTIGFSAVSQKDELVSGEVKLLENQSERIRDRAVYRRQRRNRKRYRPARFDNRKRKEGWLAPSIQHKLESHIRIVNLIKKIVPVTEIVIEVASFDIQAIKNPDIEKMQYQQGKQSGFWNLREYILHRDKHQCQSETCQQKKTQPKNQALAVHHIGYWKKDRTDRPENLITLCSKCHSPANHKQKGSLYGWEPTVAPFRGETFMSQVRWRLVNKLEHCRHTYGYQTKSKRIDLELEKTHYNDAFVIAGGQRQNRTEVLIFQEKRKNNRCLEKFYDAKFIDIGSGKKVGGADLPCGRVKRNKGHEKNGENLKKYRGKKVSKGRRQIRKQRYPIQPHDVVKYNGNFYRAVGIQNKGKYLKMSDGTDKIVKNIKDIEIVFHQKTLVLIDAISM

SEQ ID NO: 22702 - protein, 442 aa, unidentified
  REGION 1..442: note = Human gut metagenome
MVYVLNKDGQPLMPTNRHGKVRRLLKTKKARVIKRCPFTIQLLYDTANHTQNITLGVDAGSKHIGLSATTEDKVLFEADVELRNDISKLLEARYKFRRSRRNRKTRYRKKRFDNRISSKHKGWLAPSIEHKIQSHFAMVEKVHRILPVTKIVVETASFDMQLLKAQLEGKPIPQGTDYQNGELAGWNIREYIFHRDNYTCQWCKGKSKDPVLVTHHHAYWKGDHTNKPSSLITLCNTCNDSKYHKKEANRLWGWEPKITNSYKHAAFMGVMRWTFYNRLKEIYPNVSMTYGYITKNTRIENNLPKAHYVDARCISGHPEAKSNGEYFYYKKVRCHNRQLHKANTLKGGIRKRNQAEYIVKGFRLFDRVEYQNNEYFVFGRRASGFFDIRTLDGQKVNKGSISFKKLKLKETSRTYLIERRMADTGVSLAPLTTEVTSLRQTI

SEQ ID NO: 22703 - protein, 476 aa, unidentified
  REGION 1..476: note = Human gut metagenome
LEVVGTEGVSHPGLPGKYKHKGGQLMSVAVISKTGERLMPTSEYRARKLLKSGKAIKHSYHPFTIQLTERETGDIQPIELCMDTGYIHIGISVKSEKHEYLAEQIDTLTDERGRHDACRMYRRQRRSRKRYRQARFNNRKRDQGWIAPSLEHKKKIHIQAISRINNVMPITDITLEMGNFDTQVLKAKEEGKPLPKGADYQHGERYSIATLREAVFSRDSYKCQCCGRTIKDGAILHIHHIKYRSQGGTNSMSNLATVCDKCHTPKNHKPGGKLYNWKPKLSSFKGATFMTAIRWQLYNEVKALFPDIDIHITYGAATKERRRKLDIDKSHVNDAFVMGQFHPKHRIKAVLYKKKRRNNRCLEKFYDAKYIDSRDGKKRSGQELFNGRINRNHKKDSENLHQYRLQKVTAGKRTVRKQHYSIQPHDIIVYESRKRETTGCHCSGTRVMLLPDKKSVSIKKIKIYKYAGGYFKSAFN

SEQ ID NO: 22704 - protein, 420 aa, unidentified; identical to SEQ ID NO: 6836
  REGION 1..420: note = Human gut metagenome

SEQ ID NO: 22705 - protein, 423 aa, Arthrospira sp.; identical to SEQ ID NO: 7646

SEQ ID NO: 22706 - protein, 470 aa, unidentified; identical to SEQ ID NO: 2825
  REGION 1..470: note = Human gut metagenome

SEQ ID NO: 22707 - protein, 487 aa, unidentified
  REGION 1..487: note = Human gut metagenome
VQDVFAGIDSGRENIGSGVSNEDGDCLYLGELKTSNKSIKIKMTERTGFRRERRRHDRQSKQRKAKKDHTEIQNGNDDICRTTISCKSVQISYPAAEESVTHKIIRGKEGKFANRHRDEGWITPSARQLVQMHMNDLKSMCKILPINHVTLERVAFDFQKLENENIKTWEYGKGKLYGYDSPEEYIHDVQNGKCLVCGKPHIDYLHHIIPRSKGGSDKVSNIAGLCYDCHYGPMGVHNCQNTQDRLPELKSEANKQYKVSLLNSVMPVLIEEIDKFCKANSIMFSICEGHDTAKVRDMYDLQKDHCLDGFAISLVGRNVKSVDVMPDRIHQKQRYKKKSKNIIQKRNYREYYDDKKLVAINRHKGTDQKADSLEEYMNTYAETHTTDECKKHFDSLVVKPARRTYTFHKEWRICPFHIGDKVRYEKKNKIKGNTKVDTFICEGIYFSKDENKAKVEHNKTKSKKMKFCRAIESGCIPYIDYIKLALI

SEQ ID NO: 22708 - protein, 413 aa, unidentified; identical to SEQ ID NO: 15509
  REGION 1..413: note = Human gut metagenome

SEQ ID NO: 22709 - protein, 431 aa, unidentified
  REGION 1..431: note = Human gut metagenome
MPNKVYVINKHGRPLMPCSPAKARHLLDEGKAKIKKRTPFTIQLVYGSSGYTQEVILGVDAGSKTIGMSVSTTKEELLSAEVKPRNDVVDLQSTRREFRRARRNRKTRYRKPRFDNRVRSKHKGWLAPSVEVKIQEHITSIKRVCRILPVSKVVIETAEFDLQLLKAIADGKPVPQGEDYQKGEMYGHYNVRQYVLWRDDYTCQCCGAHATKKKEVWLHVHHLESRKTGGDAPGNLVTLCDSCHEKLHKGLIAEKDFKKRKRRSTRDATFMGIMRKTLMQRLCSELPIPVVETRGYITKATREKLLVLPKSHTNDALAIAQGKRGFNVGYLPGIIQTDKIYTIRPVRHHNRQLHKAAILKGGIRKSNQVGKYVFGYRLFDKVQFNEQDCFIWGRRTTGIFTIKTINGKMIKDGISFKKLKLVEKSTSYLIA

SEQ ID NO: 22710 - protein, 448 aa, unidentified
  REGION 1..448: note = Fermentation metagenome
MSVYVINQRKQLLMPTTEQKARLLIKQGKAKVIKIKPFIIQLLYATGETKQPITLGIDSGYNNIGFSAITDKKELIVGELKLLQNIKERLLERAMYRRQRRSRLRYRKPRWNNRIKSKQKGWLAPSLQHKLNSHIKFIDSLYKILPITKCIVEIANFDIQKIKNPNIKGIEYQQGEQSGFYNLREYILHRDDHKCQNPNCKNKDKEKILEIHHIKYKSFGGTNNPNNLITLCTKCHTSPNHKKGKFLYNWYMEGKKVRGFKDATFMSTIRWCLVNQLKEKYNNVSFTYGYITKNHRIENKIEKSHYNDAFCIAKGINQIRNNKIWQLQQCRRNNRSLEKFYDAKYIDTRTGHKVSGSELNCGRRTRNKNKNSENLRVYRGQKLSKGQRRIRKQKYFYQPNDLIKYEEKIYTVKGTQNGGKYVALKEIKKVPRIELIKPYKFQKGIVWN

SEQ ID NO: 22711 - protein, 431 aa, unidentified; identical to SEQ ID NO: 8901
  REGION 1..431: note = gut metagenome

SEQ ID NO: 22712 - protein, 325 aa, unidentified
  REGION 1..325: note = Human gut metagenome
MYCAVMPITHATVEVGSFDTMLVKAIQEGKAIPEGADYQKGPRYNLATLREAVFYRDNYTCQVCGRKVADGAILHMHHMFYWKGRHGDSLNELLTVCEKCHTPANHQKGGKLYGFGENVKFADLSGAAFMNTVRWQIVNELYAAFGKDFVTVTYGAMTKEKRIALRLEKSHNNDAYAMGEFHPNCRCTFEHYEKVRRNNRILEKFYDSRYIDIRTGEIATGKELFNGRINRNHKKDSENLHRYRGKRTYAGHRALLRKKVNLNPGDLVSLNGEVLVVHSTHTNKKGAVNVEFKTPGKSGQKSASLKKLKIVKAADSMHSAWEKIS

SEQ ID NO: 22713 - protein, 418 aa, unidentified; identical to SEQ ID NO: 4327
  REGION 1..418: note = Human gut metagenome

SEQ ID NO: 22714 - protein, 416 aa, unidentified; identical to SEQ ID NO: 16735
  REGION 1..416: note = metagenome

SEQ ID NO: 22715 - protein, 448 aa, unidentified
  REGION 1..448: note = Human gut metagenome
MSTGLRAVQAEPAGIRKGDALKVFVLNMRGRPLMPCSPARARHLLKAGKAVVRRRTPFTIQLRIATGETKQSVTLGVDAGAKHVGLSAATEKEEVFASEVELRQDITGLLAARLSLRRDRRHRKTRYRAPRFLNRVRSKHKGWLAPSVENRIQAHMSRIDAVCRLLPVTKIVIETASFDVQKIRNPEVEGTGYQQGDQLGFWNVREYVLFRDGHVCQHCHGHSKDKILNVHHLESRQTGGDAPNNLITLCETCHKACHAGKIKLKVKRGQSFRAEAFMGIMRWTLLDRVRKAHPGLPVENTYGYLTKNTRITLGLPKAHCVDAYCIAGNLKAVRRGVYLHQRQVRKHNRQIHKCTVLSKTLKDGTKIGYRKLNQTPHLVKNFRLFDKVRCLGQTGFIFGRRSSGYFDVRRLDGVKLSSGISYRKLTLLEKRSTYLTELRKEDGASSPV

SEQ ID NO: 22716 - protein, 421 aa, unidentified
  REGION 1..421: note = Human gut metagenome
MQYVYVLNKHGKPLMPCSPGKARLLLKEGKARVVKRTPFVIKLLHGSAGYKQPVALGVDAGSRHVGLSACTEGRELYKEELSPRNDVVELLSVRRQYRRSRRNRKTRYRAPRFNNRVHSKHKGWLAPSVEVKIQEHITVIKRVCRILPIVLVRVETAEFDTQRLKAMLEGKPLPVGSDYQLGEMYDEYNVRQYVLKRDNYTCQCCGAHPAEKKPVRLHVHHIESRHVGGNAPNNLITLCAVCHKALHEGKITLGNGKKRGKPLRDAAFMGIMRNTLLARLKDELNIPVKQTYGYITKLLREENHVEKSHTNDARCIAKAPNAKPCDTMFRTRALRHHNRQIHKAKILKGGTRKKNQAPYLVKGFRLWDKVRYNGEECFITGRRTSGYFAIKKYDGTVISNSASYKKLTLLEAATNYITERS

SEQ ID NO: 22717 - protein, 498 aa, unidentified
  REGION 1..498: note = Human gut metagenome
MDGDPQMPIKRKRHVEQLLQTGRARVFRQVPFTIQLTYKNEPVLQPVTIAEDPGRSNIGMAVVSLSGELLSAAVVQTRNKEIVKLMDKRKQHRRASRNGERKARQRLAKKCHTMVKAGSLMRKLPMYGKDKRVRCNVIKNTEARFCNRKREDGWLTPSAEHLVRTQINLIHKMQKFLPITDVAIEINRFAFLSLEDPSISGVDFQNGPLKGYDDLNAAVEDLQDGHCLMCNSPIEHRHHIVPRSMQGSNSIGNIAGLCCKCHERVHKDSAFEDSLKKKKAGLNKRDAAVSVLNQAIPFICKRLEQEFRKEHVHYCSGRDTSMVRRSLGYHKTKEEQLHEVDAWCIAVLSLQQIPEKAPSFDHVHEILQFRRQDRSRIKAQTSRAYYHERKKIAKNRKKAEGQREDSLQEWRKRQVERYGEEQTRKMISQLKVKKSIRRYKRLDRLMPGAVFYYQGVRYVMRGQHCEGTYLQAVGMGSKDFPAKKCKIVAHNEGLVFVS

SEQ ID NO: 22718 - protein, 309 aa, Methanosarcina sp.
VVSRIPFTIKLTYNSKGYTQPVVAGMDSGSKKIGCAAVGNGKVLYQSEAEIRQDVSAKMKQRAMYRRTRRSRKTRYRPARFDNRRNSLREGRIPPSIRSKLESHFREKKFVESILPVTKWGVELASFDIHKITDPSVSGIEHQNGDQKGFYNLKAYILNRDKHTCQHCKGKSKDPKLHCHHIIFRSQKGTDTPKNLICLCNTCHDALHRGEFQLSVKRSKTKHATEIGIIKSQIKKSDWNFIETFGYETKYKREQMLELPKTHYFDAVSICCNDQKVELEDIFYLKKNMLVKEIISREREKIRKEDSNW

SEQ ID NO: 22719 - protein, 284 aa, Moorena sp.; identical to SEQ ID NO: 3117

SEQ ID NO: 22720 - protein, 424 aa, Succinivibrio sp.; identical to SEQ ID NO: 6253

SEQ ID NO: 22721 - protein, 432 aa, unidentified; identical to SEQ ID NO: 7963
  REGION 1..432: note = Freshwater metagenome

SEQ ID NO: 22722 - protein, 423 aa, Clostridium sp.; identical to SEQ ID NO: 5342

SEQ ID NO: 22723 - protein, 423 aa, unidentified; identical to SEQ ID NO: 3951
  REGION 1..423: note = Human gut metagenome

SEQ ID NO: 22724 - protein, 470 aa, unidentified; identical to SEQ ID NO: 2949
  REGION 1..470: note = Human gut metagenome

SEQ ID NO: 22725 - protein, 465 aa, unidentified; identical to SEQ ID NO: 6446
  REGION 1..465: note = Human gut metagenome

SEQ ID NO: 22726 - protein, 517 aa, Leptospirillum sp.
MLPQSRALEAADADNREGQDETVGGKGAIPKPVANISEGRRFARSALRPQGQCNVRFDGGFVQVFVLDKKKKPLMPCHPARARELLREGRAVVHRIAPFTIRLKDRIGGETQPIRVKLDPGSKTTGLAVVREEETDGEKTAHVLFQAEIHHRGSAIKKKLDQRRAFRRRRRSQLRYRTPRFDNRTRPDGWLPPSLRHRVDTTLAWVERLRRLVPVSELSQELVRFDMQKIENPEISGVEYQQGTLAGYEVREYLLEKWGRTCAYCGSENVPLEIDHIHPRSLGGSDRVSNLTLACRSCNLKKGNRPVGEFLAKTPERLSTILARAKAPLKDAAAVNTTRWALFQALKATGLPVETASGGRTKYNRTRLGIPKGHSLDAACVGKVDRIEGWNRPCLSIKSTGRGSYQRTRLDAFGFPRGSLTRTKAHFGFQTGDRVRAIVTKGKKTGTYAGRVAVRSSGSFNIQTGSGVVQGISCKDCRLLQRADGYGYSIHPIIEKGEAGEALPLPGMNAGVSRARG

SEQ ID NO: 22727 - protein, 415 aa, unidentified; identical to SEQ ID NO: 3635
  REGION 1..415: note = Human gut metagenome

SEQ ID NO: 22728 - protein, 485 aa, unidentified
  REGION 1..485: note = Human gut metagenome
DVFAGIDSGRENIGSGASNEDGDCLYLGELRTSNKSIKMKMTERVGFRRERRKHDRQNKQRKARKDHTEIQNGKDDICRATISCKSVQISYPTAEESVTHKIIRGKEGKFANRHRDGDWITPSARQLVQMHMNDLKSICKILPISHVTLERVAFDFQKLENENIKAWEYGKGKLYGYDSPEEYIHDVQDGKCLVCGKPHIDYLHHIIPRSKGGSDKVSNIAGLCYDCHYGPIGVHNCQDTQDRLPELKNEVNKQYKVSLLNSVMPVLIEEIDKFCKANSIMFSICEGHDTAKVRDMYDLQKDHCLDGFAISLVGRNVKSVDVMPDRIHQKQRYKKKSKNIIQKRNYREYYDDKKLVAINRHKGTDQKADSLEEYMNTYAETHTADECKNHFESLTVKPARRTYTFHKEGRICPFHIGDKVRYEKKNKIKGNTKVDTFICECIYFSKDENKAKVEHNKTKSKKMKFCRAIESGCIPYIDYIKLALI

SEQ ID NO: 22729 - protein, 520 aa, Moorena sp.; identical to SEQ ID NO: 22462

SEQ ID NO: 22730 - protein, 400 aa, unidentified
  REGION 1..400: note = Human gut metagenome
EICEDVGYNYIGISVKSESHEYVSAQYDTLQDEKEHHDDCRRTRRTRRNRLRYRKPRFDNRKRNKDWLAPSLEHKKQLNISLIERYVSVIPITHATVEVGSFDTMLLQAIQKGEAKPESADYQKGPRYNLATLREAVFYRDNYTCQVCKRKIADGAILHMHHMFYWKGRHGYQLDELVAVCEKCHTPANHQKGGKLYGFGKDKKFANLSGAAFMNAVRWQIVDALHATYGKEFVTITYGAMTKEKRIILGIEKTHNNDAYAMGDYHPAHRCVFRHYQKRRRNNRVLEKFYDATYIDARTGNKAKGKELFNGRINRNHKKDSENFHKYRSKKVSKGRCSIRRQRYAIQPYDTVRLEGKTYITSGCHNKGTRLLIPVNGKSKSVAISKVQVVCHAGAWIQII

SEQ ID NO: 22731 - protein, 408 aa, unidentified; identical to SEQ ID NO: 3192
  REGION 1..408: note = Human gut metagenome

SEQ ID NO: 22732 - protein, 414 aa, unidentified
  REGION 1..414: note = Human gut metagenome
MPCSPAKARLLLKEKKAIVKRRTPFTIQLTIATGETKQPVGLGVDAGYKHVGLSASTDKAELYASQVELRQDITDLLSARRALRQSRRNRKTRYRAPRFDNRIRTKRKGWLAPSVENRINAHLSRIEAVLRLLPITKITVETASFDMQRLKNPDISGKEYQEGEQLGFWNVREYVLFRDGHVCRHCHGRSKDPVLNVHHLESRRTGSDSPDNLITLCETCHKALHRGEITLKAKRGQSFRAQAFMGIMRREVLNRLKASYPELKVHETYGYLTKHARIANGIVKSHGADAFCIAGNLGAERLGEFFFQKQTRRNNRQIHKLSILKGGIRKRNQAPFEAKGFRLFDKVACQGEEGFIFGRRSSGSFDVRKLDGTRISAGISCKKLRLLEKRRTYLTEIRKEEALPPLPEGRGLRA

SEQ ID NO: 22733 - protein, 451 aa, Blautia sp.
MSVAVISKTGEKLMPTSEYRARKLLKSGKAIKHSYRPFTIQLTEMETGDVQPIELCMDTGYIHIEISVKSEKHEYLAEQIDTLTDERTRHDACRMYRTQRRGRKRYRHTRFNNRKRDKGWIAPSLEHKKNIHIQAISRISKVMPVTDITMEMGNFDTQVLKAKEEGKPLPQGTDYQHGERYGIATLREAVFARDGYKCQCCGRTIKDGAILHVHHVKYRSHGGTNSMSNLATVCDKCHTPKNHKPGGKLYNWKPKLPSFKGATFMTTIRWQLYNEVKALFPDIDIHITYGAMTKRRRRELDIDKSHVNDAFAMGCFHPKHRVKAVLYKKKRRNNRCIESFYDAKYIDSRDGKKRSGQELFNGRINRNHKKDSENLHKYRLQKITDGKRTVRKQHYNIQPHDIIVYESRKHETAGCHCNGARVMILPDKKSVSIKKIKIYKYAGGYFKSAFN

SEQ ID NO: 22734 - protein, 411 aa, Orenia sp.; identical to SEQ ID NO: 7492

SEQ ID NO: 22735 - protein, 414 aa, Clostridium sp.; identical to SEQ ID NO: 8775

SEQ ID NO: 22736 - protein, 451 aa, Moorena sp.; identical to SEQ ID NO: 2390

SEQ ID NO: 22737 - protein, 442 aa, unidentified
  REGION 1..442: note = Human gut metagenome
MSTSVFVLDKKHRPLMPCRPARARRLLRAGRARVVKRFPFVIRLVDRTVEQSEVQPVLIKLDPGSRETGAAVVRDDGKKRHHALAFFVIEHRGGAIRDALKARSAFRRRRRSQNFRCRSPRFLNRVKPKGWLPPSLRHRVETTLSFVRRMCRYLPVSGIAAELVKFDSQKLQTPEVSGIEYQQGTLFEYEVREYLLEKFGRKCVYCGAEGVPLNIDHVVPRAKGGSNRVSNLVLACVSCNQKKGARSLEDFLKGKPEVLARVRRELKTPLRDAAAVNATRWVLFNELKATGLPVETGSGALTKFNRHAFGVEKEHWLDALCVGRLNGVVTRKGLNVLEIRCMGRGSRQRTRLTKYGFPRGYLMRQKCVHGFATGDMVEANVPKGKKAGLWRGRVAVRVSGSFNIQTPKGVIQGVGWKHCRLISHNDGYGYAWLGHAPHSSPA

SEQ ID NO: 22738 - protein, 286 aa, unidentified
  REGION 1..286: note = Human gut metagenome
VLRLLPITKITVETASFDMQRLKNPDISGKEYQEGEQLGFWNVREYVLFRDGHVCRHCHGRSKDPVLNVHHLESRRTGSDSPDNLITLCETCHKALHRGEITLKAKRGQSFRAQAFMGIMRREVLNRLKASYPELKVHETYGYLTKHARIANGIVKSHGADAFCIAGNLGAERLGEFFFQKQTRRNNRQIHKLSILKGGIRKRNQAPFEAKGFRLFDKVACQGEEGFIFGRRSSGSFDVRKLDGTRISAGISCKKLRLLEKRRTYLTEIRKEEALPPLPEGRGLRA

SEQ ID NO: 22739 - protein, 426 aa, unidentified; identical to SEQ ID NO: 19271
  REGION 1..426: note = metagenomes

SEQ ID NO: 22740 - protein, 433 aa, Alishewanella sp.
LEKPSNNTVEAHITHFGGERRVTVIILEIGYVSVLVLDNQKQPLMPCHSARARQLLRDGKAAVFRRYPFTIILKDRVGGDTQPLSLNVDPGSKTTGVALVAHYLRGRCAVWALHIGHRGQQIKSALDGRRGIRRSRRNRKTRYRAPRFLNRTRPKGWLAPSIMSRVHNVDTWAKRLMRFVPITSANVETVRFDMQLMENPSMAGMDYQQGSLFGWELREYLLYRHKHTCAYCDGLTGDVVLEKEHIVPRALGGSNRLANHVISCRTCNEDKGSLHPNAWAQLCTQRCGKLNTARAKNMQRIQAGYRPSFKDAAAVNATRYAVGGVIKCLLTDTQFWSGGRTKKNRSDQGYAKDHWIDAACVGEKGGAVSLLCDAVLVANAKGHGSRQMCRVDKYGFPRTSAKTRSVINGFKTGDMVTASVPTGKKQGVHVGRV

SEQ ID NO: 22741 - protein, 431 aa, unidentified; identical to SEQ ID NO: 5232
  REGION 1..431: note = Human gut metagenome

SEQ ID NO: 22742 - protein, 415 aa, unidentified
  REGION 1..415: note = Wastewater metagenome
MENRIEYCFVIDKNNRPLAPTKVNKGWYLVRKGRAKLKSKYPMMIQLEKEVESDEDNESHMVCGIDDGSAHVGLAIVQKCPTKNKVVFKGTIEQRQDIKHLMGVRRGYRRYHRYHKRYRQARFTNRYSSKRSGRLAPSIKQKKDAVLRVLYQLNKWLNIQEYYLEDVCIDIRAMTDDYNPYKWQYQKSNRLDENLRKAAINRDGCKCQECGKSNCVLEVHHIRARKYGGADTIGNLITLCSGCHQKTEGREREFEDRYFKIIGSKPKRFDYAMHVMQGKNYLRGKISELGLLHLTNGGETANKRIDWNIEKSHSNDAICVTDCIPDTCDVKEWIIRPMRRKSKAKTDNVLGIRHRDLVSYTPRGKSSVVGYVTALYPDSYQISMTSRNKQYKKISARSCVLKWRFNKIYWLEQCV

SEQ ID NO: 22743 - protein, 424 aa, unidentified; identical to SEQ ID NO: 6292
  REGION 1..424: note = Human gut metagenome

SEQ ID NO: 22744 - protein, 456 aa, unidentified; identical to SEQ ID NO: 13209
  REGION 1..456: note = Human gut metagenome

SEQ ID NO: 22745 - protein, 509 aa, unidentified; identical to SEQ ID NO: 5057
  REGION 1..509: note = Human gut metagenome

SEQ ID NO: 22746 - protein, 431 aa, unidentified
  REGION 1..431: note = Human gut metagenome
MPDKVYVISRLGHPLMPCSPAKARHLLDDKKAKVVKRMPFTIRLLYGSTKYIQPIILGVDAGSKTIGLSASTAKEEVFAAEVMPRNDVVENLSTRREFRRARRNRTTRYRKPRSDNRVRSNHERWLAPSVKVKIQEHITSIKRVCTILPISKVVIETAEFDLQLLKAIQEGKPIPEGEDYQKGEMYGSYNVCQYVLWRDNYTCICCGVRGMPKNPVRLHVHHFESCKYGGNAPDNHGTLCDDCHKKFHLGIITDVKLKTRRRQSTRDAAFMGIMRKTLMWRLRTELFIPVAETKGYITKATREKLLVLPKSHTRDALAIAQGRHGFGIKEYAYVEPANHIYTVRPVRHHNRQLHKASILKGGIRKRNQASKYVFGFRLYDKVLYQGKACFVWGRRTSGTFFLRTIDGIKVKDGVSYRNLTLLERSSNYLIA

SEQ ID NO: 22747 - protein, 515 aa, unidentified
  REGION 1..515: note = Human gut metagenome
MTALEEKLSKTEYIYVLGFDGKPQMPTRRKRHVLKLLKTGRARIAEDIPFTIRLTYRNAPVLQPVTLAEDPGRTNIGGAVLSPLGDLLFAAVIETRNKEIKKLMADRQKSRQASRRGERKARQRLAKRYGSMVKSGMVMRKLPMYAADKFVTCKFIRNTQARFCNRKRCPDWITPTVQHLVQTHLNIIRKISRYLPVTDIAFEVNRFAFMHMENPKAMGVDFQNGPLKGYDDVKEAICTQQHGKCLMCKKPISHFHHIVPRSRGGSDTIQNLAGLCPECHTKVHTDTTFRKDFDRKKSGQLKKYGALSALNQAVPFICKKLLEEYGEEHVHFCGGLDTSLIRTALGFEKTKKNQMHEVDAYCIGLAALEINEVETPAFDHTFQIRQFRRQDRSIIHHQTGRSYYQGKEKVAQNRKPGFEQKTTALSQWYEEQVRIHGEKEAEKLRSQLRVEKSCRHYNDMDRFLPGAVFLYEGKRYVLSGRITNGKYLRACGQGMKNFPAAECTFIRHNAGLVFI

SEQ ID NO: 22748 - protein, 475 aa, Moorena sp.; identical to SEQ ID NO: 15647

SEQ ID NO: 22749 - protein, 465 aa, unidentified; identical to SEQ ID NO: 3070
  REGION 1..465: note = Human gut metagenome

SEQ ID NO: 22750 - protein, 453 aa, unidentified; identical to SEQ ID NO: 5967
  REGION 1..453: note = Human gut metagenome

SEQ ID NO: 22751 - protein, 416 aa, unidentified
  REGION 1..416: note = Human gut metagenome
MVYVLDKNGQPLMPTDRHRKVRLMLQSGQAKVIKRCPFTIQLTYNTGHQAQEISLGIDAGSKHIGVSATTKTRVLYEADVELRNDIVDLLSSRRELRRGRRNRKTRYRPARFDNRRREDGWLAPSIRQKIGTHLTVVENICKILPISRITVETASFDIQKIKNPDIQGAEYQQGDQLGFWNNREYVLFRDNHTCQCCKGKSKDKILNVHHIESRKTGGNAPNNLITLCEICHTGYHKGAVQLPKTVKRGMRFKDAAFMGIMRWAFYEALKQQYEPVGTPVHNTYGYITKHTRIEHNLPKEHYVDARCISGNPDAFPSGEYYYQKKVRCHNRQIHKLTILKGGIRKQNQATYLVKGYRLFDKVSYQGKGYFVFGRRQSGFFDIRTLSGEKVNKGSLSCKKLKFIATRTYYLTERRAV

SEQ ID NO: 22752 - protein, 447 aa, unidentified; identical to SEQ ID NO: 5309
  REGION 1..447: note = Human gut metagenome

SEQ ID NO: 22753 - protein, 418 aa, unidentified; identical to SEQ ID NO: 8891
  REGION 1..418: note = Human gut metagenome

SEQ ID NO: 22754 - protein, 442 aa, unidentified
  REGION 1..442: note = Human gut metagenome
VRHLLKDGKAKIIKHHPFTIQLLYDSKTNTQPIEICEDVGYNYIGISVKSQSHEYVSAQYDTLQDEKACHDSCRKLRRSRRNRLRYRKSRFDNRKRGEGWLAPSLRHKKELNVNVVKMYCAVMPITHVTIEVGSFDTMLLKAVQEGKAIPEGADYQKGPRYNLATLREAVFYRDNYVCKVCGRKATEGAILHMHHMFYWKGRHSNSLDELLTVCEKCHTPANHQKSGKLYGFGENVKFADLSGAAFMNTVRWQIVNELYAAFGKDFVTITYGAMTKEKRIALRLEKSHNNDAYAMGEFHPNHRCTFEHYEKVRRNNRTLEKFYDSRYIDIRTGEIATGKELFNGRINRNHKKDSENLHRYRGKRTYAGHRALLRKKVKLNPGDLVSLNGEVLIVHGTHTNKKGAVNVELKVPAKNGQKSASLKKLKIVKTTDSMHSAWEKIS

SEQ ID NO: 22755 - protein, 414 aa, unidentified; identical to SEQ ID NO: 2588
  REGION 1..414: note = Human gut metagenome

SEQ ID NO: 22756 - protein, 414 aa, Selenomonas sp.
MPTIKKYAFVLDAEGKRLDPTIEQNAWRLIRQHKARLVSKFPMVIQLNKVVDNPNNDEIRCGIDDGANHVGLALVQKCLTKNKVVFKGTIEQRKDVKHLLTVRRGYRRYHRYHKQYRPARFFNRASSRRSGRLMPSIIQRKQAMLRVIDRLRQWIRIDGYWLEDVKIDIRALTDGYKPYRWQYQRSNRLDNNLRLAAIYRDGCKCMECGKVKTRFEVHHITPREAGGTDTISNLITLCPNCHARTFSRESQFADRYYALIGSAGHVEGLDDAQRVMQGKHWFRGQLQLRGSLVLTTGGDTANKREDWNISKNHANDAVCITDLKPENIGVGEWSIKPMRRKSKAGVDEVCGFRHRDYVTYTYRNGETHTGYVTAMYPDKNQLNFQSSTKHCKRVNALKTRLLWRFNKIYWLKCA

SEQ ID NO: 22757 - protein, 428 aa, unidentified
  REGION 1..428: note = Human gut metagenome
LKVFVLNMRGRPLMPCSPARARHLLKAGKAVVRRRTPFTIQLRIATGETKQSVTLGVDAGAKHVGLSAATEKEEVFASEVELRQDITGLLAARLSLRRDRRHRKTRYRAPRFLNRVRSKHKGWLAPSVENRIQAHMSRIDAVCRLLPVTKIVIETASFDIQKIKNTTVEGTDYQQGDQLGFWNVREYVLFRDGHVCQHCHGHSKDKILNVHHLESRQTGGDAPNNLITLCETCHKACHAGKIKLKVKRGQSFRAEAFMGIMRWTLLDRVRKAHPGLPVENTYGYLTKNTRITLGLPKTHCVDAYCIAGNLKAVRRGVYLHQRQMRKHNRQIHKCTILLQTLEDGTKIGYRKLNQTPHMVKNFRLFDKVRCLGQTGFIFGRRSSGYFDVRRLDGVKLSPSISWRKLTLLEKRSTYLTELRKEDGASSPV

SEQ ID NO: 22758 - protein, 533 aa, unidentified; identical to SEQ ID NO: 18428
  REGION 1..533: note = Mouse gut metagenome

SEQ ID NO: 22759 - protein, 493 aa, unidentified; identical to SEQ ID NO: 3781
  REGION 1..493: note = Human gut metagenome

SEQ ID NO: 22760 - protein, 421 aa, unidentified; identical to SEQ ID NO: 7313
  REGION 1..421: note = Bioreactor metagenome

SEQ ID NO: 22761 - protein, 431 aa, unidentified
  REGION 1..431: note = Human gut metagenome
MPNKVYVINKHGRPLMPCSPAKARHLLDAGKAKVKKRTPFTIQLVYGSSGYTQEVILGVDAGSKTIGMSASTTKEELLSAEVKPRNDVVDLLSTRREFRRARRNRKTRYRKPRFDNRVRSKHKGWLAPSVEVKIQEHITSIKRVCRILPVSKVVIETAEFDLQLLKAIEEGKPVPQGEDYQQGEMYGHYNVRQYVLWRDGYTCQCCGAHATKKKEVRLHVHHLESRKVGGDAPDNQVTLCESCHEKLHKGLIAEKDFKKRKRKSTRDATFMGIMRKTLMQRLCSELPIPVIETRGYITKATREKLLVLPKSHTNDALAIAQGKQGFNVGYLPGIVQINKIYTIRPVRHHNRQLHKATILKGGIRKSNQTEKYVFGYRLFDKVQFNGQDCFIWGRRTTGIFTIKTINGKMIKDGISFKKLKPVEKSTGYLIA

SEQ ID NO: 22762 - protein, 472 aa, unidentified
  REGION 1..472: note = Human gut metagenome
VVDNRLLSIKPLINIGEGVIYSSICTGLSLQTYQKRKEVPCMVYVLDINGQPLMPTTRHGKVRRLLNSHLAKVVKRCPFTIQLLYQSTKEIQPVSLGVDAGSKHIGMAATTEKKVVYQEELSPRNDVVKLLSLRRASRSSRRSRKTRYRKPKFNNRVHSKHKGWLAPSVEVKIQEHITAIKRICQILPISEIQVETAEFDFQRLKAMKEWKPLPVGTDYQLGEQYDFYNTRQYVLHRDGYTCQCCGTHDNNIKLHVHHIESRQTGGDAPSNLITLCEHCHKALHKGKLELPKGKKRGKTYRDATFMGIMRKTLLERLRKEVDVPVSGTYGYITKYLREKTDLEKSHINDAICISKYPYAKPLDTYYLTKVVRNHNRQIHKSNFSKGGIRKRNQAPYLIKGFRLFDKVLYQGKEYFIFGRRATGYFDIRTLDGTKVNEGSISYKKLRIQDTAKAYLKEARAIPHMNKFTCVLA

SEQ ID NO: 22763 - protein, 236 aa, unidentified
  REGION 1..236: note = Human gut metagenome
MVYVQDINGKPLMPTTRHGKVRRLLKDKKAVVVNLCPFTIKLMYVTSDYKQEIVLGVDAGTKHVGLSATTKSKELYSSEVILRNDIVDLLSTRRELRRARRNRLRYRKPRFNNRIKSKRPGWIAPSVKYKIDAHIRVVENVCSILPISRIVIEVAQFDTQKIKNPNISGKEYQEGDQLGFWNTREYVLARDGHKCQYCKGKSKDKILNVHHIESRKTGGDSPSNLITLCETCHKEY

SEQ ID NO: 22764 - protein, 536 aa, unidentified
  REGION 1..536: note = Human gut metagenome
LYIKMTSCTCTVFPAYNYAKASSSQGKHNLLLRQERLIVKEVTYMSTVYVLNKDGKPLMPTTRGGHVRHLLKEQKARVVRTNPFTIQLLYETDNLVQPLYLGIDPGRTNIGVAVVKTDGTAVFTAHLETRNKEIPKLMQGRKKARRARRTNGRRCRRQRRAKANGTISKKCVKQATAQNGSVSKRANEIGVIKRHLPGCEKEVLCIGIKNKEAKFSNRTRPEGWLTPTANQLLQTHINLVKKIQKFLPISDVVLEINKFAFMRLDNPNVQKWQYQQGPLYQKASLEEAVSEMQEHHCLFCKKPIDHYHHVVPQHKNGSNTISNIVGLCTKHHDLVHKEAVWQEKLAKKKTGLNKKYGALSVLNQIIPALTKELSSLFPKHFFVTNGKSTYDYRAAHGVSKDHWLDAYCIACSVLPNDTCDKTINSRVPYELKQFRRHDRRALNNENMSRVYTFNGKMVATNRHKATEQTTDSLEEFRQRQPNDVCNLKVKEHHPTYRNMNRNYPGSVFLVGNQVHVMQGIAGSKDGEATTYKDTNA

SEQ ID NO: 22765 - protein, 429 aa, Symploca sp.
MRVFVVNQDKKPLNTCHPAKARKLLSLGRAAVWRHYPFTIILKGKERPIVTTEHRIKIDPGSKTTGLAILNGNRVVFAANLIHHGDTIRKTISERRAVRRNRRHRQTRYRKCRFNRSQPKGWLAPSLMSRVNNILSWVKRLVAICPIRAISQELVRFDTQKLQNPEISGVEYQQGELWGYEVKEYLLEKWGRQCVYCGATDTQLEVEHIHPRSKGGSNRLSNLTIACRDCNLNKSNSKIKNFLSGKPDLLQRILKIAKVPLKDAAAVNATRWELYRQLQSLELPVEVGTGGRTKYNRTRLGLPKTHYWDAASVGESTPKNLRAAKVKPLTIKAMGRGNRQICTTNKHGFPIRHRTRCKTFYGFRTGDMVRAILPQGKFAGTHIGRLTVRKSGVFEMNTPKGKITPVRHKYCQLIQRNDGYMYSFVVDVQ

SEQ ID NO: 22766 - protein, 443 aa, Anoxybacillus sp.; identical to SEQ ID NO: 8762

SEQ ID NO: 22767 - protein, 421 aa, unidentified
  REGION 1..421: note = Human gut metagenome
MQYVYVLNKHGEPLMPCSPGKARLLLKQQKACVVKRTPFTIKLLYGSAGYKQPITLGVDAGSKHVGLSASTEKRELYREEFTPRNDVVDLLSTRRQNRRSRRNRKTRYRAPRFDNRVHSKHKGWLAPSVEVKIQEHITVIKRICRILPITLVRVETAEFDTQRLKAMLKGKSLPVGTDYQLGEMYDEYNVRQYVLKRDNYTCQCCGAHPTEKKPVRLHVHHLESRHVGGNAPNNLITLCVACHKALHEGKITLDKGKKRSKPLRDAAFMGIMRNTLLARLKDELNIPVKQTYGYITKLLREKNKIPKSHVNDARCIAKAPNAKPCDTMLYTRALRHHNRQIHKAKILNGGIRKKNQAPYLVKGFRLWDKVRYNGEECFITGRRSSGYFALKKYDGTVISNSASYKKLMLLEAATNYITERS

SEQ ID NO: 22768 - protein, 242 aa, unidentified; identical to SEQ ID NO: 15640
  REGION 1..242: note = Human gut metagenome

SEQ ID NO: 22769 - protein, 396 aa, unidentified
  REGION 1..396: note = Human gut metagenome
VVRRTPFTIQLTIATGESKQPVSLGVDAGYKHVGLSASTEKAELYASQVELRQDITDLLSARRALRQSRRNRKTRYRAPRFDNRIRTKRKGWLAPSVENRINAHLSRIEAVLRLLPITKITVETASFDMQRLKNPDISGKEYQEGEQLGFWNVREYVLFRDGHVCRHCHGRSKDPVLNVHHLESRRTGSDSPDNLITLCETCHKALHRGEITLKAKRGQSFRAQAFMGIMRREVLNRLKASYPELKVHETYGYLTKHARIANGIVKSHGADAFCIAGNLGAERLGEFFFQKQTRRNNRQIHKLSILKGGIRKRNQAPFEAKGFRLFDKVACQGEEGFIFGRRSSGSFDVRKLDGTRISAGISCKKLRLLEKRRTYLTEIRKEEALPPLPEGRGLRA

SEQ ID NO: 22770 - protein, 419 aa, unidentified; identical to SEQ ID NO: 4877
  REGION 1..419: note = Human gut metagenome

SEQ ID NO: 22771 - protein, 451 aa, Moorena sp.; identical to SEQ ID NO: 5369

SEQ ID NO: 22772 - protein, 521 aa, unidentified
  REGION 1..521: note = Human gut metagenome
MRDYMTQKRKEASRMSEYIYVLGMDGDPQMPTKRKRHVEKMLQTGRARVFRQVPFTIQLTYKNQPVLQPVTIAEDPGRSNIGMAVVSLSGELLSAAVVQTRNKEIVKLMEKRKQHRRASRNGERKARQRLAKKCHTMIKAGFLMRKLPMYGKDKRVQCNVIRNTEARFCNRKREDGWLTPSAEHLVRTHINLIHKMQKFLPITDVAIEINRFAFLSLEDPSISGVDFQNGPLKGYDDLNAAVEDLQDGHCLMCNSPIEHRHHIVPRSMQGSNTIGNIAGLCCKCHERIHKDARFEDHLKKKKAGLNKRYAAVSVLNQAIPFICKRLEQEFGKEHVHYCSGRDTSMVRRSLGYHKTKEEQLHEVDAWCIAVLALRQIPEKAPEFDHVHEILQFRRQDRSIIDAQTSRMYYHEGKKVAKNRKKAEGQKDDSLQEWRERQVERYGKEQTRKMISQLEIKKSSRRYNRLDRLMPGAVFYYQGVRYVMRGQHSNRQYLQAVGMGSKDFPAKKCKIVVHNEGLVFVS

SEQ ID NO: 22773 - protein, 431 aa, unidentified
  REGION 1..431: note = Human gut metagenome
MPNKVYVINKHGRPLMPCSPAKARHLLDAGKAKVKKRTPFTIQLVYGSSGYTQEVILGVDAGSKTIGMSASTTKEELLSAEVKPRNDVVDLLSTRREFRRARRNRKTRYRKPRFDNRVRSKHKGWLAPSVEVKIQEHITSIKRVCRILPVSKVVIETAEFDLQLLKAIEEGKPVPQGEDYQQGEMYGHYNVRQYVLWRDGYTCQCCGAHATKKKEVRLHVHHLESRKVGGDAPDNQVTLCESCHEKLHKGLIAEKDFKKRKRKSTRDATFMGIMRKTLMQRLCSELPIPVIETRGYITKATREKLLVLPKSHTNDALAIAQGKQGFNVGYLPGIVQIDKICTIRPVRHHNRQLHKATILKGGIRKSNQTKKYVFGYRLFDKVQFNEQDCFIWGRRTTGIFTIKTINGKMIKDGISFKKLKPVEKSTSYLIA

SEQ ID NO: 22774 - protein, 423 aa, Moorena sp.; identical to SEQ ID NO: 12394

SEQ ID NO: 22775 - protein, 417 aa, unidentified; identical to SEQ ID NO: 7125
  REGION 1..417: note = Human gut metagenome

SEQ ID NO: 22776 - protein, 431 aa, unidentified; identical to SEQ ID NO: 13666
  REGION 1..431: note = Human gut metagenome

SEQ ID NO: 22777 - protein, 425 aa, Moorena sp.; identical to SEQ ID NO: 4226

SEQ ID NO: 22778 - protein, 451 aa, unidentified; identical to SEQ ID NO: 18560
  REGION 1..451: note = Human gut metagenome

SEQ ID NO: 22779 - protein, 432 aa, unidentified
  REGION 1..432: note = Human gut metagenome
MSSARYWHEEKFSGRKVSEMTDYAFVLDANNKQLAPTKEQKAWFLIRRKRATLVSKYPMVIQLKKKIPDNEICKDEIRCGIDDGGLHVGVALVQKCQTRNKVVFKGTIEQRNDVKHLMDVRRGYRSYHRYHKRYRPARFNNRSSSKREGRIAPSILQKRQATIRVINQLNKWINITNYWLEDVAIDIRALTDGYKPYRWQYQKSNRLDENIRKAVILRDGCRCMECGKSNCRLEVHHIKPRRLKGSSTLGNLITLCTKCLQKTEGVEELYMDRYFALLNSSDNRNLDCAQHVMIGKKWLREQLSNLGMLYLTNGGDTANKRIDWDITKSHSNDAICITDLRPDTYEIKEWVIKPMRRQSKAKTDNVLGIKHRDLVEYTFRNGETHRGYVTALYPEQNAINFQSPIKHCKKVNAGKCKVLWKYSKIYWLDNVS

SEQ ID NO: 22780 - protein, 423 aa, Deinococcus sp.; identical to SEQ ID NO: 6340

SEQ ID NO: 22781 - protein, 420 aa, unidentified
  REGION 1..420: note = Human gut metagenome
MQYAYVLNKRGEPLMPCSPGKARILLKQQKACVVKRTPFTIKLLHGSAGYKQPITLGVDAGSKHVGLSASTEKRELYSEEFTPRNDVVELLSTRRQNRRSRRNRKTRYRAPRFNNRVHSKHKGWLAPSVEVKIQEHITVIKHICRILPITLVRVETAEFDTQRLKAMLAGKPLPVGTDYQLGEMYDEYNVRQYVLKRDNYTCQCCGAHTTAKKTVKLHVHHLESRKVGGNAPSNLITLCTTCHNNLHKGKITLDGKKRGKTLRDAAFMGIMRNTLLTRLRNELNIPVQNTYGYITKLLREQNDIKKSHVNDARCISKHPLAKPCSVCYRTKAIRHHNRQIHKAKILKGGIRKANQAPYIVKGFCLWDKVLYNEQECFISGRRSSGYFALRKFDGTTITNSISFKKLRLLEPATNYLIERK

SEQ ID NO: 22782 - protein, 438 aa, Microcoleus sp.
MCKVLLIDTEKRPLSPIYPAQARQLLRNKKAAVFRRFPFTLILKESRPDSPISPLRLKIDPGAKFTGIALVNDSTGEVVFAAELKHRGLAIRDSLTSRRQLRRSRRNRKTRYRPPRFLNRTRPLGWLAPSLQSRIGNIKAWVEKLRKFAPIAAISQELVRFDLQLMRNPDLQGKEYQQGTLAGYETREYLLEKWNRQCAYCGVKDVPLQIEHIYPRAKGGSNSITNLTLSCEKCNKKKGTKALKEFLKKDQSRLEKILKQAKRPLADAAAVNATRFALLYVLKETGLPVEIGSGGLTKFNRSQQNLEKSHWLDAACVGISTPILNIKGVKPLLICANGHGTRQSCRTDKFGFPIRHCSRTKFHFGFQTGDLVKAVVTRGKKVGEYVGRIVTRASGSFNISAKDGLVQGISHRYCSIIHKGWLFLCVIAPAPRFLSPPN

SEQ ID NO: 22783 - protein, 470 aa, unidentified; identical to SEQ ID NO: 16591
  REGION 1..470: note = Human gut metagenome

SEQ ID NO: 22784 - protein, 482 aa, unidentified
  REGION 1..482: note = Human gut metagenome
SLAAAAQESHDFNRGRCQYLTKGVSCMSTCVCVLSNSGERLMPTFRLGKVRHLLKDGKAKIVKHHPFTIQLLYDSKTNTQPIEICEDVGYNYIGISVKSQSHEYVSAQYDTLQDEKACHDSCRKYRRTRRNRLRYRKPRFDNRKRSEGWLAPSLRHKKELNVNVVKMYCAVMPITHATVEVGSFDTMLVKAIQEGKAIPEGADYQKGPRYNLATLREAVFYRDNYVCKVCGRKATEGAILHVHHMFYWKGRHGNSLSELITVCEKCHTPANHQKGGKLYGFGENVKFADLSGAAFMNTVRWQIVNELYAAFGKDFVTVTYGAMTKEKRIALHLEKSHNNDAYAMGNCHPAHRCEFGHYQKRCRNNRVLEKFYDATYIDTRTGDKAKGKELFNGRISRNHKKDSEDLHKYRSKKVSKGRRSIRRQRYAIQPYDTVRLKSKSYITSGCHNKGTRLLIPANGKSKSVAISKVQVVCHAGAWIQII

SEQ ID NO: 22785 - protein, 533 aa, Streptosporangium sp.; identical to SEQ ID NO: 19912

SEQ ID NO: 22786 - protein, 458 aa, Moorena sp.; identical to SEQ ID NO: 4474

SEQ ID NO: 22787 - protein, 430 aa, unidentified
  REGION 1..430: note = Human gut metagenome
MSVAVVSKTGMLLMPTSEYRARKLLKSKKAIIHGYHPFTIQLTERETGYIQPVELCMDTGYIHIGTSVKSEKHEYLGEQIDTLTDERQKHDACRMYRRQRRNRKRYRQPRFNNRERDDGWIAPSLEHKKTIHIQAISRICKVIPVTDITLEMGNFDTQVLKAREEGRPLPQGLDYQHGERYSVTTLREAVFLRDGYTCQCCGRTIKDGAILHAHHVVYRSQGGTNRISNLITVCDKCHTPANHKPGGKLYGWKPKVASFKGATYMTTIRWKLYNEVKALFLDIDIHITYGAETKERRRAFDITKSHVNDAFVMGQFHPKHRSKPICYKKKRRNNRCLEKFYDAKYIDNRNGKTRTGQELFNGRISRNHKKDSENLHQYRRQKISAGKRTIRKQHYAIQSHDIVIFNGEKFETSGCHNNGTRVILLPQKKS

SEQ ID NO: 22788 - protein, 364 aa, Anabaena sp.
LITVEDKVNDSTGEVVFAAELKHRGFAIRDALTCRRQLRRSRRNRKTRYRQPRFNNRTRPLGWLAPSLKSRVENIKTWVDKLRKFAPVSAISQELVRFDMQLMRNPDIQGNEYQQGTLQGFETREYLLEKWNRECAYCGVKEVPFQIEHIHSKAQGGSNSITNLTLSCEKCNIKKGTKDIKDFLKQDPTRLEKILKQAKKPLADAAAVNTTRFALLEVLKSSGLPVETGSGGLTKFNRSQQNLEKSHWLDAACVGKSTPILNIQGIKPLLIQANGHGTRQMCGTDKFGFPNRHRTNRQVHHGFSTGDIIKAVVTSGKKIGQYFGRVLCRATGSFDIVTKLGRVSGISYKYCLATHKKDGYSYSF

SEQ ID NO: 22789 - protein, 420 aa, unidentified; identical to SEQ ID NO: 6507
  REGION 1..420: note = Human gut metagenome

SEQ ID NO: 22790 - protein, 442 aa, unidentified; identical to SEQ ID NO: 3658
  REGION 1..442: note = Human gut metagenome

SEQ ID NO: 22791 - protein, 436 aa, unidentified
  REGION 1..436: note = Human oral metagenome
MTKTLTTRTTQACVLDQQGKPLMPTTRLGKVYHLLKTKKAHIVSYEPFTIQLDYEPDTQVIQPMTLGVDSGAIHSGYSVANEHREYYSAEVIARNDISNRLSDRRMYRQTRRSRKTRYRKPRFNNRKNKKKGWLPPSLEQKVAVQVNEINHIHRYFPIETIIVETAEFDIQKIKNPDISGIEYQQGTLQGYNIRNYLLEKHGRKCFYCGKAVSDFEVEHMFPKSRGGSNRIDNLTLSCHDCNEKKGTLTAEEFIQQTLPVKKATAKLKELPNEKRLFKYMAYMNATRWALYDAIKERYPNVKMTYGYITKYNRIQAGLPKAHHIDAKCITGFATVPSMSQTVVKVKMRRHNRQLHRATFSKGHVRKAASLPTTVFGFQLYDLVLFNNHRYYIKGRRSSVAFALVSIEGLKNEERNYKKLTLLAHTNAYLTNYYVNR

SEQ ID NO: 22792 - protein, 414 aa, unidentified; identical to SEQ ID NO: 12795
  REGION 1..414: note = Human gut metagenome

SEQ ID NO: 22793 - protein, 421 aa, unidentified
  REGION 1..421: note = Human gut metagenome
MRGQPLMPCSPAKARHLLKAGKAVVKRRTPFTIQLRIATGETKQNVTLGVDAGAKHVGLSATTEKEEVFASEVELRQDITGLLAARLSLRRDRRHRKTRYRAPRFLNRVRSKHKGWLAPSVENRIQAHMSRIDAVCRLLPVTKIVIETASFDIQKIKDPSVEGTDYQQGDQLGFWNVREYVLFRDGHVCQHCHGRSKDKILNVHHLESRQTGGDAPNNLITLCETCHKAYHAGKIKLKVKRGQSFRAEAFMGIMRWTLLDRVRKAHPGLPVENTYGYLTKHTRITHGLPKTHCVDAYCIAGNLKAVRRGVYLHQRQMRKHNRQIHKFTVLSKRLEDGTKIGYRKLNQSPYLVHGFRLFDKVRCLGQIGFIFGRRSSGYFDVRRLDGVKLSPSISWRKLTLLEKRSTYLTELRKEDGASSPV

SEQ ID NO: 22794 - protein, 368 aa, unidentified
  REGION 1..368: note = Human gut metagenome
VTLGIDAGSKHIGVSATTKSKVLYEADIEIRNDIVDLLATRRQMRRARRSRKTRYRKARFDNRKRSNKWLAPSIQHKVNCHLDAVHFAHMLLPVSKIIVEVASFDIQKIKNPLISSTDYQNGELLDWKNVREYVLFRDGHICQCCKGRSKDPVLQVHHIESRKTGGNAPNNLITLCKTCHSGYHQGTVKLPTKIKRGMKFNNATFMGIMRWSFYDKLKALYPDVSLTYGYITKDVRITNGLVKTHFIDARCISENPLAVSDNTVYFLKKRRRHNRQIHKFNILKGGRKKRNQAAYLVKSYRLFDKVKYNHKEYFIFGRRASGFFDIRTLSGEKVNKGSISCKKLKLLEASKGYLTERRNAFLSPLNSV

SEQ ID NO: 22795 - protein, 453 aa, unidentified; identical to SEQ ID NO: 6850
  REGION 1..453: note = Human gut metagenome

SEQ ID NO: 22796 - protein, 512 aa, unidentified; identical to SEQ ID NO: 6489
  REGION 1..512: note = Human gut metagenome

SEQ ID NO: 22797 - protein, 415 aa, Bacillus sp.; identical to SEQ ID NO: 15146

SEQ ID NO: 22798 - protein, 498 aa, unidentified
  REGION 1..498: note = Human gut metagenome
MPTTRCGHIRYLLKEKKARVVASKPFTIQLLYETNDVVQPLYLGIDPGRTNIGVAVVKTDGTAVFTAHLETRNKEIPKLMKKRKDSRRARRTNGRRCRRQRRAKANDTISKKCVKQATAQNGSVSKRAKEIGVIKRHLPGCEKDVLCIGIKNKEAKFNNRTRPEGWLTPTANQLLQTHVNLVKKIQKFLPISDVVLEVNKFAFMQLDNPNVQKWQYQQGPLYQKANLEEAVSEMQEHHCLFCKKKIDHYHHVVPQHKNGSNTIDNIVGLCTKHHDLVHKETAWQEKLAKKKTGLNKKYGALSVLNQIIPALTKGLSSLFPKHFFVTTGKSTYDYRAAHDVCKDHWLDAYCIACSVLPNDVCDSNINSHAPYELKQFRRHDRRALHKENMNRVYTLNGKKVATNRHKAIEQTTDSLEEFRQRQPNDVCKLKVKEHHPEYRNPKRSFPGCVFLVGKQTHVMQGTSGSHNGKADGYYDTNGNSYPFGKCKFVAKSEGIVFA

SEQ ID NO: 22799 - protein, 419 aa, unidentified; identical to SEQ ID NO: 4877
  REGION 1..419: note = Human gut metagenome

SEQ ID NO: 22800 - protein, 458 aa, Lactobacillus sp.; identical to SEQ ID NO: 4474

SEQ ID NO: 22801 - protein, 358 aa, Moorena sp.; identical to SEQ ID NO: 6503

SEQ ID NO: 22802 - protein, 415 aa, unidentified; identical to SEQ ID NO: 12480
  REGION 1..415: note = Human gut metagenome

SEQ ID NO: 22803 - protein, 449 aa, Moorena sp.; identical to SEQ ID NO: 16728

SEQ ID NO: 22804 - protein, 464 aa, unidentified; identical to SEQ ID NO: 6574
  REGION 1..464: note = Human gut metagenome

SEQ ID NO: 22805 - protein, 417 aa, unidentified
  REGION 1..417: note = Human gut metagenome
MPCSPAKARLLLKERKAIVKRRTPFTIQLTIATGEAKQPVMLGVDSGYKHIGLSATTEKAELYASEVELRQDITGLLSARLALRRSRRSRKTRYRAPRFDNRVASKREGWLAPSVENRIAAHMSRVEAVMQVLPVTAITVETAAFDTQLLKNPDITGAAYQQGDKLGFWNVREYVLFRDGHVCQHCRGKSKDPILNVHHIESRRTGGDAPNNLITLCETCHKAFHRGEIKLKVRRGKSFKAETFMGIMRWTLLERLKKAHPELRVRNTYGYLTKHKRISYGIAKSHCADAYCIADNLGAKRLEGFFFQKQTRKHNRQIHKLSILKGGLKKKNQAPYEVKGFRLFDKVICKGEEAFIFGRRTSGSFDVRRLDGTRISAGINYKKLRLLEPRTTYLTEFRKEAALPPLHECRGFRAEFL

SEQ ID NO: 22806 - protein, 419 aa, unidentified; identical to SEQ ID NO: 6671
  REGION 1..419: note = Human gut metagenome

SEQ ID NO: 22807 - protein, 413 aa, unidentified; identical to SEQ ID NO: 3220
  REGION 1..413: note = Human gut metagenome

SEQ ID NO: 22808 - protein, 442 aa, Lactobacillus sp.; identical to SEQ ID NO: 3479

SEQ ID NO: 22809 - protein, 421 aa, unidentified
  REGION 1..421: note = Human gut metagenome
MVYVLDITGQPLMPTDRHGKVKHLLKDGKVKVVKRCPFTIQLLYTTTTYTQEITLGVDAGSKVIGLSASTPRRELYSSEVTLRNDIVKLLSLRREYRRSRRNRTTRYRAARFNNRVHSKNKGWLAPSIENKINTHIKVVADIHKILPISKIVVETASFDIQKIKNPNISGEEYQQGEQLDFWNVRQYVLFRDNYTCQCCKGKSKDNRLAVHHIESRQTGGNAPNNLITLCITCHKKYHKGKIKLPNTIKRDKIFKDAVFMGIMRWAFYERLKNIYPNIRMTYGYITKNTRIQHNLSKTHYTDALCISGNPLAKPLEVLYIQKAIRTRNRQIHKATISKGGIRKLNQAPKYVFGFQLYDKVLYKGKECFIFGRRLSGSFDIRTLDGTKISPGVSHKKLKLLEKRKTILTERVIKNQEGGKRG

SEQ ID NO: 22810 - protein, 518 aa, unidentified; identical to SEQ ID NO: 11951
  REGION 1..518: note = Human gut metagenome

SEQ ID NO: 22811 - protein, 440 aa, unidentified; identical to SEQ ID NO: 14910
  REGION 1..440: note = Human gut metagenome

SEQ ID NO: 22812 - protein, 435 aa, unidentified; identical to SEQ ID NO: 16785
  REGION 1..435: note = Human gut metagenome

SEQ ID NO: 22813 - protein, 457 aa, unidentified; identical to SEQ ID NO: 17713
  REGION 1..457: note = Human gut metagenome

SEQ ID NO: 22814 - protein, 415 aa, unidentified; identical to SEQ ID NO: 2674
  REGION 1..415: note = Human gut metagenome

SEQ ID NO: 22815 - protein, 421 aa, unidentified; identical to SEQ ID NO: 4235
  REGION 1..421: note = Human gut metagenome

SEQ ID NO: 22816 - protein, 414 aa, unidentified
  REGION 1..414: note = Human gut metagenome
MVYVINKQGQALMPTERFGKVRRLLKNSLAHVVCRIPFTIQLDYDTTDYTQPVSLGIDAGSKHIGISATTSEKELYAADVELRNDIVDKLSTRRELRRTRRSRLRYRKARFNNRVSSKRKGWLAPSVENKIQTHLTVVEKIHKFLPITNIVVETASFDIQKIKNSSISGVEYQQGEQLDFFNVREYVLFRDNHTCQHCKGKSKDKVLNVHHIESRKTGGDSPNNLITLCETCHKAYHRGEFELNVKRGKSFRDSAFMGIMRWKLYDRLKNIYPNVSMTFGYITKNTRITNNLPKEHYVDARCISGNPVAKPLGYYFYQKKVRCQNRQIHKANFLKGGRKKLNQAPFLVKGFRLFDLVEYQKELYYIFGRRSNGSFDIRKLDGTKVNKGSINCKYLRLIDKRKSILIEKRMQVNL

SEQ ID NO: 22817 - protein, 457 aa, unidentified
  REGION 1..457: note = Human gut metagenome
MDAVAVISASGKPLMPTNPMRARKLIKKGKAVIYKYRPLFTIRLTERTDGDIQTIEYCCDTGYQHIGLSIKSRKHEYVNEQRDLLPNETERHNGSRKYRKARRRRKLRHRACRRDNRHDNQICKDGYAPSIRNKRDQHISLYRSYTEILPVGRAVFEMGQFDTQVLKAIEKGEPLPQGKDYQHGERYGYATLREAVFARDSYTCICCGKNAFKDKRILCIHHLGFRIGDRTNRLANLATVCTKCHTPKNHQPKGKLYNLKPELKDFKGATFMTMVRWDMLDKLKVVSKDIQVDVTYGAATKEARRDLKIKKSHANDAYCMGSFHPSHRTDLKRYEKCRRNNRVLSKFYDATYIDIRDGKKKKANALGCNRTKRRESRRSEKNERIYRGKKVSKGRIVLRTKRTVIRPGDIVYTGKKKYIVASSKNLGKQLKLADGSLLTTSKVTKIIHCGGWKTVTL

SEQ ID NO: 22818 - protein, 406 aa, unidentified; identical to SEQ ID NO: 5685
  REGION 1..406: note = Human gut metagenome

SEQ ID NO: 22819 - protein, 273 aa, unidentified
  REGION 1..273: note = Human gut metagenome
KLQNPEVSGVKYQQGTLFEYEVREYLLEKFGRKCVYCGAEGVPLNIDHVVPRAKGGSNRVSNLVLACVSCNQKKGARSLEDFLKGKPEVLARVRRELKTPLRDAAAVNATRWVLFNELKATGLPVETGSGALTKLNRHAFGVEKEHWLDALCVGRLNGVVTRKGLNALEIRCMGRGSRQRTRLTKYGFPRGYLMRQKCVHGFATGDMVEANVPKGKKAGLWRGRVAVRVSGSFNIQTPKGVIQGVGWKHCRLISHNDGYGYAWLGHAPHSSPA

SEQ ID NO: 22820 - protein, 421 aa, unidentified
  REGION 1..421: note = Human gut metagenome
MTPMVYVLSKTGQPLMPTENHAKVRALLKQQKAKVVHRCPFTIQLLYDSTDYTQPVSLGIDAGSRHIGVSATTETKVLYEADVTLRNDIVDLLSTRREARRTRRSRKTRYRKPRFNNRIRKDGWLAPSIQQKVDTHLTTVRKVTEILPVNSITVETASFDIQKIKNPDIAGTGYQQGKQLDFWNVREYVLFRDGHKCQCCKGKSKDPVLNVHHIESRKTGGNAPNNLITLCETCHKGYHNGTVSLPKNIRRGMKFNDAAFMGIMRWTFFNRVKETYEPLGIMVNMTYGYITKNTRIEHNLPKDHFIDARCISGHPDAVSDGTVFYQKKVRCHNRQIHKQKILKGGIRKRNQAPYLVKGFRLFEKVKYHGKQYFIFGRRSSGFFDIRTLDGTKVNKGSVSCKKIRSLDMPRSYLTEERKAIV

SEQ ID NO: 22821 - protein, 470 aa, Blautia sp.; identical to SEQ ID NO: 2925

SEQ ID NO: 22822 - protein, 425 aa, Nodularia sp.; identical to SEQ ID NO: 3165

SEQ ID NO: 22823 - protein, 429 aa, Moorena sp.
MQRVLVLDKLKSPLMPCHPARARELLRKQKAKVFRLKPFTIILIERTGGDVQPLELKVDPGSKVTGIAIVGEFRRGQRAIFAVNLEHRGPQIKAALEARRSLRRSRRSRKTRYRAPRFLNRTRQKGWLPPSIKSRADNVRTWTKKLTSHSPISSIAVETVRFDLQKIVNPEISGIQYQQGELLGYEVREYLLEKWGRKCAYCDAKGTPLEVEHIVPKSKRGSDRVSNLTLACNPCNQKKGSSDIEVFVKDQKRLAHIKRFSLAALRDAAAVNATRYATGDALKSFGLPTSFWSGGRTKKNRISQDYPKDHWIDACCVGVTGERVFIPIDLKPLLVKAESRGSRQKCLPDKYGFPRTAPKANKRVHGFQTGDLVEANVLKGKKSGRYKGRVAVRSTGNFNIKTDKLTVQGISYKSCRIVQRVDGYSYAMA

SEQ ID NO: 22824 - protein, 494 aa, unidentified
  REGION 1..494: note = Human gut metagenome
MTMVYVQNKDGKPLMPTTRYCYVRLLLKEKKARVVCTTPFTIRLNYDTPNITQDLILGIDPGRTNIGVAVVKEDGSCVFSAHLETRNKEVPLLMKKRAAFRRQHRTQDRRRKRQRRAIAAGTTVESNTIERLLPGYEKPIVCHHIRNKEARFNNRSRPAGWLTPTANHLLQAHINLIAKAAKFLPITKVVVELNRFAFMAMDNPNIRRWEYQQGPLYGLGSVKDAVYAQQDGHCLFCKKPIDHYHHVVPRRKNGSETLANRCGLCAKHHALVHTDKAWAEKLVTRKVGMNKKYHALSVLNQIIPHLMEYLGEETSYDVYATDGRSTKGFRIAKNVPKEHYTDAYCIACSILDANTKGSTPAEPFKLKQFRRHDRQACHQQRVDRKYYLDGKQVATNRHKAIEQKSNSLEEFRETYGDAAVSQLTVKPHPPQYKDMTRIMPGAVMNFCGAVGILLGSDGFHNGKPDYYKSTKEEKVRMRRCALLAQNAGMVFIPA

SEQ ID NO: 22825 - protein, 436 aa, unidentified
  REGION 1..436: note = Human gut metagenome
LGKDFYPLRRREQFLFSCQFIERSMASMQYVYVLNKHGEPLMPCSPGKARLLLKQQKACVVKRTPFTIKLLYGSAGYKQPVALGIDAGSKHVGLSASTEKRELYREEFTPRNDVVELLSTRRQNRRSRRNRKTRCRAPRFDNRVHSKHKGWLAPSVEVKIQEHITVIKRICRILPITLVRVETAEFDTQRLKAMLKGKPLPVGTDYQLGEMYDEYNVRQYVLKRDNYTCQCCGAHPTEKKPVRLHVHHLESRHVGGNAPNNLITLCVACHKALHEGKITLDKGKKRGKPLRDAAFMGIMRNTLLARLKDELNIPVKQTYGYITKLLREKNKIPKSHVNDARCIAKAPNAKPCDTMLYTRALRHHNRQIHKAKILKGGIRKKNQAPYLVKGFRLWDKVRYNGEECFITGRRSSGYFALKKYDGTVISNSASYKKLML

SEQ ID NO: 22826 - protein, 504 aa, unidentified; identical to SEQ ID NO: 5865
  REGION 1..504: note = Human gut metagenome

SEQ ID NO: 22827 - protein, 418 aa, unidentified
  REGION 1..418: note = Human gut metagenome
MVYVTNRQGKALMPTDRHGKVRRLLKSGLAHVVRRIPFTIQLDYDTTEITQPITLGIDSGSKFIGVCATTNKKELYAANVELRNDIVDKLSTRREQRRTRRSRLRYRKTRFNNRVSSKRKERVAPSVENKIQTHMTVVRNAYKILPISKIVVETASFDIQKIKNPNIDGEDYQNGEQMGFWNIREYVLWRDGHTCQHCHGKSGDKILNAHHLESRKTGGNSPSNLITLCETCHKAYHRGEFELKVKRGTSFRDAAFMGIMRWAFFERLKQIYTNVSMTFGYATKNTRIANGLPKEHYVDARCISENPQAKPLGYYFYQKKARCQNRQIHKINILKGGKKKLNQAPFMVKGFRLFDLVDYQKELFYVFARRKSGYFDIRRLDGTKVNKGSINCKKLRLVEIRRTLLTERRNSGSIPPRS

SEQ ID NO: 22828 - protein, 420 aa, unidentified
  REGION 1..420: note = Human gut metagenome
MQYVYVLNKHGEPLMPCSPGKARLLLKQQKACVVKRTPFTIKLLFGSAGYKQPITLGVDAGSKHVGLSASTEKRELYSEEFTPRSDVVELLSTRRQNRRSRRNRKTRYRVPRFDNRVHSKHKGWLAPSVEVKIQEHITVIKHICKILPISLVRVETAEFDTQRLKAMLAGKPLPVGTDYQLGEMYDEYNVRQYVLKRDNYTCQCCGAHTTAKKLVKLHVHHLESRKTGGNAPSNLVTLCTTCHKNLHKGRVTLDGKERGKPLRDAAFMGIMRKTLMVRLKEELPIPVQGTYGYITKMRREQNDIKKSHVNDARCISKHPLAEPCSVCYRTKAIRHHNRQTHKANFSKGGIRKRSQMPYVVEGYRLWDKVLYKGQECFVSGRRASGSFTLKKLDGTRISKGVTFKKLRLLEPATNYLIERM

SEQ ID NO: 22829 - protein, 416 aa, unidentified
  REGION 1..416: note = Human gut metagenome
VSETTNYAFVLDANNKQLAPTKEQKAWFLIRKKRATLVSKYPMVIQLKKKIPDKEICKDEVRCGIDDGGLHVGIALVQKCQTRNKVIFKGIVEQRNDVKHLMDVRRGYRRYHRYHKRYRPARFDNRKSSKREGRVAPSILQKRQATIRVINQLNKWINITNYWLEDVAIDIRALTDGYKPYRWQYQKSNRLDENIRKAVILRDGCKCMECGKSDCRLEVHHIKPRRLKGSYTLGNLITLCTKCHQKTEGVEELYMDRYFALLRSSDNKNLNYAQHVMIGKKWLREQLSNLGILYLTNGGDTANKRIDWDIVKSHSNDAICITDLRPDTCEIKEWVIKPMRRQSKAKTDNVLGIKHRDLVEYIFRNGEIHRGYVTALYPEQNAINFQSPTKHCKKVNARKCKVLWKYSKIYWLDNVS

SEQ ID NO: 22830 - protein, 536 aa, Anaerostipes sp.; identical to SEQ ID NO: 2718

SEQ ID NO: 22831 - protein, 328 aa, Parasutterella sp.; identical to SEQ ID NO: 16634

SEQ ID NO: 22832 - protein, 419 aa, unidentified; identical to SEQ ID NO: 4131
  REGION 1..419: note = Human gut metagenome

SEQ ID NO: 22833 - protein, 279 aa, unidentified
  REGION 1..279: note = Human gut metagenome
VVVETAEFDLQLLKAIADGKPVPQGEDYQKGEMYGHYNVRQYVLWRDNYTCQCCGTHPSKKKEVRLHVHHLESRKVGGDAPDNQVTLCESCHEKLHKGLIAEKDFKKRKRKSTRDATFMGIMRKTLMQRLCSELPIPVVKTRGYITKATREKLLVLPKSHTNDALAIAQGKRGFNVGYLPEIAQIDKIYTIRPVRHHNRQLHKATILKGGIRKSNQTEKYVFGYRLFDKVQFNGQDCFIWGRRTTGIFTIKTINGKMIKDGISFKKLKPVEKSTSYLIA

SEQ ID NO: 22834 - protein, 293 aa, Parasutterella sp.; identical to SEQ ID NO: 6812

SEQ ID NO: 22835 - protein, 440 aa, unidentified; identical to SEQ ID NO: 2597
  REGION 1..440: note = Human gut metagenome

SEQ ID NO: 22836 - protein, 425 aa, Nodularia sp.; identical to SEQ ID NO: 3165

SEQ ID NO: 22837 - protein, 417 aa, unidentified
  REGION 1..417: note = Human gut metagenome
MIYVRSKEGSVLMPTERCGKIGYLLRHGKAHVVSRVPFVVQLDYDSTTYTQDVSLGIDAGSKHIGVSASSEKKEMLSAQVELRSDIVNLLSTRRELRQTRRNRKTRYRKARFDNRKKKDGWLAPSVEQKIESHLKVIRLVHKILPITKTTIEVAQFDAQKIKNPYIKGDEYQQGEQMGFWNVREYVLARDGHKCVHCKGKSKDPILNVHHLESRKTGGNSPSNLVTLCETCHKAYHRGEFDLKIKRGSSLRDAAVMNIMRWAVYERAKAEFGNVHLTYGYITKHTRIENGIAKTHAADAFCIAKNVHAMRLSSFFMCRCVPRHTRALHVANPKKCGIRRNTIASHKIGKSNFQRFDMVRWMGKECFIFGSTHGRPVLRDIDGLQVANQPSVNIKTIKFLKRLKNNILMEEKNFRRLN

SEQ ID NO: 22838 - protein, 431 aa, unidentified; identical to SEQ ID NO: 4306
  REGION 1..431: note = Human gut metagenome

SEQ ID NO: 22839 - protein, 494 aa, unidentified; identical to SEQ ID NO: 12326
  REGION 1..494: note = Human gut metagenome

SEQ ID NO: 22840 - protein, 311 aa, unidentified; identical to SEQ ID NO: 10911
  REGION 1..311: note = Human gut metagenome

SEQ ID NO: 22841 - protein, 423 aa, unidentified; identical to SEQ ID NO: 3951
  REGION 1..423: note = Human gut metagenome

SEQ ID NO: 22842 - protein, 555 aa, unidentified; identical to SEQ ID NO: 2442
  REGION 1..555: note = Lachnospiraceae bacterium UBA2826

SEQ ID NO: 22843 - protein, 428 aa, Moorena sp.; identical to SEQ ID NO: 4442

SEQ ID NO: 22844 - protein, 480 aa, unidentified
  REGION 1..480: note = metagenome
LYTKPLDNIGEGSLPSSGEINLKGMTFMVYVKSIDGKALMPTSNAKARKLLKQKKAKVVSLRPFVVKLTYKTKTEYTQKLNLGVDSGYYNIGFSVIDAKQEYIAGEVKLLEGMKKRLLEKASYRRIRRSRLRYRKARWNNRVKSKKKGWLAPSLKHKLDTHIKFIDYLKNILPIGKITIEVANFDIQKMKYDLISGVDYQNGDMFGFWNVREFVLHRDGHKCQNPNCIHKDKKEQILKVHHIRYRSEGGSDRPENLITLCSKCHTPANHKKGKFLYDWCVNGKKVRGFKDATFMSMIRWYLVNELKSKHNNVSITYGYITKNHRIQNGIEKSHLNDAFAIAKGTNQARTKDRFLVIQDRLKNRSLEKFYDSKIIDIRTEKKVSGGDLSCGRSTKNKNLNTENLRKYRGVKISKGQRRIRKQKYFYQPNDLVKYDGKVYTVKGTQNEGKYIALKEIKKVPKVELLIPYVFKKGLNWSYGLC

SEQ ID NO: 22845 - protein, 348 aa, Anoxybacillus sp.; identical to SEQ ID NO: 18653

SEQ ID NO: 22846 - protein, 515 aa, unidentified; identical to SEQ ID NO: 3339
  REGION 1..515: note = Human gut metagenome

SEQ ID NO: 22847 - protein, 431 aa, Moorena sp.; identical to SEQ ID NO: 2831

SEQ ID NO: 22848 - protein, 425 aa, unidentified
  REGION 1..425: note = Human gut metagenome
VLQTTNPFQHWRRITTDRKVEQTEPVRYPSMENTLKVFVLNMRGQPLMPCSPPKARKLLRAGKAVPVRRTPFVIQLTVPTGETKQPITLGVDAGYKHVGLSATTAKEELLASEVELRQDVTGLLSDRLALRRARRNRKTRYRAPRFDNRVRSKHKGWLAPSVENRIQAHISRIEAVCRVLPITKIVIETASFDIQKIKNPEVEGTDYQQGEQLGFWNVREYVLFRDGHVCQACKGRSKDLILNVHHIESRKTGGDAPGNLITLCEACHKAYHAGKLKQFSPRRGASFRAETFMGIMRWTVLNRLRERHPELPVTNTYGYLTKHKRIVAGLPKTHCADAFCIAGVLDAKRRGEYLFQKQTRRHNRQIHKLTILKGGVRKRHQAPYLVHGFRLFDKVLCKGEVGFIFGRRSSGAFDVRRLNGTKISA

SEQ ID NO: 22849 - protein, 422 aa, unidentified
  REGION 1..422: note = Human gut metagenome
LRVFVWNKRRKPLMPCSPAKARHLLKEKKAAVVRRTPFTIQLTIATGESKQPVTLGVDAGYKHVGLSASTEKAELYASEVELRQDVSDLLSARRALRQSRRNRKTRYRAPRFDNRIRTKRKSWLAPSVENRINAHLSRIEAVLRLLPVTKITVETASFDMQLLKNPDISGKEYQEGEQLGFWNVREYVLFRDGHVCQHCHGRSKDPVLNVHHLESRRTGGDSPGNLITLCETCHKALHRSEITLKTKRGQSFRAEAYMGLMRWEVLNRLKTSHPGLEVHNTYGYRTKYTRIVNGIDKSHCADAFCIAGNLGAERLGEFFFQKQTRRNNRQIHKLSILKGDIRKRNQAPFEVNGFRLFDKVACKGEEGFIFGRRSSGFFEVRKLDGTCISAGISYKKLHLLEKRRTYLTEIRKEEALPPLPEG

SEQ ID NO: 22850 - protein, 499 aa, unidentified
  REGION 1..499: note = Human gut metagenome
MRYVYVLDVDGNPLMPTCRYGKVRRMLKSGQAKAVDTLPFTIQLTYKPKTYILQPVTLGQDPGRTNIGMAAVSSDGKELGRFHCTTRNKEIPKLMADRRAARRASRRGERLARKRLARKLHTTAKHLSERMLPGYDKPLAVKDILNTEARFNNRLRPEGWLTPTATQLLRTHINLFMRLAKILPVTDVAVEINKFAFMQLDNLDMRKWDIDFQRGPLYGTGGLEAAVSEQQNGTCLLCGKAPVGHYHHIVPRSRRGSNTVSNIVGLCPECHELVHKDTDAAQRLAEVKSGLLKKYGGASVLNQIIPSLVETLAGLFPGHAHVTNGWNTKKFREEHDLEKDHDVDAYCIACSHLEPKDPQAETEPFEIQQFRKHNRAIIHHQTERVYKLDGVIIARNRRKRMDQKTDSLEEWYADMVMEHGKTQTDAMRSGLTVRKSTRYYNAPKRTMPGTVFLYEGKRYVMTAQHTNGRYYRAYGAGKKEFPAAKVRILRKNTGLVFAA

SEQ ID NO: 22851 - protein, 453 aa, Scytonema sp.; identical to SEQ ID NO: 12367

SEQ ID NO: 22852 - protein, 192 aa, unidentified; identical to SEQ ID NO: 19880
  REGION 1..192: note = Human gut metagenome

SEQ ID NO: 22853 - protein, 419 aa, Bacillus sp.; identical to SEQ ID NO: 11166

SEQ ID NO: 22854 - protein, 472 aa, unidentified
  REGION 1..472: note = Oxalobacteraceae bacterium
LSVFVLDQKLRPLMPCREKRARKLLAAGRARIHRLYPFCIRIVDRALEDSVLQPLVIKIDPGSKVTGLAVCRISEAVDDDGVVAPVMHIQFLMELLHRGQTIKQSLHARSSMRRRRRGNLRYRQPRFDNRTRQAGWLPPSLLHRVLTIETWVNRIRNMAPITQIAQELVRFDMQKMQNPEIAGIEYQQGTLAGYELREYLLEKWNRECSYCGAKDLPLQMEHIVAKANGGSNRASNLCLGCESCNQKKGAKDIRAFLKNDPIRLAQILKHAKMSLRDAAAVNATRNALLKVLKATDLPVETGTGGRTKWNRSRLGIVKTHALDAACVGVVADVVSINAPALQITCMGRGTHSRTLLDQYGFPRTTLPRTKTFFGFKTGDMITAEVTKGKRIGSHKGRVAVRSSGYFNIQSGIKGMKAVQGIPHKDCRIAQRADGYNYLWKSVSDQPKAKASTAVQSAPCLTALKDGVSRSIF

SEQ ID NO: 22855 - protein, 431 aa, unidentified; identical to SEQ ID NO: 6230
  REGION 1..431: note = Human gut metagenome

SEQ ID NO: 22856 - protein, 436 aa, unidentified; identical to SEQ ID NO: 18680
  REGION 1..436: note = Human gut metagenome

SEQ ID NO: 22857 - protein, 436 aa, unidentified
  REGION 1..436: note = Human metagenome
MTKTLTTRTIQACVLDRHGKPLMPTTRLGKVYRLLKAQKAHIVSYEPFTIQLDYEPDTQVIQPMTLGVDSGAIHSGYSVANEHREYYSAEVIARNDISNRLSDRHMHRRNRRSRKTRYRKPRFNNRKNKKKGWLAPSLEQKVAVQVNEIEHIYRHFPIETIIVETAEFDIQKIKNPNISGIEYQQGTLQGYNIRNYLLEKHGHKCFYCGKTVSGFEVEHMLPKSRGGSHRIDNLTLSCHDCNQKKDTLTAEEFIRQILPAKKAAAKLKQLPNEKRVFKYMAHMNATRWTLYDTVKEKYPNVKMTYGYITKHNRIQAELPKAHHIDAKCITGFATVPSISQTVVKVKMRRHNRQLHRATFSKGHVRKAANLPTVTFGFQLHDLVCFNNHRYYIKGRRSSGSFALVSVEGLKDENRNYKKLTLLAHTNAYLTNRYINA

SEQ ID NO: 22858 - protein, 254 aa, unidentified
  REGION 1..254: note = Human gut metagenome
MVYVQDINGKPLMPTTRHGKVRRLLKDKKAVVVNLCPFTIKLMYVTSDYKQEIVLGVDAGTKHVGLSATTKSKELYSSEVILRNDIVDLLSTRRELRRARRNRLRYRKPRFNNRIKSKRPGWIAPSVKYKIDAHIRVVENVCSILPISRIVIEVAQFDTQKIKNPNISGKEYQEGDQLGFWNTREYVLARDGHKCQYCKGKSKDKILNVHHIESRKTGGDSPSNLITLCETCHKEYHKGNIDLKIRRGKSLRDA

SEQ ID NO: 22859 - protein, 442 aa, unidentified; identical to SEQ ID NO: 3234
  REGION 1..442: note = Human gut metagenome

SEQ ID NO: 22860 - protein, 442 aa, unidentified; identical to SEQ ID NO: 2903
  REGION 1..442: note = Human gut metagenome

SEQ ID NO: 22861 - protein, 338 aa, unidentified
  REGION 1..338: note = Human gut metagenome
TRREFRRARRNRTTRYRKPRFNNRVHSKNNGWLAPSVEVKIQEHITSIKRVCAILPISKIVVETAEFDLQLLKAVQDGKPVPEGEDYQKGEMYGSYDVRQYVLWRDNYTCTCCGVKGTDKKPVKLHVHHFESRKHGGNAPDNYGTLCEDCHKKLHLGIITDISLKTRKRPSTRDAAFMGIMRKTLMQRLITGLSIPVAETKGYITKAAREEILKLPKTHTNDALAIAQGRHGFGIREQAYVKPTNRIYTVRPVRHHNRQLHKATMLKGGIRKLNQASKYIFGFRLYDKVLYQGGECFVWGRRRSGSFLLRTIDGTKVKDGVGYRNLTLLERSTNYLIA

SEQ ID NO: 22862 - protein, 428 aa, unidentified; identical to SEQ ID NO: 6748
  REGION 1..428: note = Human gut metagenome

SEQ ID NO: 22863 - protein, 431 aa, unidentified
  REGION 1..431: note = Human gut metagenome
MPNKVYVINKHGRPLMPCSPAKARHLLDAGKAKVKKRTPFTIQLVYGSSGYTQEVILGVDAGSKTIGMSASTTKEELLSAEVKPRNDVVDLLSTRREFRRARRNRKTRYRKPRFDNRVRSKHKEWLAPSVEVKIQEHITSIKRVCRILPVSKVVIETAEFDLQLLKAIADGKSVPQGEDYQKGEMYGHYNVRQYVLWRDNYTCQCCGAHATKKKEVRLHVHHLESRKVGGDAPDNQVTLCESCHEKLHKGLIAEKDFKKRKRRSTRDATFMGIMRKTLMQRLYSELPIPVIETRGYITKATREKLLVLPKSHINDALAIAQGKHGFNVGYLPEIAQIDKIYTIRPVRHHNRQLHKATILKGGIRKSNQAEKYVFGYRLFDKVQFNGQDCFIWGRRTTGIFTIKTINGKMIKDGISFKKLKPVEKSTSYLIA

SEQ ID NO: 22864 - protein, 470 aa, Moorena sp.
MSVFVVGLNGCRLMPASERKARLLLKGGKASVYRKVPFTIKLNYKTGSTVQPGYLGIDTGSQHIGVSVVQKDGTVLHKEEIGLRDSMSKRKLLESRASSRRGRRYRKTRYRHPKWKPKTKRIYNEKADRKGRHWKKQKNTFTSKRQAGWLPPSLQSKTDHHIQWIRKLLDLLPEGYRLSIELGRFDPARMKDPGIHGELYQKGPQYDYENVRAYVLARDGYTCRVCKKNGGKLHVHHILYRSRGASDDPKYMAAVCSNCHTTENHLPGGILYQWMQDQKKFTRGLRDATFMNILKKRLRKAFPDAVFTYGNITKADREKLELPKSHGNDATAIALVKTEVTSVKDEEPVIHIQQVRRKKRSLHEETPRKGRKEPNRTASRIDKNTKSVTVTKGSGEKKASMTACLFDRVELDGKKGWITGFTGTSCYVKDKEDSYICTSPKYKQVSISRLRILHHCGNWAIGAEKPLGKR

SEQ ID NO: 22865 - protein, 456 aa, unidentified
  REGION 1..456: note = Human gut metagenome
MSTCVCVLSNSGERLMPTFRLGKVRRLLKDGKAKIVKHHPFTIQLLYDSKTNTQPIEICEDVGYNYIGISVKSESHEYVSAQYDTLQDEKEHHDDCRKYRRTRRNRLRYRKPRFDNRKRSEGWLAPSLEHKKQLNIRLVERYVSVIPITHATVEVGSFDTMLLQAIQKGESKPEGADYQKGPRYNLATLREAVFYRDNYTCQVCGRKIADGAILHMHHMFYWKGRHGNSLDELLTVCEKCHTPANHQKSGKLYGFGEDVKFANLSGAAFMNTVRWQIVNELYAAFGKPFVTFTYGAMTKEKRIALHLEKSHNNDAYAMGDYHPAHRCEFGHYQKRCRNNRVLEKFYDATYIDTRTGNKAKGKELFNGRISRNHKKDSEDLHKYRSKKVSKGRCSIRRQRYAIQPYDTVRLESKTYITSGCHNKGTRLLIPANGKSKSVAISKVQVVCHAGAWIQII

SEQ ID NO: 22866 - protein, 294 aa, unidentified
  REGION 1..294: note = Human gut metagenome
MTAIQRACAILPVSKVVVETAEFDLQLLKAVAEGKPVPQGEDYQKGEMYGHYNVRQYVLWRDSYTCRICGVHGSVRKGVPLHVHHLESRRVGGDAPDNLVTLCTACHDKLHKGIIMAADIKKRKRRSTRDATFMGIMRMTLLRRLREQLPVPVVETRGYITKATRENLLVLPKSHTNDALAIAHGPQGFRAEYLPNIRQADRLYTIRPVRHHNRQLHKATILKGGVRKANQAEKYICGFRLYDKVLYNGIECFVWGRRTSGSFLLRQLNGEKVKDGVSYKHLKLLERSQSYLVA

SEQ ID NO: 22867 - protein, 318 aa, unidentified
  REGION 1..318: note = Human gut metagenome
LVKKIQKFLPISDVVLEINKFAFMRLDNPNVQKWQYQQGPLYQNASLEEAVSEMQEHHCLFCKKPIAHYHHVVPQSENGSNTIGNIVGLCTKHHDLVHKDTAWQKKLAKKKTGLNKKYGALSVLNQIIPALTKELSSLFPKHFFATNGKSTYDYRAAHGVSKDHWLDAYCIACSVLPNDVCDSNINSRVPYELKQFRRHDKRALHKANMNRVYTLDGKKVATNRHKAIKQTTDSLEEFRQRQPDDVCKLKVKEHHPEYRNPERNFPGCVFLVGKHTHVMQGTSGSHNGQADGYYDTNGNSYSSGKCKFVAKNEGIVFA

SEQ ID NO: 22868 - protein, 475 aa, unidentified; identical to SEQ ID NO: 4985
  REGION 1..475: note = Human gut metagenome

SEQ ID NO: 22869 - protein, 419 aa, unidentified; identical to SEQ ID NO: 6046
  REGION 1..419: note = Human gut metagenome

SEQ ID NO: 22870 - protein, 442 aa, unidentified; identical to SEQ ID NO: 2834
  REGION 1..442: note = Human gut metagenome

SEQ ID NO: 22871 - protein, 462 aa, unidentified; identical to SEQ ID NO: 14482
  REGION 1..462: note = Human gut metagenome

SEQ ID NO: 22872 - protein, 426 aa, unidentified; identical to SEQ ID NO: 3614
  REGION 1..426: note = Human gut metagenome

SEQ ID NO: 22873 - protein, 456 aa, unidentified; identical to SEQ ID NO: 6026
  REGION 1..456: note = Human gut metagenome

SEQ ID NO: 22874 - protein, 386 aa, unidentified
  REGION 1..386: note = Human gut metagenome
LTIATGEAKQPVSLGVDAGYKHVGLSASTEKAELYASEVELRQDITDLLSARRALRQSRRNRKTRYRAPRFDNRIRTKRKGWLAPSVENRINAHLSRIEAVLRLLPITKITVETASFDMQRLKNPDISGKEYQEGEQLGFWNVREYVLFRDGHVCRHCHGRSKDPVLNVHHLESRRTGSDSPDNLITLCETCHKALHRGEITLKAKRGQSFRAQAFMGIMRREVLNRLKASYPELKVHETYGYLTKHARIANGIVKSHGADAFCIAGNLGAERLGEFFFQKQTRRNNRQIHKLSILKGGIRKRNQAPFEAKGFRLFDKVACQGEEGFIFGRRSSGSFDVRKLDGTRISAGISCKKLRLLEKRRTYLTEIRKEEALPPLPEGRGLRA

SEQ ID NO: 22875 - protein, 383 aa, unidentified
  REGION 1..383: note = Human gut metagenome
LKVFVLNMRGQPLMPCSPAKARHLLKAGKAAVRRRTPFTIQLRIATGETKQSVTLGVDAGAKHVGLSAATEKEEVFASEVELRQDITGLLAARLSLRRDRRHRKTRYRAPRFLNRVRSKHKGWLAPSVENRIQAHMSRIDAVCRLLPVTRIVIETASFDVQKIRNPEVEGTGYQQGDQLGFWNVREYVLFRDGHVCQHCHGHSKDKILNVHHLESRQTGGDAPNNLITLCETCHKACHAGKIKLKVKRGQSFRAEAFMGIMRWTLLDRMRKAHSGLPVENTYGYLTKNTRITPGLPKTHCVDAYCIAGNLKAVRRGVCLHQRQVRKHNRQIHKCTVLSKTLKDGTKIGYRKLNQTPHLVKSFRLFDKVRCLGQTGFIFGRRSS

SEQ ID NO: 22876 - protein, 494 aa, unidentified; identical to SEQ ID NO: 4514
  REGION 1..494: note = Human gut metagenome

SEQ ID NO: 22877 - protein, 420 aa, unidentified; identical to SEQ ID NO: 6507
  REGION 1..420: note = Human gut metagenome

SEQ ID NO: 22878 - protein, 421 aa, unidentified
  REGION 1..421: note = Human gut metagenome
MRGKPLMPCSPAKARHMLKAGKAVVVRRTPFTIKLTIATGETKQDVTLGVDAGARHVGISATTEKEEVFASEVALRQDITGLLADRLAFRRARRNRKTRYRAPRFNNRVRSKHKGWLAPSVENRIQAHMSRIDAVCRLLPVTKIVIETASFDVQKIKNPTIEGTDYQQGDQLGFWNVREYVLFRDGHICQHCRGRSKDPILNVHHLESRKTGGDAPNNLITLCETCHKAYHAGKIKLKVKRGQSFRAEAFMGIMRWTLLDRVRKAHPGLPVENTYGYLTKNTRITLGLPKAHCVDAYCIAGNLKAVRRGVCLHQRQVRKHNRQIHKCTVLSKTLKDGTKIGYRKLNQTPHLVKNFRLFDKVRCLGQTGFIFGRRSSGYFDVRRLDGVKLSSGISYRKLTLLEKRSTYLTELRKEDGASSPV

SEQ ID NO: 22879 - protein, 399 aa, unidentified
  REGION 1..399: note = Human gut metagenome
ICEDVGYNYIGISVKSESHEYVSAQYDTLQDEKEHHDDCRKYRRTRRNRLRYRKPRFDNRKRSEGWLAPSLEHKKQLNIRLIERYVSVIPITRATVEVGSFDTMLLQAIQKGESKPEGVDYQKGPRYNLATLREAVFYRDNYTCQVCGRKVADGAILHMHHMFYWKGRHGYQLDELVTACEKCHTPANHQKGGKLYGFGKDKKFANLSGAAFMNAVRWQIVDALHATYGKEFVTITYGAMTKEKRIALQLEKTHNNDAYAMGDYHPACRCKFRHYQKRRRNNRVLEKFYDATYIDARTGNKAKGKELFNGRISRNHKKDSENLHKYRSKKVSKGRRSIRRQRYAIQPYDTVRLENKTYITSGCHNKGTRLLIPANGKSKSVAISKVQVVCHAGAWIQII

SEQ ID NO: 22880 - protein, 430 aa, unidentified
  REGION 1..430: note = Groundwater metagenome
MAVFVLDKHKKPLMPCTEKRARLLLERRRAVVHKMSPFTIRLKDRTVEQSQLQPLRLKLDPGSKTTGLAILREDDSESSTAILLAELRHKPGIKEKLDDRSTQRRNRRNRKTRYREKRFDNRAKPSGWLPPSLQARVNQASNVAAKLQKLLPITAISTEHAKFDTQLLQNPAIAGIEYQQGELLGYEIREYLLEKWKRVCAYCGKADTPLEIEHITPKSRGGSNRISNLTLACRLCNQTKGNKTAEEFGYPEIQKQAKLPLKDAAAMNTTRWRLLNQLKETGLPVECGTGARTKKQRIEHGLPKTHYYDACCVGAGTPANLVTLQKYVSIWKAIGRGTRKMCNTDKYGFPKSHRQRKKNHFGFQTNDIAKADVLRGKYQGIHTGRVVVRAKGCFDLKDIAGNRICQGISHKYFRLLQRADGWQYDKTKIA

SEQ ID NO: 22881 - protein, 415 aa, unidentified; identical to SEQ ID NO: 7777
  REGION 1..415: note = Human gut metagenome

SEQ ID NO: 22882 - protein, 414 aa, unidentified
  REGION 1..414: note = Human gut metagenome
MVYVINKQGQALMPTERFGKVRRLLKNSLAHVVCRIPFTIQLDYDTTDYTQPVSLGVDAGSKHIGISATTSEKELYAADVELRNDIVDKLSTRRELRRTRRSRLRYRKARFNNRVSSKRKGWLAPSVENKIQTHLTVVEKIHKFLPITNIVVETASFDIQKINNPSISGSEYQQGEQLDFFNVREYVLFRDNHICQHCKGKSKDKVLNVHHIESRKTGGDSPNNLITLCETCHKAYHRGEFELNVKRGKSFRDAAFMGIMRWGFYDRLKNIYPNVSMTFGYITKNARITNNLPKDHYVDARCISGNPVAKPLGYYFYQKKVRCQNRQIHKANFLKGGRKKLNQAPFLVKGFRLFDLVEYKKELYYIFGRRSSGSFDIRKLDGTKVNKGSINCKYLRLIATRKSILTEKRMQVNL

SEQ ID NO: 22883 - protein, 433 aa, Moorena sp.; identical to SEQ ID NO: 16249

SEQ ID NO: 22884 - protein, 431 aa, unidentified
  REGION 1..431: note = Human gut metagenome
MPNKVYVINKHGRPLMPCSPAKARHLLDAGKAKVKKRTPFTIQLVYGSSGYTQEVILGVDAGSKTIGVSALTKKEELFAANVIPRNDVVDLLSTRREFRRARRNRKTRYRKPRFDNRVRSKHKGWLAPSVEVKIQGHITAIRRVCGILPVSKVVVETAEFDLQLLKAIADGKPVPQGEDYQKGEMYGHYNVRQYVLWRDNYTCQCCGAHATKKKEVRLHVHHLESRKVGGDAPSNLITLCDSCHEKFHKGIITAANLKKRKRRSMRDATFMGIMRKTLMQRLCSELPIPVIETRGYITKATREKLLVLPKSHTNDALAIAQGKQGFNVGYLPGIVQINKIYTIRPVRHHNRQLHKATILKGGIRKSNQAGKYVFGYCLFDKVQFNGQDCFIWGRRTTGIFTIKTINGKMIKDGISFKKLKPVEKSTSYLIA

SEQ ID NO: 22885 - protein, 418 aa, Moorena sp.
MQNYVFVIDTNKQPLNPISPKKARRLLEKGKAAVFRMYPFTIILKTAIDNPTISPCQIKIDPGSKTTGFALVRDNQVIWGMELEHRGGLIKKKLESRRAVRRGRRNRNTRYRKPKFLNRKRPEGWLPPSLEHRILTIQTWVRRLIKFCPVNEIWIERVKFDTQKMQNPEINGVQYQQGELAGYEVREYLLEKWGRQCAYCGKQNVQLQIEHIHPKSKGGSDRVSNLCLACEKCNQGKGNKPIEEFLNKKPSLLQKIKTKAKQPLKDAAAVNATRNKLVKVLNKVRPVVTGTGAQTKYNRTRLGLPKQHWIDAACVGDIENLTLITSQPLLATCKGQGGRQKAALNKYGYPIRHNPLKPIKGWVTGDIGKHQKLGTGKVTPRSKGSFGFTPLGMKVYKSCKPQDISAIHRKDGYGYRFC

SEQ ID NO: 22886 - protein, 531 aa, unidentified; identical to SEQ ID NO: 4135
  REGION 1..531: note = Human gut metagenome

SEQ ID NO: 22887 - protein, 451 aa, unidentified; identical to SEQ ID NO: 5203
  REGION 1..451: note = Human gut metagenome

SEQ ID NO: 22888 - protein, 443 aa, Actinomadura sp.; identical to SEQ ID NO: 3431

SEQ ID NO: 22889 - protein, 420 aa, unidentified; identical to SEQ ID NO: 21345
  REGION 1..420: note = Human gut metagenome

SEQ ID NO: 22890 - protein, 409 aa, unidentified
  REGION 1..409: note = Human gut metagenome
AFVLDANNKQLTPIKEQKAWFLIRKKRATLVSKYPMVIQLKKKIPDKEICKDEVRCGIDDGGLHVGVALVQKCQTRNKVVFKGVIEQRNDVKHLIDVRCGYRRYHRYHKRYRSARFNNRNSSKREERIAPSILQKRQATIRVINQLNKWINITNYWLEDVAIDIRALTDGYKPYRWQYQKSNRLDENIRKAVILRDGCKCMECGKSNCRLEVHHIKPRRLKGSSTLDNLITLCTKCHQKTESVEELYMDRYFALLNSSDNKNLNYAQHVMIGKKWLREQLSNLGMLYLTNGGDTANKRIDWDIAKSHSNDAICITDLRPDTCEIKEWAIKPMRRQSKAKTDNVLGIKHRDLVEYTFRNGETHRGYVTALYPEQNAINFQSPTKHCKKVNAKKCKVLWKYSKIYWLDNVG

SEQ ID NO: 22891 - protein, 424 aa, unidentified; identical to SEQ ID NO: 13009
  REGION 1..424: note = Human gut metagenome

SEQ ID NO: 22892 - protein, 477 aa, unidentified; identical to SEQ ID NO: 12969
  REGION 1..477: note = Human gut metagenome

SEQ ID NO: 22893 - protein, 420 aa, unidentified; identical to SEQ ID NO: 13994
  REGION 1..420: note = Human gut metagenome

SEQ ID NO: 22894 - protein, 227 aa, unidentified
  REGION 1..227: note = Human gut metagenome
MVYVVANDGQPLMPTERHGKVCRMLRSGMAKVIKKCPFTIQLQYESERNVQPVSLGVDAGSKHIGISATTKAKVLYESDVELRDDIVKLLATRRQLRRSRRSRKTRYRPARFDNRKRKEGWLAPSIRQKIGSHLTVVANVCKILPINQIIVETASFDIQKIKNPEIQGIEYQQGEQMDFWNVREYVFFRDGHTCQCCKGRSKDKILNVHHIESRKTGGNAPNNLITL

SEQ ID NO: 22895 - protein, 315 aa, unidentified; identical to SEQ ID NO: 4900
  REGION 1..315: note = Permafrost metagenome

SEQ ID NO: 22896 - protein, 433 aa, unidentified; identical to SEQ ID NO: 13677
  REGION 1..433: note = Anaerobic digester metagenome

SEQ ID NO: 22897 - protein, 417 aa, unidentified
  REGION 1..417: note = metagenome
VYVLNKHGEPLMPCSPRKARLLLKQKKACVVKRTSFTIKLLYGSTGYKQPITLGVDAGSKHIGISATTEKHELYREEATPRNDVVDLLSARRAFRRSRRNRKTRYRAPRFDNRVHSKHKGWLAPSVEVKIQEHITLIEHVCRILPVTLVRVETAEFDTQRLKAMLEGKPLPVGTDYQLGEMYDEYNVRQYVLKRDNYTCQCCGAHSTKTKGVKLHVHHIETRRTGGNAPNNLITLCKACHKALHAEKVTLDGKKRGKPLKDAAFMGIMRKTLMERLRKELKIPVQGTYGYITKYLREKNGIPKSHTNDARCISKNPLAIPCDTCYYTKAVRHHNRQLHKATILKGGIRKANQAPYIVKGYRLWDKVSCNGTECFITGRRTSGYFALKKLDGTVASNSISYKKLRLLEAATNYIIERK

SEQ ID NO: 22898 - protein, 417 aa, unidentified
  REGION 1..417: note = Human gut metagenome
MPCSPAKARLLLKEKKAIVKRRTPFTIQLTIATGEAKQPVALGVDSGYKHIGLSATTEKAELYASEVELRQDITDLLSARLALRRSRRSRKTRYRAPRFDNRVASKRKGWLAPSVENRIAAHMSRVEAVMRVLPVTAITVETAAFDTQLLKNPDIAEAAYQQGEQLGFWNVREYVLFRDGHVCQHCRGKSKDPILNVHHIESRRTGGDAPNNLITLCETCHKAFHRGEIKLKVKRGKSFKAETFMGIMRWTLFERLKKAHPELRVRNTYGYLTKHKRISHGIAKSHCADAYCIADNLGAKRLEGFFFQKQTRKHNRQIHKLSILKGGLRKKNQAPYEVKGFRLFDKVICKGEEAFIFGRRTSGSFDVRRLDGTRISAGINYKKLRLLEPRTTYLTEFRKEAALPHLHKCRGFRAEFL

SEQ ID NO: 22899 - protein, 450 aa, Moorena sp.; identical to SEQ ID NO: 4205

SEQ ID NO: 22900 - protein, 418 aa, Moorena sp.; identical to SEQ ID NO: 6948

SEQ ID NO: 22901 - protein, 429 aa, Moorena sp.; identical to SEQ ID NO: 6772

SEQ ID NO: 22902 - protein, 499 aa, unidentified; identical to SEQ ID NO: 10243
  REGION 1..499: note = Human gut metagenome

SEQ ID NO: 22903 - protein, 323 aa, unidentified
  REGION 1..323: note = Human gut metagenome
MVYVLNLEGEPLMPTNNAKARKLLKNQKAKVVKVKPFVIQLLYRTTEYKQPIILGIDSGYLNIGFSAITNKKELLVGEVKMLKGMKDRLLERSQYRKIRRQRLRYRKPRFNNRKRNDGWLAPSIQHKLDTHIKIINEINRMLPISNIIVEVANFDIQKIKNPNIRSEEYQQGEQMGFWNLREYILYRDGHKCQNPNCKNKSKNQILEIHHIKYKSEGGTDVPSNLITLCNKCHTSPNHKKGKFLYDWMMKKKKVKGFKDATFMSMVRWKIINELKTKYQSVNFTYGYMTKNHRIRHAIEKTHYNDAFAIAKELIKYVVRIYGQ

SEQ ID NO: 22904 - protein, 515 aa, unidentified; identical to SEQ ID NO: 17815
  REGION 1..515: note = Human gut metagenome

SEQ ID NO: 22905 - protein, 500 aa, unidentified
  REGION 1..500: note = Human gut metagenome
LVWNVQAPWDVYPSPTLCGLCLKVLRGRNGDADKKPIPTLTKDENRPSGRTTGLRAEQAEPAGIRKGDTLKVFVLNMRGKPLMPCSPAKARHMLKAGKAVVVRRTPFTIKLTIATGETKQDVTLGVDAGARHVGISATTEKEEVFASEVALRQDITGLLADRLAFRRARRNRKTRYRAPRFNNRVRSKHKGWLAPSVENRIQAHISRIEAVCRLLPVTKIVIETASFDIQKIRNPEVEGTGYQQGDQLGFWNVREYVLFRDGHICQHCRGRSKDPILNVHHLESRKTGGDAPNNLITLCETCHKAYHAGKIKLKVKRGQSFRAEAFMGIMRWTLLDRVRKAHPGLPVENTYGYLTKHTRITHGLPKTHCVDAYCIAGNLKAVRRGVYLHQRQMRKHNRQIHKFTVLSKRLEDGTKIGYRKLNQSPYLVHGFRLFDKVRCLGQIGFIFGRRSSGYFDVRRLDGVKLSPSISWRKLTLLEKRSTYLTELRKPVSYTHLRAHE

SEQ ID NO: 22906 - protein, 458 aa, unidentified
  REGION 1..458: note = Human gut metagenome
LTKDENRPSGRTTGLRAEQAEPAGIRKGDTLKVFVLNMRGKPLMPCSPAKARHMLKAGKAFVVRRTPFTIKLTIATGETKQDVTLGVDAGARHVGISATTEKEEVFASEVALRQDITGLLADRLAFRRARRNRKTRYRAPRFNNRVRSKHKGWLAPSVENRIQAHISRIEAVCRLLPVTKIVIETASFDIQKIRNPEVEGTGYQQGDQLGFWNVREYVLFRDGHICQHCRGRSKDPILNVHHLERRKTGGDAPNNLITLCETCHKAYHAGKIKLKVKRGQSFRAEAFMGIMRWTLLDRMRKAHSGLPVENTYGYLTKNTRITLGLPKTHCVDAYCIAGNLKAVRRGVCLHQRQVRKHNRQIHKCTVLSKTLKDGTKSGYRKLNQTPHLVKSFRLFDKVRCLGQIGFIFGRRSSGYFDVRRLDGVKLSPSISWRKLTLLEKRSTYLTELRKEDGASSPV

SEQ ID NO: 22907 - protein, 512 aa, unidentified
  REGION 1..512: note = Human gut metagenome
MSTVYVLNKDGKPLMPTTRGGHVRHLLKEQKARVVRAKPFTIQLLYETNDVVQPLYLGIDPGRTNIGVAVVKANGTAVFTAHLETRNKEVPKLMQDRKKARRARRTNGRRCRRQRRAKANGTISKKCVKQDTAQSKNPSKRAKEIGIIKRRLPGYKKDVLCIGIKNKEAKYTNRTRPEGWLTPTANQLLQTHINLVRKMQKFLPISDVVLEVNKFAFMRLDNPDIQKWQYQQGPLYQKGSLENAVSEMQEHHCLFCDKPIDHYHHVVPQSENGSNTIANIVGLCAEHHNLVHKDAAWQKKLAEEKVGLNKKYGALSVLNQIIPALTNKLSVLFPKHFFVTAGKSTHDYRAAHGVSKDHWLDAYCIACSVLPSNVCDSNINNHMPYELKQFRRHDRRVLNNENMNRVYTLDNKAVAINRHKATEQEAASLEEFRKEHPNDVCKLKVKEHHPTYRNMNRNYPGSIFLVGKHVHIMQGIVGSKDGKATTYKDSNANSITASKCKFVAKNSGILFV

SEQ ID NO: 22908 - protein, 435 aa, unidentified
  REGION 1..435: note = Human gut metagenome
MPDTDYIYVLGVDGKPQMPTKRKRHVKRLLNTGKARIACHVPYTIQLLYENTPVLQPVMLAEDPGRTNIGMAILSIKGELLMSAVVETRNREIVRLMNHRRGYRRASRIGERKARQRLAKRFGTMLKAGLIMRKLPKFAADKFITCHCIKNTESRFFNRKHPDGWLTPTSRQLVETHINLMHKIQKYLPVTDIAMEVNRFAFLSLENPSVSGVDFQNGPLKGFDSLHDTVNELQHGKCLLCDKKIEHYHHIVPRSINGSNTIGNIAGLCMECHDKVHKCAAYQKKLNDVKKGLDKKYGALSALNQAVPFICKCLEAEFGREHVSYCTGRDTAKMRSSFGFQKTKDNQMHETDAWCIGILALNKIPNVVPDFGQTYCIRQFRRQDRSLVCAQTERVYKLDGVTIAKNRKKRTEQKTDSLDDWYNRQAGDFIRQKES

SEQ ID NO: 22909 - protein, 419 aa, Moorella sp.; identical to SEQ ID NO: 4784

SEQ ID NO: 22910 - protein, 512 aa, unidentified; identical to SEQ ID NO: 9441
  REGION 1..512: note = Human gut metagenome

SEQ ID NO: 22911 - protein, 427 aa, Moorena sp.; identical to SEQ ID NO: 3216

SEQ ID NO: 22912 - protein, 430 aa, Beggiatoa sp.; identical to SEQ ID NO: 9043

SEQ ID NO: 22913 - protein, 432 aa, Scytonema sp.
MEGRMSKVLIIDTEKRPLDPIHPAQARQLLRNGKAAIFRRFPFTLILKESRPDAPVQPLRIKIDPGAKITGISVVNDSTGEVVFAAELQHRGFAIRESLTSRRQLRRGRRNRKTQYRQPRFDNRKRPDGWLPPSLMSRVYNIETWVKRLIRFAPITAISQELVRFDTQLMENPNIQGKEYQQGTLAGYETREYLLEKFGRKCAYCDKQNVPLQIEHIYPRAKGGTNRISNLTLSCEKCNIKKGTKDIKNFLKKDPTRLKKIENQAKKPLADTAAVNATRFKLLEVISATGLPVETGSGGLTKFNRTQQELEKTHWIDAAVVGKSTPEKLIIKGVKPLLVKAAGHGTRQCAGINKYGFPTRYRTSKQIHFGFQTGDIIKAVVKSGKKAGTYVGRVLCRASGSFDISMKSGRVQGISHKYCSVIHKKDGYSYGF

SEQ ID NO: 22914 - protein, 415 aa, Bacillus sp.; identical to SEQ ID NO: 16311

SEQ ID NO: 22915 - protein, 463 aa, unidentified; identical to SEQ ID NO: 6734
  REGION 1..463: note = Human metagenome

SEQ ID NO: 22916 - protein, 512 aa, unidentified; identical to SEQ ID NO: 19995
  REGION 1..512: note = Human gut metagenome

SEQ ID NO: 22917 - protein, 457 aa, Moorena sp.; identical to SEQ ID NO: 4365

SEQ ID NO: 22918 - protein, 418 aa, Moorena sp.
MPCHPARARQLMRKGRAAVYRRYPFTIIIKEREGGDTQPTALKFDPGAKTTGIAVVVDCKRGKRCVFAAEIEHRGSQIKEGLEKRRAIRRSRRHRKTRYRKPRFKNRTKPKGWLPPSLRSRVDNIASWTKKLRSRIPVSSLSMERVRFDAQKLVNPEISGVEYQQGTLFGYEIREYLLEKWGRKCAYCSKKDVPLQIEHMTPKSRGGSNRIGNLTLACEKCNQKKNTKTAEEFGFSGLREKSSKPLRAAAAMNATRNAIYSVLKATGLSLEAGTGGRTKYNRSKQGYAKEHWLDAMCVGESGENVFVEKQHEVLEVKAMGRGSRQMCRVDGYGFPRTKAKSEKRVRGFQTGDIIRAVVPKGKKKGVYEGRVAVRKSGSFNIKQGKQKAVQGIGWKHCKIIQQIDGYSYKNRMGVDTPL

SEQ ID NO: 22919 - protein, 570 aa, unidentified
  REGION 1..570: note = Candidatus Collierbacteria bacterium
MKQSKQSNKKFKAQALNSKEKSALEILGFQPDLVYQAQESMPKGIATPTGATTTFKITSKDALRDDNSSPGPCKNKTSNALTKAERLAKATERQLTEAQRNLNIVEENIASKATVPSREIARKGIHTQGRVLVIGQDSNPCMPCNPARARKLLKAGKAKIHLYFPFVIQLNYSPTGTQPVQLKGDPGTRTTGICLNILTQRGWRTVWAMHLVHHPDDIRNSLTKRRSQRNGRRSRNTRYRPPRWNNRKRAKGWLAPSLMTNVINLVTWVKRLKKHAPVTQITIEDVKFDTQLMQNPDISGLEYQYGTLHGTDIREHTFWKCNYTCSYCGKKNIPLTVDHIKSQSPRTPDRQAGTNTPSNLTAACKPCNQEKSNYSVEEFAIMRGVKSFPLLKINNEKNLKAVGISNSIRLRIIEETKKATRINPELGSGGRTKFNRENQKYPKTHFIDAACAGESGAKVSLNPNMQIYIVKACSRNARRMQQPDSFGFPKGKAKEFSCIHGVRTGDIGKAVVTKGKNKGTWIGRISIRSTGTFKVGNKDGVNYKKIKVIQRNNGYSYNFAYPPLFQNPKP

SEQ ID NO: 22920 - protein, 417 aa, unidentified
  REGION 1..417: note = Human gut metagenome
MPCSPAKARLLLKERKAIVKRRTPFTIQLTIATGEAKQPVTLGVDSGYKHIGLSATTEKAELYASEVELRQDITDLLSARLALRRSRRSRKTRYRVPRFDNRVASKRKGWLAPSVENRITAHMSRVEAVMRVLPVTAITVETAAFDTQLLKNPDITGAAYQQGEQLGFWNVREYVLFRDGHVCQHCRGKSKDPILNVHHIESRRTGGDAPNNLITLCETCHKAFHRGEIKLKVRRGKSFKAETFMGIMRRTLFERLKKAHPELNVRNTYGYLTKHKHISYGIAKSHCADAYCIADNLGAKRLEGFFFQKQTRKHNRQIHKLLILKGGLKKKNQAPYEVKGFRLFDKVICKGEEAFIFGRRTSGSFDVRRLDGTRISAGINYKKLRLLEPRTTYLTEFRKEAALPPLHKCRGVCAEFL

SEQ ID NO: 22921 - protein, 424 aa, unidentified; identical to SEQ ID NO: 12629
  REGION 1..424: note = Human gut metagenome

SEQ ID NO: 22922 - protein, 477 aa, unidentified
  REGION 1..477: note = Human gut metagenome
MWLNSSEGKEQCCIHGNLGITLGKDSHSLRRGQFCQSLTVTTTRKETTSMYVYVLNQHGEPLMPCSPRKARTMLRDHKATVVRRTPFTIRLLHRSSEYRQDITLGVDAGSKFIGLSACTENKELFAAEVKPRNDVVDLLSTRRELRRSRRNRKTRYRAARFNNRVHSKHKGWLAPSVEVKIQEHITAIKRTCAILPISMVIVETAEFDTQRLKAMLEGKPLPVGTDYQLGEMYDEYNVRQYVLKRDNYTCQCCGIQSTDKAPVKFAVHHKESRHVGGNAPNNLITLCEKCHRRLHAGVITLEEGKRKRGKSFRDAAFMGIMRKTLMRRLRSELSIPVKETYGYITKLLRETHSIQKSHVNDARCIARVPNAQPSDTLYRIRTVRNHNRQLHKANPIKGGIRKRNQAPYEVFGFRLWDKVLFNGQECFITGRRVSGYFALKDFDGKKVHASVSHKVLTVVESATSYLIERRTAVSSRG

SEQ ID NO: 22923 - protein, 515 aa, unidentified
  REGION 1..515: note = Human gut metagenome
MTVLEERLSKTEYIYVLGFDGKPQMPTRRKRHVLKLLKTGRARIAEDIPFTIRLTYRNAPVLQPVTLAEDPGRTNIGAAVLSPLGDLLFAAVIETRNKEIKKLMTDRQKSRQASRRGERKARQRLAKRYGSMVKSGMVMRKLPMYAADRFVTCKFIRNTQARFCNRKRCPDWITPTVQHLVQTHLNIIRKISRYLPVTDIAFEVNRFAFMHMENPKAMGVDFQNGPLKGYDDVKEAIRTQQHGKCLMCKKPISHFHHIVPRSRGGSDTIQNMAGLCPECHTKVHTDTAFRKDFDEKKSGQLKKYGALSALNQAVPFICKKLLEEYGEEHVHFCRGMDTSLIRTALGFEKTKMNQMHEVDAYCIGLAALEVNEVETPAFDHTFQIRQFRRQDRSIIHHQTGRSYYQGKEKVAQNRKPGFEQKTTALSQWYEEQVRIHGEKEAEKLRSQLRVEKSCRHYNDMDRFLPGAVFLYEGKRYVLSGRITNGKYLRACGQGMKNFPAAECTFIRHNAGLVFI

SEQ ID NO: 22924 - protein, 428 aa, Oscillochloris sp.; identical to SEQ ID NO: 14672

SEQ ID NO: 22925 - protein, 413 aa, unidentified
  REGION 1..413: note = Human gut metagenome
MTSYAFVLDANGKQLAPTKEQKAWFLIRKKRAALVSKYPMVIQLKKEIQENEICKDEIRCGIDDGGLHVGIALVQKCKTKNKVVFKGTIEQRNDVKHLMEVRRGYRRYHRYHKRYRQARFNNRKSSKREGRIAPSILQKRKATIRVINQLNKWINITNYWLEDVSIDIRVLTDGYKSYRWQYQKSNRLDENIRKATILRDGGKCMECGKSNCRLEVHHIKPKRRNGSNTLDNLITLCESCHQKTEGQEELYMDRYFSLLKSSDNKNLNYAQHVMIGKMWLRKQLSGLGVLYLTSGGDTANKRIDWNIEKSHANDAVCITDLQPDTYDMKEWTMKPMRRQSKAKTDHVLGIKHRDLVEYTFKNGETHRGYVTALYPEQKAINFQSPTKHCKKVNARKCKLLWKYSKIYWFENAS

SEQ ID NO: 22926 - protein, 374 aa, unidentified; identical to SEQ ID NO: 10163
  REGION 1..374: note = Human gut metagenome

SEQ ID NO: 22927 - protein, 409 aa, unidentified
  REGION 1..409: note = Human gut metagenome
VVKRFPFVIRLVDRTVEQSEVQPVLIKLDPGSRETGAAVVRDDGKKRHHALAFFVIKHRGGAIRDALKARSAFRRRRRSQNFRCRSPRFLKRVKPKGWLPPSLRHRVETTLSFVRRMCRYLPVSGIATELVKFDSQKLQNPEVSGVKYQQGTLFEYEVREYLLEKFGRKCVYCGAEGVPLNIDHVVPRAKGGSNRVSNLVLACVSCNQKKGARSLEDFLKGKPEVLARVRRELKTPLRDAAAVNATRWVLFNELKATGLPVETGSGALTKLNRHAFGVEKEHWLDALCVGRLNGVVTRKGLNVLEIRCMGRGSRQRTRLTKYGFPRGYLMRQKCVHGFATGDMVEANVPKGKKAGLWRGRVAVRVSGSFNIQTPKGVIQGVGWKHCRLISHNDGYGYAWLGHAPHSSPA

SEQ ID NO: 22928 - protein, 467 aa, Clostridium sp.; identical to SEQ ID NO: 14886

SEQ ID NO: 22929 - protein, 490 aa, unidentified; identical to SEQ ID NO: 9939
  REGION 1..490: note = Human metagenome

SEQ ID NO: 22930 - protein, 375 aa, unidentified
  REGION 1..375: note = Human gut metagenome
MVYVQDINGKPMMPTTRHGKVRRLLKDKKAVVVNLCPFTIKLMYVTSDYKQEIVLGVDAGTKHVGLSATTKSKELYSSEVILRNDIVDLLSTRRELRRARRNRLRYRKPRFNNRIKSKRPGWTAPSVKYKIDAHIRVIDNVCSILPIFRIVIEVAQFDTQKIKNPNISGKEYQEGDQLGFWNTREYVLARDGHKCQYCKGKSKDKILNVHHLESRKTGGDSPSNLITLCETCHKEYHKGNIDLKIKRRSSLRDAAVMGIMKWRLYEELKSKYDNISMTFGYVTKYNRIKHGIEKSHVFDAFVISKNFDAIRLCYYYKVRLASRHNRQIHKQKIPKGGIKRPNQSPFEVFGFRLFDRVMFENSYYFILARRKTGSF

SEQ ID NO: 22931 - protein, 462 aa, unidentified; identical to SEQ ID NO: 9356
  REGION 1..462: note = Human gut metagenome

SEQ ID NO: 22932 - protein, 327 aa, unidentified
  REGION 1..327: note = Human gut metagenome
RAKYRRNRRNRKTRYRKARWLNRASSIKKDRFSPTMQSKLHSHVREIEYIQSILPVTEMVFETGQFDMHLMKNPSLANPKVRPWGYQKGANYGFENTKAMVLNRDNYTCQCCKGKHKDSKLEVHHIVFRSQGGSDEESNLLTLCHTCHKDLHSGKINPKLSGKVKGNLKYATQMNSIRKQLFRCYPNAIETFGYVTKVNRLHLGVAKEHYYDACTIATQGNAFNVKSNLYKKKCVSDGDFQKTKGIHSEQPIVTDKICGFRKFDKVRYFGNDYFIKGRMSTGYAILMDIDGNKIDFSTMPRGYKTPKLSNCKRITARSTVMTQVKVV

SEQ ID NO: 22933 - protein, 413 aa, unidentified; identical to SEQ ID NO: 5477
  REGION 1..413: note = Human gut metagenome

SEQ ID NO: 22934 - protein, 504 aa, unidentified; identical to SEQ ID NO: 13658
  REGION 1..504: note = Human gut metagenome

SEQ ID NO: 22935 - protein, 372 aa, Anabaena sp.
LFAQRAVGISKLYLEIRIGQTDRKQIMSNFVFLIDANKTPLNPIHPSHASKLLDSGKAAVFRRYPFVLIMNRVVENIVTYPINLKIDPGSKFTGISLVNNKEEVIWGMELQHRGAVIKSELETRSWVRRSRRNRHTRYRKPRFLNRKRTINWLAPSLKHRVLTTNTWVKRLIKYAPITAITQELVRFDLQQLENPEISGIEYQQGELQGYEVREYLLEKWERKCSYCDAKDIPLQVEHIQPKAKGGSNRISNLCLSCEKCNQKKGTQDIGKFLAKKPELLKRIKSQSKRPLKDAVAINSTRWDLFQTLKETGLPITTASGGRTKFNRRKLNLPKEHWIDAACVGVVKNLNILTTNIFKLTLSGLKTLRFFNQ

SEQ ID NO: 22936 - protein, 415 aa, Parasutterella sp.; identical to SEQ ID NO: 6468

SEQ ID NO: 22937 - protein, 475 aa, unidentified; identical to SEQ ID NO: 5744
  REGION 1..475: note = Human gut metagenome

SEQ ID NO: 22938 - protein, 475 aa, unidentified
  REGION 1..475: note = Human gut metagenome
MVAVVTSTGKPLMPTSAYRARKLLKKGRAVIFKYRPYFTIQLVDRADGEVQEVEYKSDTGSVHVGISVCTEKKELLSEQRDLLENEPEHHNDRKKNRRTRRNRKRYRKPRFDNRKKKPQEGHEKWLPPTLLHKMEVQVRLFREFCRVVPVTSACFEMGKFDTQALKAVSKGEPVPEGEGYQKGERYGTDTLRAAVFLRDGHTCRFCGRSVKDGAILHVHHVGYWKGDRTNRPANLASACEQCHTPANHGKNGILYGKEPEFKTLKDASYMTSVRWIMLDEIKKAAPGVQVSVTYGVTTKKKRQELHLPKSHVNDAFSMASFHPKKRSDTEYWKKIPRHDRVLQKFYDAVYLDTRDGSEKKGSELSNGRISRNHKKDSENLHQYRVHKVSKGHNSIRRGASSLKPGSIVMYRGEKMTVHGTHTRYVKGKDGKTAKKVNVQFTCPASDGKKSASLEKCTPVSRVYNTGWKRYWPDKK

SEQ ID NO: 22939 - protein, 439 aa, unidentified; identical to SEQ ID NO: 3280
  REGION 1..439: note = Wastewater metagenome

SEQ ID NO: 22940 - protein, 477 aa, unidentified; identical to SEQ ID NO: 14838
  REGION 1..477: note = Human gut metagenome

SEQ ID NO: 22941 - protein, 420 aa, unidentified; identical to SEQ ID NO: 12109
  REGION 1..420: note = Human gut metagenome

SEQ ID NO: 22942 - protein, 374 aa, unidentified
  REGION 1..374: note = Human gut metagenome
MVIQLKKEIPENKICKDEIRCGIDDGGLHVGIALVQKCKTKNKVVFKGTIEQRNDVKHLMEVRRNYRRYHRYHKRYRQARFDNRKSSKRKGRIAPSILQKRQATIRVINRLNKWINITNYWLEDVSVDIRALTDGYQSYRWQYQKSNRLDENIRKAAILRDGSKCMECGRANCRLEVHHIKPRRRNGSNTLDNLITLCESCHQKTEGQEELYMDRYFSLLKSSDNKNLNYAQHVMIGKKWLRKQLSNLGVLYLTNGGDTANKRIDWNVEKSHANDAVCITDLQPDTYDMKEWAIKPMRRKSKAKTDNVLGIRHRDLVEYTFKNGETHRGYVTALYPEQKAINFQSPTKHCKKVNARKCKLLWKYSKIYWFENAS

SEQ ID NO: 22943 - protein, 418 aa, unidentified; identical to SEQ ID NO: 20125
  REGION 1..418: note = Human gut metagenome

SEQ ID NO: 22944 - protein, 443 aa, Anoxybacillus sp.; identical to SEQ ID NO: 2800

SEQ ID NO: 22945 - protein, 395 aa, unidentified
  REGION 1..395: note = Human gut metagenome
MMPTTRHGKVRRLLKDKKAIVVNLCPFTIKLMYVTSDYKQEIVLGVDAGTKHVGLSATTKSKELYSSEVILRNDIVDLLSTRRELRRTRRNRLRYRKPRFNNRIKSKRPGWVAPSVKYKVDAHIRVIENICSILPISRIVIEVAQFDTQKIKNPEILGKEYQEGDQLEFWNTREYVLARDGHKCQYCKGKSKDKILNVHHLESRKTGGDSPSNLITLCETCHKEYHKGNIDLKIKRGSSLRDAAVMGIMKWKLYEELRSRYDRVSMTFGYITKHNRIKYGIEKSHTSDAFVISKNINAKRIGCQYLKRLIRRHNRQIHKMKILKGGKKKNNQAPFEVFGFRLFDKVLYNNKICFVYGRRKSGSFNIRDFNGENSKDVSRKKFKLIRGKRHPIILK

SEQ ID NO: 22946 - protein, 423 aa, unidentified
  REGION 1..423: note = Human gut metagenome
LNMRGQPLMPCSPAKARHLLMDKKAVVKRRTPFTLQLTIATGETKQDVTLGVDAGAKHIGLSASTEKEEVFASEVELRQDITGLLAARLAFRRARRHRKTRYRAPRFLNRVHSKHMGWLAPSVENRIQAHMSRIDAICGLLPVTKIVIETASFDIQKIKNPDVEGTDYQQGDQLGFWNVREYVLFRDGHVCQHCRGRSKDKVLNVHHLESRQTGGDAPNNLITLCETCHKAYHAGKIKLKVKRGQSFRAEAFMGIMRWTMLDRVRKAHPDLPVENTYGYLTKNTRITLGLPKTHCIDAYCIAGNLNARRRGVYLYERQMRKHNRQIHKCKVLSKTLKDGTKVGYRKLNQTPYLVKNFRLFDKVRCFGQTGFIFGRRTSGHFDVRTLNRTRLSDCVNSKKLTLLEKRRTFLTELRKEDGASSPV

SEQ ID NO: 22947 - protein, 339 aa, unidentified
  REGION 1..339: note = Human gut metagenome
LLSARRALRQSRRSRNTRYRAPRFDNRIRTKRKGWLAPTVENRINVHLSRIETVLRLLPVTKITVETASFDTQLLKNPDIAGKEYQEGEQLGFWNVREYVLFRDGHVCQHCHGRSKDPVLNVHHLESRRTGGDSPGNLITLCETCHKALHRGEIKLKAKRGRSFRAETFMGIMRWGVLNRLKASHPKLEVHNTYGYRTKHARIANGIAKSHCADAFCIAGNFGAKRLGEFFFQKQTRRNNRQIHKLSILKGGIRKRNQAPFEVNGFRLFDKVACQGEEGFIFGRRSSGYFDVRKLDGTCISAGISYKKLHLLEKRRTYLTEIRKEEALPPPPEGRGLRA

SEQ ID NO: 22948 - protein, 386 aa, Alistipes sp.
QTIATGETKQPVSLGVDAGYKHVGLSASTEKAELYASEVELRQDITDLLSARRALRQSRRNRKTRYRAPRFDNRIRTKRKGWLAPSVENRINAHLSRIEAVLRLLPVTKITVETASFDMQLLKNSDIAGKEYQEGEQLGFWNVREYVLFRDGHVCQHCHGRSKDPVLNVHHLESRRTGGDSPGNLITLCETCHKALHRGEIKLKAKRGQSFRAEAFMGIMRWEVLNRLKASHPELEVHNTYGYRTKHARIANGIAKSHCADAFCIAGNLGAKRLCEFFFQKQTRRNNRQIHKLSILKGGIRKRNQVPFEVKGFRLFDKVAYKGEEGFIFGRRSSGYFDVRKLDGTHISAGISYKKLRLLEKRRTYLTEIRKEEALPPLPEGRGLRA

SEQ ID NO: 22949 - protein, 533 aa, unidentified
  REGION 1..533: note = Human gut metagenome
MSTVYVLNKDGKPLMPTTRGGHVRHLLKEQKARVVRAKPFTIQLLYETNDVVQPLYLGIDPGRTNIGVAVVKANGTAVFTAHLETRNKGVPKLMQDRKKARRARRTNGRRCRRQRRAKANGTISKKCVKQDTAQSKNPSKRAKEIGIIKRRLPGYKKDVLCIGIKNKEAKYTNRTRPEGWLTPTANQLLQTHINLVRKMQKFLPISDVVLEVNKFAFMRLDNPDIQKWQYQQGPLYQKGSLENAVSEMQEHHCLFCDKPIDHYHHVVPQSENGSNTIANIVGLCAEHHNLVHKDAAWQKKLAEEKVGLNKKYGALSVLNQIIPALTNKLSVLFPKHFFVTAGKSTHDYRAAHGVSKDHWLDAYCIACSVLPSNVCDSNINNHVPYELKQFRRHDRRTLHKENMSRVYTLNGKAVATNRHKAIKQTTDSLEEFRQNYPDDVYKLKVKEHHPAYRNLNRNYPGSVFLVGKQAHVMQGIASSKDGKTTKYNDTNATTITAGKCKFVAKNSGILFVQCKFRKALSDGTTKKLQYPVR

SEQ ID NO: 22950 - protein, 451 aa, unidentified; identical to SEQ ID NO: 7445
  REGION 1..451: note = Human gut metagenome

SEQ ID NO: 22951 - protein, 420 aa, unidentified; identical to SEQ ID NO: 5988
  REGION 1..420: note = Human gut metagenome

SEQ ID NO: 22952 - protein, 423 aa, Moorena sp.; identical to SEQ ID NO: 3576

SEQ ID NO: 22953 - protein, 509 aa, unidentified
  REGION 1..509: note = Human gut metagenome
TPIKSSAASDVYKRQVLDVDGKPLMPTCRFSKVRRMLKSDQAKAVDTLPFTIQLTYRTKTRILQPVTLGQDPGRTNIGVAAVRSDGKELGRFHCITWNKEIPKLMTDRMAVRRASRRGERLVRKRLARKLHTTAKHLEGRMLPGCDKPLPVKDIINTESRFNNRLRPEGWLTPTATQLLRTHINLFVRLAKILPVTDVAIELNKFAFMQLDNPEMKKREIDFCHGLLYGTGGLEATVKEQQNGKCLLCGKEPISHYHHIVLRSRRGSNTIANIAGLCPKCHEWVHKDTDAAKRLADIKTGLLKKYGGTSVLNQIIPKLVTKLSELFPDHLHVTNGWNTKEFREKHHLEKDHDVDAYCIACSHLKPEETLVETEPFEILQFRKHNRAIIHHQTERTYKLDGVTVAKNRKKRMEQKTDSLEDWYVDMAKEHGKTQADAMRSRLTVIKSTRYYNTPGRMMPGTVFLYEGKRYVMTGQITNGKYYRAYDQEKRNFPAVKVRILTKNTGLVFVA

SEQ ID NO: 22954 - protein, 432 aa, unidentified
  REGION 1..432: note = Human gut metagenome
MLIYVLSKDKEPLMPTKRCGKVRHLLKDGKARVVYRCPFTIQLLYETNTYTQDLTLGGDTGSGDAAFGVSTNDVDENGRKHIKYKSTVEIRNDIKSKMDRRRELRRTRRNRLRYRPARFKNRKNSKRKDRFSPTMTSKIDSHVKEIELVKKILPITNITLEVGQFDTQLMANPQLANPKVKLWGYQKGPNYGFANTKARVLNRDNYTCQYCKTKKKGTRLEVHHIVYRSHNGSDDADNLITLCHDCHTALHNGEITLKQKGKKNGTLNHATQMNSIRKQLLKRYPEAVETFGYVTKENRQLLGLPKDHYIDACVIATGGVPFVDDTDVLYCKKSVAKGDYQQTKGQRSEIKIPTGKIQGFKKYDKVLYLGKEYFIKGRMSSGYCILMDIDGKKVDFSDQPKGFKTPKLCNLKRIGARKSCLVTAKAVTLNTP

SEQ ID NO: 22955 - protein, 536 aa, unidentified; identical to SEQ ID NO: 18595
  REGION 1..536: note = Human gut metagenome

SEQ ID NO: 22956 - protein, 441 aa, Moorena sp.
MSKVFVVDANKQPLNPVHPGYARLLLKQGKAAVLRRYPFVLILHAEVEMPQLEPLRVKLDPGSKTTGLALVNDATGEVIFAAEIMHRGAEIKQALDGRRGVRRGRRQRDTRYRKARFLNRRRPKGWLPPSLESRVCNVVTWVKRLMRLCPLAAISQELVRFDLQEMETPEIAGIAYQQGTLAGYEAREYLLEKWGRKCCYCGATHLPLQIEHIQCRAKGGSDRIANLCLACEPCNLKKGTLDIQVFLAKKPDLLKRILVQAKAPLKDAAAVNSTRWALYERLQALGLPIECATGGRTKFNRVSRGLEKTHWHDAACVGASTPEILQIQGLVPLLITAQGYGCRQMCNVNEIGFPCSKPKGAKKVKGFQTGDIVRAIVTSGTKQGTYMGRVLVRATGSFDIRTKHGRVQGISHRFCTPIHRCDGYSYRQGAGHAAHPTQSTR

SEQ ID NO: 22957 - protein, 449 aa, unidentified
  REGION 1..449: note = Human gut metagenome
LAEDPGRTNIGAAVLSPLGDLLFAAVIETRNKEIKKLMADRQKSRQASRRGERKARQRLAKRYGSMVKSGMVMRKLPMYAADKFVICKFIRNTQARFCNRKRCPDWITPTVQHLVQTHLNIIRKISRYLPVTDIAFEVNRFAFMHMENPEAMGVDFQNGPLKGYGDVKEAIRTQQHGKCLMCKKPISHFHHIVPRSRGGSDTIQNLAGLCPECHTKVHTDTAFRKDFDEKKSGQLKKYGALSALNQAVPFICKKLLEEYGEEHVHFCRGLDTSLIRTAFGFEKTKKNQMHEVDAYCIGLAALEVNEVETPAFDHTFQIRQFRRQDRSIIHHQTGRSYYQGKEKVAQNRKPGFEQKTTALSQWYKEQIRIHGEKEAEKLRSQLRVEKSCRHYNDMDRFLPGAVFLYEGKRYVLSGRITNGKYLRACGQGMKNFPAAECTFIRHNAGLVFI

SEQ ID NO: 22958 - protein, 465 aa, unidentified
  REGION 1..465: note = Human gut metagenome
MSTCVCVLSKNGERLMPTIRLGKVRHLLKDGKAKIVKHHPFTIQLLYDSKTNTQPIEICEDVGYNYIGISVKSQSHEYVSAQYNTLQDEKACHDSCRKLRRTRRNRLRYRKPRFDNRKRGEGWLAPSLRHKKELNVNVVKMYCAVMPITHATVEVGSFDTMLVKAIQEGKAIPEGADYQKGPRYNLATLREAVFYRDNYTCQVCGRKVADGAILHMHHMFYWKGRHGDSLNELLTVCEKCHTPANHQKGGKLYGFGENVKFADLSGAAFMNTVRWQIVNELYAAFGKDFVTVTYGAMTKEKRIALRLEKSHNNDAYAMGEFHPNCRCTFEHYEKVRRNNRILEKFYDSRYIDIRTGEIATGKELFNGRINRNHKKDSENLHRYRGKRTYAGHRALLRKKVNLNPGDLVSLNGEVLVVHSTHTNKKGAVNVEFKTPGKSGQKSASLKKLKIVKAADSMHSAWEKIS

SEQ ID NO: 22959 - protein, 419 aa, unidentified; identical to SEQ ID NO: 3670
  REGION 1..419: note = Human gut metagenome

SEQ ID NO: 22960 - protein, 440 aa, unidentified; identical to SEQ ID NO: 14503
  REGION 1..440: note = Human gut metagenome

SEQ ID NO: 22961 - protein, 320 aa, unidentified
  REGION 1..320: note = Human gut metagenome
MVYVLANDGQPLMPTERHGKVCRMLKSGIAKVVKKCPFTIQLQYESERNVQPVALGIDAGSKHVGVSATTKAKVLYESDVELRDDIVKLLATRRQLRRRRRSRKTRYRPARFDNRRRKEGWLAPSIRQKIESHLTVVANVCKILPVSQIIVETASFDIQKIKNPDIQGIEYQQGEQMDFWNIREYVLFRDGHTCQCCKGKSKDKVLNVHHIESRKTGGNAPNNLITLCETCHKGYHNGTVTLPKNIKRGMKFKDAAFMGIMRWTFYNTLKEQYEPDIPVHYTYGYITKNTRINHNLPKGHCIDARCISGNPDAVSDGTYY

SEQ ID NO: 22962 - protein, 432 aa, unidentified
  REGION 1..432: note = Human gut metagenome
MSSARYWHEEKFSERKVSEMTDYAFILDANGKQLAPTKEQKAWFLIRRKRATLVSKYPLVIQLKKKIPDNEICKDEIRCGIDDGGLHAGIALVQKCQTRNKVVFKGTIEQRNDVKHLMDVRRGYRSYHRYHKRYRPARFNNRSSSKREERIAPSILQKRQATIRVINQLNRWINITNYWLEDVAIDIRALTDGYKPYRWQYQKSNRLDENIRKAVILRDGCRCMECGKSNCRLEVHHIKPRRLKGSSTLGNLITLCTKCHQKTEGVEELYMDRYFALLNSSDNRNLDYAQHVMIGKQWLREQLSNLGMLYLTNGGDTANKRIDWDITKSHSNDAICITDLRPDTCEIKEWVIKPMRRQSKAKTNNVLGIKHRDLVEYTFRNGETHRGYVTALYPEQNAINFQSPAKHCKKVNAGKCKVLWKYSKIYWLDNVS

SEQ ID NO: 22963 - protein, 489 aa, unidentified; identical to SEQ ID NO: 5672
  REGION 1..489: note = Human gut metagenome

SEQ ID NO: 22964 - protein, 522 aa, Moorena sp.; identical to SEQ ID NO: 11042

SEQ ID NO: 22965 - protein, 409 aa, unidentified
  REGION 1..409: note = Human gut metagenome
MVYVINKQGQALMPTERFGKVRRLLKNGLAHVVCRIPFTIQLDYDTTDYTQPISLGVDAGSKHIGISATTSEKELYAADVELRNDIVDKLSTRREQRRTRRSRLRYRKARFNNRISSKRKGWLAPSVENKIQTHLTVVEKIHKFLPITNIVVETASFDIQKIKNPSISNEEYQQGEQLDFFNVREYILFRDGHTCQHCKGKSKDKVLNVHHIESRKTGGDSPNNLITLCETCHKAYHRGEFELNVKRGKSFRDAAFMGIMRWNLYDRLKHIYPNVSMTFGYITKNTRITNNLPKEHYVDARCISGNPVAKPLGYYFYQKKVRCQNRQIHKVNFLKGGRKKLNQAPFLVKGFRLFDLVEYQKDLYYIFGRRDSGFFDIRKLDGTKVNKGSISCKHLRLIDKRKSILTERR

SEQ ID NO: 22966 - protein, 266 aa, unidentified
  REGION 1..266: note = Human gut metagenome
MVYVQDINGKPMMPTTRYGKVRRLLKDKKAVVVNLCPFTIKLTYVTSDYKQEIVLGVDAGTKHVGLSATTKSKELYSSEVILRNDIVDLLSTRRELRKTRRNRLRYRKPRFDNRVKSERPGWVSPSVKYKIDAHIRVVDNVCSILPISRIVIEVAQFDTQKIKNPEISGKEYQEGNQLGFWNVREYVLARDGHKCQNCKGKSKDKILNVHHIESRKTGGDSPSNLITLCETCHKEYHKGNIDLKIRRGKSLRDAAVMGIIKFLLYH

SEQ ID NO: 22967 - protein, 480 aa, unidentified; identical to SEQ ID NO: 2726
  REGION 1..480: note = Human gut metagenome

SEQ ID NO: 22968 - protein, 406 aa, unidentified; identical to SEQ ID NO: 2874
  REGION 1..406: note = Human gut metagenome

SEQ ID NO: 22969 - protein, 419 aa, unidentified; identical to SEQ ID NO: 3927
  REGION 1..419: note = Human gut metagenome

SEQ ID NO: 22970 - protein, 414 aa, unidentified
  REGION 1..414: note = Human gut metagenome
MPCSPAKARLLLKEKKAIVKRRTPFTIQLTIATGETKQPVSLGVDAGYKHVGLSASTEKAELYASEVELRQDITDLLSARRALRQSRRNCKTRYRAPRFDNRIRTKRKGWLAPSVENRINAHLSRIEAVLRLLPVTKITVETASFDMQLLKNPDIAGKEYQEGEQLGFWNVREYVLFRDRHVCQHCYGRSKDPVLNVHHLESRRTGGDSPGNLITLCETCHKALHRGEITLKAKRGQSFRAEAFMGIMRWEVLNRLKASHPELEVNNTYGYRTKHARIANDIAKSHCADAFCIAGNLGAERLGEFFFQKQTRRNNRQIHKLSILKGGIRKRNQAPFEVKGFRLFDKVACKGEEGFIFGRRSSGFFDVRKLDGTRISAGISYKKLHLLEKRRTYLTEIRKEEALPPLPEGRGLRA

SEQ ID NO: 22971 - protein, 455 aa, unidentified
  REGION 1..455: note = Human metagenome
YPLTALNKQKTIRKDFVKRMTKTLTTQTTQACVLDRQGKPLMPTTRLGKVYRLLKTQKAHIVSYEPFTIQLDYQPDTQVIQPMTLGVDSGAIHSGYSVANEHREYYSAEVIARNDISNRLSERHMYRQTRRSRKTRYRKPRFKNRKNKKKGWLPPSLEQKVAAQANEIDHIHRYFPIETIIVETAEFDIQKIKNPDISGIEYQQGTLQGYNIRNYLLEKHGRKCFYCGKAVSDFEVEHMLPKSKGGSNRIDNLTLSCHDCNEKKGTLTAEEFIKQTLPVKKAASKLKQLPNEKRLFKYMAHMNATRWALYDAIKERYPNVKMTYGYITKYNRIQAGLPKTHHIDAKCITGFSTVPSMSQTVVKVKMRRHNRQLHRATFSKGHVRKAASLPTTVFGFQLYDLVLFNNHRYFIKGRRSSGAFALVSVEGLKNEERMYKKLTVLAHTNAYLTNRYVNA

SEQ ID NO: 22972 - protein, 426 aa, unidentified; identical to SEQ ID NO: 3604
  REGION 1..426: note = Cyanobacteria bacterium UBA11159

SEQ ID NO: 22973 - protein, 449 aa, Allochromatium sp.
MAVFVLDRQKTPLMPCTEKRARLLLERGRAVVVRLAPFTIRLKDRIGGAVQPLRLKLDPGSRVTGLALVRESETCDADTGAVERLEHGLWFGELVHRGQAIREALTSRRHYRRARRSRKTRYRAPRFLNRTRRDGWLPPSLQHRLDTTVNWVQRLHRLAPITALSQELVRFDTQALQNPEISGVEYQQGELAGYEVREYLLEKWRRTCAYCGATHVPLEIEHIVPRSRGGSDRVSNLTLACRACNQRKGNRSIEDFLQRQTVLLHQIQAQAKAPLQDAAAVNATRWALFAALTATGLPVETASGGRTKYNRTRLDIPKTHALDALCVGAVDQVRDWNRPVLAIRATGRGAYSRTRTSNNGFPRGYLMREKRIHGFQTGDWVRAEVPTGKKAGVHVGRVAVRQTGSFNIQTQAGTVQGISYRHCRLLQRADGYGYTFQPKPKMEDARRAA

SEQ ID NO: 22974 - protein, 418 aa, unidentified; identical to SEQ ID NO: 15678
  REGION 1..418: note = Human gut metagenome

SEQ ID NO: 22975 - protein, 512 aa, unidentified; identical to SEQ ID NO: 7502
  REGION 1..512: note = Human gut metagenome

SEQ ID NO: 22976 - protein, 500 aa, Moorena sp.
LLVYVLNRHGDPLMPCKPCKAKLLLKQGKAKVIKRTPFTIRLLFGSSGYRQNVNLGIDAGSKHIGVSATTEDRVLYEADAELRNDIVELISTRREARHVRRNRKTRYRAPRFDNRRRPEGWLAPSVKQKVDCHIKLIADVHKILPISKMIIETASFDTQLLKATLEGKPLPQGTDYQSGEQLGFWNTREYVLFRDNHECQCCHGRSKDPVLNVHHIESRKTGGDSPDNLITLCETCHTGYHKGTVKLPAGIKRGMKFNDAAFMGIMRWSVYNRLKDLYPYVSLTYGYKTKNTRIRAGLPKEHCIDARCISGNPSALSDGIVYFQRKMRCHNRQIHKFKVNRGGLRKLNQAPYLVKGFRLWDRVLYNSEKCFIQGRRSSGFFQLKKLDGTLVSASASCKKLRLVETGKHFITERRRAIPPRPAEDGASLPINDEKREIMAIDINQIKGFQLTHTIKGRSTTTTFAKKDFSLFKEWVNICKENGYEYDVSLIKEDGSIEPIH

SEQ ID NO: 22977 - protein, 473 aa, unidentified
  REGION 1..473: note = Human gut metagenome
MTMVYVQNKDGKPLMPTTRYCYVRLLLKEKKARVVSRTPFTIRLNYDTPDVTQDLILGVDPGRTNIGVAVVKEDGQCVFSAHLETRNKDVPLLMKKRAAFRRNHRTLDRRRKRQRRAKAAGTTIAEGSVERLLPGYEKPIVCNHIRNKEARFNNRSRPAGWLTPTANHLLQTHINLIAKVAKFLPITKVVIELNRFAFMAMDNPNIRRWEYQQGPLYGLGSVEDAVYAQQDGHCLFCEKPIDHYHHVVPRHKGGSETLANRCGLCARHHDLVHTDKSWAEKLVTRKGGMNKKYHALSVLNQIIPHLIEHLGSETPYEAYATDGKSTKGFRIAKNVPKEHYTDAYCIACSILDTNIEVSAPTSPFELKQFRRHDRQACIRQMVDRKYLLDGKVVATNRHKAIEQKSDSLQEFREAYGSAAVSQLTVKPHPPQYKDMTRIMPGAVMDFNGTIGVMQSSIVGRVYKSTKGYKAAPR

SEQ ID NO: 22978 - protein, 475 aa, Streptomyces sp.; identical to SEQ ID NO: 22107

SEQ ID NO: 22979 - protein, 442 aa, unidentified
  REGION 1..442: note = Human gut metagenome
MSTSVFVLDKKHRPLMPCRPARARRLLRVGRARVVKRFPFVIRLVDRTVEQSEVQPVLIKLDPGSRETGAAVVRDDEKKRHHALAFFVIKHRGGAIRDALKARSAFRRRRRSQNFRCRSPRFLNRVKPKGWLPPSLRHRVETTLSFVRRMCRYLPVSGIATELVKFDSQKLQTPEVSGIEYQQGTLFEYEVREYLLEKFGRKCVYCGAEGVPLNIDHVVPRAKGGSNRVSNLVLACMSCNQKKGARSLEDFLKGKPKVLARVRRELKTPLRDAAAVNATRWVLFNELKATGLPVETGSGALTKLNRHAFGVEKEHWLDALCVGRLNGVVTRKGLNVLEIRCMGRGSRQRTRLTKYGFPRGYLMRQKCVHGFATGDMVEANVPKGKKAGLWRGRVAVRVSGSFNIQTPKGVIQGVGWKHCRLISHNDGYGYAWLGHAPHSSPA

SEQ ID NO: 22980 - protein, 456 aa, unidentified
  REGION 1..456: note = Human gut metagenome
MNTCVCVLSNNGERLMPTFRLSKVRRLLKDGKAKIVKHHPFTIQLLYDSKTNTQPIEICEDVGYNYIGISAKSKSREYVSAQYDTLQDEKEHHDDCRKMRRSRRNRLRYRKPRFDNRKRDEGWLAPSLEHKKQLNISLIERYVSVIPITHATVEVGSFDTMLLQSIQKGEAKPEGADYQKGPRYNLATLREAVFYRDNYTCQVCKRKITDGAILHMHHMFYWKGRHGYQLDELVTACEKCHTPANHQKGGKLFGFGKDKKFANLTGAAFMNAIRWQIVNALYATFGKEFVTITYGAMTKEKRIALQLEKSHNNDAYAMGKLHPSRRCTFVHYEKIKRNNRVLEKFYDATYIDARTGNKAKGKELFNGRISRDHKKDSENLHKYRNKKVSRGRRSIRRQRYAIQPYDTVRLEGKTYITSGCHNKGTRLLIPVNGKSKSVAISKVQVVCHAGAWIQII

SEQ ID NO: 22981 - protein, 406 aa, unidentified; identical to SEQ ID NO: 20530
  REGION 1..406: note = Human gut metagenome

SEQ ID NO: 22982 - protein, 472 aa, unidentified; identical to SEQ ID NO: 8020
  REGION 1..472: note = Human gut metagenome

SEQ ID NO: 22983 - protein, 323 aa, unidentified
  REGION 1..323: note = Human gut metagenome
TRYRAPRFDNRIRTKRKGWLAPSVENRINAHLSRIETVIRLLPVTKITVETTSFDMQLLKNSDIAGKEYQESEQLGFWNVREYVLFRDGHVCQHCHGRSKDPVLNVHHLESRRTGGDSPGNLITLCETCHKALHRGEITLKAKRGQSFRAETFMGIMRWEVLDRLKASHSKLEVQNTYGYRTKHARISNGIAKSHCADAFCIAGNLGAERLGEFFFQKQTRRNNRQIHKLSILKGGIRKRNQAPFEVNGFRLFDKVACKGEEGFIFGRRSSGYFDVRKLNGTHISAGISCKKLRLLEKRQTYLTEIRKEKALPPLPEGRGLRA

SEQ ID NO: 22984 - protein, 441 aa, unidentified
  REGION 1..441: note = Human oral metagenome
MTKMATQKVTQVCVLDQNGQPLMPTQRLGKVYRLLKTKKAHIVAYEPFTIKLNYEPKTHIIQPMTLGVDSGAIHSGYSLANEHREYYSAEVIARDNISKNISDKRMYRRNRRSRKTRYRKPRFNNRKNKGKGWIPPSLEQKVTVQVNEIKHLHQYFPIKDIIIEVAEFDIQKIENPEISGKEYQQGTLQGYNIRNYLLEKYNHKCFYCDKEVSTFEVEHMIPRARRGSNRIDNLTLACHDCNQKKGTLTAEEFIKQTLTPQKAAQKIRQIPKMKQLLKYMAHMNATRWVLYNTIKETYESVSLTYGYITKHNRINACLPKAHHIDAKCITGFSTVPSFDITVVKTKMRRHNRQLHRATFSKGHKRRAATLSKYVHGFQLYDIVLFNNHRYYIKSRRSFGSFKLASLEGLKDEERSYKKLTFLTHTNAYLTNHYVNDKSING

SEQ ID NO: 22985 - protein, 476 aa, unidentified; identical to SEQ ID NO: 13038
  REGION 1..476: note = Human gut metagenome

SEQ ID NO: 22986 - protein, 470 aa, unidentified; identical to SEQ ID NO: 2825
  REGION 1..470: note = Human gut metagenome

SEQ ID NO: 22987 - protein, 427 aa, Akkermansia sp.; identical to SEQ ID NO: 22170

SEQ ID NO: 22988 - protein, 426 aa, unidentified; identical to SEQ ID NO: 3614
  REGION 1..426: note = Human gut metagenome

SEQ ID NO: 22989 - protein, 420 aa, Moorena sp.
MIMVYVLNKNGIPLMPTKRHGKVRRMLKNGQAKVVKRCPFTIQLLYDTTNYTQQINLGIDAGSKHIGICAATEKEELYSADIELRKDVVELLSTRRENRRTRRNRKTRYRKARFNNRKKGKGWVAPSIKQKIQCHLQIVKNIHQILPITKIIVETASFDIQKIKSPKIQGKEYQQGEQLDFWNVREYVLFRDNHVCQCCKGESRDNILNVHHIESRKTGGDAPNNLITLCKTCHSGYHKKTIALPETIHRGMSFKDAAFMGIMRWSFYEELKKEYTYVSMTYGYITKNTRINHHLPKSHYIDARCIAGNPDAVPLGYYFYQKKIRCHNRQIHKVNFLKGGKKKRSQASYTIKGFRLFDKVKYKKEIGFIFGRRSSGYFDLRKLNGEVIHRSASYKKIRLLETRKTFLIERRMQDARIATT

SEQ ID NO: 22990 - protein, 531 aa, Moorena sp.; identical to SEQ ID NO: 2367

SEQ ID NO: 22991 - protein, 469 aa, unidentified; identical to SEQ ID NO: 3488
  REGION 1..469: note = Human gut metagenome

SEQ ID NO: 22992 - protein, 413 aa, unidentified
  REGION 1..413: note = Mouse gut metagenome
MTNYAFVLDANGKQLSPTKEQKAWFLIRKKRAILISKYPMVIQLNREILDDKVCKDEIRCGIDDGGLHVGVALVQKCKTKNKTIFKGTMEQRNDVKYLMEVRKGHRCHHRYYKRYRQARYNNRISSKRKGRVAPSILQKKQAIIRVINQLNKWINITNYWLEDVAIDIRALTDGYNPYRWQYQKSNRLDENIRKAVILRDGCKCKECGKSKCRLEVHHIKPRRLNGSNTLDNLITLCEKCHQNTEGREELFMKKYFSLLNSSDNKNLNYASHVMIGKNWLREQLSNFGILYLTNGGDTGNKRIDWNIGKSHCNDAVCITNLNPDTCDVKEWIMKPMRRQSKAKTDNVLGIKHKDLVEYTYKNGETHRGYVTALYPKQEALNFQSPRKHCKKVNAKKCRLLWKYQKIYWLESET

SEQ ID NO: 22993 - protein, 428 aa, unidentified
  REGION 1..428: note = Human gut metagenome
KVYVINKHGRPLMPCSPAKARHLLDEGKAKVKKRTPFTIQLIYGSSGYTQEVILGVDAGSKTIGLSASAETEELLSAEVKPRNDVVDLLSTRREFRRARRNRKTRYRKPRFDNRVRSKHKGWLAPSVEVKIQEHITSIKRVCRILPVSKVVIETAEFDLQLLKAIADGKPVPQGEDYQKGEMYGHYNVRQYVLWRDDYTCQCCGAHATKKKEVRLHVHHLESRKVGGDAPDNQVTLCESCHEKLHKGLIAEKDFKKRKRRSTRDVTFMGIMRKTLMQRLCSELPIHVVETRGYITKATREKLLVLSKSHINDALAIAQGKHGFNVGYLPGILQIDMIYTIRPVRHHNRQLHKATILKGGIRKSNQTGKYVFGYRLFDKVQFNGQDCFIWGRRTTGIFTIKTINGKMIKDGISFKKLKPVEKSTSYLIA

SEQ ID NO: 22994 - protein, 416 aa, unidentified; identical to SEQ ID NO: 10554
  REGION 1..416: note = Human gut metagenome

SEQ ID NO: 22995 - protein, 443 aa, unidentified
  REGION 1..443: note = Human gut metagenome
LTKDENRPSGRTTGLRAEQAEPAGIRKGDTLKVFVLNMRGKPLMPCSPAKARHMLKAGKAVVVRRTPFTIKLTIATGETKQDVTLGVDAGARHVGISATTEKEEVFASEVALRQDITGLLADRLAFRRARRNRKTRYRAPRFNNRVRSKHKGWLAPSVENRIQAHISRIEAVCRLLPVTKIVIETASFDIQKIRNPEVEGTGYQQGDQLGFWNVREYVLFRDGHICQHCRGRSKDPILNVHHLESRKTGGDAPNNLITLCETCHKAYHAGKIKLKVKRGQSFRAEAFMGIMRWTLLDRVRKTHPKLPVENTYGYLTKHKRIALGLPKTHCADAFCIAGNLKALRRGDFLFQQQTRKHNRQIHRCSILKGGVRKLNQAPFLVKGFRLFDKVRIGGQIGFVFGRRVRGTFNIRRLDKTVIGTDINCKKLSLLETRKTFLTELRKE

SEQ ID NO: 22996 - protein, 413 aa, unidentified; identical to SEQ ID NO: 3620
  REGION 1..413: note = Fermentation metagenome

SEQ ID NO: 22997 - protein, 455 aa, unidentified
  REGION 1..455: note = Human gut metagenome
MVFVLDRHHKPLMPCHPARARRLLGKGRARIHKLYPFTIRLVDRELKDSTVQPVVLKLDPGSKETGMALVREDETKTHHALYFVNLKHRGSEIKPSLLQRSSFRRSRRSRNLHYRAPRFLNRTRPQGWLAPSLQHRVDTTLSWVERLRKLAPVATLEMELVKFDTQKMQNPEIDGVAYQQGELAGFEVREYLLEKFGRKCIYCGAEGVPLNIDHIVPKSAGGSNRVSNLVLACVDCNQKKNNLPFEVFLKGDKAKINRIRSQLKTPLKDAASVNTTRWQLFEALKLTGLSLTTATGARTKYNRHQFGVPKEHWLDALCVGKVAAIRGWHPLDVLVVKCTGRGAYKRTRLTKDGFPRGYLTRTKRFFGFGTGDMVVATVFAGKKKGSYKGRVAVRKSGSFAIQTASRKVDGISYRYCRLLSRADGYGYSWHSSKSLINSTKETALLPRINTQVSAP

SEQ ID NO: 22998 - protein, 426 aa, unidentified; identical to SEQ ID NO: 9697
  REGION 1..426: note = Human gut metagenome

SEQ ID NO: 22999 - protein, 453 aa, unidentified; identical to SEQ ID NO: 10368
  REGION 1..453: note = Human gut metagenome

SEQ ID NO: 23000 - protein, 431 aa, unidentified; identical to SEQ ID NO: 4463
  REGION 1..431: note = Human gut metagenome

SEQ ID NO: 23001 - protein, 470 aa, unidentified; identical to SEQ ID NO: 2949
  REGION 1..470: note = Human gut metagenome

SEQ ID NO: 23002 - protein, 428 aa, Moorena sp.
MQNYVFVIDTDKQPLNPIHPKKARRLLEKGKAAVFRMYPFTIILKTAIRQSRRCANANPTISPCQIKIDPGSKVTGFALVQNNQVIWGMELEHRGGLIKKKLESRRAVRRGRRNRHTRYRKPRFLNRKRPEGWLPPSLEHRILTIQTWVKRLIKFCPANEIWVERVKFDMQKMKNPEINGTEYQQGELAGYEVREYLLEKWGRECTYCGKQNVPLQIEHIHPKSKGGSDRVSNLCLACEKCNQRKGNKPVEDFLKKKPNLLQKIKTKAKQPLKDAAVVNATRNKLVKVLREVKSVTTGTGAQTKYNRTKLGLPKQHWIDAACVGGIETLVLKTSQPLLVTCFGQGGRQKAALNKYGYPIRHNPLKPIKGWCSGDIAKNILTGEFGRVNPRSKSNSFNYTVSGKKAISLHVKNLCRVHRKDGYTYGFCQ

SEQ ID NO: 23003 - protein, 462 aa, unidentified
  REGION 1..462: note = Human gut metagenome
MSVLVIGRNGRALMPTNPRKARLLLKKKTASVVCRHPFTIQLLYKTGCATQEGCIGIDTGSQHIGVGITCGDRVILKDEHALRSSMEKRSLLATRAVMRRGRRYRKVRYRKPKWRHYTKRMYFEKANRRGQHWRKVKTTTQSPRLKGWLPPSLQSKCDHHFRIIDRYLKYLPDPITRNLVIEAGRFDMARMNDPTIHGEMYQRGPMYDAENLRAYIFARDNYQCACCKAKAGTTRKADGTTVKLVAHHILFRSRGATDNPKYIISVCDHCHTTKAHQPGGILYSWMENNKKVARGLRDATFMNILRKRLFARYPQAAFTYGNITAADRKQLRLPKSHANDAVAISLFGKEASTVKNICQTMHYKQIRKSKRSLHEAIPRKGRKNPNTKAVRNKKNTTQVNGFKLWDSVLADGKKLFICSFTGTSAYLIDKNGCYISQPGKTYKQWPLSKLKRLHPNGNWLMA

SEQ ID NO: 23004 - protein, 470 aa, unidentified; identical to SEQ ID NO: 2825
  REGION 1..470: note = Human gut metagenome

SEQ ID NO: 23005 - protein, 478 aa, Acidiferrobacter sp.; identical to SEQ ID NO: 4550

SEQ ID NO: 23006 - protein, 473 aa, unidentified; identical to SEQ ID NO: 3562
  REGION 1..473: note = uncultured beta proteobacterium

SEQ ID NO: 23007 - protein, 448 aa, unidentified
  REGION 1..448: note = Human gut metagenome
MSTGLRAVQAEPAGIRKGDALKVFVLNMRGRPLMPCSPARARHLLKAGKAVVRRRTPFTIQLRIATGETKQSVTLGVDAGAKHVGLSAATEKEEVFASEVELRQDITGLLAARLSLRRDRRHRKTRYRAPRFLNRVRSKHKGWLAPSVENRIQAHMSRIDAVCRLLPVTKIVIETASFDVQKIRNLEVEGTGYQQGDQLGFWNVREYVLFRDGHVCQHCHGYSKDKILNVHHLESRQTGGDAPNNLITLCETCHKACHAGKIKLKVKRAQSFRAEAFMGIMRWTLLDRMRKAHSGLPVENTYGYLTKNTRITLGLPKTHCVDAYCIAGNLKAVRRGVCLHQRQVRKHNRQIHKCTVLSKTLKDGTKIGYRKLNQTPHLVKSFRLFDKVRCLGQTGFIFGRRSSGYFDVRRLDGVKLSSGISYRKLTLLEKRSTYLTELRKEDGASSPV

SEQ ID NO: 23008 - protein, 513 aa, unidentified; identical to SEQ ID NO: 3179
  REGION 1..513: note = Human gut metagenome

SEQ ID NO: 23009 - protein, 462 aa, unidentified; identical to SEQ ID NO: 9356
  REGION 1..462: note = Human gut metagenome

SEQ ID NO: 23010 - protein, 512 aa, unidentified; identical to SEQ ID NO: 20070
  REGION 1..512: note = Human gut metagenome

SEQ ID NO: 23011 - protein, 302 aa, unidentified
  REGION 1..302: note = Human gut metagenome
PSVENRINAHLSRIEAVLRLLPITKITVETASFDMQRLKNPDISGKEYQEGEQLGFWNVREYVLFRDGHVCRHCHGRSKDPVLNVHHLESRRTGSDSPDNLITLCETCHKALHRGEITLKAKRGQSFRAQAFMGIMRREVLNRLKASYPELKVHETYGYLTKHARIANGIVKSHGADAFCIAGNLGAERLGEFFFQKQTRRNNRQIHKLSILKGGIRKRNQAPFEAKGFRLFDKVACQGEEGFIFGRRSSGSFDVRKLDGTRISAGISCKKLRLLEKRRTYLTEIRKEEALPPLPEGRGLRA

SEQ ID NO: 23012 - protein, 423 aa, unidentified
  REGION 1..423: note = Human gut metagenome
KIVKHHPFTIQLLYDSKTNTQPIEICEDVGYNYIGISVKSESREYVSAQYDTLQDEKEHHDDCRKYRRTRRNRLRYRKPRFDNRKCSEGWLAPSLEHKKQLNIRLIERYVSVIPITHATVEVGSFDTMLLQAIQKGKSKPEGVDYQKGPRYNLATLREAVFYRDNYTCQVCGRKIADGAILHMHHMFYWKGRHGYQLDELVTACEKCHTPANHQKGGKLFGFGEDKEFANLSGAAFMNAVRWQIVDALYATYGKEFVTITYGAMTKEKRIALQLEKTHSNDAYAMGNCHPAHRCEFGHYQKRCRNNRVLEKFYDATYIDTRTGNKAKGKELFNGRISRNHKKDSEDLHKYRSKKMSKGCRSIRRQRYAIQPYDTVRLEGKTYITSGCHNKGTRLLIPANGKSKSVAISKVQVVCHAGAWIQII

SEQ ID NO: 23013 - protein, 423 aa, Moorena sp.
MRVFVLNKNRQPLDPCKPARARIILSKGKAKVYRRYPFTIILTEEIEEPITHGSQLKIDPGSKTSGLAIIQNNRVVWGCELTHRGFQIRDALTSRRQLRRARRHRKTRYRQPRFLNRTRPKGWLAPSLMSRVHNILTWVKKLTRLCPITGLYQELVRFDTQKLQNPEISGIEYQQGTLYGYELREYLLEKWNRKCAYCGAKGTHLEIEHIKPLSKGGSNRVSNLAIACHSCNQAKSNQEIEQFLSGKPEILKRILSQAKRPLSDAAAVNTTRWKLYHELKLFGLPVEVGSGGLTKFNRCRQNLPKTHWLDAANVGKVDTLIVEDYKPLLVAAKGHGTRQICRINKYGFPIRYCSRVKIHKGFQTGDIVRAVVTKGKKIGTYVGRVATRKSGYFNISTKSGMVQGISHKYCQFIHRKDGYAYTD

SEQ ID NO: 23014 - protein, 411 aa, unidentified
  REGION 1..411: note = Human gut metagenome
MVYVQDIDGKPMMPTTRHGKVRRLLKDNKAVVINTCPFTIKLTYKTSDYKQEIVLGVDSGTKHVGLSATTKSKELYASEVILRSDVVDLLSTRRGLRRTRRSRLRYRKQRFNNRVKSKKDGWIAPSVRHKIDSHIRIISFVYSILPVSKLIVEVAQFDTQKIKNPEISGKEYQEGEQLGFWNVREYVLARDGHKCQHCKGKSKDPILNIHHIESRKIGGDSPSNLITLCETCHKEFHKGNIKLKVSRGKSLRDAAVMGIMKWKLYEELKSRYDNVSMTFGYITKYNRINHGIEKSHVSDAFVISRNFNSCRLGYYYKRKLVRRHNRQIHKMKILKGGIRKRNQAPFKVFGFRLFDKVMFQGEEHFIYARRLSGQFNIRDINGENKKDVSCKKLKYVSHGLVSVKTNLFLSQ

SEQ ID NO: 23015 - protein, 355 aa, unidentified
  REGION 1..355: note = Human gut metagenome
MQAQGTLAFPPRRKRRRSSRPKSRFDRTSRDFWPIVWHSDVQGAIERRATALRASTIAFDQSTRDGLRRPLKTAFRRTCRVEAVCRLLPVTKIVIETASFDIQKIRNPEVEGTGYQQGDQLGFWNVREYVLFRDGHICQHCRGRSKDPILNVHHLESRKTGGDAPNNLITLCETCHKAYHAGKIKLKVKRGQSFRAEAFMGIMRWTLLDRVRKTHPKLPVENTYGYLTKHKRIALGLPKTHCADAFCIAGNLKALRRGDFLFQQQTRKHNRQIHKCSILKGGVRKLNQAPFLVKGFRLFDKVRIGGQIGFVFGRRVRGTFNIRRLDKTVIGTDINCKKLSLLETRKTFLTELRKE

SEQ ID NO: 23016 - protein, 393 aa, unidentified
  REGION 1..393: note = Human gut metagenome
TGYIHIGISVKSEKHEYLAEQIDTLTDERSRHDACRMYRRQRRSRKRYRQPRFNNRKRNDGWIAPSLEHKKNIHIQAISHICKVMPVTDITLEMGNFDTQVLKAREEGKPLPQGADYQHGERYGIATLREAVFARDGYTCQCCGRTIKNDAILHVHHIVYRSQGGTNRMSNLITVCDKCHTPANHKKGGKLYNWKPKIASFKGAAYMTAIRWKLYNEVKTLFPDIDIHITYGAETKERRRAFDINKSHVNDAFVMGQFHPKHRSKPICYKKKRRNNRCLEKFYDAKYIDSRDGKKRSGQELFNGRISRNHKKDSENLHQYRLQKVTPGRRAIRKQHYPIQPHDIIVYNGNKIEVSGCQHKGTRVVFSKTKKSVQISKIKLFKYAGGYSKSVFN

SEQ ID NO: 23017 - protein, 415 aa, unidentified; identical to SEQ ID NO: 7357
  REGION 1..415: note = Human gut metagenome

SEQ ID NO: 23018 - protein, 470 aa, unidentified
  REGION 1..470: note = Human gut metagenome
VLRPRYQYPTRWYPSREQGSGNGCLSGEENTDLKQEVSGTLSKGDHSHPGEQDFCVPAITIQGGPAMSVFVVGLNGCRLMPTSERKARLLLKHGKASVYRKVPFTIKLNYKTGSTTQSGYLGIDTGSQHIGVSVVREDGAVLHKEEIGLRDSMSKRKLMQSRASSRRGRRHRKTRYRHPKWRPKAKRVYCEIPDRKRRHWKKKEITFTSKRPKGWLPPSLQSKTDHHIRWIKKLQDLLPEGYRLSIELGRFDPARLKDPEIHGELYQKGPQYDYENVRAYVLNRDRYTCQVCGKKGGKLHVHHILYRSYGATDDPQYMATVCSDCHNTENHHQGGILYQWMQKQKKFTRGLRDATFMNILRKRLIEAFPGATFTYGNITKADRERLRLPKSHGNDATAIAIVKTGIMTVKDKEPVIYIQQVRRKKRSLHEETPRKGRKEPNRKASRYDKNTKAVTVTKRKNKKKISITGC

SEQ ID NO: 23019 - protein, 422 aa, unidentified
  REGION 1..422: note = Human gut metagenome
LNKRGKPLMPCSPAKARLLLKEKKAIVKRRTPFTIQLTIATGETKQPVGLGVDAGYKHVGLSASTDKAELYASEVELRKDITDLLSARRALRQSRRNRKTRYRAPRFDNRIRTKRKGWLAPSVENRINAHLSRIEAVLRLLPVTKITVETASFDMLLLKNPDIAGKEYQEGEQLGFWNVREYVLFRDGHVCQHCYGRSKDPVLNVHHLESRRTGGDSPGNLITLCETCHEALHRGEIALKTKRGHSFRAEAFMGMMRWEVLNRLKASHSELEVNNTYGYRTKHARIVNGIDKSHCADAFCIAGNLGAERLCEFFFQKQTRRNNRQIHKLSILKGGIRKRNQAPFEIKGFRLFDKVACQGEEGFIFGRRSSGYFDVRKLDGTRISAGISCKKLRLLEKRRTYLTEIRKEEALPPLPEGRGLRA

SEQ ID NO: 23020 - protein, 451 aa, unidentified; identical to SEQ ID NO: 2436
  REGION 1..451: note = Human gut metagenome

SEQ ID NO: 23021 - protein, 481 aa, unidentified; identical to SEQ ID NO: 5118
  REGION 1..481: note = Human gut metagenome

SEQ ID NO: 23022 - protein, 441 aa, unidentified
  REGION 1..441: note = Human gut metagenome
MPTFRLGKVRRLLKDGKAKIVKYHPFTIQLLYDSKTNTQPIEICEDVGYNYIGISVKSESHEYVSAQYDTLQDEKEHHDDCRKYRRTRRNRLRYRKPRFDNRKRSEGWLAPSLEHKKQLNIRLVERYVSVIPITHATVEVGSFDTMLLQAIQKGESKPEGADYQKGPRYNLATLREAVFYRDNYTCQVCGRKVADGAILHMHHMFYWKGRHGNSLDELLTVCEKCHTPANHQKSGKLYGFGEDVKFANLSGAAFMNTVRWQIVNELYAAFGKPFVTFTYGAMTKEKRIALHLEKSHNNDAYAMGDYHPAHRCEFGHYQKRCRNNRVLEKFYDATYIDTRTGNKAKGKELFNGRISRNHKKDSEDLHKYRSKKVSKGRRSIRRQRYAIQPYDTVRLESKTYITSGCHNKGTRLLIPANGKSKSVAISKVQVVCHAGAWIQII

SEQ ID NO: 23023 - protein, 512 aa, unidentified; identical to SEQ ID NO: 11552
  REGION 1..512: note = Human gut metagenome

SEQ ID NO: 23024 - protein, 431 aa, unidentified; identical to SEQ ID NO: 11953
  REGION 1..431: note = Human gut metagenome

SEQ ID NO: 23025 - protein, 457 aa, unidentified
  REGION 1..457: note = Human gut metagenome
MDAVAVISASGKPLMPTNPVRARKLIKKGKAVIYKYRPLFTIRLTERTDGDIQTIEYCCDTGYQHIGLSIKSRKHEYVNEQRDLLPNETERHNDSRKYRKARRRRKLRHRACRRDNRHDNQICKDGYAPSIRNKRDQHISLYRSYTEILPVERAVFEMGQFDTQVLKAIEKGEPLPQGKDYQHGERYGYATLREAVFARDDYTCICCGKNAFKDKKILCVHHLGFRIGDRTNRLANLATVCTKCHTPKNHQPKGKLYNLKPELKDFKGATFMTMVRWDMLDKLKVVSKDIQVDVTYGAATKEARRDLKIKKSHANDAYCMGSFHPSHRTDLKRYEKCRRNNRVLSKFYDATYIDIRDGKKKKANALGCNRTKRRESRRSEKNERIYRGEKVSKGRIVLRTKRAVIRPGDIVYVGKKKYIVASSKNLGKQLKLADGSLLTTSKVTKIIHCGGWKTVTL

SEQ ID NO: 23026 - protein, 526 aa, unidentified
  REGION 1..526: note = Human gut metagenome
LLRQGRLIVKEVAYMSTVYVLNKNGKPLMPTTRCGHVRRLLKEQKARAVASKPFTIQLLYETDDVVQPLYLGIDPGRTNIGVAVVKTDGTAVFTAHLETRNKEIPKLMKKRKDSRRARRTNGRRCRRQRRAKANGTLSKKCVKQTTAQNGSVSKRAKKIGVIKRHLPGCEKEALCIGIKNKEAKFNNRTRPEGWLTPTANQLLQTHINLVKKIQKFLPISDVVLEVNKFAFMRLDNPNIQKWQYQQGPLYQKASLEEAVSEMQEHHCLFCKNTIDHYHHVVPQHKNGSNTIDNIVGLCTKHHDLVHKETAWQEKLAKKKTGLNKKYGALSVLNQIILALTKGLSFLFPKHFFVTTGKNTYDYRTAHSVSKDHWLDAYCIACSVLPNDVCDSSINSHVPYELKQFRRHDRRALHKENMSRVYTLNGKKVATNRHKAIEQTTDSLEEFRQRQPNDVYKLKVKEHHPEYRNPKRNFPGCVFLVGKHTHVMQGTSGSHNGKADGYYDTNGNSYSSGKCKFVVKNKGIVFA

SEQ ID NO: 23027 - protein, 422 aa, unidentified; identical to SEQ ID NO: 9550
  REGION 1..422: note = Human gut metagenome

SEQ ID NO: 23028 - protein, 535 aa, unidentified
  REGION 1..535: note = Human gut metagenome
MYRLTTEAGIPLIPERLHDTKKRKEASRMSEYIYVLGVDGDPQMPTKRKRHVEQLLQTGRARVFRQIPFTIQLTYENKPVLQPITIAEDPGRSNIGMAVVSLSGELLSAAVVQTRNKEIVKLMDKRKQHRRASRNGERKARQRLAKKCHTMIKAGFLMRKLPMYGKDKRVKCLVIKNTESRFCNRKREDGWLTPSAEHLVQTHINLIHKMQKFLPITDVAIEINRFAFLSLEDPSISGVDFQKGPLKGYDDLNAAVEDLQDGHCLMCNSPIEHRHHIVPRSMQGSNTIGNIAGLCCKCHEKVHKDSAFEDSLKKKKAGLNKRYAAVSVLNQAIPFICKRLEQEFGKEHVHYCSGRDTSMVRRSLGYHKTKEEQLHEVDAWCIAVLSLQHVPEKAPEFDHVHEILQFRRQDRSRIKAQTSRAYYHEGKKIAKNRKKAEGQKDDSLQGWRKRQVERYGEEQTRKMISQLKVKKSIRRYNRLDRLMPGAVFYYQGVRYVMRGQHCEGTYLQAVGMRDKDFPAKKCKIVVHNQGLVFVS

SEQ ID NO: 23029 - protein, 448 aa, unidentified
  REGION 1..448: note = Human gut metagenome
MVAVLSKTGIRLMPTSSYRARKLLAKKKAVICGYRPFTIRLTERETGDVQPVELAVDTGYFHIGNSLKTAKHELAAVEIRTLMDEKQRYDDRRRYRRMRRSRLRYRAPRFDNRRRPEGWLAPSIQGRMEQNLAFLRRVLSVVPVTRIVMEMGQFDTQVLKAVEEGRPLPEGTDYQQGERYGIATLREAVFARDNYTCQCCKKTIHDGVILHAHHIVYRSQGGTNRMGNLITVCEKCHTPKNHKPGGKLYKWKPTVKSFKGATFMTAVRWIMYRSVKESFPDVDVRITYGAKTKLQRRALDITKSHVNDAYVMGDFHPKHRARPVILQKRRRNNRILEKFYDAKYIDTRDGSKKTGQQLFNGRTNRNHNTDTENLRLYRGKKLSKGKRAIRTTRYRIQPHDILVYQGQEMEASGCHNKGTRVMTTAKKSLPIGKVRVRRYSGGYYAVAE

SEQ ID NO: 23030 - protein, 416 aa, Moorena sp.
MEDFMSNFVFVLDSHKQPLNPIRPGMARKLLTTGKAAVFKRYPFTIILKVEITAPQEPITLKLDPGSKTTGIALVQGKNVIFGAELTHRGQSIKASLESRRSLRRGRRSRHTRYRKARFLNRTRSKGWLAPSLQHRVETTLTWVTRLMKVAPISFIVQELVRFDLQQLENPEISGLEYQQGILCGYEIREYLLNKWDRKCAYCGVADTPLQIEHIHPKAKGGSDRISNLCLACENCNTRKGTQDIEQFLSKKPDVLKKILSQAKRPLKDATVVNSTRWALFNRLRMTGLPVSTGSGGLTKFNRTRLQLPKSHWLDAACVGKVEELKVLTFQPLLIKATGHGTRQMCGTNKFGFPIRHKSRKQIHFGFQTGDIINATVTAGKKVGSYVGRILCRASGSFDIATMKGWLFLWSLIQGD

SEQ ID NO: 23031 - protein, 251 aa, unidentified
  REGION 1..251: note = Human gut metagenome
MVYVQDIDGKPMMPTTRYGKVRQLLKDKKAVVINTCPFTIKLMYKTSDYKQEIVLGVDAGTKHVGLSATTKSKELYSSEVILRSDIVDLLSTRRELRRTRRNRLRYRKPRFDNRIKSKRTGWVAPSVRHRIDAHIRVIDNVCSILPISRIIVEVAQFDTQKIKNPNISGNEYQEGNQLGFWNVREYVLTRDGHKCQHCKGKSKDPILNVHHIESRKTGGDSPSNLITLCETCHKEYHKGKIDLRVKRGKSL

SEQ ID NO: 23032 - protein, 423 aa, Leptolyngbya sp.; identical to SEQ ID NO: 9497

SEQ ID NO: 23033 - protein, 415 aa, unidentified; identical to SEQ ID NO: 3582
  REGION 1..415: note = Human gut metagenome

SEQ ID NO: 23034 - protein, 456 aa, unidentified
  REGION 1..456: note = Human gut metagenome
MSTCVCVLNNSGERLMPTIRLGKVRHLLKDGKAKIVKHHPFTIQLLCDSKTNTQPIEICEDVGYNYIGISVKSESHEYVSAQYDTLQDEKEHHDDCRKMRRARRNRLRYRKPRFDNRKRSEGWLAPSLEHKKQLNISLIERYVSVIPITRATVEVGSFDTILLQAIQKGKSKPEGVDYQKGPRYNLATLREAVFYRDNYTCQVCGRKIADGAILHMHHMFYWKGRHGYQLDELVTACEKCHTPANHQKGGKLFGFGEDKEFANLSGAAFMNAVRWQIVDALHATYGKEFVTITYGAMTKEKRIILGIEKTHNNDAYAMGDYHPVHRCVFRHYQKRRRNNRVLEKFYDATYIDARTGNKAKGKELFNGRINRNHKKDSENFHKYRSKKVSKGRRSIRRQRYAIQPYDTVRLEGKTYITSGCHNKGTRLLIPANGKSKSVAISKVQVVCHAGAWIQII

SEQ ID NO: 23035 - protein, 413 aa, unidentified
  REGION 1..413: note = Human gut metagenome
MTSYAFVLDANGKQLAPTKEQKAWFLIRKKRAALVSKYPMVIQLKKEIQENEICKDEILCGIDDGGLHVGIALVQKCKTKNKVVFKGTIEQRNDVKHLMEVRRGYRRYHRYHKRYRQARFNNRKSSKREGRIAPSILQKRQATIRVINQLNKWINITNYWLEDVSIDIRVLTDGYKSYRWQYQKSNRLDENIRKATILRDGGKCMECGKSNCRLEVHHIKPKRRNGSNTLDNLITLCESCHQKTEGQEELYMDRYFSLLKSSDNKNLNYAQHVMIGKMWLRKQLSGLGVLYLTSGGDTANKRIDWNIEKSHANDAVCITDLQPDTYDMKEWTMKPMRRQSKAKTDHVLGIKHRDLVEYTFKNGETHRGYVTALYPEQKAINFQSPTKHCKKVNARKCKLLWKYSKIYWFENAS

SEQ ID NO: 23036 - protein, 440 aa, unidentified
  REGION 1..440: note = Human gut metagenome
MSVFVLDKKHEPLMPCHPARARKLLKAGRARVVKTYPFTIRLVDRLLENSAVQPVAVKVDPGSKQSGMAVVRDDGKAHHHALFFINLVHRGQVIQERMTARSAFRRRRRGANLRYRAPRFLNRKRHKGWLPPSLQHRVDTTMSWVKKLRKLVPVTALWVENVKFDTQKLQNPEVSGVEYQQGTLFGFEVREYLLEKFGRRCVYCGAENTPLNIDHVVPRAKGGSDRVSNLVLACTDCNQKKGAQPLEAFLKDKPQQFERIRRQLKAPLRDAAAVNATRWALFNALKQTGLLVATGTGAQTKFNRKAFGIPKEHWLDALCVGRINGADYPKSMGVLQVRCTGRGSYQRTRLNKYGFPRGHLMRQKRVHGFATGDMVKAVVPSGKKAGIHQGRVAVRMTGSFAIQKADGKVDGIHWRHCRLISRNDGYGYAWLRPAPHSSLI

SEQ ID NO: 23037 - protein, 366 aa, unidentified
  REGION 1..366: note = Human gut metagenome
MYVTSDYKQEIVLGVDAGTKHVGLSATTKSKELYSSEVILRNDIVDLLSTRRELRRTRRNRLRYRKPRFNNRIKSKRPGWIAPSVRYKIDAHIRVIDNVCSILPISRIVIEVAQFDTQKINNPEISGKEYQEGDQLEFWNAREYVLARDGHKCQYCKGKSKDKILNVHHIESRKTGGDSPSNLITLCETCHKEYHKGNIDLKIRRGKSLRDAAVMGIMKWRLYEELKSKYDNISMTFGYVTKYNRINHDIEKSHVSDAFVISKNFNAIRLGYYYKVRLVRRHNRQIHKQKIQKGGIKRLNQSPFEVFGFRLFDRVMFENSYYFIFGRRKTGSFNIRDIDGKSQKNITYKKFKLSRCKRFMIQKEMN

SEQ ID NO: 23038 - protein, 480 aa, unidentified; identical to SEQ ID NO: 7001
  REGION 1..480: note = Human gut metagenome

SEQ ID NO: 23039 - protein, 522 aa, Moorena sp.; identical to SEQ ID NO: 11042

SEQ ID NO: 23040 - protein, 628 aa, unidentified
  REGION 1..628: note = Human gut metagenome
MKPWITTRILQASVREDARKCRKETIMVAVLSNTDVALMPTSSCRARILLRSKRAEIVGYHPFTIRLLDRETGNTQPIEYKSDTGSVYVGVSICSEKHEYISEERILLDDEKKKHDNCRTLRRTRRNRLRYRKPRFDNREKAKGWIAPTLQNKLDRQLDIFHAYKKVMPITSATFEVGKFDIQLLAAMESGKPVPEGKDYQQGARYQQETLRQAVFFRDSFTCQVCQKGVKDGVILRMHHIGFRKNDHSDRMANLLTVCTTCHSSKNHNPGGELWDLKPEIKPLHDAAFMNTIRWKLIDTLKETHPDVELHFTYGARTKCTRRTMHIGKSHANDAYCIGEFHPKHRCDTVYYQKQRRNNRVLEKFYDAVYLDLRTGEDEKAAALGSGRTKRNTHLAYKDQRPYRGRKVSSGHRSITRKRSPYKKGDILRVQKEYTVKEPDQNGKLQKVTKVMDVTAKLASSHSKVDSKTLKAFRTGKIKKIPKSAVMMAYDFTEPLPNGRQSCDGKHVKAVKTTKIQAWKRISKPEPKKRRLTPNDKEQTRRIPRTTYKGGGTLRHDNGKTVFRIPYIQIKNKGFKIASQISRSSVPDRPHPYRIFLPVAICKRRLYAWAARYAGTRFLKCHDRWLYA

SEQ ID NO: 23041 - protein, 425 aa, unidentified; identical to SEQ ID NO: 2429
  REGION 1..425: note = metagenome

SEQ ID NO: 23042 - protein, 475 aa, Ferroplasma sp.; identical to SEQ ID NO: 14031

SEQ ID NO: 23043 - protein, 268 aa, unidentified
  REGION 1..268: note = Human gut metagenome
LLKAIEEGKPVPQGEDYQQGEMYGHYNVRQYVLWRDDYTCQCCGAHATKKKEVRLHVHHLESRKTGGDAPRNLITLCDSCHKKHHDGLITEDDFKKRKRRSTRDATFMGIMRKTLIQRLRAELTIPVAETRGYITKATREKLLVLPKSHTNDALAIAQGKHGFNVGYLPGILQIDKIYTIRPVRHHNRQLHKATILKGGIRKSNQAEKYVFGYRLFDKVQFNGQDCFIWGRRTSGYFVVKTIDGKVIHNSASFKKLRLVERASNYLIA

SEQ ID NO: 23044 - protein, 456 aa, Halomonas sp.; identical to SEQ ID NO: 2773

SEQ ID NO: 23045 - protein, 426 aa, unidentified
  REGION 1..426: note = Human gut metagenome
LAKDHYRSIDREETNLRVYVLNKRGEPLMPCSAAKARILLKEKKAKVKRRTPFTIQLTIATGETKQPVTLGVDSGYRHVGLSASTEKAELYASEIELRQDIPELLAARRALRGARRSRKTRYRAPRFDNRKRDKGWLAPSVENRIGAHVSRVEAVLRILPVTKIIVETASFDVQRIKNPDVQGVEYQEGEQLGFWNVREYVLFRDGHECQHCHGKSKDRVLNVHHIESRRTGGDAPNNLITLCETCHKAFHRGEFELKVKRGRSFQAEAFMGVMRWTFFERLRARHPEIEVRNTYGYLTKDTRIANKIEKSHCADAFCIAGNLKAKRLGYYFFQKQTRRPNRQIHKLTILKGGVRKRHQTPYEIKGFRLYDKVLYRGKTAFIFGRRSSGYFDIRTLDGERISAAVNSKKLRLLEKRRTFLIELRRN

SEQ ID NO: 23046 - protein, 515 aa, unidentified; identical to SEQ ID NO: 5111
  REGION 1..515: note = Human gut metagenome

SEQ ID NO: 23047 - protein, 470 aa, unidentified
  REGION 1..470: note = Human gut metagenome
MSVFVVGLNGCRLMPTSERKARLLLKEGKASVYRKVPFTIKLNYKTGSTVQPGYLGIDTGSQHIGITAVREDGTVLHKEEIGLRDSMTKRKLLESKASLRRGRRYRKTRYRHPKWRPETKRVYCEKPDRKGRHWKKQKNTFTSKRQAGWLPPSLQSKTDHHIRWIRKILGLLPEGYRLSIELGRFDPARMKDPEIHGELYQKGPQYDYENVRAYVLDRDRYTCQACKKKGGKLQVHHILYKSSGATDNPQYMATVCSNCHTLENHQPGGILYRWKQEQKKFTRGLRDATFMNILRKRLMEAFPDAVFTYGNITKVDREALKLPKSHANDATAIALVRTGITSIKDNEPVIHIQQVRRKKRSLHEENPRKGRKEPNRTASRNSKNTKSVTVNKKLGKIKTQVTAWLFDRVELDGKKGWISGFTGKSCYVKDRQDKYVCLSKKYDSVSITKLKILHHCGNWVVGAETTLGKC

SEQ ID NO: 23048 - protein, 451 aa, unidentified; identical to SEQ ID NO: 3061
  REGION 1..451: note = Human gut metagenome

SEQ ID NO: 23049 - protein, 451 aa, unidentified; identical to SEQ ID NO: 19449
  REGION 1..451: note = Human gut metagenome

SEQ ID NO: 23050 - protein, 431 aa, unidentified
  REGION 1..431: note = Human gut metagenome
MPNKVYVINKHGRPLMPCSPAKARHLLDAGKAKVKKRTPFTIQLVYGSSGYTQEVILGVDAGSKTIGMSASTTKEELLSAEVKPRNDVVDLLSARREFRRARRNRKTRYRKPRFDNRVRSKHKEWLAPSVEVKIQEHITSIKRVCRILPVSKVVIETAEFDLQLLKAIADGKSVPQGEDYQKGEMYGHYNVRQYVLWRDNYTCQCCGAHATKKKEVRLHVHHLESRKVGGDAPSNLITLCDSCHEKFHKGIITAANLKKRKRRSMRDATFMGIMRKTLIQRLRAELTIPVAETRGYITKTTREKLLVLPKSHTNDALAIALGKHGFNVGYLPEIAQIDKIYTIRPVRHHNRQLHKATILKGGIRKSNQTGKYVFGYRLFDKVQFNGQDCFIWGRRTTGIFTIKTINGKMIKDGISFKKLKLVEKSTSYLIA

SEQ ID NO: 23051 - protein, 413 aa, unidentified; identical to SEQ ID NO: 5965
  REGION 1..413: note = Human gut metagenome

SEQ ID NO: 23052 - protein, 406 aa, unidentified; identical to SEQ ID NO: 7944
  REGION 1..406: note = Human gut metagenome

SEQ ID NO: 23053 - protein, 443 aa, Anoxybacillus sp.
MVEENMTCFMQRKGENPMVFVLDTNKRPLAPCHEAVARKLLKQGKAAIYKRFPFTIILKKSVDESENETTYRLKIDYGSRHTGLAILRGQEVVWLGQLDHRTDIKERIDKRRAFRRARRNRKTRYRKPRFLNRKRKEGWLPSSLESRVQNIQTWVSRLKKLCPIGYISYENAKFDTQLMRNPEISGIEYQQGTLQGYEVREYLLEKFGRKCCYCGKENVPLEVEHIIPKSRGGTDRVDNLCLACHDCNQRKGSKTAEEFGYPHIQKQVKESLKDASAINSTRWKAYEVLKQTGLDVECGTGARTKMNRIRLDLPKTHYFDACCVGESTPNHLYFKTKEVLFIKAKGRGSRSRTNLDRYGFPRGYLARQKFFFGFQTGDMVKAVVPRGKYQGVWFGEVACRKTGSFDIKGKDGKRIAQGINYRYVQVIQRFDGYAYGKGVAELA

SEQ ID NO: 23054 - protein, 419 aa, unidentified
  REGION 1..419: note = Human gut metagenome
MVYVLDINGQPLMPTARHGKVRRLLNSHLAKVVKRCPFTIQLLYQSTKETQPVSLGVDSGSKHIGLAATTEQKVVYQEELIPRNDVVKLLSARRALRRSRRNRKTRYRKARFNNRVRSKHKGWLAPSVEVKIQEHITAIKNVCKILPVSEIHVETAEFDFQRLKAMEEGKPLPVGTDYQLGEQYDFYNTRQYVLHRDGYTCQCCGTHDNNIKLHVHHIESRQTGGNAPNNLIVLCEHCHKALHEGKIELPENKKRGKSYRDAAFMGIMRSTLLERLKKEVNVPVMMTYGYITKYWREKVGLKKNHINDAICISKRPYAKLLDTYYLTKAVRHHNRQIHKANFSKGGIRKRNQAPYLVKGFRLFDKVLYQDKECFIFGRRVSGGMDVRLLDGVRINAFVGYKKLKLLESRKAYLIERRTC

SEQ ID NO: 23055 - protein, 370 aa, Lactobacillus sp.; identical to SEQ ID NO: 16713

SEQ ID NO: 23056 - protein, 442 aa, unidentified; identical to SEQ ID NO: 2903
  REGION 1..442: note = Human gut metagenome

SEQ ID NO: 23057 - protein, 423 aa, Scytonema sp.; identical to SEQ ID NO: 6470

SEQ ID NO: 23058 - protein, 441 aa, unidentified
  REGION 1..441: note = Human gut metagenome
MSVSVFVLDRKHRPLMPCRPARARRLLKSGRARVVRLFPFTIRLTDRLIEDSKLQPVLVKLDPGSRQTGVALVRADEKAHHHALFFVNLVHRGESIRDALTARRNCRRRRRGNLRHRAPRFLNRTKPQGWLPPSLRHRVDTATAWVAKLVKLAPVTGIVEELVKFDAQKLQNPEISGTEYQQGTLFEYEVREYLLEKFGRRCVYCGAENVPLNIDHVVPKARGGSNRISNLVLSCVNCNQKKDSQPVEVFLKNRPEVLDRIKRRLKTSLAHAATVNATRWSLFSALKAFGLPVETGSGALTKFNRHTFGVPKEHWHDALCAGRVNGVHYPKTMGILQVRCTGRGSYQRTRVDKYGFPRGYLTRQKRIHGFATGDMVKAVVPSGKKAGTYRGRVAVRKSGYFNIQTPEGVIQSIAWRHCRLLSFNDGYGYAWLRPAAHSSPV

SEQ ID NO: 23059 - protein, 418 aa, unidentified; identical to SEQ ID NO: 13453
  REGION 1..418: note = Human gut metagenome

SEQ ID NO: 23060 - protein, 366 aa, unidentified; identical to SEQ ID NO: 10799
  REGION 1..366: note = Human gut metagenome

SEQ ID NO: 23061 - protein, 512 aa, unidentified; identical to SEQ ID NO: 15043
  REGION 1..512: note = Human gut metagenome

SEQ ID NO: 23062 - protein, 314 aa, unidentified
  REGION 1..314: note = Human gut metagenome
VHRRTKRKGWLAPTVENRINAHLSRIEAVLRLLPVTKITVETASFDLQLLKNPDISGKEYQEGEQLGFWNVREYVLFRDGHVCQHCHGRSKDPVLNVHHLESRRTGGDSPGNLITLCETCHKALHRGEITLKAKRGQSFRAEAFMGIMRWEVLNRLKASHPELEVNNTYGYRTKHARIANDIAKSHCADAFCIAGNLGAERLGEFFFQKQTRRNNRQIHKLSILKGGIRKRNQAPFEVNGFRLFDKVACKGEEGFIFGRRSSGFFDVRKLDGTRISAGISYKKLHLLEKRRTYLTEIRKEEALPPPPEAAQRPR

SEQ ID NO: 23063 - protein, 322 aa, Parasutterella sp.; identical to SEQ ID NO: 7135

SEQ ID NO: 23064 - protein, 515 aa, unidentified; identical to SEQ ID NO: 11058
  REGION 1..515: note = Human gut metagenome

SEQ ID NO: 23065 - protein, 465 aa, unidentified; identical to SEQ ID NO: 3856
  REGION 1..465: note = Human gut metagenome

SEQ ID NO: 23066 - protein, 418 aa, unidentified
  REGION 1..418: note = Human gut metagenome
MIYVRNKEGKALMPTERGGRIGYLLRHGKGHVVSRVPFVVQLDYESTTYTQEVSLGIDAGSKHIGVSASSEKKELLAAQVELRSDVVNLLSTRRELRQTRRNRKTRYREQRFDNRKKKDGWLTPSVEQKVESHLKVIRLVHKLLPITKTTIEVAQFDAQKIKNPDIKGEEYQQGEQMGFWNVREYVLARDGHKCIHCKGKSKDPILNVHHLESRKTGGNSPSNLVTLCETCHKAYHRGEFELKIKRGTTLRDAAVMNIMRWAVYEQAKEEFRNVHMTYGYVTKHTRIENGITKTHVADAFCIAKNVNAMRLSSFFMCRCVPRHTRALHVANPKKGGIRRSCIASHKIGKSRFQRFDMVRWKGKECFIFGSTKGRPVLRDIKGIKMHENNSVNIKTISFLKRLRKNIIVEERTFESRII

SEQ ID NO: 23067 - protein, 453 aa, unidentified; identical to SEQ ID NO: 6331
  REGION 1..453: note = IscB polypeptide

SEQ ID NO: 23068 - protein, 455 aa, unidentified
  REGION 1..455: note = Human gut metagenome
MVFVLDRHHKPLMPCHPARARRLLGKGRARIHKLYPFTIRLVDRELKDSTVQPVVLKLDPGSKETGMALVREDETKTHHALYFVNLKHRGSEIKQSLLQRSSFRRSRRSRNLHYRAPRFLNRTRPQGWLAPSLQHRVDTTLSWVERLGKLAPVATLEMELVKIDTQKMQNPEIDGVAYQQGEVAGFEVREYLLEKFGRKCIYCGAEGVPLNIDHIVPKSAGGSNRVSNLVLACVDCNQKKNNLPFEVFLKGDKAKINRIRSQLKTPLKDAASVNTTRWQLFEALKLTGLSLTTATGARTKYNRHQFGVPKEHWLDALCVGETAAVRGWHPLGVLVVKCTGRGAYKRTRLTKDGFPRGYLTRTKRFFGFGTGDMVVATVFAGKKKGSYKGRVAVRKSGSFAIQTASRKVDGISYRYCRLLSRADGYGYSWHSSKSLINSTKETALLPRINTQVSAP

SEQ ID NO: 23069 - protein, 431 aa, unidentified; identical to SEQ ID NO: 5579
  REGION 1..431: note = Human gut metagenome

SEQ ID NO: 23070 - protein, 431 aa, unidentified
  REGION 1..431: note = Human gut metagenome
MVYVLDINGQPLMPTARHGKVRRLLNSHLAKVVKRCPFTIQLLYQSTKETQPVSLGVDAGSKHIGLAATTEKKVVYQEELIPRNDVVKLLSARRALRRSRRSRKTRYRKVRFNNRVHSKHKGWLAPSVEVKIQEHIAAIKNVCKILPVSEIHIETAEFDLQRLKAMEEGKTLPVGTDYQLGEQYDFYNTRQYVLYRDGYICQCCGTHDKNVKLHVHHIESRQTGGNAPNNLITLCEHCHKALHEGKIELPKGRKRGKSYRDATFMGTMRSTLLERLKKEMDIPVTMTYGYITKYWREKAGLKKSHINDAICISKHPYAKLLDTYYLTKAVRHHNRQIHKVNFSKGGIRKRNQAPYLVKGFRLFDRVLYQGENYFIFGRRATGFFDIRTLDGTKVNKGSISYKKLRIQDTAKAYLKEVQAIPHMNEFMCVLA

SEQ ID NO: 23071 - protein, 448 aa, unidentified
  REGION 1..448: note = Human gut metagenome
ILKTCFAASNLAKIVVLMDAWDIIVVLNKRGKPLMPCSPAKARHLLKEKKAAVVRRTPFTIQLTIATGESKQPVSLGVDAGYKHVGLSASTEKAELYASEVELRQDITDLLSARRALRQSRRNRKTRYRAPRFDNRIRTKRKGWLAPSVENRINAHLSRIETVIRLLPVTKISVETTSFDMQLLKNSDIAGKEYQEGEQLGFWNVREYVLFRDGHVCQHCHGRSKDPVLNVHHLESRRTGGDSPGNLITLCETCHKALHRGEITLKAKRGQSFRAETFMGIMRWEVLDRLKASHPKLEVQNTYGYRTKHARISNGIAKSHCADAFCIAGNLGAERLGEFLFQKQTRRNNRQIHKLSIPKGGIRKRNQVPFEVKGFRLFDKVAYKGEEGFIFGRRSSGYFDVRKLDGTHISAGISYKKLRLLEKRQTYLTEIRKEEALPPLPEGRGLRA

SEQ ID NO: 23072 - protein, 404 aa, unidentified
  REGION 1..404: note = Human gut metagenome
LLKEKKAIVVRRTPFTIQLTIATGESKQPVSLGVDAGYKHVGLSASTEKAELYASEVELRPDVSDLLSARRTLRQSRRNRKTRYRAPRFDNRIRTKRKGWLAPSVENRINAHLSRIGAILRLLPVTKITVETASFDTQLLKNPDISGKEYQEGEQLGFWNVREYVLFRDGHACQHCHGRSKDPVLNVHHLESRRTGGDSPGNLLTLCETCHKALHRREIKLKTKRGQSFRAEAFMGIMRWEVLNRLKASHPELEVHNTYGYRTKHTRIVNGIDKSHCADAFCIAGNLGAKRLGEFFFQKQTRRNNRQIHKLSILKHGLRKRNQAPFEVKGFRLFDKVVCQGEEGFIFGRRSSGSFDVRKLDGTRISAGISYKKLRLLEKRRTYLKEIRKEEALPPLPEGRSLRA

SEQ ID NO: 23073 - protein, 217 aa, unidentified
  REGION 1..217: note = Human gut metagenome
SWQEKLAKKKTGLNKRYGALSVLNQIIPALTKELSSLFPKHFFATNGKSTYDYRAAHGVSKDHWLDAYCIAGSVLPNDACDNNINNRVPYELKQFRRHDRRALHKENMSRVYTLNGKKVATNRHKAVEQATDSLEEFCQNHPDDVCKLKVKEHHPEYRNPKRNFPGCVFLVGKHTHVMQGTSGSHNGKADGYYDTNGNSYSSGKCKFVVKNEGIVFT

SEQ ID NO: 23074 - protein, 470 aa, unidentified; identical to SEQ ID NO: 2949
  REGION 1..470: note = Human gut metagenome

SEQ ID NO: 23075 - protein, 424 aa, unidentified; identical to SEQ ID NO: 6292
  REGION 1..424: note = Human gut metagenome

SEQ ID NO: 23076 - protein, 414 aa, unidentified; identical to SEQ ID NO: 15185
  REGION 1..414: note = Human gut metagenome

SEQ ID NO: 23077 - protein, 390 aa, unidentified
  REGION 1..390: note = IscB polypeptide
MLIFVIDLEGTPLIPTCEARARLLLKQGKAKVYSVMPFTIQLNRIVDNVVGEFKVGIDDGAKRVGISVAHDDKVVFAGTIKLRQDVSKKMLQRSQYRRTRRSRNLRHRQARFLNRGKKGWISPTIKQKKDSILRVIDYLKKQLNIVECVIEQGQFDISSMSQGYKLTGKEYQISEYKGNNWRQKVLWRDGYKCQHCGSEENLQAHHIIFKSNGGGNSVKNGITLCVECHVSLHRGEWKLMKKIKHFKYPAHLQQGKWYLYNALKKRFKIIRIYYGWMTAKARSKLGIEKTHHGDSSAMIGANKYICNPYMIIPRRTKVWDDNPTKTYTEKNGFRHWDIIKAKHTKRGSVIGSVRSLKAKCITIRTMFDNNFPVSYNKSKLLWRPSGLVYC

SEQ ID NO: 23078 - protein, 424 aa, unidentified
  REGION 1..424: note = Human oral metagenome
MFVYVLDKNGQPLMPTSRFGKVRRLLRDKKAKVVRSCPFTIRLLYEPETKIVQDVVLGVDTGSKYVGVACVGNSKVLYQAQVELRDDIKKKMDSRRMYRRNRRFRKTRYRKVRFLNRGNSIRKDRYCPTLVSKYFGHEREIEFCKEILPITKVVLEVGKFDTQLMEKPWLQQYKWAYQKGVNYGYVNAREHALARDNYTCQCCGKKNCRLEVHHIVFQSNDGSDDLENLVTLCKDCHDTIHHDGKELKLKGKRRSNLRYATQMSIIRSMLLKKYSNAEETHGYVTKANREHLGLPKYHYIDACVIASCGDKFEQSDILYQKRCVSKQDRQLCKGIRGERKIPTGKIFGFKKFDKVEYLGKVCFIKGRRSRGYFILMDINNNALDFRDKGGKREPTYQHLKRIAVRRGNLCISSRLGRNSTDGCL

SEQ ID NO: 23079 - protein, 310 aa, Moorena sp.
MPITSATFEMGKFDTQLLQAIADGKPLPEGKDYQHGSKYLYQTEREAVFGRDHYTCQVCGKSVKDGVILHTHHIGFWKGYRSNRISNLLTVCEHCHTAKNHKPGGALWGLEPKSTNLAAATYMSTVRWAMYRELVPNHPKIDIHIQYGAKTAVTRKSLHLAKTHANDAYCIGSLHPKHRTAELAYQKKRRNNRILAKFYDAKYIDIRDGEKKTGSVLSCGRTNRRESRHSDKNRRIYRGKKVSKGRASVREKHYFYQPGDMVLFRSQRFVVNGVHCNGTRVILNTGKSVKMADLICIKKEGGWRFLPAQA

SEQ ID NO: 23080 - protein, 437 aa, unidentified
  REGION 1..437: note = Anaerobic digester metagenome
MVYVLSKEGKPLMPTERYGKARRMLRDGRAKVVKAKPFTIQLTYETTKYTQPITLGIDAGYQSIGFSAITEKKELLAGECQLLQGQVERNRERLMYRRQRRNRLRYRKSRFDNRRKPEGWLAPSLQNKLDTHIRLVEKIKSILPITQVIVEVANFDIQAIKNPGIQGVAYQQGEQYNFWNLREYILHRDNHECQNPGCKNRSKNQELQVHHIGYWKGDYTDRPGNLITLCDKCHRPENHREGKFLWGWQPKVKSFRAETFMSTIRWKLVRTLGCEYTYGYITKSRRIELKLEKSHVNDAFVIAGGTNQSRTIPITIQQVRRNNRSLQKFYDAKYIDLRTGEKASGQELNCGRRTRNKNLNTENLRKYRGKKLSPGRVNIRKQRYPYQPGDTVLYEGQKCTVKGVQNLGIYIKLSELSKPVKTSEVSILYYGKGLRVW

SEQ ID NO: 23081 - protein, 406 aa, unidentified
  REGION 1..406: note = Human gut metagenome
MVYVQDIDGKPMMPTTRHGKVRRLLKDNKAVVVNTCPFTIKLTYKTSDYKQEIVLGVDAGTKHVGLSATTKSKELYSGEVILRNDVVELLSTRRESRRARRNRLRYRKPRFENRVKSKRLGWVAPSVRHKVDAHIRVIDNICSTLPISRIIVEIAQFDTQKIKNPDISGNEYQEGDQLGFWNVREYVLARDGHKCQHCKGKSKDPILNVHHIESRKTGGDSPSNLITLCETCHKEYHKGNIDLKVKRGKSLRDAAVMGIMKWKLYEELKSRYPNVSMTFGYITKYNRIKYGIEKSHTSDAFVISRNFNAKRIEYQYLKRLVRRHNRQIHKMKILKGGKKKNNQAPFEVFGFRLFDKVLYNNEIFFVYGRRKSGNFNIRDFNGENPKDVSHKKFKLIRGKRHPIILK

SEQ ID NO: 23082 - protein, 414 aa, unidentified
  REGION 1..414: note = Human gut metagenome
MPCSPAKARLLLKEKKAIVKRRTPFTIQLTIATGESKQPVTLGVDAGYKHVGLSASTEKAELYASEVELRQDVSDLLSARRALRQSRRNRKTRYRAPRFNNRLRTKRKGWLAPSVENRINAHLSRIEAVLRLLPVTKITVETASFDMQLLKNPDIAGKEYQEGEQLGFWNVREYVLFRDRHVCQHCYGRSKDPVLNVHHLESRRTGGDSPDNLITLCETCHKALHRGDITLKAKRGKSFRAEAFMGIMRWEVHNRLRALHPGIEVSNTYGYRTKHARIANGIAKSHCADAFCIAGNLGAERLCEFFFQKQTRRNHRQIHKLSILKGGIRKRNQAPFEVKGFRLFDKVACQGEEGFIFGRRSSGFFDVRKLDGTRISAGISCKKLHLLEKRRTYLTEIRKEEALPPLPEGRGLRA

SEQ ID NO: 23083 - protein, 317 aa, Lamprocystis sp.; identical to SEQ ID NO: 5016

SEQ ID NO: 23084 - protein, 388 aa, unidentified
  REGION 1..388: note = Human gut metagenome
VTHKIIRGKEGKFANRHRDEGWITPSARQLVQMHMNDLKSMCKILPISHVTLERVAFDFQKLENENIKVWEYGKGKLYGYDSPEEYIHDVQNGKCLVCGKPHIDYLHHIIPRSKGGSDKVSNIAGLCYDCHYGPMGVHNCQNTQDRLPELKSEANKQYKVSLLNSVMPVLIEEMDKFCKANSIMFSICEGHDTAKVRDMYDLQKDHCIDGFAISLVDRNVKSVDVMPDRIYQKQRYKKKSKNIIQKRNCREYYDDKKLVAVNRHKGTDQKADSLEEYMNTYAETHTADECKMHFESLTVKPARRTYTFHKEGRICPLHIGDKVRYEKKNKIKGNTKVDTFICEGIRFVKDENKAEVKHNKTKSKKMKFCRVLESGCTPYVDYRKLALM

SEQ ID NO: 23085 - protein, 424 aa, Anabaena sp.; identical to SEQ ID NO: 18755

SEQ ID NO: 23086 - protein, 410 aa, unidentified
  REGION 1..410: note = Lachnospiraceae bacterium UBA7767
YVLSKTGQPLMPTENHAKVRILLKQGKAKVVHRCPFTIQLLYSSTNYTQKVTLGVDSGIKHIGLSATTKDKVLFESDVELRNDIVDLLSTRRELRRSRRSRKLRYRKPRFNNRRRSDRWLAPSVKQKVDSHITMIAKVHKILPISNIVVEVASFDIQKIKDPTISGTDYQQGEQLGFWNVREYVLFRDGHKCQCCKGKSKDKILNVHHIESRKTGGDAPNNLITLCETCHTGYHKGTVKLPKALHRGMSFKDATFMGIMRWALYGKLKAIYPDVKLTYGYITKNTRIKNGLPKDHYIDARCISGNPNAVSNGDVYYYKKVRCHNRRIHKNTILKCGYRKCNQAPYEVMGFRLFDKVQWKGQKCFIFGRRATGRMDLRLLDGTHINASVGYKTLKLLKMRSSYLVEQRKVG

SEQ ID NO: 23087 - protein, 413 aa, Moorena sp.
MKVYVINKRDRPLMPTTARKARLLLKFGKATIHRREPFTIKLIYGSTGYTQPGNLGIDAGYKSVGFSAVNSTEELIGGEVKLLERISERLAERRQYRRQRRNRLRHRQPRFNNRCRLRGWLAPSIQHKLDSHHKIIKLVKEILPIKKVTVEVASFDLQKIKNPDIEGKGDQQGEQLGFSNLREYILHRDNHKCQNPNCKNKAKQPILQVHHLGFWNQDRSDRPSNLITLCSKCHTPANHKPGKFLHGWKPKLKSFKPETFMTLVWRKLTTDVGYEATYGYITKDVRREYKIEKSHHNDAFVIAGGTNQRRIEPIKYQQVRRNKRSIEQFYDAKYIDLRDGNINSGTELFSGRRTRNKNENTENLRKYRGQKVKQGQRRIKVHRYPYSQHDLVLYEGKVFSVIGMQNKGKGADC

SEQ ID NO: 23088 - protein, 444 aa, unidentified
  REGION 1..444: note = Candidatus Anoxychlamydiales bacterium
MLVFVLNKLKKPLMPCSPAKARRLLKKGLAKVISKKPFTIKLLFGSSRYKQEVIAGMDTGSKTIGIAAIANGKVLYQAETKLRGEEIKKKMDQRRMYRRSRRSRKLRYRKPRFLNRRANAAIDRLAPSVKHKVFSHLREKKFIESILPVSVWIVETASFDIHKITNPKGVSKALGKGRTYQKGRMLDFYNVKQYVLNRDKYQCQVCKKKNGLKLHVHHIQFRSNGGTNSPDNLTSLCETCHDKLHKLKKEEAEKSSKKLQKSAQKQTKHATEISILRSQLCKHFRNLGSSQVFEETFGYITKFNRESANLLKSHHIDAICIASRGERIEVQNQNNPSDLFLRRCVSKGDYQQTRGIRSELKIPTGKLFGLKKFDLVKTSKGVGFVKGKRSSGFFAISDINGTIISDSVNIKKNISRTQARKSILIWRSQFVSDLKDKVSLREKR

SEQ ID NO: 23089 - protein, 515 aa, unidentified
  REGION 1..515: note = Human gut metagenome
MTALEERLSKTEYIYVLGFDGKPQMPTRRKRHVLKLLKTGRARIAEDIPFTIRLTYRNAPVLQPVTLAEDPGRTNIGAAVLSPLGDLLFSAVIETRNKEIKKLMADRKKSRQASRRGERKARQRLAKRYGSMLKSGMIMRKLPMYAADKFVTCKFIRNTQARFCNRKRCPDWITPTVQHLVQTHLNIIRKISRYLPVTDIAFEVNRFAFMHMENPEAMGVDFQNGPLKGYDDVKEAIRTQQHGKCLMCKKPIAHFHHIVPRSRGGSDTIQNLAGLCTEFHTKVHTDTAFRKDFDEKKSGQLKKYGALSALNQAVPFICKKLLEEYGEEHVHFCRGLDTSLIRTALGFEKTKKNQMHEVDAYCIGLAALEVNEVKTPAFDHTFQIRQFRRQDRSIIHHQTGRSYYQGKEKVAQNRKPGFEQKTTALSQWYKEQVRIHGEKEAEKLRSQLRVEKSCRHYNDMDRFLPGAVFLYEGKRYVLSGRITNGKYLRACGQGMKNFPAAECTFIRHNAGLVFI

SEQ ID NO: 23090 - protein, 458 aa, unidentified
  REGION 1..458: note = Human gut metagenome
LKGVGMMSEIKKVDYIYVVDSNGTPLMPTSRLGMVRRWLKTGQVKWFGNSRKTIQFVRPVTTNTQELTLGVDAGFHLGLSVVGNNREYYAAESLRKSEKDRITSRRELRRTRRNRLRYRKARFDNRRRKDGWLAPSIQHRLDFTIKEIKRLYTFLPITNLVVEVTPFDNQKLLNPDIQGWQYQKGKMYGFKTIKDYLLARDNYRDALDGKQYPASQLRVHHLAQRKDGGSNQPDNLVLLSDINHNQANHNNGILAKLRENRQKTLDYRGAYFMSILATRLSNYFDNYTTTQGYLTANLRQKYEIEKSHLNDAFVIAGGTDTTLRTNNVYSRQKLRNNNRVLQKFYDAKYIDSRDGKQKAGKELSSGRTRRSQEINYDNLRQFRKEKVKKGRVSIRKGHYQLRPHDVVLNTRTNRIETVKGVQNSGTVIKFQTGKTCSIKGVISLYHVNGILEKKMESI

SEQ ID NO: 23091 - protein, 418 aa, Moorena sp.
MQNYVFVIDANKQPLNPIHPRKARRLLDKGKAAVFRMYPFTIILKTAISNPTISPCQIKIDPGSKVTGFALVQNGQVIWGMELEHSGGLIKKKLESRRAVRRGRRNRHTRYREPRFLNRKRSEGWLTPSLEHRILTIQTWVKRLIKFCPVNEIWIERVKFDTQKIQNPEISGVQYQQGELVGYEVREYLLEKWGRECAYCGKKGVPLQVEHIHPKSKGGSDRVSNLCIACEKCNQRKGNKPIEDFLKKKPNLLQKINTKAKQPLKDAAAVNATRNKLVKVLKEIKPVITGTGAQTKYNRTKLGFPKEHWIDAACVGDIETLTLKVSQPLLVTCKGQGGRQKAALNKYGYPIRHNPLKPIKGWVTGDIAKHQKLGIGKVTPRTKGSFGFTPLGLKGYKSCSPKDLVAVHRKDGYTYSFC

SEQ ID NO: 23092 - protein, 401 aa, unidentified
  REGION 1..401: note = Human gut metagenome
MSVFVVGLNGCRLMPTSERKARLLLKQGKAFVEQKVPFTIRLNYKTGSTTQLGYLGIDTGSQHIGVSVVREDGTVLHKEEIGLRDSMSKRKLLEAKASLRRGRRYRKTRYRHPKWRPKTKRVYCEVPDRKGRHWQKKKITFTSKRPKGWLPPSLQSKTDHHIRWIKKLQDLLPEGYRLSIELGRFDPARMKNPEIHGDLYQKGPQYDYENVRAYVLDRDRYTCQICKKKGGKLHVHHILYRSHGATDDPQYMVTVCSDCHSAQNHLPGGILYQWMQEQKRFSRGLRDATFMNILRKRLIRAFPEAVFTYGNVTKVDREKLKLPKSHGNDATAIALVKTGITAVKDKESVICIQQVRRKKRSLHEETPRKGRKEPNRTAARNNKNTKAVTVTKRQNKKKVSM

SEQ ID NO: 23093 - protein, 413 aa, unidentified; identical to SEQ ID NO: 7541
  REGION 1..413: note = Human gut metagenome

SEQ ID NO: 23094 - protein, 397 aa, unidentified
  REGION 1..397: note = Human gut metagenome
EDVGYNYIGISVKSESHEYVSAQYDTLQDEKEHHDDCRKYRRTRRNRLRYRKPRFDNRKCSEGWLAPSLEHKKQLNIRLIERYVSVIPITRATVEVGSFDTMLLQAIQKGESKPEGVDYQKGPRYNLATLREAVFYRDNYTCQVCGRKIADGAILHMHHMFYWKGRHGYQLDELVTACEKCHTPANHQKGGKLFGFGEDKEFANLSGAAFMNAVRWQIVNALYATYGKEFVTITYGAMTKEKRIALQLEKTHSNDAYAMGDYYPAHRCVFRHYQKRRRNNRVLEKFYDATYIDTRTGNKAKGKELFNGRISRNHKKDSEDLHKYRSKMVSKGRRSIRRQRYAIQPYDTVRLEGKTYITSGCHNKGTRLLIPANGKSKSVAISKVQVVCHAGAWIQII

SEQ ID NO: 23095 - protein, 411 aa, Desulfosporosinus sp.; identical to SEQ ID NO: 8287

SEQ ID NO: 23096 - protein, 350 aa, unidentified
  REGION 1..350: note = Human gut metagenome
GGAIRDALKARSAFRRRRRSQNFRCRSPRFLNRVKPKGWLPPSLRHRVETTLSFVRRMCRYLPVSGIATELVKFDSQKLQNPEVSGVKYQQGTLFEYEVREYLLEKFGRKCVYCGAEGVPLNIDHVVPRAKGGSNRVSNLVLACVSCNQKKGARSLEDFLKGKPEVLARVRRELKTPLRDAAAVNATRWVLFNELKATGLPVETGSGALTKLNRHAFGVEKEHWLDALCVGRLNGVVTRKGLNVLEIRCMGRGSRQRTRLTKYGFPRGYLMRQKCVHGFATGDMVEANVPKGKKAGLWRGRVAVRVSGSFNIQTPKGVIQGVGWKHCRLISHNDGYGYAWLGHAPHSSPA

SEQ ID NO: 23097 - protein, 494 aa, unidentified; identical to SEQ ID NO: 3039
  REGION 1..494: note = Human gut metagenome

SEQ ID NO: 23098 - protein, 420 aa, unidentified
  REGION 1..420: note = Human gut metagenome
MQYVYVLNKHGEPLMPCSPRKARLLLKQKKAYVIKRTPFTVKLLYGSAGYKQPVTLGVDAGSKHIGISATTEKHELYREEATPRNDVVDLLSARRAFRRSRRNRKTRYRAPRFNNRVHSKHKGWLAPSVEVKIQEHITLIKHACRILPVTLVRVETAEFDTQRLKAMLEGKPLPVGTDYQLGEMYDEYNVRQYVLKRDNYTCQCCGAHSTKTKGVKLHVHHIETRRTGGNAPNNLITLCKACHKALHAEKVTLDGKKRGKPLKDAAFMGIMRKTLMERLRKELKIPVQGTYGYITKCLREKNGIPKSHTNDARCISKNPLAIPCDTCYYTKAVRHHNRQLHKATILKGGIRKANQAPYIVKGYRLWDKVAYNGTECFITGRRTSGYFALKKLDGTVASNSISYKKLRLLEAATNYIIERK

SEQ ID NO: 23099 - protein, 443 aa, unidentified; identical to SEQ ID NO: 15325
  REGION 1..443: note = gut metagenome

SEQ ID NO: 23100 - protein, 511 aa, unidentified; identical to SEQ ID NO: 11885
  REGION 1..511: note = Human gut metagenome

SEQ ID NO: 23101 - protein, 458 aa, Acidithiobacillus sp.; identical to SEQ ID NO: 13713

SEQ ID NO: 23102 - protein, 445 aa, Ktedonobacter sp.
  SITE 445: note = misc_feature - Xaa can be any naturally occurring amino acid
VSKVFVLDTQKQPLNPVHPGRARMLLSSGKAAVFKRYPFTLILKGRGEQPQVAPLRIKIDPGSKTTGIAIVNDTSGEVVFAAELSHRGQEIKKRLERRRGVRRSRRQRHTRYRKPRFENRHNKQRGWIAPSLESRVCNVVTWVQRLMRVCPIVAMSQELVKFDMQAMEQAEIKGIEYQQGTLQGYETREYLLEKWNRMCAYCSAKDIPLQIEHIHPRAKGGSDRLSNVTLACEACNSKKGTQDVRAFLATKPDVLRRILAQAQAPLEDAAAVNTTRWALYERLKALGIPLECGTGGRTKYNRVTRGIEKAHWCDAACVGASTPEHLHLSGVVPLLITADGHGSRQMCLMDKHGFPRTGPKQAKHVQGFQTGDMVRAIVTRGTKIGTYVGRVAVRATGSFNITTKQGTIQGISHRYCTALHTCDGYSYGQGEPLHPSPEKECLFPX

SEQ ID NO: 23103 - protein, 442 aa, Lactobacillus sp.; identical to SEQ ID NO: 7095

SEQ ID NO: 23104 - protein, 378 aa, unidentified
  REGION 1..378: note = Human gut metagenome
MPDKVYVISRLGHPLMPCSPAKARHLLDDKKAKVVKRMPFTIRLLYGSTKYIQPIILGVDAGSKTIGLSASTAKEEVFAAEVMPRNDVVENLSTRREFHRARRNRTTRYRKPRSDNRVRSNHERWLAPSVKVKIQEHITSIKRVCTILPISKVVIETAEFDLQLLKAIQEGKPIPEGEDYQKGEMYGSYNVCQYVLWRDNYTCICCGVRGTPKNPVRLHVHHFESRKYGGNAPDNHGTLCDDCHKKFHLGIITDVKLKTRRRQSTRDAAFMGIMRKTLMWRLRTELFIPVAETKGYITKATREKLLVLPKSHTRDALAIAQGRHGFGIKEYAYVEPANHIYTVRPVRHHNRQLHKASILKGGIRKRNQASKYVLGLRR

SEQ ID NO: 23105 - protein, 408 aa, unidentified
  REGION 1..408: note = Human gut metagenome
MTALEERLSKTEYIYVLGFDGKPQMPTRRKRHVLKLLKTGRARIAEDIPFTIRLTYRNAPVLQPVTLAEDPGRTNIGAAVLSPLGDLLFAAVIETRNKEIKKLMADRKKSRQASRRGERKARQRLAKRYGSMVKSGMIIRKLPMYAADKFVTCKFIRNTQARFCNLKRCPDWITPTVQHLVQTHLNIIRKISRYLPVTDIAFEVSRFAFMHMENPEAMGVDFQNGPLKGYGDVKEAIRTHQHGKCLMCKKPIAHFHHIVPRSRGGSDTIQNLAGLCPECHTKVHTDTAFRKDFDEKKSGQLKKYGALSALNQAVPFICKKLLEEYGEEHVHFCRGLDTSLIRTALGFEKTKKNQMHEVDAYCIGLAALEVNEVETPAFDHTFQIRQFRRQDRSIIHHQTGRSYYQGRE

SEQ ID NO: 23106 - protein, 370 aa, unidentified
  REGION 1..370: note = Human gut metagenome
VDAGYKHVGLSASTEKAELYASEVELRQDVSDLLSARRALRQSRRSRNTRYRAPRFDNRIRTKRKGWLAPTVENRINVHLSRIETVLRLLPVTKITVETASFDTQLLKNPDIAGKEYQEGEQLGFWNVREYVLFRDGHVCQHCHGRSKDPVLNVHHLESRRTGGDSPGNLITLCETCHKALHRGGITLKAKRGQSFRAEAFMGIMRWEVLNRLKASHPELEVNNTYGYWTKHARIANGIAKSHCADAFCIAGNLGAERLGEFLFQKQTRRNNRQIHKLSILKGGRRKRNQASFEVKGFRLFDKVACKGEEIFIFSRRSSGYFDVRKLDGTRISAGISYKKLRLLEKRRTYLTEIRKEAFSPLPEGRSLRA

SEQ ID NO: 23107 - protein, 456 aa, unidentified
  REGION 1..456: note = Human gut metagenome
MSTCVCVLSNNGERLMPTIRLGKVRHLLKDGKAKIIKHHPFTIQLLYDSETNIQPIEICEDVGYNYIGISVKSQSHEYVSAQYDTLQDEKSCHDACRRMRRTRRNRLRYRQKRFDNRKRDKGWLAPSLKHKKELNVNVIKMYCEVVPITHATVEVGSFDTMLVKAIEEGKATPEGADYQKGPRYNLATLREAVFYRDNYTCQVCGREASEGAILHVHHMFYWKGRHGNSLSELITVCEKCHTPANHQKGGKLYGFGENVKFADLSGAAFMNTVRWQIVNELYAAFGKDFVTVTYGAMTKEKRIALHLEKSHNNDAYAMGNCHPAHRCEFGHYQKRCRNNRVLEKFYDATYIDTRTGDKAKGKELFNGRISRNHKKDSEDLHKYRSKKVSKGRRSIRRQRYAIQPYDTVRLESKSYITSGCHNKGTRLLIPANGKSKSVAISKVQVVCHAGAWIQII

SEQ ID NO: 23108 - protein, 346 aa, unidentified
  REGION 1..346: note = Human gut metagenome
KETKFTNRTRPEGWLTPTANQLLQTHINLVKKIQKFLPISDVVLEINKFAFMRLDNPNIQKWQYQQGPLYQKASLEEAVSEMQEHHCLFCKKPIAHYHHVVPQSENGSNTIGNIVGLCTKHHDLVHKDTAWQKKLAKKKTGLNKKYGALSVLNQIIPALTKELSSLFPKHFFATNGKSTYDYRAAHGVSKDHWLDAYCIACSVLPNDVCDSNINSRVPYELKQFRRHDRRALHKANMNRVYTLDGKKVATNRHKAIKQTTDSLEEFRQRQPDDVCKLKVKEHHPEYRNPERNFPGCVFLVGKHTHVMQGTSGSHNGQADGYYDTNGNSYSSGKCKFVAKNKGIVFA

SEQ ID NO: 23109 - protein, 424 aa, unidentified; identical to SEQ ID NO: 3434
  REGION 1..424: note = Human gut metagenome

SEQ ID NO: 23110 - protein, 426 aa, Parasutterella sp.; identical to SEQ ID NO: 3045

SEQ ID NO: 23111 - protein, 366 aa, Anoxybacillus sp.
MVFVLDTNKCPLAPCHEAVARKLLKQGKAAIYKRYPFTIILKEIVDNFRPKTPYRLKIDHGSKHTGLAILRGQEVVWLGQLDHRTDIKERMDKRRAFRRARRNRKTRYRKPRFLNRRRKDGWLPPSLESRVQNIQTWVNRLKKLCPIGYISYENTKFDTQLMRNPEISGIEYQQGTLQGYEVREYLLEKFGRKCCYCGKENVPLEVEHIIPKSRGGTDRVDNLCLACHDCNQRKGSKTAEEFGYPHIQKQVKESLKDASAVNSTRWKVYEVLKQSGCEVECGTGARTKMNRIRLDLPKTHYFDACCVGESTPNHLYFKTKEVLFIKAKGRGSRSRTNLDRYGFPRGYLARQKFFFGFQTGDMVKAV

SEQ ID NO: 23112 - protein, 424 aa, unidentified; identical to SEQ ID NO: 14112
  REGION 1..424: note = Human gut metagenome

SEQ ID NO: 23113 - protein, 423 aa, unidentified; identical to SEQ ID NO: 3951
  REGION 1..423: note = Human gut metagenome

SEQ ID NO: 23114 - protein, 438 aa, unidentified
  REGION 1..438: note = Human gut metagenome
GAVFYRHYPAVIILKDVDARNIYKLPSYRIKIDPGAVHTGIAIVCNETNEVMYFLQIEHRGSEVKKALITRKQTRRNRRSRETRYRRCKFKNGGDFDSSRKNGWLPPSVKSTADNVIHWVEKLCRYINITECSFEAVRFDSQLMDNPEIGGEEYQQGTLSGYELREYLMEHFRHTCQYCGGESGDPVLEWEHKIPRSRGGSDSVKNASLACSCCNRDKGNRTLEEYLEDSKHISPKGKSEKALNEARISHISGILEKGTIYGSNRYSAWVNSTRRYIEKYLFLMFDDVECCSGGRTKYNRIKLKLPKDHHYDALCVGSVPKEGYTDRTNSYVLYVKATGRGTRFRGQCNSCGVITVKYKNNSKRKFGFQTGDIVQLNKPKGKDTGQYTGKVAVRSSGSFDLIRKGCKRITANYKYFRMMQYSDGYEYLGPLRPIPHSA

SEQ ID NO: 23115 - protein, 268 aa, unidentified
  REGION 1..268: note = Human gut metagenome
LLKAIEEGKPVPQGEDYQQGEMYGHYNVRQYVLWRDGYTCQCCGAHATKKKEVRLHVHHLESRKVGGDAPDNQVTLCESCHEKLHKGLIAEKDFKKRKRKSTRDATFMGIMRKTLMQRLCSELPIPVIETRGYITKATREKLLVLPKSHTNDALAIAQGKQGFNVGYLPGIVQINKIYTIRPVRHHNRQLHKATILKGGIRKSNQAEKYVFGYRLFDKVQFNGQDCFIWGRRTSGYFVVKTIDGKVIHNSASFKKLNLVERASNYLIA

SEQ ID NO: 23116 - protein, 420 aa, unidentified
  REGION 1..420: note = gut metagenome
MVYVISKNGKPIMPTENHAKVRLLLKYGKAKVVRRTPFTILLLTSSKTYRQNITLGVDAGSKHIGMSATTEKKELFSAELNPRNDVVELLSTRRELRRSRRNRKTRYRKARFNNRVHSKYKGWLAPSVEVKIWNHIQGINLINKILPLTTIRVETAEFDLQRLKATEEGNPLPVGKDYQLGEQYSHYNTRQYVLHRDGYRCACCGAKSTKKKEIKFHVHHLESRKTGGNAPSNLITLCETCHKLYHIGKLRLPVDKHRIKSMRDATFMGIMRKTLMERLRNMFSNVEVKETMGYITKYWRECNNIEKSHTSDAFVIANNFSAKRLDKSLLIKPKRQHNRQIHKCTINKGGKRKLNQTPKYVFGYKLFDKVLCLGQEGFIFGRRSSGYFDIRKLNGEKIHTGISYKKLKLLEHSNSMLIAY

SEQ ID NO: 23117 - protein, 375 aa, unidentified
  REGION 1..375: note = Human gut metagenome
VKLGVDAGSKFIGLSASTDKAELYASEVELRTDVVDLLSSRRELRRARRNRKTRYRAPRFNNRVHSKNKGWLAPSVENKINAHLSRVDAVRQLLPVTKIVVETASFDIQKIKNPDIEGADYQWGEQLGFWNVREYVLFRDGHRCCHCHGKSKAPILNVHHLESRKTGGDAPNNLITLCETCHKAYHAGKIVLKAKRGQAFRDAAFMGIMRWTFFNRLKAQCPELDVRNTYGYLTKNTRIRHGLDKSHHTDAFCIAGNLGAKRLGEYFFQKQTRKHNRQIHKMSILKGGVRKRQQAPYEVKGFRLFDKVRYGSREAFIFGRRNSGYFDIRLLKGEKVSPAISYKYLQLLESRKTFLTQLIKKDAIPPATEVAGFLA

SEQ ID NO: 23118 - protein, 427 aa, unidentified; identical to SEQ ID NO: 9446
  REGION 1..427: note = Chlamydiae bacterium

SEQ ID NO: 23119 - protein, 408 aa, unidentified; identical to SEQ ID NO: 21993
  REGION 1..408: note = Human gut metagenome

SEQ ID NO: 23120 - protein, 442 aa, unidentified; identical to SEQ ID NO: 12678
  REGION 1..442: note = Human gut metagenome

SEQ ID NO: 23121 - protein, 423 aa, Arthrospira sp.; identical to SEQ ID NO: 3251

SEQ ID NO: 23122 - protein, 415 aa, unidentified; identical to SEQ ID NO: 6534
  REGION 1..415: note = Human gut metagenome

SEQ ID NO: 23123 - protein, 370 aa, unidentified
  REGION 1..370: note = uncultured archaeon
VDSGYKNIGLSAVTSKKEVYSAEVRLRADIVKLNSERRQYRRARRNRKTWYRQPRFLNRKKPEGWLAPSIQHKLDSHFKLIERIKSILPVTRIVVEVAAFDIQKIRNPEISGTGYQNGVQKDSWNVREYVLHRDNHTCQVCHGKSKDPVLETHHIVSRQVGGDSPDNLVTLCQTCHSKVSKGKLVLDIENPVGFRPETFMSTVRWMLVNRLREMGNIVSHTYGYLTKSNRIALGVEKSHMNDAFVISGGTMQERSPISYLIKQVRRCNRKLFKGDRSHIKNTATRFVHGFQRYDKVLWNNIECFVFGRREKGYFDLRKLDGTKVHASANVKEIGLLERASTSLIEPFEWGTLLYFPKNRVPATPAPHRGV

SEQ ID NO: 23124 - protein, 420 aa, unidentified; identical to SEQ ID NO: 3288
  REGION 1..420: note = Human gut metagenome

SEQ ID NO: 23125 - protein, 524 aa, unidentified
  REGION 1..524: note = Human gut metagenome
MPTTRCGHVRKLLNSKKAVVVNSNPFTIRLKYDTPNGVQDVFAGIDSGRENIGSGASNEDGDCLYLGELKTSNKSIKLKMTERAGFRKERRRHDRQNKQRKARKDHTEIQNGNADICRTTISCKSVQISYPAAEKSVTHKIIRGKEGKFANRHRDEGWITPSARQLVQMHMNDLKSMCKILPISHVTLERVAFDFQKLENENIKVWEYGKGKLYGYDSPEEYIHDVQNGKCLVCGKPHIDYLHHIIPRSKGGSDKVSNIAGLCYDCHYGPMGVHNCQNTQDRLPELKSEANKQYKVSLLNSVMPVLIEEMDKFCKANSIMFSICEGHDTAKVRDMYDLQKDHCIDGFAISLVDRNVKSVDVMPDRIYQKQRYKKKSKNIIQKRNCREYYDDKKLVAVNRHKGTDQKADSLEEYMNTYAETHTTDECKKHFDSLVVKPARRTYTFHKEWRICPFHIGDKVRYEKKNKIKGNTKVDTFICEGIRFVKDENKAEVKHNKTKSKKMKFCRVLESGCTPYVDYRKLALM

SEQ ID NO: 23126 - protein, 396 aa, unidentified
  REGION 1..396: note = Human gut metagenome
VKRRTPFTIQLTIATGETKQPVSLGVDAGYKHVGLSASTEKAELYASEVELRQDITDLLSARRALRQSRRNRKTRYRAPRFDNRIRTKRKGWLAPSVENRINAHLSRIETVLRMLPVTKITVETASFDMQLLKDPDISGKEYQEGEQLGFWNVREYVLFRDGHVCQHCHGRLKDPVLNVHHLKSRRTGGDSPGNLITLCETCHKALHRGEITLKAKRGQSFRAETFMGIMRREVLDRLKASHPKLEVQNTYGYWTKHARISNGIVKSHCADAFCIAGNLGAKRLGEFLFQKQTRRNNRQIHKLSILKGSLRKRNQAPFEVNGFRLFDKVAYQGDEGFIFGRRSSGFFDIRRLDGTRISAGINYKKLRLLEKRRTYLTEIRKEEALPPLPEGRGLRA

SEQ ID NO: 23127 - protein, 403 aa, unidentified
  REGION 1..403: note = Human gut metagenome
LLKEKKAIVVRRTPFTIQLTIATGESKQAVNLGVDAGYKHVGLSASTEKAELYASEVELRQDVSDLLSARRALRRARRNRKTRYRAPRFDNRIRTKRKGWLAPSVENRINAHLSRIETVLRLLPVTKITVETASFDTQLLKNPDIAGKEYQEGEQLGFWNVREYVLFRDGHVCQHCHGRSKDPVLNVHHLESRRTGGDSPGNLITLCETCHKALHRGDITLKAKRGKSFRAEAFMGIMRWEVHNRLRALHPGIEVSNTYGYRTKHARIANGIAKSHCADAFCIAGNLGAERLGEFFFQKQTRRNNRQIHKLSILKGGRRKRNQASFEVKGFRLFDKVACKGEEIFIFSRRSSGYFDVRKLDGTRISAGISYKKLRLLEKRRTYLTEIRKEAFPPLPEGRSLRA

SEQ ID NO: 23128 - protein, 319 aa, unidentified; identical to SEQ ID NO: 3180
  REGION 1..319: note = metagenome

SEQ ID NO: 23129 - protein, 431 aa, unidentified; identical to SEQ ID NO: 4463
  REGION 1..431: note = Human gut metagenome

SEQ ID NO: 23130 - protein, 430 aa, unidentified; identical to SEQ ID NO: 6024
  REGION 1..430: note = Spirochaetales bacterium UBA5920

SEQ ID NO: 23131 - protein, 418 aa, unidentified; identical to SEQ ID NO: 14280
  REGION 1..418: note = coral metagenome

SEQ ID NO: 23132 - protein, 273 aa, unidentified; identical to SEQ ID NO: 9974
  REGION 1..273: note = Human gut metagenome

SEQ ID NO: 23133 - protein, 415 aa, unidentified; identical to SEQ ID NO: 2995
  REGION 1..415: note = Human gut metagenome

SEQ ID NO: 23134 - protein, 465 aa, unidentified
  REGION 1..465: note = Ignavibacteria bacterium
MIFTIDKNGNPGHPTKRFDLIRKLRKQRKVRIIGGGASGKPPVAIFLDREFDASRTIDRKHIIALDPGYSYIGFAVCEIMNGKLVIYCRGILQTRISDIKGLMSDRRSHRRRRRYLSRFKQKRLSFKKGKVLTKFKAPRNVRSVNRASATLKHGIETHLNLYRKLLRFFPFPECQVQFVMEDNMFNIRAMTWGNTSDTDYQKSPRTSIKEKKCVLCGSLEKLNQHHLIPRKMGGTNIPENKVYLCEDCHRDVHAGRVYLPVTGIKQWRGLGTMNAIIGVLRRLPFIYFVPVSDMVSKRNALKLEKDHGNDALATAAAFCDCTMIDTSFEKRLILVKFRRHIRAHTHAQRERHYKVNGVMIAQNRKKRTDQKEPSFADVSPLSPDQQRKLEVYPGVKLFNPLRENALCTGGDVWVYVPTGQRFIAKGVTSKTYLYSPMLESIVGKSYVRPDKCSRIVHNEGIVVWS

SEQ ID NO: 23135 - protein, 422 aa, unidentified; identical to SEQ ID NO: 5333
  REGION 1..422: note = Human gut metagenome

SEQ ID NO: 23136 - protein, 427 aa, unidentified
  REGION 1..427: note = metagenome
LTKDENRPSGRTTGLRAEQAEPAGIRKGDTLKVFVLNMRGKPLMPCSPAKARHMLKAGKAFVVRRTPFTIKLTIATGETKQDVTLGVDAGARHVGISATTEKEEVFASEVALRQDITGLLADRLAFRRARRNRKTRYRAPRFNNRVRSKHKGWLAPSVENRIQAHISRIEAVCRLLPVTKIVIETASFDIQKIRNPEVEGTGYQQGDQLGFWNVREYVLFRDGHICQYCRGRSKDPILNVHHLESRKTGGDAPNNLITLCETCHKAYHAGKIKLKVKRGHSFRAEAFMGIMRWTLLNRMRKAHPSLPVENTYGYLTKHKRIALGLPKTHCADAFCIAGNLKALRRGDFLFQQQTRKHNRQIHRCSILKGGVRKLNQAPFLVKGFRLFDKVRIGGQIGFVFGRRVRGIFNIRRFDKTVIGKDINCKKN

SEQ ID NO: 23137 - protein, 432 aa, Desulfobacter sp.
MRGEALMPTTVQKARLLLKNGKARIHSHRPFTIQLTYATGEAKQDLVLGVDAGYHNIGISVVSPTNEVFSSEIKLLQGQVERNKERRMYRTQRRSRLRYRKPRFDNRIKPKGWLAPSIQHKFDSHIKFIKRLCSVLPITKTIIEIAAFDIQKIKAPEINGKQYQEGEQLGFWNLREYILHRDNHKCQNPNCKNKSKNQILEIHHIGFWKKDRSDRPGNLITLCDKCHTPAKHKKKGFLYGWEAKTKSFKPETFMSIVRWKLVDELKCAHTYGHITKHKRIGLSLPKTHYHDAFCIAGGENQERCKPIFFHQKRKNNRCLEKFYDAKIIDTRTGKKVSGGELHSGRRTRNKNLNGENLRKYRGVKVSKGRRQIRKQRYAIRPDDIVKFDGKIYRAIGVQNKGQYLKIVNGSKPIVKNIKYIEVLFHQKTLKTV

SEQ ID NO: 23138 - protein, 417 aa, unidentified
  REGION 1..417: note = Human gut metagenome
MPCSPAKARLLLKEKKAIVKRRTPFTIQLTIATGEAKQPVALGVDSGYKHIGLSATTEKAELYASEVELRQDITDLLSARLALRRSRRSRKTRYRAPRFDNRVANKREGRLAPSVENRIAAHMSRVEAVMRVLPVAAITVETAAFDTQLLKNPDIAGAAYQQGEQLGFWNVREYVLFRDGHVCQHCRGKSKDPILNVHHIESRRTGGDAPNNLITLCETCHKAFHRGEIKLKVRRGKSFKAETFMGIMRWTLLERLKKAHPELRVRNTYGYLTKHKRISHGIAKSHCADAYCIADNLGAKRLEGFFFQKQTRKHNRQIHKLSILKGGLRKKNQAPYEVKGFRLFDKVICKGEEAFIFGRRTSGSFDVRRLDGTRISAGINYKKLRLLEPRTTYLTEFRKEAALPPLHKCRGFCAEFL

SEQ ID NO: 23139 - protein, 444 aa, unidentified; identical to SEQ ID NO: 3399
  REGION 1..444: note = uncultured cyanobacterium

SEQ ID NO: 23140 - protein, 489 aa, unidentified; identical to SEQ ID NO: 19542
  REGION 1..489: note = Human gut metagenome

SEQ ID NO: 23141 - protein, 627 aa, unidentified; identical to SEQ ID NO: 12202
  REGION 1..627: note = Lachnospiraceae bacterium UBA7276

SEQ ID NO: 23142 - protein, 362 aa, unidentified
  REGION 1..362: note = Human gut metagenome
MVYILNKHNEPMMPCSERKARLLLKQGRAVIYRKDVFTIKLINGSYGYKQHITMGIDCGSKHIGISATTNKKELFSANAELRNDIVKLLSDRKSLRRNRRYRKTRYRKPRFDNRRIKEGWLAPSIRQKIDSHVRIVSLIHKLLPVKQVNVEVAAFDIQKIKNPYIKSSEYQMGEQLDSYNVREYVLFRDNHICQHCKGKSKDDVLQVHHIESRKTGGNAPNNLVTLCKTCHEKYHSGEITLNVNRGKSFRDASVMSTMRWFLYEELKSRFSNVNITYGYITKYKRIKLGLSKEHYNDAYCITGNLNTSRLCNHHLIRFIPRHSRILHVQTFSKGGNRRSASAPYWLNGGKSSKVGITFTMFD

SEQ ID NO: 23143 - protein, 428 aa, unidentified; identical to SEQ ID NO: 4442
  REGION 1..428: note = Bioreactor metagenome

SEQ ID NO: 23144 - protein, 416 aa, unidentified
  REGION 1..416: note = Human gut metagenome
MPCSPAKARHLLDAGKAKVKKRTPFTIQLVYGSSGYTQEVILGVDAGSKTIGMSASTTKEELLSAEVKPRNDVVDLLSTRREFRRARRNRKTRYRKPRFDNRVRSRHKGWLAPSVEVKIQEHITAIRRVCGILPVSKVVVETAEFDLQLLKAIADGKPVPQGEDYQKGEMYGHYNVRQYVLWRDNYTCQCCGAHATKKKEVRLHVHHLESRKVGGNAPDNQVTLCESCHEKLHKGLITEKDFKKRKRRSTRDATFMGIMRKTLMQRLCSELPIPVIETRGYITKATREKLLVLPKSHTNDALAIAQGKHGFNVGYLPGIEQIDKIYTIRPVRHHNRQLHKAAILKGGIRKSNQAEKYVFGYRLFDKVQFNGQDCFIWGRRTTGIFTIKTINGKMIKDGISFKKLKLVEKSTSYLIA

SEQ ID NO: 23145 - protein, 317 aa, Lamprocystis sp.
MAVFVLDRRGKPLMPCSEKRARLLLTRGRARVHRVVPLQNPQISGVAYQQGTLAGYEVREYLLEQWGRRCAYCTGDGVPLEIDHITPRSRGGSDRVTNLTLACHPCNQAKGNRSAAEFGHPEIEAKAKQSLGDAAAVNSTRWSLFNALTATGLAVETGTGGRTKWNRTRLGVPKTHALDAACVGVVEGVTGWVAPVLSIRCTGRGAYQRTRVTQDGFPRGYLMRHKQVRGFQTGDLVRATVPSGKKAGVHMGRVAVRATGRFNIQTPQGVVQGIGYRHCCVIQRGDGYGYAQLGATALPSPAIRSRPEGRGFSRRNG

SEQ ID NO: 23146 - protein, 431 aa, unidentified
  REGION 1..431: note = Human gut metagenome
MPNKVYVINKHGRPLMPCSPAKARHLLDDGKAKVKKRTPFTIQLLFGSTGYTQEVILGVDAGSKTIGLSASAETKELFSAEVKPRNDVVDLLSTRRESRRARRNRKIRYRKPRFDNRVRSKHKGWLAPSVEVKIQEHITSIKRACRILPVSKVVIETAEFDLQLLKAIADGKPVPQGEDYQKGEMYGHYNVRQYVLWRDGYTCQCCGAHTTKKKEVRLHVHHLESRKTGGDAPSNLITLCDSCHEKFHKGIITAANLKKRMCRSMRDAAFMGIMRKTLIQRLRAELTIPVAETRGYITKATREKLLVLPKSHTNDALAIAQGKQGFNVGYLPGILQIDKIYTIRPVRHHNRQLHKAAILKGGIRKSNQAEKYVFGYRLFDKVQFNGQDCFIWGRRTTGIFTIKTINGKMIKDGISFKKLKPVEKSTSYLIA

SEQ ID NO: 23147 - protein, 462 aa, unidentified
  REGION 1..462: note = Human gut metagenome
MSVLVIGSNGRALMPTNPRKACLLLKKKTASVVCRHPFTIQLLYKTGCATQEGCIGIDTGSQHIGVGVTCGDRVILKEEHELRSSMEKRSLLVARAAMRRGRRYRKVRYRKPKWRHHTKRMYFEKPNRRGQHWRKVKTTTQSPRPKGWLPPSLQSKCDHHFRIIDRYLKYLPDSITRNLVIEVGRFDMARMNDPMIHGEMYQRGPMYDAENLRAYIFARDNYQCACCKAKAGTTRKADGTTVKLVAHHILFRSRGATDNPRYIISVCDHCHTTKAHQPGGVLYSWMENNKKVTRGLRDATFMNILRKRLFARYPQSAFTYGNITAADRKQLRLPKSHANDAVAISLLGKEASTVKNICQTMHYKQIRKSKRSLHEAIPRKGRKNPNTKAVRNKKNTTQVNGFKLWDSVLANGKKLFICSFTGTSAYLIDKNGCYISQPGKTYKQWPLSKLKRLHPNGNWLVT

SEQ ID NO: 23148 - protein, 550 aa, unidentified
  REGION 1..550: note = Human gut metagenome
LFLQIPQAFGCLLRLSIFPVDSSARVALSRTIPLTANTQPRETQPPVSAGETYSKRRVAYMPTVYVLNKDGKPLMPTTRCMHVRHLLKNGKARVVKSKPFTIQLLYETDDVVQPLYLGIDPGRTNIGVAVVKADGAVVFTAHLETRNKEVPKLMKKRKESRCARRTNGRRCRRQRRAKTNGTISKKCVKQTTAQNGSVSKRAKEIGVIKRHLPGCEKDVLCIGIKNKEAKFTNRARPEGWLTPTANQLLQTHINLVKKIQKFLPISDVVLEVNKFAFMQLDNPNIQKWQYQQGPLYQKGSLENAVSEMQEHHCLFCEKPIEHYHHVVPKSENGSNTIANIVGLCTEHHNLVHKDATWQKKLAKEKVGLVKKYSALSVLNQIIPALTKEMNSLFPKHFFVTNGKSTYDYRTAHGVSKDHWLDAYCIACSVLPNDVCDSNINSHVPYELKQFRRHDRRVLHKANMSRVYTLNGKTVATNRHKAIKQTTDSLEEFRQSHPGDVCKLKVKEHHPAYRNLNRNYPGSVFLVDGQVHVMQGVSGSHNGKADGYYNT

SEQ ID NO: 23149 - protein, 423 aa, Moorena sp.
MVFVLDKHKQPLMPCTPKRARLLLAQGRAVVHRIKPFVIRLKDRRALDSVLQPVVLKLDPGSKTTGSALVREEATPDGPVHYALHLAELTHRGEAVHRALLQRASYRRRRRSANLRYRPCRVALRRRAPSWLPPSLRSRIGNVLTWAQRYAYWAPVSRIEVERVKFDLALMQNPEVAGVEYQRGELFGWEVRAYLLEKFQYRCAYCGRAHTVFELDHIVPRSRHGSNRVSNLALSCHDCNIAKGKQTAAEFGHPEVEAQAKRPLGDAAAVNATRYALVEALRVLGLPIGTWSGGRTRWNRDRFGIEKAHCLDALCVGTLAGVHVPPLCPLAITAQGRGRYQRTNVNGSGFPRGYFTREKRVRGFSTGDLVRAEVPAHLKTGGVRLGRVAVRASGSFRVGKTDGINARYCRVLQRMDGYSYASS

SEQ ID NO: 23150 - protein, 438 aa, unidentified
  REGION 1..438: note = Human gut metagenome
IVKHHPFTIQLLYDSKTNTQPIEICEDVGYNYIGISAKSKSHEYVSAQYDTLQDEKEHHDDCRKMRRTRRNRLRYRKPRFDNRKRGEGWLAPSLRHKKELNVNVVKMYCAVMPITYATVEVGSFDTMLVKAIQEGKVIPEGADYQKGPRYNLATLREAVFYRDNYVCKVCGRKATEGAILHMHHMFYWKGRHGNSLNELLTVCEKCHTPANHQKSGKLYGFGEDVKFADLSGAAFMNTVRWQIVNELYAAFGKPFVTITYGAMTKEKRIALQLEKSHNNDAYAMGEFHPNHRCAFEHYEKVRRNNRILEKFYDSQYIDIRTGEIATGKELFNGRINRNHKKDSENLHKYRGKRTYAGHRALLRKKVNLNPGDLVSLNGEPLVVLGTHTRKNGAVNVEFETPSKSGRKSASLKKLKIVKAADSIHPAWEKVSQIIQRKE

SEQ ID NO: 23151 - protein, 406 aa, unidentified; identical to SEQ ID NO: 2703
  REGION 1..406: note = Human gut metagenome

SEQ ID NO: 23152 - protein, 434 aa, unidentified; identical to SEQ ID NO: 2891
  REGION 1..434: note = Human gut metagenome

SEQ ID NO: 23153 - protein, 477 aa, unidentified; identical to SEQ ID NO: 8085
  REGION 1..477: note = Human gut metagenome

SEQ ID NO: 23154 - protein, 453 aa, unidentified; identical to SEQ ID NO: 6494
  REGION 1..453: note = Human gut metagenome

SEQ ID NO: 23155 - protein, 504 aa, unidentified
  REGION 1..504: note = Human gut metagenome
MAWEAIQTRRIKPHDIGEGALRRHAAGTVSFPVLCKNRKETLMSVLVIGRNGKALMPTNPRKARLLLKKKTASVVCRHPFTIQLLYKTGCATQEGCIGIDTGSQHIGVGITCGDRVILKDEHALRSSMEKRSLLATRAVMRRGRRYRKVRYRKPKWRHHTKRMYFEKANRRGQHWRKVKTTTQSPRPKGWLPPSLQSKCDHHFRIIDRYLKYLPDPITRNLVIEAGRFDMARMNDPTIHGEMYQRGPMYDAENLRAYIFARDNYQCACCKAKAGTTRKADGTTVKLVAHHILFRSRGATDNPKYIISVCDHCHTTKAHQPGGILYSWMENNKKVARGLRDAVFMNILRKRLFARYPQSAFTYGNITATDRKQLRLPKSHANDAVAISLFGKEASTVKNICQTMHYKQIRKSKRSLHEAIPRKGRKNPNTKAVRNKKNTTQVNGFKLWDSVLADGKKLFICSFTGTSAYLIDKNGCYISQPGKTYKQWPLSKLKRLHPNGNWLMA

SEQ ID NO: 23156 - protein, 326 aa, Moorena sp.; identical to SEQ ID NO: 4303

SEQ ID NO: 23157 - protein, 481 aa, unidentified
  REGION 1..481: note = Human gut metagenome
MWTTVLRDEKPYGRSSALPVRECVSITKKRGHRMVAVLSKTGIRLMPTSSYRARKLLAKKKAVICGYRPFTIRLTERETGDVQPVELAVDTGYFHVGNSLKTAKHELAAVEIRTLMDEKQRYDDRRQYRRMRRSRLRYRAPRFDNCRRPEGWLAPSIQGRMEQNLAFLRRVLSVVPVTRIVMEMGQFDTQVLKAVEEGRPLPEGTDYQQGERYGIATLREAVFTRDNYTCQCCKKTVRDGTILHVHHIVYRSQGGTNRMGNLITVCEKCHTPKNHKPGGKLYKWNPTVKSFKGATFMTAVRWIMYRSVKESFLDVDVRITYGAKTKLQRRTLDITKSHVNDAYVMGDFHPKHRARPVILQKKRRNNRILEKFYDAKYIDARDGSKKTGQQLFNGRTNRNHNTDTENLRLYRGMKLSKGKRAIRTTRYRIQPHDILVYQGQEMEASGCHNKGTRVMTTAKKSLPIGKVRVRRYSGGYYAVAE

SEQ ID NO: 23158 - protein, 476 aa, unidentified; identical to SEQ ID NO: 15014
  REGION 1..476: note = Human gut metagenome

SEQ ID NO: 23159 - protein, 430 aa, Moorena sp.; identical to SEQ ID NO: 3328

SEQ ID NO: 23160 - protein, 398 aa, unidentified
  REGION 1..398: note = Human oral metagenome
LKEGKAKVVRREPFIIRLLYEPETDVVQECYCGVDTGSKHIGVAVVGNDRVLYQSQTELRSDIKKKMNRKRASRRNRRNRKTRYRKPRFLNRRNSIREDKLPPSVKHKVQAHIDEIEFCKKILPVSDLILEVSQFDTALMKNPGLMNEKVKHWGYQKGFNYGYASRRGAILHRDNYTCQCCGKKNCRLEVHHIKFKSNGGTDDEENLITLCEDCHRGIHAGTVVLNKKPKKSKGLKHATHMSIIRSQLLKEYPDAIETFGFVTSENRNHLNLPKDHYIDSCVIASGGLEFKELDVIFYKRRVSKGDYRLTRGIRGEQKLPTGKLCGFRRFDKVKYFGEKYLIKGRVSRGSVLLMDIFGNKIDFSFMPRGYRTPKMSNCERVSARRSILCITKELENEE

SEQ ID NO: 23161 - protein, 455 aa, unidentified
  REGION 1..455: note = gut metagenome
VIKSSEGKERCPLHQTPSNIDEGCLLPERAWGQNLRVFVTNQRGKPLMPCSPAKARVLLREKKARVKRRTPFTIQLTTATGEARQDVSLGVDAGYRHVGLSASTEKAELYASEAVLRDDITDLLSARLALRRARRNRKTRYRAPRFSNRVHSKNKGSLAPSVGHKIASHLKLVENVCRLLPVTKITVETASFDMQAIKNPDIKGAEYQQGEQLGFWNVREYVLWRDGHQYRHCRGKSGDPILNVHHLESRRTRGDAPNNLVTLCETCHKAYHAGRIDLKLKRGRSMRAEAFMGIMRWTFFNRLKESHSDKTVENTYGYLTKNTRITHGIEKSHCADAYCIAGNLRAERLPEFLFQKQVRKHNRQIHKMTIGRGGIRKRQQMPFEVKGFRLFDKARLGSEEGFIFGRRSSGYFDVRRLDGQKLSAGVSFKKLHLLEKPTTYLKALLPRLKTKVSAP

SEQ ID NO: 23162 - protein, 428 aa, unidentified; identical to SEQ ID NO: 4442
  REGION 1..428: note = Bioreactor metagenome

SEQ ID NO: 23163 - protein, 423 aa, unidentified
  REGION 1..423: note = Human gut metagenome
MRVFVFNMRGEPLMPCTQRKARLLLKAGKAKIYKYNPFTIQLKYATGENKQECHVGIDTGSKYIGLAVTSENKVLFKGEVELRQDVKSKIDTKRIYRRSRRNRKTRYRRCRFLNRKRFGKWLPPSLQNRINHTFKWIDKLCSFIPESILHIEVGKFDIAKMINPEVHSMDYSQGQTYGYQGERYFIFARDNYTCQVCGERNKPLQTHHIIYVSNGGTNRVDNQITVCKECHTSTNHKNGGIFYKWQKEHKKVKQYKAPPFMNVLRQQILNQYPQALITYGFETTIKRKNIGLEKTHYNDAIVISGISTISENLDEWLLIKQFRKKKRSLHEGVPRKGRKEPNRIQKRNSKNTPYYRGFYLNDKVSVFGKSGYITGFTNSGAYVKGVDGEYIVLPNKSYKRVNIASLKFICHNNNWQYITKNAV

SEQ ID NO: 23164 - protein, 476 aa, unidentified
  REGION 1..476: note = Human gut metagenome
LKASGAEGVSHPGLPGKYKHKGGQLMSVAVISKTGERLMPTSEYRARKLLKSGKAIIHSYHPFTIQLTERETGDIQPIELCMDTGYIHIGISVKSEKHEYLAEQIDTLTDERARHDACRMYRRQRRGRKRYRQPQFNNRKRDKGWIAPSLEHKKDIHIQAISRINKVMPLTNITMEMGNFDTQVLKAKEEGKPLPQGADYQHGERYGITTLREAVFARDGYTCQCCGRAIKDGVILHVHHIVYRSQGGTNRMSNLITVCDKCHTPANHKKGGKLYNWKPKIASFKGAAYMTAIRWKLYNEVKTLFPDIDIHITYGAETKERRRAFDIDKSHVNDAFVMGQFHPKHRSKPICYKKKRRNNRCLEKFYDAKYIDSRDGKKRSGQELFNGRISRNHKKDSENLHQYRLQKVTPGRRAIRKQHYPIQPHDIIVYNGNKIEVSGCQHKGTRVVFSKTKKSVQISKIKLFKYAGGYSKSVFN

SEQ ID NO: 23165 - protein, 279 aa, unidentified
  REGION 1..279: note = metagenome
VVIETAEFDLQLLKAIEEGKPVPQGEDYQQGEMYGHYNVRQYVLWRDNYTCQCCGTHPSKKKEVRLHVHHLESRKVGGDAPDNQVTLCESCHEKLHKGLIAEKDFKKRKRRSTRDATFMGIMRKTLMQRLCSELPIPVIETRGYITKATREKLLVLPKSHTNDALAIAQGKQGFNVGYLPGIVQINKIYTIRPVRHHNRQLHKATILKGGIRKSNQTEKYVFGYCLFDKVQFNGQDCFIWGRRTTGIFTIKTINGKMIKDGISFKKLKLVEKSTSYLIA

SEQ ID NO: 23166 - protein, 536 aa, unidentified; identical to SEQ ID NO: 4526
  REGION 1..536: note = Human gut metagenome

SEQ ID NO: 23167 - protein, 359 aa, unidentified
  REGION 1..359: note = Human gut metagenome
LRYRKPRFDNRKRDDGWLAPSLRHKKELNVNVVKMYCAVMPITHATIEVGSFDTMLVKAIQEGKAIPEGADYQKGPRYNLATLREAVFYRDNYVCKVCGRKATEGAILHMHHMFYWKGRHGDSLDELLTVCEKCHTPANHQKSGKLYGFGENVKFADLSGAAFMNTVRWQIVNELYAAFGKGFVTITYGAMTKEKRIALQLEKTHSNDAYAMGEFHPNHRCTFEHYEKVRRNNRTIEKFYDSRYIDIRTGEIATGKELFNGRINRNHKKDSENLHRYRGKRTYAGHRALLRKKVNLNPGDLVSLNGEVLVVHGTHTNKKGAVNVEFKVPAKNGQKSASLKKLKIVKTTDSMHSAWEKIS

SEQ ID NO: 23168 - protein, 447 aa, unidentified
  REGION 1..447: note = Human gut metagenome
VVTVQRSTQHLLFDRVFIRRNLFMVYVISQDGKPLMPCSNPIARLLLKQGKAKVKKREPFTIKLTYEAPNYTQDLTLGVDTGSGTIGTAVSKDNGDIVYMSEVIVRNDITDKMTQRVKYRRNRRNRKIRYRKARWLNRANSIKNDRFSPTMQSKLHSHVKEIEYIKSILPITEMVFETGQFDTHFMKNPSLANPKVRPWGYQKGANYGFENTKAMVLNRDNYTCQCCKGKHKDSKLEVHHIVFRSQGGSDEESNLITLCHTCHKDLHSGKINPKLSGKVKGNLKYATQMNSIRKQLFRFYPNAIETFGYVTKANRLHLGVNKEHYYDACTIATQGNAFNVKSNLYKKKCVSDGDFQKTKGVCSEQPIVTDKICGFRKFDKVRYFGNDYFIKGRMSTGYAILMDIDGDKVDFSAMPKGYKTPKMVNLKRLEARSTWMITTVEVTPNIA

SEQ ID NO: 23169 - protein, 423 aa, Moorena sp.
MRVFVLNKNRQPLDPCNPARARILLSTGKAKVYRRYPFTIILTEEVKNPVIHKHQVKIDPGSKTTGLAIVQGERVIWGSELTHRGSQIRDNLISRGQLRRSRRNRKTRYRKPRFLNRTKPKGWLAPSLTSRVQNILTWVKKLIRFCPITGISQELVRFDTQKLQNPEISGIEYQQGTLYGYELREYLLEKWNRKCAYCGATGTQLEIEHIKPLSKGGSNRVSNLTIACHSCNQAKSNQDIELFLSKKPSILKRILSQSKRPLADAASVNSTRWKLYHDLKSIGLPVEVGSGGLTKFNRCRQDLPKTHWLDAANVGKVETLIIEVTKPLLITAKGHGTRQLCRTNKYGFPIRHCSRIKFHKGFQTGDIVRAVVTKGKKIGTYVGRVATRKSGSFNISTLGGLVQGISHKYCRFIHRKDGYAYTN

SEQ ID NO: 23170 - protein, 432 aa, Moorena sp.
MNSVCVLAPDRQALDPCHPARARQLLGAGRAAVLRRFPFTIILHDRTRAASMVHAHRLKIDPGSKTSGLALVQGPRVVWAAELTHRGQRITAALRSRYAVRHSRRHRHTRYRQARFLNRTRPEGWLPPSLQSRVCNVMTWVKRLARLCPITALSQELVRFDMQQMHHAEIRGVQYQHGELAGYEVREYLLEKWGRVCAYCGATAVPLEVEHIMPKARGGSNRVSNLTLACAPCNQQKGARSAAECGLPQVQAQARRPLHDAAAVNTTRWALSQALQATGLPVETGTGGRTKYNRSRLGLAKSHWGDAACVGASTPDTLRVTGIHPVSMRAMGHGTRQMCRVDAHGFPKTHRARQKHYGGMQTGDIVKAVVPTGKYAGTWTSRVVVKASGWFDLVIDGKKASVHQRHCTRLWAADGYTYTLSAGADTAVSSPR

SEQ ID NO: 23171 - protein, 414 aa, unidentified
  REGION 1..414: note = Human gut metagenome
MPCSPAKARLLLKEKKAIVKRRTPFTIQLTIATGETKQPVSLGVDAGYKHVGLSASTEKAELYASEVELRQDITDLLSARRALRQSRRNRKTRYRAPRFDNRIRTKRKGWLAPSVENRINAHLSRIEAVLRLLPVTKITVETASFDLQLLKNPDISGKEYQEGEQLGFWNIREYVLCRDGHVCQHCYGRSKDPVLNVHHLESRRTGGDSPGNLITLCETCHKALHRGEITLKAKRGQSFRAEAFMGIMRWEVLGRLKASHPELEVNNTYGYRTKHARIANDIAKSHCADAFCIAGNLGAERLGEFFFQKQTRRNNRQIHKLSILKGGIRKRNQAPFEVNGFRLFDKVACKGEEGFIFGRRSSGFFDVRKLDGTRISAGISYKKLHLLEKRRTYLTEIRKEEALPPLPEGRGLRA

SEQ ID NO: 23172 - protein, 420 aa, unidentified; identical to SEQ ID NO: 3685
  REGION 1..420: note = Human gut metagenome

SEQ ID NO: 23173 - protein, 436 aa, unidentified
  REGION 1..436: note = Human oral metagenome
MTKTLTTRTTQACVLDQQGKPLMPTTRLGKVYRLLKTQKAHIVSYEPFTIQLDYEPNTHVIQPMTLGVDSGAIHSGYSLANEHREYYSAEVIARNDISNRLSDRRMYRQNRRSRKTRYRQPRFSNRKNKKKGWLPPSLEQKVAVQVNEINHIHRYFPIETIIVETAEFDIQKIKNPDISGIEYQQGTLQGYNIRNYLLEKHGRKCFYCGKAVSDFEVEHMLPKSKGGSNRIDNLTLSCHDCNEKKGTLTAEEFIKQTLSAKKAATKIKQLPNEKRLFKYIAHMNITRWTLYNTIKGTYPNVKMTYGYITKYNRIQAGLPKAHHIDAKCITGFATVPSMSQTVVKVKMRRHNRQLHRATFSKGHVRKAASLPTTVFGFRLYDLVCFNNHRYYIKGRRSSGYFALVSVENLKNEERSYKKLTLLAHTNAYLTNRYVNA

SEQ ID NO: 23174 - protein, 428 aa, unidentified; identical to SEQ ID NO: 3255
  REGION 1..428: note = IscB polypeptide

SEQ ID NO: 23175 - protein, 447 aa, unidentified; identical to SEQ ID NO: 3915
  REGION 1..447: note = Human gut metagenome

SEQ ID NO: 23176 - protein, 470 aa, unidentified; identical to SEQ ID NO: 10659
  REGION 1..470: note = Human gut metagenome

SEQ ID NO: 23177 - protein, 374 aa, Moorena sp.; identical to SEQ ID NO: 10430

SEQ ID NO: 23178 - protein, 423 aa, unidentified; identical to SEQ ID NO: 4062
  REGION 1..423: note = Human gut metagenome

SEQ ID NO: 23179 - protein, 480 aa, unidentified; identical to SEQ ID NO: 2726
  REGION 1..480: note = Human gut metagenome

SEQ ID NO: 23180 - protein, 465 aa, unidentified; identical to SEQ ID NO: 17564
  REGION 1..465: note = Human gut metagenome

SEQ ID NO: 23181 - protein, 430 aa, Desulfobacter sp.
LNVFVLDTNKKPQNPVHPAKARLLLTEGKAAVFRQFPFTIILKETVLDVASNPLRIKIDPGSRDTGIAVINDDTGEIVFAMELRHRGQQIKNNLESRRAIRRSRRNRKTRYRKPRFDNRTRAEGWLPPSLKSRVHNIETWVNRLCRFCNIQAISMELVRFDMQKIQNPEISGVAYQQGELMGYEVREYLLEKWDRTCAYCGKTDIPLEIEHIVPKSKGGSNRVSNLTLACTACNRKKGNKSLEQFLSKKPRLLKRIQKQSGVPLKDAGAVNTTRWDLFRTLKKTGLPVETGSGGLTKFNRTTRGLHKTHWLDAACVGESTPEKMFQIDKTVLIVKADGHGSRQMCRVNKFGFPRTTAKSTEKKVKGFQTGDIVKAVVTSGKKVGTYIGRVAVRKSGSFNIKTVDKTVQGISWKYCRLLHASDGYSYNTTC

SEQ ID NO: 23182 - protein, 447 aa, Moorena sp.
MPATASIYNIGEGKLTSYKEVRNLRVFVKNLRGQSLMPCSQRKARLLLKNKKAKIYCYNPFTIQLLYATGETVQKCNIGIDTGSRHIGLAITSEKKVLFKGEINLRQDVKSNLDTRRIYRRNRRNRKTRYRKARFLNRVKSKKQNWLPPSIESKINHTFNWIDKLENLAADTKLHIEAGKFDIAKMIRPDIQGKDYQQGQCYGYFDTRYFVFARDGYTCQCCKKKNKILNTHHIIYRSNGGTDRADNLITVCTDCHTSENHEKGGILYEWQQRHKKVKQYKEPPFMNIIRKRILKKYPDAVICYGSQTTPKRKDMNLDKTHYNDAIIISGIEDIKENPDEWLLIKQFRKKKRSLHEANARKGRKEPNITQKRNSKNTSYYKGMYLNDYVEVFGQKGYISGFTNGGVYVKNTNDGYITMPGKKYKQVSISNIVRICHNNNWQYYMQNI

SEQ ID NO: 23183 - protein, 544 aa, unidentified; identical to SEQ ID NO: 21750
  REGION 1..544: note = Human gut metagenome

SEQ ID NO: 23184 - protein, 377 aa, Anoxybacillus sp.
IKATYRLKIDYGSRHTGLAILRGQEVVWLGQLDHRTDIKERIDKRRAFRRARRNRKTRYRKPRFLNRKRKEGWLPSSLESRVQNIQTWVNRLKKLCPIGYISYENAKFDTQLMRNPEINGVEYQQGTLQGYEVREYLLEKFGRKCCYCGKENVPLEVEHIIPKSRGGTDRVDNLCLACHDCNQRKGSKTAEEFGYPHIQKQVKESLKDASAINSTRWKVYEVLKQTGLDVECGTGARTKMNRIRLDLPKTHYFDACCVGESTTNHLYFKTKEVLFIKAKGRGSRSRTNLDRYGFPRGYLARQKFFFGFQTGDMVKAVVPRGKYQGVWFGEVACRKTGSFDIKGKDGKRIAQGINYRYVQVIQRFDGYAYGKGVAELA

SEQ ID NO: 23185 - protein, 443 aa, unidentified
  REGION 1..443: note = Human gut metagenome
LTKDENRPSGRTTGLRAEQAEPAGIRKGDTLKVFVLNMRGKPLMPCSPAKARHMLKAGKAFVVRRTPFTIKLTIATGETKQDVTLGVDAGARHVGISATTEKEEVFASEVALRQDITGLLADRLAFRRARRNRKTRYRAPRFNNRVRSKHKGWLAPSVENRIQAHISRIEAVCRLLPVTKIVIETASFDIQKIRNPEVEGTGYQQGDQLGFWNVREYVLFRDGHICQHCRGRSKDPILNVHHLESRKTGGDAPNNLITLCETCHKAYHAGKIKLKVKRGQSFRAEAFMGIMRWTLLNRMRKAHPSLPVENTYGYLTKHKRIALGLPKTHCADAFCIAGNLKALRRGDFLFQQQTRKHNRQIHKCSILKGGVRKLNQAPFLVKGFRLFDKVRIGGQIGFVFGRRVRGTFNIRRLDKTVIGTDINCKKLSLLETRKTFLTELRKE

SEQ ID NO: 23186 - protein, 504 aa, unidentified
  REGION 1..504: note = Human gut metagenome
LAKRTTDSAVCETGASPAERAVDRDPARDIRKDVWCGRRKPHPALPEKKGGMLMAVAVVSRTGVPLMPTSPYRARKLLASGKAEKYGYDPFTIRLTERETGDTQPVELCMDTGYIHIGVSVKSEKHEYLALQIDTLTDEKKKHEKCREKRRNRRSRKRYRKPRFDNRKRDKGWLAPSLEHKKEIHVRAAERICRVIPVTDITMEMGNFDTQALKAREEGRPLPQGTEYQQGERYGTATLREAVFSRDNYTCLCCGRTMKDGAYFHVHHIRYRSQGGTDRMANLATVCEKCHIPANHQPGGKLYNWKPEIKSFKGATFMTAVRWQMYREIKEKIPDVSVHLTYGAATKERRRALDIEKSHVNDAFVMGRFHPGHRARPELYIKKRRNNRVLESFYDARYIDSRDGKKKPGKELFNGRISRNHKKDSENLHKYRLRKVSKGKRCIRKKHYPIQPHDILVYCGRKYETAGCHNLGTGAILLPERRSIAVSKLKIYRYSGGYYKAEFN

SEQ ID NO: 23187 - protein, 408 aa, unidentified; identical to SEQ ID NO: 21203
  REGION 1..408: note = Human gut metagenome

SEQ ID NO: 23188 - protein, 440 aa, Clostridium sp.
VPLMVYVLSKEGKPLMPTNRYAKVRVLLKSKKAVVVNSKPFTIKLSYNTEDFVQPITLGIDSGYLNIGFSAITKEKELISGEVKLLKGMSERLKEKAMYRRQRRSRLRYRKSRFNNRKRSKDWLSPSIQHKYDSHIRFIDKLKKLLPITNIIIEVANFDTHKLKDPSIEGAAYQNGEQKDFFNLREYILHRDAHKCQNPNCKNKSAEPILQVHHIGFWKQDRSDRPGNLITLCNKCHTPKNHKEKSFLYGWQPKVKSFKEATFMSMIRWRLVNTLGCKYTYGYITKYNRITLKLEKTHYNDAFCIAGGSNQNRVKPLIFEQIKRNSRSLQKFYDAKVIDIRTNTKVSGAELFNGRRTRNKNLNSENLRKYRGVKVSKGQRRIRTKRYFYQPGDLVKYEDKVYTVKGTQNKGKYIALKELKKVPKVELLAPYKFRKGLVCV

SEQ ID NO: 23189 - protein, 518 aa, Moorena sp.; identical to SEQ ID NO: 7410

SEQ ID NO: 23190 - protein, 297 aa, unidentified; identical to SEQ ID NO: 15825
  REGION 1..297: note = Human gut metagenome

SEQ ID NO: 23191 - protein, 515 aa, unidentified; identical to SEQ ID NO: 13672
  REGION 1..515: note = Human gut metagenome

SEQ ID NO: 23192 - protein, 401 aa, unidentified
  REGION 1..401: note = Human gut metagenome
RRQRRAKTNGTISKKCVKQTTAQNGSVSKRAKEIGVIKRHLPGCEKDVLCIGIKNKEAKFTNRARPEGWLTPTANQLLQTHINLVKKIQKFLPISDVVLEVNKFAFMQLDNPNIQKWQYQQGPLYQKGSLENAVSEMQEHHCLFCEKPIEHYHHVVPKSENGSNTIANIVGLCTEHHNLVHKDATRQKKLAKEKVGLVKKYSALSVLNQIIPALTKEMNSLFPKHFFVTNGKSTYDYRTAHGVSKDHWLDAYCIACSVLPNDVCDSNINSHVPYELKQFRRHDRRVLHKANMSRVYTLNGKTVATNRHKAIKQTTDSLEEFRQSHPGDVCKLKVKEHHPAYRNLNRNYPGSVFLVDGQVHVMQGVSGSHNGKADGYYNTNGNAYPYYKCKFVVKNEGIVFA

SEQ ID NO: 23193 - protein, 431 aa, unidentified; identical to SEQ ID NO: 2977
  REGION 1..431: note = Human gut metagenome

SEQ ID NO: 23194 - protein, 396 aa, unidentified; identical to SEQ ID NO: 4508
  REGION 1..396: note = Human gut metagenome

SEQ ID NO: 23195 - protein, 205 aa, unidentified
  REGION 1..205: note = Human gut metagenome
MVYVQDIDGKPMMPTTRHGKVRQLLKDKKAVVINTCPFTIKLMYKTSDYKQEIVLGVDAGTKHVGLSATTKSKELYSGEVILRSDIVELLSTRRESRRTRRNRLRYRKPRFNNRIKSKRLGWVAPSVRHRIDAHIRVIDNICSILPVSRVIVEVAQFDTQKIKNPDISGDEYQEGDQLGFWNVREYILARDGHKCQHCKGKSKDP

SEQ ID NO: 23196 - protein, 452 aa, unidentified; identical to SEQ ID NO: 4732
  REGION 1..452: note = Sediment metagenome

SEQ ID NO: 23197 - protein, 485 aa, unidentified
  REGION 1..485: note = Human gut metagenome
DVFAGIDSGRENIGSGASNEDGDCLYLGELKTSNKSIKMKMTERVGFRRERRKHDRQNKQRKARKDHTEIQNGNADICRTTISCKSVQISYPAAEKSVTHKIIRGKEGKFANRHRDEGWITPSARQLVQMHMNDLKSMCKILPISHVTLERVAFDFQKLENENIKVWEYGKGKLYGYDSPEEYIHDVQNGKCLVCGKPHIDYLHHIIPRSKGGSDKVSNIAGLCYDCHYGPMGVHNCQNTQDRLPELKSEANKQYKVSLLNSVMPVLIEEMDKFCKANSIMFSICEGHDTAKVRDMYDLQKDHCFDGFAISLVGRNVESVDVIPDRIYQKQRYKKKSKNIIQKRNCREYYDDKKLVAVNRHKGTDQKADSLEEYMNTYAETHTADECKNQFESLTVKPARRTYTFHKEGRICPFHIGDKVRYEKKNKIKGNTKVDTFICEGIRFVKDENKAEVKHNKTKSKKMKFCRVLESGCTPYVDYRKLALM

SEQ ID NO: 23198 - protein, 475 aa, unidentified; identical to SEQ ID NO: 13183
  REGION 1..475: note = Human gut metagenome

SEQ ID NO: 23199 - protein, 406 aa, unidentified
  REGION 1..406: note = Human gut metagenome
LDANNKQLTPTKEQKAWFLIRKKRATLVSKYPMVIQLKKKIPDKEICKDEVRCGIDDGGLHVGVALVQKCHTRNKVIFKGVIEQRNDVKHLMDVRRGYRRYHRYHKRYRPARFNNRNSSKREGRITPSILQKRQATIRVVNQLNKWINITNYWLEDVAIDIRALTDGYKPYRWQYQKTNRLDENIRKAVILRDGCKCMECGKSNCRLEVHHIKPKRLKGSNTLGNLITLCAKCHQKTESVEELYMDRYFALLKSSDNKNLNYAQHVMIGKKWLREQLSNLGMLHLTNGGDTANKRIDWDITKSHSNDAICITDLKPDTCEIKEWVIKPMRRQSKAKADNVLGIKHRDLVEYTFRNGETHRGYVTALYPEQNAINFQSPTKHCKKVNARKCKVLWKYSKIYWLDNVS

SEQ ID NO: 23200 - protein, 444 aa, unidentified; identical to SEQ ID NO: 19934
  REGION 1..444: note = Microcoleaceae bacterium UBA9251

SEQ ID NO: 23201 - protein, 438 aa, Moorena sp.
VLGKVFLVDTNKQPLDPVHPGWARKLLNTGQAAVLRRYPFTLILKKQVAEEVARPLRLKLDPGSKTTGFALVDDPSGEVVFAAELTHRGQQIKNALHARRAVRRWRRQRKTRYRAPQFDNRRRPKGWLAPSLESRIATTLTWTRRLMRVCPITEISMELVKFDMQLMDHPEIAGIEYQQGELAGYEVREYLLEKWGRRCAYCDAKDVPLQIEHLVCRARGGTDRVSNVCLACEPCNRKKGTQDISAFLKRDPVRLARILAQAKAPLRDAAAVNTTRWVLYERLKTFGLPIECGSGGLTKYNRVKLGFPKAHWTDAACVGKSTPQTLCIKGVTPLLITAMGHGSRQMCCMNKWGFPRTGPKAARRVKGFQTGDIVRAVVPTGKYAGRYTGRVAVRRSGSFDVTTANAKVQGISYRFCSALHCCDGYDYRKGGAAFSPAP

SEQ ID NO: 23202 - protein, 411 aa, unidentified; identical to SEQ ID NO: 2867
  REGION 1..411: note = Human gut metagenome

SEQ ID NO: 23203 - protein, 408 aa, unidentified; identical to SEQ ID NO: 11651
  REGION 1..408: note = Human gut metagenome

SEQ ID NO: 23204 - protein, 413 aa, unidentified; identical to SEQ ID NO: 5477
  REGION 1..413: note = Human gut metagenome

SEQ ID NO: 23205 - protein, 426 aa, Anoxybacillus sp.; identical to SEQ ID NO: 20281

SEQ ID NO: 23206 - protein, 453 aa, unidentified
  REGION 1..453: note = Human gut metagenome
MPVAVISKTGERLMPTSEYRARKLLKSGKAIKYSYHPFTIQLTERESGDVQPIELCVDTGYIHIGISVKSEKHEYLAEQIDTLTDEKARHDACRMYRRQRRSRKRYRQPRFNNRKRNDRWIAPSLEHKKSVHIQAILRICKVMPVTDITLEMGNFDTQVLKAREEGKPLPQGVDYQHGERYGITTLREAVFARDGYTCQCCGRAIKDGAILHVHHIVYRSQGGTNRMSNLITVCDKCHTQANHKQGGKLYNWKPKIASFKGATYMTTIRWKLYNEVKALFPDIDIDIDITYGAETKERRRALDIDKSHVNDAFVMGQFHPKHRSKPICYKKKRRNNRCLEKFYDAKYIDSRDGKKRSGQELFNGRISRNHKKDSENLHQYRLQKVTPGRRAIRRQHYPIQPHDIIVYNGNKIEVSGCQHKGTRVVFSKTKKSVQISKIKLFKYAGGYSKSVFN

SEQ ID NO: 23207 - protein, 479 aa, unidentified
  REGION 1..479: note = Groundwater metagenome
VRSKGNWLTRRHKKNMQKLEERNTYTPTNIPHVCGNCGLVLNVEETLSVSGLKTSSNNSDAALTATGQAGQDLRVPAVYVLGMRGEPLMPTTTRKARVLLKEGTAKVIKRTPFTIQLLYATGETKQSVTLGVDSGYSKIGLSVVTDKKELYSAEAKLRTDIVKLNSERRTYRRARRCRKTWYRKPRFLNRKTLEGWLAPSIQHKLDSHIKLIDNIKGILPVSNIIIEVAAFDIQKIKNPEISGIGYQNGVQTDFWNVREYILYRDDHICQHCKGKSKDKILEVHHIKSKQVGGDRPDNLLTLCSGCHDKVSKGKIELDIKPANGFKAETYMSTVRWKLLNKLGEMGNVASHSYGYITKQNRIALGLPKSHTNDGFLIAGGNGQKRTTVEYLIKQVRNCNRKLFKGDRSHIKNTAERFIHGFQRYDKVLWNGIECFIFGRRTSGYFDLRKLDGTKVHASAKAEHLKLLERANTFLMEVRG

SEQ ID NO: 23208 - protein, 416 aa, unidentified
  REGION 1..416: note = Human gut metagenome
MVYVLSQNGQPLMPTENHAKVRVFLKQGKAKVVQRCPFTIQLLYESTTHTQKINLGIDAGSKTIGVSATTDSKVLYEAEVVLRNDIVELLSGRRALRRSRRNRKTRYRKPRFDNRKKPDGWLAPSIRQKIETHVTVVENITKILPMTKIIVETASFDIQKIKNPEIEGAEYQHGEQLDFWNVREYVLFRDGHTCQCCKGKSKDNILNVHHIESRKTGGNAPNNLITLCETCHKAYHKGIITLPKEIHRGMRFRDAAFMGVMRWAFYDRLKELYNPLGAEVINTYGYITKNTRITYDLPKEHYVDARCISGNPAAKPMDYYYLQKKVRCHNRQIHKCKINKGGTRKRNQAAYEVKGFRLYDQVLWKGQKCFIFGRRSTGRMDLRLLDGTHINASVGHKNLKLLSMRKNYLIEQRKAG

SEQ ID NO: 23209 - protein, 427 aa, unidentified
  REGION 1..427: note = Human gut metagenome
MPDKVYVISRLGHPLMPCSPAKARHLLDDKKAKVVKRMPFTIRLLYGSTKYIQPIILGVDAGSKTIGLSASTAKGEVFAAEVMPRNDVVENLSTRREFRRARRNRTTRYRKPRSDNRVRSNHERWLAPSVKVKIQEHITSIKRVCTILPISKVVIETAEFDLQLLKAIQEGKPIPEGEDYQKGEMYGSYNVCQYVLWRDNYTCICCGVRGTPKNPVRLHVHHFESRKYGGNAPDNHGTLCDDCHKKFHLGIIADVKLKTRRRQSTRDAAFMGIMRKTLMWRLRTELFIPVAETKGYITKATREKLLVLPKSHTRDALAIAQGRHGFSIKEYAYVEPANHIYTVRPVRHHNRQLHKASILKGGIRKRNQASKYVFGFRLYDKVLYQGKACFVWGRRTSGTFLLRTKVKDGVSYRNLTLLERSSNYLIA

SEQ ID NO: 23210 - protein, 412 aa, unidentified; identical to SEQ ID NO: 6973
  REGION 1..412: note = Lachnospiraceae bacterium UBA7767

SEQ ID NO: 23211 - protein, 432 aa, Moorena sp.; identical to SEQ ID NO: 16069

SEQ ID NO: 23212 - protein, 421 aa, unidentified; identical to SEQ ID NO: 4235
  REGION 1..421: note = Human gut metagenome

SEQ ID NO: 23213 - protein, 459 aa, unidentified; identical to SEQ ID NO: 11427
  REGION 1..459: note = Cyanobacteria bacterium UBA11153

SEQ ID NO: 23214 - protein, 415 aa, unidentified; identical to SEQ ID NO: 10543
  REGION 1..415: note = Human gut metagenome

SEQ ID NO: 23215 - protein, 430 aa, unidentified; identical to SEQ ID NO: 16689
  REGION 1..430: note = Human oral metagenome

SEQ ID NO: 23216 - protein, 431 aa, unidentified; identical to SEQ ID NO: 4463
  REGION 1..431: note = Human gut metagenome

SEQ ID NO: 23217 - protein, 421 aa, unidentified; identical to SEQ ID NO: 19757
  REGION 1..421: note = Human gut metagenome

SEQ ID NO: 23218 - protein, 477 aa, unidentified; identical to SEQ ID NO: 5307
  REGION 1..477: note = Human gut metagenome

SEQ ID NO: 23219 - protein, 442 aa, unidentified; identical to SEQ ID NO: 10903
  REGION 1..442: note = Human gut metagenome

SEQ ID NO: 23220 - protein, 415 aa, unidentified
  REGION 1..415: note = Human gut metagenome
MIYVRSKAGKVLMPTERCGKIGYLLRHGMAHVVSRVPFVVQLDYESFTYTQDVSLGIDAGSKHIGVSASSKKKELFAAQVELRSDIVSLLSTRRELRRTRRYRKTRYRKARFDNRRKKDDWLAPSVEQKVDSHLKVIRLVHGLLPITNTTIEVAQFDTQKIKRPDIKGEEYQQGEQMGFWNIREYVLARDGHRCVHCKGKSKDPILNVHHLESRKTGGDSPGNLVTLCETCHKAYHRGEFELKIKSGISLRDAAVMNIMRWAVYGRAKAEFENVHLTYGYITKHMRIENGIAKTHTADAFCIAKNVHARRSRTFFQCRCVSRHTRALHVCIPKRGGMRRSSIASHKIGKSRFQRFDMVRWKGRECFISGSTCGRPVLRDIEGIKMHDKQSVSIKTVKFLKRIRNNIAICERTLVL

SEQ ID NO: 23221 - protein, 409 aa, Moorena sp.; identical to SEQ ID NO: 2993

SEQ ID NO: 23222 - protein, 443 aa, unidentified; identical to SEQ ID NO: 16875
  REGION 1..443: note = Human gut metagenome

SEQ ID NO: 23223 - protein, 522 aa, unidentified
  REGION 1..522: note = Human gut metagenome
MATDFIYVLDTDGTPLAPTHRHKHTRMLLKNGQAKVVCYRPYTIQLLYESETPRVVPQLIAGQDPGRTNQGTNVIDRTGKSVYAAHIETRNKEIPTLMKNRSANRRASRNGERARRIRKAKLHHTTFQYGDHNRKLPKCNETVPIHYIINTEAKFCCRTRPDGWLTPTANQLLQTHISEVKQLMKILPITDFVIELNKFDFAKLKDPTLQKWQYGKGSLYQTNLKDLIDEEQDHHCLLCKNPIEHYHHIVHKADNGSDTVENMVGLCKKCHTRVHKNQKVEEKVLSKKEGLEKKFAGTSILNQIFKPYITWLIKTFGEDHVFITDGKTTAKFRNNHNIPKTHELDAYCIACSILENPIINYDCVVFEEKQFRHHNRQLINSTRERKYYHVDRVKTTKTLKNGKQVVKTELKNKTLVATNRKKRMDQKTDSLREYHMKLRQKYDKQTVKKMISELVVVKSTRGYRDQNTIMPGAVFMYHGKHYVLSGTSNQGQYFRAVGQGKTNFPTKDCKIVRKNTGLVYLY

SEQ ID NO: 23224 - protein, 420 aa, unidentified
  REGION 1..420: note = Human gut metagenome
MQYVYVLNKHGEPLMPCSPGKARILLKQQKACVVKRTPFTIKLLYGSAGYKQPITLGVDAGSKHVGLSASTEKRELYSEEFTPRNDVVELLSTRRQNRRSRRNRKTRYRAPRFNNRIHSKHKGWLAPSVEVKIQEHITVIKRICRILPITLVRVETAEFETQRLKAMLSGKPLPVGTDYQLGEMYDEYNARQYVLRRDNYTCQRCGAHTTKKKTVKLHVHHLESRKTGGNAPSNLITLCVDCHKAFHAGKVKLDGKKRGKSLKDAAFMGAMRNTLLTRLRNELNIPVQNTYGYITKLLREQNDIKKSHVNDARCISKHPLAEPCSVCYRTKAIRHHNRQTHKANFSKGGIRKRSQMPYLVEGFRLWDKVLYKGQECFVSGRRSSGSFALKKLDGTSISKGVTFKKLRLLEPATNYLIERM

SEQ ID NO: 23225 - protein, 431 aa, unidentified
  REGION 1..431: note = Human gut metagenome
MPNKVYVINKHGRPLMPCSPAKARHLLDAGKAKVKKRTPFTIQLVYGSSGYTQEVILGVDAGSKTIGMSVSTTKEELLSAEVKPRNDVVDLLSTRREFRRARRNRKTRYRKPRFDNRVRSKHKGWLAPSVEVKIQEHITTIRRVYGILPVSKVVVETAEFDLQLLKAIADGKPVPQGEDYQKGEMYGHYNVRQYVLWRDDYTCQCCGAHATKKKEVRLHVHHLESRKVGGDAPDNQVTLCESCHEKLHKGLIAEKDFKKRKRRSTRDATFMGIMRKTLMQRLYSELPIPVIETRGYITKATREKLLVLPKSHTNDALAIAQGKRGFNVGYLPEIAQIDKIYTIRPVRHHNRQLHKAAILKGGIRKSNQVGKYVFGYCLFDKVQFNGQDCFIWGRRTTGIFTIKTINGKMIKDGISFKKLKPVEKSTSYLIA

SEQ ID NO: 23226 - protein, 428 aa, Enterococcus sp.; identical to SEQ ID NO: 4335

SEQ ID NO: 23227 - protein, 472 aa, unidentified
  REGION 1..472: note = Human gut metagenome
VVDNRLLSIKPLINIGEGVIYSSICTGLSLQTYQKRKEVPCMVYVLDINGQPLMPTTRHGKVRRLLNSHLAKVVKRCPFTIQLLYQSTKEIQPVSLGVDAGSKHIGMAATTEKKVVYQEELSPRNDVVKLLSLRRASRSSRRSRKTRYRKPKFNNRVHSKHKGWLAPSVEVKIQEHITAIKRICQILPISEIQVETAEFDFQRLKAMKEWKPLPVGTDYQLGEQYDFYNTRQYVLHRDGYTCQCCGTHDNNIKLHVHHIESRQTGGDAPSNLITLCEHCHKALHKGKLELPKGKKRGKTYRDATFMGIMRKTLLERLRKEVDIPVSGTYGYITKYLREKTDLEKSHINDAICISKYPYAKPLDTYYLTKMVRNHNRQIHKSNFSKGGIRKHNQAPYLIKGFRLFDKVLYQGKEYFIFGRRATGYFDIRTLDGTKVNKGSISYKKLRIQDTAKAYLKEARAIPHMNKFTCVLA

SEQ ID NO: 23228 - protein, 473 aa, unidentified; identical to SEQ ID NO: 3562
  REGION 1..473: note = uncultured beta proteobacterium

SEQ ID NO: 23229 - protein, 429 aa, unidentified
  REGION 1..429: note = Human oral metagenome
MLVYVLKQNGQPFMPTKRFGKVRRLLKTKKAKVVRREPFTIKLLYEPETDVVQECYCGVDTGSRHIGVAVVSNDKVLYQSQTELRSDIKRKMDARRMYRRNRRQRKTRYRKPRFLNRKNSIKKDGLLPSVKHKVQAHIDEIEFCKKILPISDSNLVIEVSQFDTALMKDPSLNSEKIKHWGYQQGFNYGYSSRREAILHRDNYTCQCCGKKNCRLEVHHVKFKSNDGTDDEENLITLCEDCHKGVHAGTVVLSKKPKKSKNLKYATHMSIIRSYLLKRYPNAIETFGFVTSENRNHLNLPKDHYIDACVIASGGLEIKQLDVIFYKRRVSKGNYQLTKGVRGELKIPTGKICGFRKFDKVEYLGNVYFIKGRMSKYGYCFLTDIFGNKIDFSCMTRGTKTPKLSSCKRISARSSCLCIRKKITLNINNI

SEQ ID NO: 23230 - protein, 477 aa, unidentified; identical to SEQ ID NO: 8085
  REGION 1..477: note = Human gut metagenome

SEQ ID NO: 23231 - protein, 421 aa, unidentified; identical to SEQ ID NO: 11150
  REGION 1..421: note = Human gut metagenome

SEQ ID NO: 23232 - protein, 369 aa, unidentified
  REGION 1..369: note = Human gut metagenome
VDTGSGTIGTAVSNDNSDIVYMSEVIVRNDIMDKMTQRRKYRKNRRGRKTRYRKARWLNRANSTKTDRFSPTMQSKLHSHVKEIEYIKSILPITTMVFETGQFDTHLMKNPNLANPKVKHWGYQKGGNYGFENTKAMVLNRDNYTCQCCKGKHKDSKLEVHHIIFRSQGGSDEESNLITLCHTCHKDLHSGTINFKLKGKLKGNLKYATQMNSIRKQLFRIYPYAIETFGYVTKANRLVLGIDKEHYYDACTIATQGNIFTVKSNLYKKKCVSDGDFQKTKGIRSEQPIVTDKICGFRKFDKVRYFGNDYFIKGRMATGYAVLMDIDGNKADFSAMPKGYKTPKMVKLKRIEARTTWMITTVEVTPNIA

SEQ ID NO: 23233 - protein, 470 aa, unidentified; identical to SEQ ID NO: 2825
  REGION 1..470: note = Human gut metagenome

SEQ ID NO: 23234 - protein, 426 aa, Hydrocoleum sp.; identical to SEQ ID NO: 20690

SEQ ID NO: 23235 - protein, 407 aa, unidentified
  REGION 1..407: note = Human gut metagenome
MPTTRHGKVRRLLNNHLAKAVKRCPFTIQLLYQSTKETQPVSLGVDAGSKHIGLAAATEKKVVYQEELIPRNDVVKLLSVRRALRYSRRNRKTRYRKSRFNNRVHSKHKGWLAPSVEAKIQEHITAIKRICQILPVSEIHVETAEFDLQRLKAIEEGKPLPVGTDYQLGEQYDFYNTRQYVLHRDGYTCQCCGTHDNNVKLHVHHIESRQTGGNAPNNLITLCEHCHKALHEGKLKLPKGKKRGKSYRDATFMGITRKTLLERLKKEVDVPVTGTYGYITKYWREKAGLEKSHINDAVCISKHPYVEPLDTYYLTKAVRHHNRQIHKVNFSKGGIRKRNQAPHLVKGFRLFDKVLYQGKECFIFGRRVSGRMDIRLLDGIRINASVGYKNLELLELRKAYLTERRTC

SEQ ID NO: 23236 - protein, 442 aa, unidentified; identical to SEQ ID NO: 9771
  REGION 1..442: note = Human gut metagenome

SEQ ID NO: 23237 - protein, 470 aa, unidentified; identical to SEQ ID NO: 2949
  REGION 1..470: note = Human gut metagenome

SEQ ID NO: 23238 - protein, 475 aa, unidentified; identical to SEQ ID NO: 6136
  REGION 1..475: note = Human gut metagenome

SEQ ID NO: 23239 - protein, 439 aa, Lactobacillus sp.; identical to SEQ ID NO: 17618

SEQ ID NO: 23240 - protein, 423 aa, unidentified
  REGION 1..423: note = metagenome
MVYVLNIDGQPLMPTDRHGKVRHLLKDGRAEVVKCCPFTIRLLYDSTHYTQDIVLGVDAGSKHIGLSGTTETKELYASDVELRNDIVDLISTRRQNRRSRRNRKIRYRKARFQNRVSDKKDWLAPSIRQKVDTHMTVVSRVCKILPVTKIIVETASFDIQKIKDPDISGTGYQHGEQLDFWNVREYVLFRDGHTCQCCKGKSKDPVLNVHHIESRKTGGDAPNNLITLCETCHKGYHSGAVQLPKAIHRGMRFKDAAFMGIMRWAFYNKLKEVYEPQDIEVSMTFGYLTKNTRIRHYLPKEHYIDARCISGHPEAIPSNEVFYQKKVRCHNRQIHKNTILKGGVRKRNQAGYLVKGFRLFDKVAYKGREYFIFGRRQSGFFDLRNLSGCKVNKGSLSYRKIGFLEPRQYYLCERRVMDTQGCA

SEQ ID NO: 23241 - protein, 420 aa, Moorena sp.; identical to SEQ ID NO: 7078

SEQ ID NO: 23242 - protein, 416 aa, unidentified
  REGION 1..416: note = metagenome
MVYVLDKNGQPLMPTDRHRKVRLMLQSGQAKVIKRCPFTIQLNYDSGHQTQEISLGIDAGSKHIGVSATTKIKVLYEADVELRNDIVNLLSSRREFRRGRRNRKTRYRQAKFNNRRRGNGWLAPSIRQKIGTHLTVVENICKMLPISRIMVETASFDIQKIKNPDIQGAEYQQGDQLEFWNVREYVLFRDGHICQCCKGKSKDKILNVHHIESRKTGGNAPNNLITLCETCHTGYHKGTVQLPKAIKRGMRFKDAAFMGIMRWAFYEALKQQYEPVGTPVHNTYGYITKHTRIAYNLPKEHYVDARCISGNPEASSNGEYYYQKKVRCHNRQIHKLTVLKGGIRKQNQATYLVKGYRLFDKVSYQGKGYFVFGRRQSGFFDIRTLSGEKVNKGSLSCKKLKFIATRTHYLTERRAV

SEQ ID NO: 23243 - protein, 422 aa, unidentified; identical to SEQ ID NO: 5333
  REGION 1..422: note = Human gut metagenome

SEQ ID NO: 23244 - protein, 421 aa, unidentified; identical to SEQ ID NO: 19222
  REGION 1..421: note = Human gut metagenome

SEQ ID NO: 23245 - protein, 424 aa, Moorena sp.
MRVFVLDKNLKTLDPCRPARARLLLKQGRAKVFRRYPFTIILSDLEVENCTTHHHQLKIDPGAKTTGLAIRQNNTVIWGAEITHRGFQIRDALTSRRELRRSRRNRKTRYRKPRFLNRKRPERWLAPSLMSRVHNILTWVKKLIRFCPIAGISQELVRFDTQKTENPEISGTEYQQGTLYGYEIREYLLEKWNRKCAYCGTTDTKLEIEHIKPKSLGGSDRVSNLAIACHDCNQAKGNQEIKQFLSGKPDVLKRILSQAKRPLADAAAVNATRWKLYKELKSTGLPVETGSGGRTKYNRCRFNLPKTHWLDAACVGNVQSIYVENYQPLLIEAKGHGTRQICRTDKFGFPKRYCSRTKIHKGFQTGDIVKAVVTKGKKIGTYVGRVATRKTGSFNISTANGLIQGISHKYCQPIHKKDGYAYTI

SEQ ID NO: 23246 - protein, 386 aa, unidentified
  REGION 1..386: note = Human gut metagenome
VLQAPNPVQHWRRMSTGLRAVQAEPAGIRKGDALKVFVLNMRGRPLMPCSPAKARHLLKAEKAVVKRRTPFTIQLRIATGETKQNVTLGVDAGAKHVGLSATTEKEEVFASEVELRQDITGLLAARLSLRRDRRHRKTRYRAPRFLNRVRSKHKGWLAPSVENRIQAHMSRIDAVCRLLPVTKIVIETASFDIQKIRNPEVEGTGYQQGDQLGFWNVREYVLFRDGHVCQHCHGHSKDKILNVHHLESRKTGGDAPNNLITLCETCHKAYHAGKIKLKVKRGQSFRAEAFMGIMRWTLLDRVRKAHPGLPVENTYGYLTKHKRIALGLPKTHCADAFCIAGNLKALRRGDFLFQQQTRKHNRQIHKEALQKYPEQSFAQKFGLCNR

SEQ ID NO: 23247 - protein, 477 aa, unidentified; identical to SEQ ID NO: 2707
  REGION 1..477: note = Human gut metagenome

SEQ ID NO: 23248 - protein, 436 aa, unidentified
  REGION 1..436: note = Human oral metagenome
MTKTLTTQTTQACLLDQNGKPLMPTTRLGKVYRLLKTQKAHIVSYEPFTIQLDYEPDTHIIQPMTLGVDSGAIHSGYSVANEHREYYSAEIIARNDISNRLSDRRMYRQTRRSRKTRHRKPRFNNRKNKKKGWLPPSLEQKVATQLNEIDHLHRYFPIETIIVEVAEFDIQKIKNPDILGIEYQQGTLQGYNIRNYLLEKHGRKCFYCGKTVSDFEVEHMFPKSKGGSNRIDNLTLSCHDCNEKKGTLTAEEFIQQTLPAKKAVVKLKQLPNEKRLFKYMAYMNATRWALYDAIKERYPNVKMTYGYITKYERIQAGLPKTHHIDAKCITGFATVPSMSQTVVKVKMRRHNRQLHRATFSKGHIRKVACLPTVTFGFQLYDLVLFDNHRYYIKSRRSSGAFALVSVEGLKDENRNYKKLTLLAHTNAYLTNRYVNA

SEQ ID NO: 23249 - protein, 535 aa, unidentified
  REGION 1..535: note = metagenome
VLRPRYQYPTRWYPSREQGSGNGCLPGEEGTDLEQEVSGTLSKGDHSHPGEQDFCVPAITIQGGPAMSVFVVGLNGCRLMPTSERKARLLLKHGKASVYRKVPFTIKLNYKTGSTTQSGYLGIDTGSQHIGVSVVREDGTVLHKEEIGLRDSMSKRKLMQSRASSRRGRRHRKTRYRHPKWRPKAKRVYCEIPDRKGRHWKKKEITFASKRAKGWLPPSLQSKTDHHIWWIKKLQDLLPEGYRLSIELGRFDPARLKDPEIHGELYQKGPQYDYENVRAYVLNRDRYTCQVCGKKGGKLHVHHILYRSHGATDDPQYMATVCSDCHNTENHQQGGILYQWMQKQKKFTRGLRDATFMNILRKRLIEAFPGATFTYGNITKADRERLRLPKSHGNDATAIAIVKTGIMTVKDKEPVIYIQQVRRKKRSLHEETPRKGRKEPNRKASRYDKNTKAVTVTKRKNKKISITGCLFDRVELNGKKGWISGFTDKSCYVKDENGQYIRTSPKYKQVSLSKLKILHHCGNWAIGARQSLGKG

SEQ ID NO: 23250 - protein, 465 aa, unidentified; identical to SEQ ID NO: 15318
  REGION 1..465: note = Human gut metagenome

SEQ ID NO: 23251 - protein, 289 aa, unidentified
  REGION 1..289: note = Human gut metagenome
LKGFDNRDAAVYDLQDGKCLLCRKEIEHYHHIVPKSRGGSNTLGNIAGLCKSCHDRVHKDTMYAKRLEDLKKGLDKKYGALSVLNQAVPFLCQRLEQEFGKEHVFYCTGRDTARVRTALGYQKTKENQLHEVDAWCIGLLALGKAPEKLPEFYTHRILQFRRRDRSLIDAQVERTYKLDGKTVAKNRKKRTEQKTDSLEEWFEKQVKAFGKKEAKRKRSRLTVVKAYRRYNDPDRLMPGAVFLYQGVRYVMRGRHCKGAYLQAVGMGSKDFPVKQCKILKQNTGLVFVA

SEQ ID NO: 23252 - protein, 414 aa, unidentified; identical to SEQ ID NO: 10282
  REGION 1..414: note = metagenome

SEQ ID NO: 23253 - protein, 387 aa, unidentified
  REGION 1..387: note = Human gut metagenome
KAHVVSRVPFVVQLDYESTTYTQEVSLGIDAGSKHIGVSASSEKKELLAAQVELRNDVVNLLSTRRELRRTRRNRKTRYRKVRFDNRKRKDGWLAPSIELKVESHLKVIRLVHKLLPITKTTIEVAQFDAQKIKNPDIKGEEYQQGEQMGFWNVREYVLARDGHRCIHCKGKSRDPILNVHHLESRKTGGNSHSNLVTLCETCHKAYHRGEFELKIKRGSSLRDAAVMNIMRWAVYERAKEEFGNVNLTYGYITKHTRIENGIAKTHAADAFCIAKNVHAMRLSSFFMCRCVPRHTRALHVANPKKGGIRRSCIASHKIGKSRFQRFDMVRWMGKECFIFGSTNGKPVLRDIKGIKMHENASVNIKTIKFLRRLRNNILMEEKTSES

SEQ ID NO: 23254 - protein, 460 aa, unidentified
  REGION 1..460: note = Mouse gut metagenome
MSVFVISKNSERLMPTNRLGKVRHMLKDGRAIIYQRNPFTIQLTYETTEYVQPVELCQDTGYQHIGTSVKSESEEYVAAQHDLLLSEKGNHDDCRKYRRDRRNRKRYRAPRFDNRRAAKKPGWIAPSLRNKADRHIDIIRRYIAVAPITSVTIEIGQFDPQVLKAVAEGKPIPTGIAYQHGPMYGIDTLREAVFQRDKHTCIFCGRGLKQGAVLHTHHVYFWRDQHGDSLDELATCCEKCHTPKNHKKGGKLWGYDKKLPRYSGAAFMNTVRWYIYNQLQEYFPDTEIHITYGAATKRARLDLGLDKSHVNDAFAMGKLHPGKRAKAQLFVKRRRNNRCLEKFYDAKYIDVRDGKVKTGAELGCQRINRRELRISDKSQRIYRGKKKSSGRRSVRKQRYSIRPGDVLICNNRKTTAEGVHCNGTRVTIERQSYSIKNITLLYHMGGWIKTTINGKISKTT

SEQ ID NO: 23255 - protein, 451 aa, unidentified
  REGION 1..451: note = Human gut metagenome
MKVFVKNMRGQALMPCSPRKARILLKQKKAKVVDYRPFTIQLCYPTGEAKQEVIIGVDQGAKHIGIAVVSQGKVLAKGEVELRQDVHSLLQTRAEYRRGRRYRKTRYRKARFLHRTRPEGWLPPSIRGKLDANFAWIDKFCSLVPNPKLRIEVGKFDTAKMINPDIKGVDYQHGQTYGYYDVRYFVFARDNYTCQVCHKKNKILHTHHIIYKSKGGSDRADNLITVCTECHTHDNHQEDGILYQWMLKHKKTKQYKEPPFMNILRIRTYKKYSEADITYGSVTTERRKVLELEKTHYNDAIAITGIEKIDKNIDECFWIKQFRKKKRSLHEATARKGRKEKNIKAKRNSKNTKQVNGWFLNDEVICYGKRGWITGFNSAASSSPAAFVVDKDGNYITVPGKSYKQVNLKSLKLIRHNNNWQYAIAKEEKSAASPEIPLPPVEVRESFLAAC

SEQ ID NO: 23256 - protein, 354 aa, Moorena sp.; identical to SEQ ID NO: 10388

SEQ ID NO: 23257 - protein, 482 aa, unidentified
  REGION 1..482: note = Marine sediment metagenome
MKQKLSVKLKNTPRDTSLVSCSGSSVLNKEETLSVQNIVLTDNISEENHSQHRGSSDLRVQNIVYVLNMRGEPLMPTTQQKANKLLRKKKAKVITTKPFTIQLNYPTGENIQLITLGVDAGYLKIGFSAITNTKELISGEVQLRNDVSKKLSERRMYRRNRRNSLWYRKPRFNNRASSKKKGWLAPSIQHRLDSHIRLIEIIKKILPISEIVVEVASFDTQKMQNPEIIGVKYQQGELQGYEVKEYLLEKWNRKCTYCKKTNIPLEVEHIVPKSRGGSDRVSNLTISCSKCNQKKGNKTAEEFGYPEIQEKANKSLKMTAFMNSVRWKLVKQLNKVMPYSVSHTYGYITKYKRAELGLSKSHINDAFMITNGINQKRCKPFTITQTRRNNRSIQLNRKRFKRSIRRQRYKFQPNDMVRFNRNIYKVKGVFNYGTWVRLSDDFNIINTNIKNVSLLTYGKGLQFRCPIHLPPNSNDFGRSLLG

SEQ ID NO: 23258 - protein, 466 aa, unidentified
  REGION 1..466: note = Human gut metagenome
LSIKSLINIGEGVIYSSICTGLSLQTYQKRKEVPCMVYVLDINGQPLMPTTRHGKVRRLLNSHFAKVVKRCPFTIQLLYQSTKEIQPVSLGVDAGSKHIGMAATTEKKVVYQEELSPRNDVVKLLSARRTLRRTRRNRKTRYRKPRFNNRVHSKHKGWLAPSVEVKIQEHITAIKRICQILPISEIHVEISEFDLQRLKAMEEGRTLPVGTDYQLGEQYDFYNTRQYVLHRDGYTFQCCGTHDNNIKLHVHHIESRQTGGDAPSNLITLCEHCHKALHKGKLELPKGKKRGKTYRDATFMGIMRKTLLERLRKEVDVPASGTYGYITKYWRERAGLEKSHINDAICISKYPYAKPLDTYYLTKAVRNHNRQIHKSNFSKGGIRKRNQAPYLVKGFRLFDKVLYQGKEYFIFGRRATGYFDIRTLDGTKVNKGSISYKKLRIQDTAKAYLKEARAIPHMNKFTCVLA

SEQ ID NO: 23259 - protein, 538 aa, unidentified
  REGION 1..538: note = Human gut metagenome
AKASSSQGKHNLLLRQERLIVKEVAYMSTVYVLNKDGKPLMPTTRCGHVRHLLKEQKARVVTSKPFTIQLLYEADDVVQSLCLGIDPGRTNIGVAAVKADGTAVFTAHLETRNKEIPKLMKKRKESRRARRTNGRRCRRQRRAKANGTISKKCVKNDTAQNGSVSKRAKEIGVIKRHLPGCEKDVLCIGIKNKEAKFSNRTRPEGWLTPTANQLLQTHINLVKKIQKFLPISDVVLEINKFAFMRLDNPNVQKWQYQQGPLYQKANLEETVSEMQEHHCLFCKKKIDHYHHVVPQHKNGSNTIDNIIGLCTQHHDLVHKDATWQKRLAKKKTGLNKKYGALSVLNQIIPALTKELSSLFPKHFFVTNGKSTYDYRAAHGVSKDHWLDAYCIACSVLPNDTCDKTINSRVPYELKQFRRHDRRALNNENMSRVYTFNGKMVATNRHKATEQTTDSLEEFRQRQPNDVCNLKVKEHHPTYRNMNRNYPGSVFLVGNQVHVMQGIAGSKDGEATTYKDTNANSIAAGKCKFVAKNSGILFV

SEQ ID NO: 23260 - protein, 477 aa, unidentified; identical to SEQ ID NO: 2707
  REGION 1..477: note = Human gut metagenome

SEQ ID NO: 23261 - protein, 431 aa, Moorena sp.
MQRVLVVDTNRQPLMPCHPARARELLNRGKAAVYRHYPFTIILKERAGGNMQPVACKIDPGSRQTGIALVADFQRGKRLVWAAVLEHRGEPIKAALLARRQSRRSRRNRHSGYRPARFDNRRRPQGWLPPSLQSRVANLMTWVKRLYGLTPVKSLSMELVKFDTQLMQNAEINGVEYQQGELVGYEVREYLLEKWGRQCAYCRAKDIPLEIEHITPKSRGGSNRVGNLTLACHACNQQKGNQTAAEFEYPEIQKRARQPLKDMAAVNATRWALFGRLQSTGLSLEVGTGGRTKFNRTHQAYPKAHWIDAACAGKSGEKVYLNPHQMYLHIKATGHGTRQMCRTDKYGFPIRHRLHQKRHFGFQTGDTVMAIVPAGKYSGTHLGRAACRATGSFDLKTDTGKVTVSYKHLKTIHHSDGYTYTKGSGAVPPYG

SEQ ID NO: 23262 - protein, 427 aa, Moorena sp.; identical to SEQ ID NO: 10130

SEQ ID NO: 23263 - protein, 433 aa, Moorena sp.; identical to SEQ ID NO: 5255

SEQ ID NO: 23264 - protein, 463 aa, unidentified
  REGION 1..463: note = Human gut metagenome
MSTCVCVLSNNGERLMPTIRLGKVRHLLKDGKAKIIKHHPFTIQLLYDSETNIQPIEICEDVGYNYIGISVKSQSHEYVSAQYDTLQDEKSCHDACRRMRRTRRNRLRYRQKRFDNRKRDKGWLAPSLKHKKELNVNVIKMYCEVVPITHATVEVGSFDTMLVKAIEEGKATPEGADYQKGPRYNLATLREAVFYRDNYTCQVCGREASEGAILHVHHMFYWKGRHDNSLSELITVCEKCHTPANHQKGGKLYGFGEDIKFANLSGAAFMNTVRWQIVNELYAAFGKPFVTFTYGAMTKEKRIALHLEKSHNNDAYAMGEFHPNCRCTFEHYEKVRRNNRILEKFYDSRYIDIRTGEIATGKELFNGRINRSHKKDSENLHKYRGKRIRKGYRALRRKKVALNPGDLVSLNGEILTVHGTHTKKNGSVNVEFKTPSKSGKKSTSLKKLKIIKTISPMRSAWDK

SEQ ID NO: 23265 - protein, 498 aa, unidentified
  REGION 1..498: note = Human gut metagenome
MTVVYVLSASGEPLMPTTRCGHVRILLKEKKARVVERNPFTVQLAYETEGVTQPLYLGIDPGRTNIGAAVVREDGECVFTAQLTTRNKDVPKLMKARKLYRMAHRRLKRRCKRQRRAKAAGTISPQKEIQRLLPGCEKPIICKGIRNKEVRFNNRKRPAGWLTPTANHLLQTHINLVKKLKKFLPITDVVLEVNQFAFMAMENPRIQRWQYQRGPLFGKGSVEEAVYAAQDGHCLFCAKGIDHYHHVVPRRKNGSETLENRVGLCEEHHRLVHTEDAWTKKLAAKKAGMNKKYHALSVLNQIIPTLTERLAELFPQHAFVTTGQGTYHFRENHDIPKDHYLDAYCIACSVLSNAQKVSHPKREPYDMRQFRRHDRQACHKANITRKYYDADGKLVAANRHKAMEQKSDSLVEYRENHSEVEVSQLRVKAHFPQYKEMSRPMPGSLLATNGGNVFTLMRSDGKHNGKADYFVDTQGIKHLTKRCILLQNNQGIIFAGIG

SEQ ID NO: 23266 - protein, 458 aa, Scytonema sp.; identical to SEQ ID NO: 6085

SEQ ID NO: 23267 - protein, 424 aa, unidentified; identical to SEQ ID NO: 5018
  REGION 1..424: note = Human gut metagenome

SEQ ID NO: 23268 - protein, 502 aa, unidentified; identical to SEQ ID NO: 6049
  REGION 1..502: note = Human gut metagenome

SEQ ID NO: 23269 - protein, 427 aa, unidentified; identical to SEQ ID NO: 4946
  REGION 1..427: note = Human gut metagenome

SEQ ID NO: 23270 - protein, 416 aa, unidentified
  REGION 1..416: note = Human gut metagenome
MVYVLDKNGQPLMPTDRHRKVRLMLQSGQAKVIKRCPFTIQLNYDSGHQTQEISLGIDAGSKHIGVSTTTKIKVLYEADVELRNDIVDLLSSRRELRRGRRNRKTRYRQAKFNNRRRGNGWLAPSIRQKIGTHLTVVENICKMLPISRIMVETASFDIQKIKNPDIQGAEYQQGDQLGFWNIREYVLFRDNHTCQCCKGKSKDKILNVHHIESRKTGGNAPNNLITLCETCHTGYHKGTVQLPKAIKRGMRFKDAAFMGIMRWAFYEALKQQYEPVGTPVHNTYGYITKHTRIEHNLPKEHYVDARCISGNPEASSNGEYYYQKKVRCHNRQIHKLTVLKGGIRKQNQATYLVKGYRLFDKVSYQGKGYFVFGRRKSGFFDIRTLSGEKVNKGSLSCKKLKFIATRTYYLTERRAV

SEQ ID NO: 23271 - protein, 428 aa, unidentified; identical to SEQ ID NO: 17256
  REGION 1..428: note = Human gut metagenome

SEQ ID NO: 23272 - protein, 381 aa, unidentified
  REGION 1..381: note = Human gut metagenome
FTIQLQYESTTHTKNINLGIDAGSKTIGVSVTTDTKVLYESEVVLRNDIVELLSGRRALRRSRRNRKTRYRKPRFDNRRRPDGWLTPSIRQKIKTHVTVVENVMKILPVTKIIVETASFDIQKIKNPEIEGAEYQYGEQLDFWNVREYVLFRDGHTCQCCKGKSKDNILNVHHIESRKTGGNAPNNLITLCETCHKAYHKGVITLPKEIHRGMRFRDAAFMGIMRWAFYDRLKELYTPFGVEVINTYGYITKNTRIEHGLPKEHYVDARCISGNPAAKPLGHYYFQKKVRCHNRQIHKNTILKGGIRKRNQAAYLVKGYRLFDKVKYQNQEYFIFGRRSSGFFDIRTLDGTKVNKGSISCKKLQLVEKSKHYLTEQRKVAA

SEQ ID NO: 23273 - protein, 410 aa, Moorena sp.
MSYVFVIDQEKRPLDPVHPGRARKLLSSGKAAVYRRFPFVLILKHPVSEAHPQPLRLKIDPGSKTTGLAVLNDTSGQVLWAAELVHRGEEVHQALQKRAGVRRGRRSRHTRYRAARFSNRRRKRGWLAPSLCSRMQNVQTWTRRLMRWCPLGAISYEAVRFDTQAIQNPEIKGVAYQHGTLAGLEVKEYLLLKWRHKCVYCQKGDIPLEVEHIVPKRRGGSDRITNLTLACEACNQQKGSQTAQAFGFPHLQAQALQPLKDAAAVNSTRWALYERLKATGLPIEVSTGGQTKWNRKQRGIPKCHWLDAVCVGPSTPERVQWQHVIPLLITARGRQCRQLCNVDGWGFPRSRPKGPSKVFGFQTGDMVQAVVTRGKRMGTYVGRVAIKTDGYFKITGTHGMVEGIHGRHCP

SEQ ID NO: 23274 - protein, 447 aa, unidentified; identical to SEQ ID NO: 17762
  REGION 1..447: note = Human gut metagenome

SEQ ID NO: 23275 - protein, 420 aa, unidentified; identical to SEQ ID NO: 14093
  REGION 1..420: note = Human gut metagenome

SEQ ID NO: 23276 - protein, 400 aa, unidentified
  REGION 1..400: note = metagenome
LRVFVLNKRGKPLMPCSPAKARLLLKEKKAIVKRRTPFTIQLTIATGETKQPVGLGVDAGYKHVGLSASTDKAELYASQVELRQDITDLLSARRALRRARRNRKTRYRAPRFNNRIRTKRKGWLAPSVENRINAHLSRIEAVLRLLPVTKITVETASFDMLLLKNPDIAGKEYQEGEQLGFWNVREYVLFRDGHVCQHCYGRSKDPVLNVHHLESRRTGGDSPGNLITLCETCHKALHRGEITLKAKRGQSFRAQAFMGIMRREVLNRLKASYPELKVHETYGYLTKHARIANGIVKSHGADAFCIAGNLGAERLGEFFFQKQTRRNNRQIHKLSILKGGIRKRNQAPFEAKGFRLFDKVACQGEEGFIFGRRSSGSFDVRKLDGTRISAGISYKKLRLL

SEQ ID NO: 23277 - protein, 501 aa, unidentified
  REGION 1..501: note = Human gut metagenome
MTMRYVYVLDVDGKPLMPTCRYGKVRRMLKSGQAKTVDTLPFTIQLTYQTKTKILQPVTAGQDPGRTNIGLAAAREDGTDLYRSHCETRNKEIPKLMAERLAHRRASRRGERLARKRLAKKFGTIAKKLNGRLLPGYKEPLAVKDIINTEAKFNARLRPEGWLTPTATQLLRTHLNLLERVSRILPVTDVAIEINRFAFMELADPDKKHSEIDFQHGALFGTGGLEQAIREQQQDRCLLCGKRDIEHFHHIIPRTKRGSNTIANLAGLCEQCHTLVHQSEEAKNRLEEKKQGLTKQYGGTSVLNQIIPSLVKELEKRYPGQLHLMTGRDTKAFREKHGLEKDHDVDAYCIAASRMENIKPKIQTEPFEIQQFRKHNRANIHHQTERTYKLDGKVIAKNRKKRMDQKTDSLEDWFATMTEQYGLEKAMRLRARLTVKKSTRHYNTKDRIMPGLVFRYGTKRYVMTGQITGGRYYRAYGAGNQNFPAQKVTMLKQNTGLVYVA

SEQ ID NO: 23278 - protein, 346 aa, unidentified
  REGION 1..346: note = Human gut metagenome
LRQDITDLLSARRALRQSRRNRKTRYRAPRFDNRISTKRKGWLAPSVENRINAHLSRIEAVLRLLPVTKITVETASFDLQLLKNPDISGKEYQEGEQLGFWNIREYVLCRDGHVCQHCYGRSKDPVLNVHHLESRRTGGDSPGNLITLCETCHKALHRGEITLKTKRGQSFRAETFMGIMRWEVLNRLKASHSELKVHNTYGYLTKHARIENGIAKSHGADAFCIAGNLGAERLGEFFFQKQTRRNNRQIHKLSILKGGIRKRNQAPFEVKGFRLFDKVACQGEEGFIFGRRSSGFFDVRKLDGTRISAGISCKKLHLLEKRRTYLTEIRKEEALPPLPEGRGLRA

SEQ ID NO: 23279 - protein, 427 aa, unidentified; identical to SEQ ID NO: 14799
  REGION 1..427: note = Human gut metagenome

SEQ ID NO: 23280 - protein, 414 aa, unidentified
  REGION 1..414: note = Human gut metagenome
MPCSPAKARLLLKEKKAIVKRRTPFTIQLTIATGETKQPGSLGVDAGYEHVGLSASTEKAELYASEVELRQDITDLLSARRALRQSRRNRKTRYRAPRFNNRLCTKRKGWLAPSVENRINAHLSRIEAVLRLLPVTKITVETASFDLQLLKNPDISGKEYQEGEQLGFWNIREYVLCRDGHVCQHCYGRSKDPVLNVHHLESRRTGGDSPGNLITLCETCHKALHRGEITLKAKRGQSFRAEAFVGIMRWEVHNRLRALHPGIEVSNTYGYRTKHARIANGIAKSHCADAFCIAGNLGAERLCEFFFQKQTRRNNRQIHKLSILKGGIRKRNQAPFEVKGFRLFDKVACQGEEGFIFGRRSSGFFDVRKLDGTRISAGISCKKLRLLEKRRTYLTEIRKEEALPPLPEGRGLRA

SEQ ID NO: 23281 - protein, 436 aa, unidentified
  REGION 1..436: note = Human metagenome
MTKTLTTQTTQACVLDQNGKPLMPTTRLGKVYRLLKTKKAHIVSYEPFTIQLDYEPNTHIIQPMTLGVDSGAIHSGYSVTNEHREYYNAEVIARNDISRNLSNRHMYRRTRRTRKTRYRKPRFNNRKNKKKGWLAPSLQQKIAVQLNEIDHLHRYFPIETIIVEVAEFDIQKIKNPDISGIEYQQGTLQGYNIRNYLLEKHGHKCFYCGKTVSDFEVEHMLPKSRGGSNRINNLTLSCHDCNEKKGTLTAEEFIQQTLSAKKAVSKLKQLPNEKRLFKYMAYMNATRWALYDAIKGTYRNVKMTYGYITKYNRIHAGLPKAHHIDAKCITGFLTVPSMSQTVVKVKMRRHNRQLHRASFSKGHIRKIACLPTTVFGFQLYDLVCFNNHRYYIKSRRSSGAFTLASVEGLKNEKRTYKKLTLLAHTNAYLTNRYVNA

SEQ ID NO: 23282 - protein, 292 aa, unidentified
  REGION 1..292: note = Human gut metagenome
LSRIEAVLRLLPVTKITVETASFDLQLLKNPDISGKEYQEGEQLGFWNIREYVLCRDGHVCQHCYGRSKDPVLNVHHLESRRTGGDSPGNLITLCETCHKALHRGEITLKPKRGQSFRAEAFMGIMRWEVLGRLKASHPELEVNNTYGYRTKHARIANDIAKSHCADAFCIAGNLGAERLGEFFFQKQTRRNNRQIHKLSILKGGIRKRNQAPYEIKGFRLFDKVACQGEEGFIFGRRSSGFFDVRKLDGTRISAGISYKKLHLLEKRRTYLTEIRKEEVLPPLPEGRGLRA

SEQ ID NO: 23283 - protein, 418 aa, unidentified; identical to SEQ ID NO: 4327
  REGION 1..418: note = Human gut metagenome

SEQ ID NO: 23284 - protein, 461 aa, unidentified
  REGION 1..461: note = Human oral metagenome
MRKITETRTGKIVSDADLKLEYLYVGDYGKENNIKADFLGYTKKIEHVKHTKVDLTDKLVVTVSSQKGCPMSCNFCDCPKYGFHGNTSLSELIHQVTGGVAVVGNDKVLYQSQTELRNDIKRKMDARRLSRRSRRNRKTRYRKPRFLNRINSIKKDRLPPSVKHKVQAHIDEIEFCKKILPVSDLILEVSQFDTALMKNPGLINEKVKHWGYQKGFNYGYSSRREAILHRDNYTCQRCGKKNCRLEVHHIKFKRNGGTDNEENLITLCENCHKGIHAGTVELNKKPKKSKNLKHATHMSIIRSRLLKVYPDAIETFGFVTSENRNHLNLPKDHYIDACVIASGGLEFKELDVIYKKRRVSVQDRILTKGIRGEKRMLTGKIFGFKRFDKVKYLGETCFIKGRRSSGAFVLMNIDNNFIDFRDRGGKQNPSYMSIKRITTRKSVLCISERIEREVRLIPILS

SEQ ID NO: 23285 - protein, 402 aa, unidentified
  REGION 1..402: note = Human gut metagenome
GKAKIKKRTPFTIQLVYGSSGYTQEVILGVDAGSKTIGMSTSTKKEEVFAADVTPRNDVVDLLSTRREFRRARRNRKTRYRKPRFNNRVRSKHKGWLAPSVEVKIQEHITSIKMVCRILPVSKVVVETAEFDLQLLKAIEEGKPVPQGEDYQQGEMYGHYNVRQYVLWRDNYTCQCCGAHLTKKKEVRLHVHHLESRKVGGNAPGNLVTLCDRCHEKLHKGLITEKDLKKRKHRSTRDATFMGIMRKTLMQRLCSELPIPVAETRGYITKATREKLLVLPKSHTNDALAIAQGKHGFNVGYLPGIEQIDKIYTIRPVRHHNRQLHKATILKGGIRKSNQAEKYVFGYRLFDKAQFNGQDCFIWGRRTSGYFVVKTIDGKVIHNSASFKKLRLVERASNYLIA

SEQ ID NO: 23286 - protein, 424 aa, unidentified; identical to SEQ ID NO: 3351
  REGION 1..424: note = Human gut metagenome

SEQ ID NO: 23287 - protein, 423 aa, unidentified; identical to SEQ ID NO: 3538
  REGION 1..423: note = Human gut metagenome

SEQ ID NO: 23288 - protein, 411 aa, unidentified; identical to SEQ ID NO: 19170
  REGION 1..411: note = Human gut metagenome

SEQ ID NO: 23289 - protein, 431 aa, unidentified; identical to SEQ ID NO: 6637
  REGION 1..431: note = Viral metagenome

SEQ ID NO: 23290 - protein, 376 aa, unidentified
  REGION 1..376: note = Human gut metagenome
PVSLGVDAGYKHVGLSASTEKAELYASEVELRQDITDLLSARRALRQSRRNRKTRYRAPRFDNRIRTKRKGWLAPSVENRINAHLSRIEAVLRLLPVTKITVETASFDMQLLKNPEISGKEYQEGEQLGFWNVREYVLFRDGHVCQHCHGRSKDPVLDVHHLESRRTGGDSPGNLITLCETCHKALHRGEITLKAKRGQSFRAEAFMGIMRWEVLNRLKASHPELEVNNTYGYRTKHARISNGIAKSHCADAFCIAGNLGAKRLGEFFFQKQTRRNNRQIHKLSILKHGLRKRNQAPFEIKGFRLFDKVACQGEEGFIFGRRSTGYFDVRKLDGTCISAGISYKKLHLLEKRRTYLTEIRKEEALPPPPEGRGLRA

SEQ ID NO: 23291 - protein, 439 aa, unidentified
  REGION 1..439: note = Human metagenome
MVLVIDKHKKPCNTISNAYARILLFKKQAVIHKRFPFTIRLKNDSAVLKDRNYTVKLDPGSKTTGIAITDDKDSVVMLAELEHIGHLIKKDMDSRRIVRKTRRQRKTRYRPARFLNRTKPKGWLAPSVKSRANNVINFIKKYKKFLTINKVMIEHISFDTAQMSSNTKLYGANYQQGPLYQNKLRSFVFNRSNNKCVYCGAKATEIDHVIPRSSGGTNSIYNLVASCRACNKKKSNLTLKAFGKLMNKDYSRLEPKKLPKDAAIVQSARNYMTKEITKLVSDTTLYDAWMTKYNRDQLGLPKQHYYDALSVGEIPSKFNFFADKILQISAKGRGSRQMCRMDKYGFPGTKPKGSKLVEGFQTGDMVKAVVPKGLNKGEHLGRVIIKSSGYFEIKSKNSSVQGINHKYCRLIQKGDGYLYNYKESDFLSAIAKKVMICLH

SEQ ID NO: 23292 - protein, 405 aa, unidentified
  REGION 1..405: note = Human gut metagenome
VLTRKARLLLKQQKACVVKRTPFTIKLLYGSAGYKQPITLGVDAGSKHVGLSASTEKRELYREEFTPRNDVVDLLSTRRQNRRSRRNRKTRYRAPRFDNRVHSKHKGWLAPSVEVKIQEHITVIKRICRILPITLVRVETAEFDTQRLKAMLKGKPLPVGTDYQLGEMYDEYNVRQYVLKRDNYTCQCCGAHPTEKKPVRLHVHHLESRHVGGNAPNNLITLCVACHKALHEGKITLDKGKKRGKPLRDAAFMGIMRNTLLARLKDELNIPVKQTYGYITKLLREKNKIPKSHVNDARCIAKAPNAKPCDTMLYTRALRHHNRQIHKAKILKGGIRKKNQAPYLVKGFRLWDKVRYNGEECFITGRRSSGYFALKKYDGTVISNSASYKKLMLLEAATNYITERS

SEQ ID NO: 23293 - protein, 464 aa, unidentified; identical to SEQ ID NO: 6574
  REGION 1..464: note = Human gut metagenome

SEQ ID NO: 23294 - protein, 404 aa, unidentified
  REGION 1..404: note = Human gut metagenome
LLKEKKAIVKRRTPFTIQLTIATGESKQPVTLGVDAGYKHVGLSASTEKAELYASEVELRQDVSDLLSARRALRQSRRNRKTRYRAPRFNNRLRTKRKGWLAPSVENRINAHLSRIEAVLRLLPVTKISVETASFDMQLLKNPDIAGKEYPEGEQLGFWNVREYVLFRDRHVCQHCYGRSKDPVLNVHHLESRRTGGDSPGNLITLCETCHKALHRGDITLKAKRGKSFRAEAFMGIMRWEVHNRLRALHPGIEVSNTYGYRTKHARIANGIAKSHCADAFCIAGNLGAERLCEFFFQKQTRRNHRQIHKLSILKGGIRKRNQAPFEVKGFRLFDKVACQGEEGFIFGRRSSGFFDVRKLDGTRISAGISCKKLHLLEKRRTYLTEIRKEEALPPLPEGRGLRA

SEQ ID NO: 23295 - protein, 420 aa, unidentified
  REGION 1..420: note = Human gut metagenome
MVYVLNKNNKPVMPCSERKARLLLKQGRAVIYRKDVFTIKLINGSYGYKQHITMGIDCGSKHIGISATTNKKELFSANAELRNDIVKLLSDRRMLRRSRRFRKTRYRKHRFNNRIVKNGWIAPSIKQKIQSHFNLVGFLHKLLPITNIVVETAAFDIQKINNPSIYGSEYQQGEQLDFFNVREYVLFRDNHTCQHCKGKSKDKVLNVHHIESRKTGGDSPKNLITLCETCHKAYHRGEFELNVKRGKSFRDAAFMGIMRWSFYEKLKNIYPNVSMTFGYITKYKRIKLGLDKEHYNDAYCICGNLAAKMLSTHHFIRFIPRHSRVLHMQKFSKGGVRRSASASYWLNGGKPSKIGAMFTMFDKVKFNSVVCFISGSSNGFASLRDINWNKVHGCKTTVTVNKLALVSRRRGSMLFGELCG

SEQ ID NO: 23296 - protein, 451 aa, unidentified; identical to SEQ ID NO: 9167
  REGION 1..451: note = Human gut metagenome

SEQ ID NO: 23297 - protein, 400 aa, unidentified
  REGION 1..400: note = metagenome
MPCSPAKARLLLKEKKAIVVRRTPFTIQLTIATGETKQPVSLGVDAGYEHVGLSASTEKAELYASEVELRQDVSDLLSARRALRQSRRSRNTRYRAPRFDNRIRTKRKGWLAPTVENRINAHLSRIEAILRLLPVTKITVETASFDTQLLKNPDIAGKEYQEGEQLGFWNVREYVLFRDGHICQHCRGRSKDPILNVHHLESRKTGGDAPNNLITLCETCHKAYHAGKIKLKVKRGQSFRAEAFMGIMRWTLLDRVRKTHPKLPVENTYGYLTKHKRIALGLPKTHCADAFCIAGNLKALRRGDFLFQQQTRKHNRQIHKCSILKGGVRKLNQAPFLVKGFRLFDKVRIGGQIGFVFGRRVRGTFNIRRLDKTVIGTDINCKKLSLLETRKTFLTELRKE

SEQ ID NO: 23298 - protein, 456 aa, unidentified; identical to SEQ ID NO: 3342
  REGION 1..456: note = IscB polypeptide

SEQ ID NO: 23299 - protein, 427 aa, Moorena sp.
VFVLDTNKQALNPVHPGRARRLLSSGQAAVFKKYPFTIILKCAASSPHVWPLRVKLDPGSKTTGLAIVNDASGEVVFAASLIHRGHAIRERLEKRRAARRSRRQRKSRYRQSRFDNRGTKKKGWIAPSVQSRVCNVITWVKRLVRLCPITAISQELVKFDLQQMDHPEISGVNYQQGTLSGYEVREYLLDKWGRQCAYCGAKDVPLEVEHINPRSKSGDDRVCNLTLACEPCNTKKGTQDIRVFLAHQPELLAKLLAQAKSPLKDAAAVNITRWVLHAQLKAFGLPLECGSGGRTKFNRITRGLEKTHWCDAACVGASTPAEAEEVQARLSHRGSGESGSSSSLQACRHACWKDVSQSEWGIHDCHGRRDGHGYWQEVLPHAATSRRLWVHTERRGGVSSRPINGDGCPRHVFMVARENACHIEKNN

SEQ ID NO: 23300 - protein, 451 aa, Moorena sp.; identical to SEQ ID NO: 3199

SEQ ID NO: 23301 - protein, 431 aa, unidentified; identical to SEQ ID NO: 5232
  REGION 1..431: note = Human gut metagenome

SEQ ID NO: 23302 - protein, 420 aa, Moorena sp.; identical to SEQ ID NO: 3094

SEQ ID NO: 23303 - protein, 460 aa, unidentified
  REGION 1..460: note = Human gut metagenome
MVAVVDLFGKPLMPTNEYRARKLLKRKKAKIFCYRPFTIQLTERKDTEIQPIELCMDTGYIHIGISAKSERHEYLGMQIDTLTDEKLKHDDKRQYRRQRRNRKRYRAPRFDNRRRKEGWIAPSLEHKKEIHIDAIQRICKVMPITDITLEMGNFDTQVLKAVEEGKPLPQGSDYQYGERYGIATLREAVFLRDGYKCQCCEKTVKDGAILHVHHIKYRSQGGTNRMSNLITVCDKCHTPQNHKPGGKLWNWKPKLAEFKGASYMTSIRWMLYNEVTALLPNRSIHITYGAKTKESRRELDIEKSHVNDAYVMGLFHPKHRTQPVYFKKKRRNNRVLERFYDAKYIDGRDGKKRSGQELFNGRISRNHKKDSENLHLYRKQKVTKGKRSIRNKHYPIQPHDILLCQKKKYETAGCHCAGTRAILLPKKKSVALKQLTMYQYAGGYYRVPYESNKKEERMSS

SEQ ID NO: 23304 - protein, 406 aa, unidentified
  REGION 1..406: note = Human gut metagenome
MVYVQDIDGRPLMPTTRHGKVRRLLKSKKATVVNLCPFTIRLLYDTTGYKQEITLGVDTGTKHVGLSATTKSKELYASEVILRSDVVDLLSTRRELRKIRRYRLRYRKPRFMNRIKSKKRGWIAPSIRQKIDSHIRIIGFVYSILPVSKLIIEVAQFDTQKIKNPEISGKEYQEGEQLGFWNVREYVLARDEHKCQHCKGKSKDPVLNVHHIESRKTGGDSPSNLITLCKTCHKEFHKGNIKLKVNRGESLRDAAVMSIMKWELYDELKSLYPNVKMTFGYITKYNRINHGIENSHVSDAFVISRNFDSERLGYYYKRKLVRRHNRQIHKMKAPKGGNKRMNQSPFKVFGFRLFDKVMFQGKERFIYARRLRGIFNIRDINGENKKDISYKKLEYVSHGLISIVAG

SEQ ID NO: 23305 - protein, 554 aa, Acidithiobacillus sp.; identical to SEQ ID NO: 7890

SEQ ID NO: 23306 - protein, 279 aa, unidentified
  REGION 1..279: note = Human gut metagenome
VVVETAEFDLHLLKAIADGKPVPQGEDYQKGEMYGHYNVRQYVLWRDNYTCQCCGAHATKKKEVRLHVHHLESRKVGGDAPDNQVTLCESCHEKLHKGLIAEKDFKKRKRRSTRDATFMGIMRKTLMQRLCSELPIPVVKTRGYITKATREKLLVLPKSHTNDALAIAQGKRGFNVGYLPEIAQIDKIYTIRPVRHHNRQLHKATILKGGIRKSNQTEKYVFGYRLFDKVQFNGQDCFIWGRRTTGIFTIKTINGKMIKDGISFKKLKLVEKSTSYLIA

SEQ ID NO: 23307 - protein, 246 aa, unidentified
  REGION 1..246: note = Human gut metagenome
KINNPNISGKEYQEGNKLGFWNVREYVLARDGHKCQYCKGKSKSKILNVHHLESRKTGGDSPSNLITLCETCHKEYHKGNIDLKIKRGSSLRDAAVMGIMKWKLYEELRSRYDRVSMTFGYITKHNRIKYGIEKSHTSDAFVISKNINAKRIGCQYLKRLIRRHNRQIHKMKILKGGKKKNNQAPFEVFGFRLFDKVLYNNKICFVYGRRKSGSFNIRDFNGENSKDVSRKKFKLIRGKRHPIILK

SEQ ID NO: 23308 - protein, 424 aa, unidentified; identical to SEQ ID NO: 3351
  REGION 1..424: note = Human gut metagenome

SEQ ID NO: 23309 - protein, 383 aa, unidentified; identical to SEQ ID NO: 8530
  REGION 1..383: note = Human gut metagenome

SEQ ID NO: 23310 - protein, 478 aa, unidentified
  REGION 1..478: note = Human gut metagenome
SGRENIGSGASNEDGDCLYLGELKTSNKSIKIKMTERTGFRRERRRHDRQSKQRKAKKDHTEIQNGNDDICRTTISCKSVQISYPAAEESVTHKIIRGKEGKFANRHRDEGWITPSARQLVQMHMNDLKSMCKILPISHVTLERVAFDFQKLENENIKTWEYGKGKLYGYDSPEEYIHDVQDGKCLVCGKPHIDYLHHIIPRSKGGSDKVSNIAGLCYDCHYGPMGVHNCQNTQDRLPELKSEANKQYKVSLLNSVMPVLIEEMDKFCKANSIMFSICEGHDTAKVRDMYDLQKDHCLDGFAISLVGRNVKSVDVMPDRIYQKQRYKKKSKNIIQKRNCREYYDGKKLVAVNRHKGTDQKADSLEEYMNTYAETHTADECKKHFDSLTVKPARRTYTFHKEWRICPFHIGDKVRYEKKNKIKGNTKVDTFICEGIRFVKDENKAEVKHNKTKSKKMKFCRVLESGCTPYVDYRKLALM

SEQ ID NO: 23311 - protein, 426 aa, Parasutterella sp.; identical to SEQ ID NO: 3045

SEQ ID NO: 23312 - protein, 489 aa, unidentified; identical to SEQ ID NO: 20025
  REGION 1..489: note = Human gut metagenome

SEQ ID NO: 23313 - protein, 457 aa, Anaerostipes sp.; identical to SEQ ID NO: 2712

SEQ ID NO: 23314 - protein, 424 aa, unidentified
  REGION 1..424: note = Human gut metagenome
MVYVLSKEGTPLMPTNRHGRVRHLLDAGEAKAVKRCPFTIQLLYQSTTYTQEITLGVDAGSKTIGLSASTEKKELYASETRLRMDITDLLSVRRQFRRTRRNRKTRYRKARFNNRVHAKHKGWLAPGIEAKIGTHFRAIRDVCRILPVTEIIVETASFNLQKIKALEKGEPVPEGTDYQKGDQLGFWNVREYVLWRDGYKCRCCNGKSKDQVLNVHHIESRKTGGDAPNNLATLCGYCHKQYHKGTILLPKSVRRGNSFRDAAFMGIMRRTFYNRLKEQYPRVAMTYGYITKNTRIRNSLPKTHYADARCIAGHPQAEPLEVYYFQKKVRCHNRQIHKSNILKGGKKKRNQAEYLVKGYRLYDRVRYQNREYYVFGRRASGFFDIRTLGGNKGNKGSVSCKKLRFLEPRKTMLIERRMQEREAV

SEQ ID NO: 23315 - protein, 466 aa, unidentified
  REGION 1..466: note = Human gut metagenome
DSLFTKGVPCMSTCVCVLSNSGERLMPTFRLGKVRRLLKDGKAKIVKHHPFTIQLLYDSKTNTQPIEICEDVGYNYIGISVKSESHEYVSAQYDTLQDEKEHHDDCRRTRRTRRNRLRYRKPRFDNRKRNKDWLAPSLEHKKQLNISLIERYVSVIPITHATVEVGSFDTMLLQAIQKGEAKPESADYQKGPRYNLATLREAVFYRDNYTCQVCKRKIADGAILHMHHMFYWKGRHGYQLDELVAACEKCHTPANHQKGGKLFGFGEDKEFANLSGAAFMNAVRWQIVNALYATYGKEFVTITYGAMTKEKRIILGIEKTHSNDAYAMGDYHPAHRCVFRHYQKRRRNNRVLEKFYDATYIDARTGNKAKGKELFNGRINRNHKKDSENFHKYRSKKVSKGRRSIRRQRYAIQPYDTVRLEGKTYITSGCHNKGTRLLIPANGKSKSVAISKVQVVCHAGAWIQII

SEQ ID NO: 23316 - protein, 416 aa, Parasutterella sp.; identical to SEQ ID NO: 10114

SEQ ID NO: 23317 - protein, 408 aa, unidentified; identical to SEQ ID NO: 18260
  REGION 1..408: note = Human gut metagenome

SEQ ID NO: 23318 - protein, 416 aa, unidentified
  REGION 1..416: note = IscB polypeptide
LSCNNPEMGLRKRVSGRKVIVPVLSITGSPLMPCTPAKARHLLERRKAKVVSLNPFAIKLTFECENKTQEVSLGIDSGYKYIGFSAVTKTKELVSGEVELDDKTSKRLTERKMYRGHRRNRLRYRKPRFNNRKTPEEWLPPSVQRRFDTHVNMIAKLKELTPVKKVTVEIGAFDIQKLMDSEISGKGYQQGDLYGYNNLKAFLFYREQGKCQFCGKKIDKGEKAHLHHIKLRSETGTDRPSNMALLHEDCHDKLHKKGLYKKLKAPKEYKAETFMSIMAARLKKALNCDVTYGYETAIKRNLLGIEKSHVNDAFVIAGGTNQERCLPCRVEQKRINNRTLQTNRKGFAPSIRKQRHKIQNRDFIWIGDKKYLCGGIASKGAMIYYFDGIEKKTIYYKEVNKFYSTGSLAWINYVSL

SEQ ID NO: 23319 - protein, 493 aa, unidentified; identical to SEQ ID NO: 3781
  REGION 1..493: note = Human gut metagenome

SEQ ID NO: 23320 - protein, 463 aa, unidentified
  REGION 1..463: note = Human gut metagenome
MPNKVYVINKHGRPLMPCSPAKARHLLDEGKAKVKKRTPFTIQLVYGSSGYTQEVILGVDAGSKSIEISASTKKEEVFAADVTPRNDVVDLLSTRREFRRARRNRKTRYRKPRFNNRVRSKHKGWLAPSVEVKIQEHITSIKMVCRILPVSKVVVETAEFDLQLLKAIEEGKPVPQGEDYQQGEMYGHYNVRQYVLWRDNYTCQCCGAHPTKKKEVRLHVHHLESRKTGGDAPGNLVTLCDSCHEKLHKGLITEDDFKKRKRRSTRDATFMGIMRKTLMQRLCSELPIPVIETRGYITKATREKLLVLPKSHTNDALAIAQGKHGFNVGYLPGIEQIDKIYTIRPVRHHNRQLHKATILKRGIRKSNQAEKYVFGYRLFDKVQFNGQDCFIWKRRTSGYFVVKTIDGKIIHNSASFKKLRIAERASKGGNGISSPPNASHWTGYPCQNNEASLFGQNDCAPAL

SEQ ID NO: 23321 - protein, 418 aa, unidentified; identical to SEQ ID NO: 9478
  REGION 1..418: note = Human gut metagenome

SEQ ID NO: 23322 - protein, 502 aa, unidentified; identical to SEQ ID NO: 16429
  REGION 1..502: note = Human gut metagenome

SEQ ID NO: 23323 - protein, 545 aa, unidentified; identical to SEQ ID NO: 6325
  REGION 1..545: note = Human gut metagenome

SEQ ID NO: 23324 - protein, 406 aa, unidentified; identical to SEQ ID NO: 6897
  REGION 1..406: note = Human gut metagenome

SEQ ID NO: 23325 - protein, 502 aa, unidentified; identical to SEQ ID NO: 2616
  REGION 1..502: note = Human gut metagenome

SEQ ID NO: 23326 - protein, 504 aa, unidentified
  REGION 1..504: note = Human gut metagenome
LAKRTTDSAVCETGASPAERAADRDPARDIRKDVWCGRRKPHPALPEKKGGMLMAVAVVSRTGVPLMPTSPYRARKLLASGKAEKYGYDPFTIRLTERETGDTQPVELCMDTGYIHIGVSVKSEKHEYLALQIDTLTDEKKKHEKCREKRRNRRSRKRYRKPRFDNRKRDKGWLAPSLEHKKEIHVQAAERICRVIPVTDITMEMGNFDTQVLKAKEEGRPLPQGTDYQQGERYGTATLREAVFSRDNYTCLCCGRTMKDGAYFHVHHIRYRSQGGTDRMANLATVCEKCHTPANHQPGGKLYNWKPEIKSFKGATFMTAVRWQMYREIKEKIPDISVHLTYGAATKERRRALDIEKSHVNDAFVMGRFHPGHRARPELYIKKRRNNRVLESFYDARYIDSRDGKRKSGKELFNGRISRNHKKDSENLHKCRLRKVSKGKRSIRKKHYPIQPHDILVYCGRKYETAGCHNLGTGAILLPERKSIAVSKLKIYRYSGGYYKAEFN

SEQ ID NO: 23327 - protein, 442 aa, unidentified; identical to SEQ ID NO: 3037
  REGION 1..442: note = Human gut metagenome

SEQ ID NO: 23328 - protein, 470 aa, unidentified; identical to SEQ ID NO: 2825
  REGION 1..470: note = Human gut metagenome

SEQ ID NO: 23329 - protein, 406 aa, unidentified
  REGION 1..406: note = gut metagenome
MVYVQDIDGRPLMPTTRHGKVRRLLKSKKATVVNLCPFTIRLLYDTTGYKQEITLGVDTGTKHVGLSATTKSKELYASEVILRSDVVDLLSTRRELRKIRRYRLRYRKPRFMNRIKSKKRGWIAPSIRQKIDSHIRIIGFVYSILPVSKLIIEVAQFDTQKIKNPEISGKEYQEGEQLGFWNVREYVLARDEHKCQHCKGKSKDPVLNVHHIESRKTGGDSPSNLITLCKTCHKEFHKGNIKLKVNRGESLRDAAVMSIMKWELYDELKSLYPNAKMTFGYITKYNRINHGIEKSHVSDAFVISRNFDSERLGYYYKRKLVRRHNRQIHKMKAPKGGNKRMNQSPFKVFGFRLFDKVMFQGKERFIYARRLRGIFNIRDINGENKKDISYKKLEYVSHGLISIVAG

SEQ ID NO: 23330 - protein, 427 aa, Moorena sp.
MVFVLSSDGVPLDPCHEARARKLLKAGRAAVWKRYPFTIRLKDRLAAEAISHEHRLKIDPGSKTTGIVIVQEETARVVWAGELTHRGQQIRDALLRRRQIRCSRRQRKTRYRPVRFLNRRRRAGWLAPSLAHRALTTTTWVRRLRALCPITTISMELVRFDTQAMEHPEISGTEYQRGTLFGWDVWNYLLAKWGHRCAYCGATGVPLEQEHLIPRSRGGSDRITNLTIACRPCNERKGNQTAAEFGFPHLMAQARAPLKDAAAVNSVRWAIYQHLLATGLPVEVGTGGRTKWNRARLGYTKAHWRDAAVVGASTPDDLRVAVASVLLIAAAGHGRRQMCGTNASGFPIRHRRRQKQWFGFRSGDLVRAVIPSGKYAGRHVGRIAVRSRPSFKLNGFDVHPKYLTLVQRADGYCYFTHNLAKTGTVRN

SEQ ID NO: 23331 - protein, 451 aa, unidentified
  REGION 1..451: note = Human gut metagenome
VTTILKTCFAAFNLAKVVVLMDAWDIIVVRNKRGKPLMPCSPAKARLLLKEKKAIVVRRTPFTIQLTIATGETKQPVSLGVDAGYKHVGLSASTEKAELYASEVELRQDITDLLSARRALRQSRRNRKTRYRAPRFDNRIRTKRKGWLAPSVENRIDAHLSRIEAVLRLLPVTKITVETASFDLQLLKNPDISGKEYQEGEQLGFWNIREYVLCRDGHVCQHCYGRSKDPVLNVHHLESRRTGGDSPGNLITLCETCHKALHRGEITLKAKRGQSFRAEAFMGIMRSEVLNRLKASHPELEVNNTYGYRTKHARIANDIAKSHCADAFCIAGNLGAERLGEFFFQKQTRRNNRQIHKLSILKGGIRKRNQAPFEVKGFRLFDKVACKGEEGFIFGRRSSGFFDVRKLDGTRISAGISCKKLHLLEKRQTYLTEIRKEEALPALPEGRGLRA

SEQ ID NO: 23332 - protein, 454 aa, unidentified; identical to SEQ ID NO: 8101
  REGION 1..454: note = uncultured beta proteobacterium

SEQ ID NO: 23333 - protein, 436 aa, unidentified
  REGION 1..436: note = Human metagenome
MTKTLTKQTTQACVLDQQGKPLMPTTRLGKVYRLLKTQKAHIVSYEPFTIQLDYKPDTHIIQPMTLGVDSGAIHSGYSVANEHREYYSAEVSARDNISKRLSDRRMYRQHRRYRKTRYRKPRFNNRKNKKKGWLPPSLEQKVAVQVNEIDHLHRYFPIETIIVEVAEFDIQKIKNPDISGIEYQQGTLQGYNIRNYLLEKHRRKCFYCGKTVSKFEVEHMIPKTRGGSNRIDNLTLSCHECNQKKDTLTAEEFIKQTLPAKKAATKLKQLPNEKRLFKYMAHMNATRWTLYNAIEEKYPNVKMTYGYITKYNRIQADLPKAHHIDAKCITGFATVPSMKQTVVKIKMRRHNRQLHRATFSKGHVRKAACLPTVVFGFQLYDLVLFNNHRYYIKGRRSSGSFALVSVEGLKDEKRMYKKLTLLAHTNAYLTNQYINA

SEQ ID NO: 23334 - protein, 431 aa, unidentified
  REGION 1..431: note = Human gut metagenome
MPNKVYVINKHGRPLMPCSPAKARHLLDEGKAKIKKRTPFTIQLVYGSSGYTQEVILGVDAGSKTIGVSALTKKEELFAANVIPRNDVVDLLSTRREFRRARRNRKTRYRKPRFDNRVRSKHKEWLAPSVEVKIQEHITAIRRVCGILPVSKVVVETAEFDLQLLKAIADGKPVPQGEDYQKGEMYGHYNVRQYVLWRDDYTCQCCGAHATKKKEVRLHVHHLESRKVGGDAPDNQVTLCESCHEKLHKGLIAEKDFKKRKRRSTRDATFMGIMRKTLMQRLCSELPIPVIETRGYITKATREKLLVLPKSHTNDALAIAQGKRGFNVGYLPEIAQIDKIYTIRPVRHHNRQLHKAAILKGGIRKSNQAGKYVFGYRLFDKVQFNGQDCFIWGRRTTGIFTIKTINGKMIKDGISFKKLKPVEKSTSYLIA

SEQ ID NO: 23335 - protein, 430 aa, unidentified; identical to SEQ ID NO: 3681
  REGION 1..430: note = Human gut metagenome

SEQ ID NO: 23336 - protein, 286 aa, unidentified; identical to SEQ ID NO: 16765
  REGION 1..286: note = Human metagenome

SEQ ID NO: 23337 - protein, 408 aa, unidentified; identical to SEQ ID NO: 10304
  REGION 1..408: note = Human gut metagenome

SEQ ID NO: 23338 - protein, 443 aa, unidentified
  REGION 1..443: note = Human gut metagenome
LTKDENRPSGRTTGLRAEQAEPAGIRKGDTLKVFVLNIRGKPLMPCSPAKARHMLKAGKAVVVRRTPFTIKLTIATGETKQDVTLGVDAGARHVGISATTEKEEVFASEVALRQDITGLLADRLAFRRARRNRKTRYRAPRFNNRVRSKHKGWLAPSVENRIQAHISRIEAVCRLLPVTKIVIETASFDIQKIRNPEVEGTGYQQGDQLGFWNVREYVLFRDGHICQHCRGRSKDPILNVHHLESRKTGGDAPNNLITLCETCHKAYHAGKIKLKVKRGQSFRAEAFMGIMRWTLLDRVRKTHPKLPVENTYGYLTKHKRIALGLPKTHCADAFCIAGNLKALRRGDFLFQQQTRKHNRQIHKCSILKGGVRKLNQAPFLVKGFRLFDKVRIGGQIGFVFGRRVRGTFNIRRLDKTVIGTDINCKKLSLLETRKTFLTELRKE

SEQ ID NO: 23339 - protein, 451 aa, unidentified
  REGION 1..451: note = Human gut metagenome
MSVAVISNIGERLMPTSEYRARKLLKSGKAIKHSYRPFTIQLTEMETGDVQPIELCMDTGYIHIGISVKSEKHEYLAEQIDTLTNERTRHDACRMYRRQRRGRKRYRQPQFNNRKRDKGWIAPSLEHKKDIHIQAISRINKVMPLTDITMEMGNFDTQVLKAKEEGKPLPHGADYQHGERYGIATLREAVFSRDGYKCQCCGKTISDGAILHVHHIKYRSRGGTNSMTNLATVCDKCHTPKNHKPGGKLYNWKPKLPNFKGATFMTTIRWQLYSEVKSLFPDVNIHVTYGAATKEQRRELSIGKSHVNDAFVMGKFYPKHRANAVLYKKKRRNNRCLEKFYDAKYIDSRDGSKKTGQELFNGRINRNHKKDSENLHQYRLQKIKAGKRTIRKQHYSIQPHDIVIYENRKRETLGCHNNGTRVMLLPDKKSVAIKKIKIYKYTGGYFKSAFN

SEQ ID NO: 23340 - protein, 416 aa, unidentified
  REGION 1..416: note = Human gut metagenome
MVYVLDKNGQPLMPTDRHRKVRLMLQSGQAKVIKRCPFTIQLNYDSGHQTQEISLGIDAGSKHIGVSATTKIKVLYEADVELRNDIVDLLSSRRELRRGRRNRKTRYRQAKFNNRRRGNGWLAPSIRQKIGTHLTVVENICKMLPISRIMVETASFDIQKIKNPDIQGAEYQQGDQLGFWNIREYVLFRDNHTCQCCKGKSKDKILNVHHIGSRKTGGNAPNNLITLCETCHTGYHKGTVQLPKAIKRGMRFKDAAFMGIMRWAFYEALKQQYEPVGTPVHDTYGYITKHTRIAYNLPKEHYVDARCISGNPEASSNGEYYYQKKVRCHNRQIHKLTVLKGGIRKQNQATYLVKGYRLFDKVSYQGKGYFVFGRRQSGFFDIRTLSGEKVNKGSLSCKKLKFIATRTYYLTERRAV

SEQ ID NO: 23341 - protein, 480 aa, unidentified
  REGION 1..480: note = Human gut metagenome
LYTKPLDNIGEGSLPPSGEINLKGMTFMVYVKSIDGKALMPTSNAKARKLLKQKKAKVVSLRPFVVKLTYKTKTEYTQKLNLGVDSGYSNIGFSVIDAKQEYIAGEVKLLEGMKKRLLEKASYRRIRRSRLRYRKARWNNRVKSKKKGWLAPSLKHKLDTHIKFIDYLKNILPIGKITIEVANFDIQKIKDDLISGVDYQNGDMFGFWNVREFVLHRDGHKCQNPNCKHKDKKEQILKVHHIRYRSEGGSDRPENLITLCSKCHTPANHKKGKFLYDWCVNGKKVRGFKDATFMSMIRWYLVNELKSKHNNVSITYGYITKNHRIQNGIEKSHLNDAFAIAKGTNQARTKDRFLVIQDRLKNRSLEKFYDSKIIDIRTEKKVSGGDLNCGRSTRNKNLNTENLRKYRGVKISKGQRRIRKQKYFYQPNDLVKYDGKVYTVKGTQNEGKYIALKEIKKVPKVELLIPYVFKKGLNWSYGLC

SEQ ID NO: 23342 - protein, 453 aa, unidentified
  REGION 1..453: note = Human gut metagenome
RLMPTIRLGKVRHLLKDGKAKIIKHHPFTIQLLYDSETNIQPIEICEDVGYNYIGISVKSESHEYVSVQYDTLQDEKDCHDSCRKMRRIRRNRLRYRKPRFDNRKRNKDWLAPSLEHKKELNVNVIKIYCEVVPITHVTVEVGSFDTMLVKAIQEGKAIPEGADYQKGPRYNLATLREAVFYRDNYTCKVCGRKAKNDSAILHVHHMFYWKGRHGNSLNELLTVCEKCHTPANHQKGSKLYGFGENIKFANLSGAAFMNTVRWQIVNELYATFGKLFVTFTYGAMTKEKRIALHLEKCHNNDAYAMGNFHPVDRCAFEHYKKVKRNNRILEKFHDSQYIDIRTGKVANGRSLFNGRINRSHKKDSENLHKYRGKRTRKGYRALRRKKVALNPGDLVSLNGEILVVHSTHAGKNGYVGVEFKTPSKSGKKSASLKKLKIVKTSNSMHSAWTKVS

SEQ ID NO: 23343 - protein, 493 aa, unidentified; identical to SEQ ID NO: 10546
  REGION 1..493: note = Human gut metagenome

SEQ ID NO: 23344 - protein, 415 aa, unidentified
  REGION 1..415: note = Human gut metagenome
MVYVQDIDGKPMMPTTRHGKVRRLLKSNKAIVVNLCPFTIKLTYVTSDYKQEIVLGVDAGTKHVGLSATTKSKELYSSEVILRNDIVDLLSTRRELRRARRNRLRYRKPRFNNRIKSKRPGWIAPSVKYKIDAHIRVVENVCSILPISRIVIEVAQFDTQKIKNPNISGKEYQEGDQLGFWNTREYVLARDGHKCQYCKGKSKDKILNVHHIESRKTGGDSPSNLITLCETCHKEYHKGNIDLKIRRGKSLRDAAVMGIMKWRLYEEIKSKYDRVSMTFGYVTKYNRINHGFEKSHVSDAFVISKNFNAIRLGYYYKVRLVRRHNRQIHKQKIQKGGIKRLNQSPFEVFGFRLFDRVMFENSYYFIFGRRKTGSFDIRYIDGKNQKNVTYKKLKLSRCKRFMIQMELNKKNTDMF

SEQ ID NO: 23345 - protein, 424 aa, unidentified; identical to SEQ ID NO: 14112
  REGION 1..424: note = Human gut metagenome

SEQ ID NO: 23346 - protein, 423 aa, unidentified; identical to SEQ ID NO: 8242
  REGION 1..423: note = Human gut metagenome

SEQ ID NO: 23347 - protein, 430 aa, Beggiatoa sp.; identical to SEQ ID NO: 9043

SEQ ID NO: 23348 - protein, 512 aa, unidentified
  REGION 1..512: note = Human gut metagenome
MSTVYVLNKDGKTLMPTTRCGHVRHLLKKQKARVVTSNPFTIQLLYETDDVVQPLYLGIDPGRTNIGVAVVKTDGTAVFTAHLETRNKEIPKLMKKRKASRRARRTNGRRCRRQRRAKANGTISKKCVKQTTAQNGSVSKRAKEIGVIKRRLPSCEKEVLCIGIKNKEAKFNNRTRPEGWLTPTANQLLQTHVNVVKKIQKFLPISDVVLEINKFAFMQLNNPNIQKWQYQQGPLYQKADLEEAVSEMQEHHCMFCKNPIDHYHHVVPQHKNGSNTIDNIVGLCTKHHDLVHKDTAWYEKLTKKKTGLNKKYGALSVLNQIIPALTKGLSSLFQKHFFVTTGKSTYDYRAAHGVSKDHWLDAYCIACSVLPNDVCDSNINSHVPYELKQFRRHDRRALHKENINRVYTLNGKKVATNRHKAIEQTTDSLEEFRQNHPDDVCKLKVKEHHPEYRNPKRNFPGCVFLVGKRTHVMQGTSGSHNGKADGYYDTNGNSYPSGKCKFVAKNKGIVFA

SEQ ID NO: 23349 - protein, 493 aa, unidentified; identical to SEQ ID NO: 21866
  REGION 1..493: note = Human gut metagenome

SEQ ID NO: 23350 - protein, 406 aa, unidentified; identical to SEQ ID NO: 2752
  REGION 1..406: note = Human gut metagenome

SEQ ID NO: 23351 - protein, 392 aa, unidentified
  REGION 1..392: note = Freshwater metagenome
EAKIVKRTPFTIQLLQATGETKQDITLGVDAGSKHIGLSATTQKKEMFSAEVELRNDIVDLLSTRRQNRRTRRNRLRYRKPRFLNRVGSKNKGWLAPSIENKIQTHISIVEKLYKLLPITKIIVEVASFDIQKIKNPDIQGTEYQQGNKLNFWNTREYVLFRDGHKCHGKKGCKNKILNVHHIESRKTGGDSQDNLITLCEECHNHYHSGKLKLNLKRGKSFRDAAFMGIMRLAFYNKLKVLYPNVSLTYGYMTKNTRIINNLPKEHRIDALCITGNPIVKRLKNYYYVKQVRKHNRQIHKANILKGGKKKLNQAPYLVKGFRLFDKVKFEDRECFIFGRRSTGYFDLRTLDGTKIHASASVKKLKLLEVRKSLLWERREQGIGVHGIPPLP

SEQ ID NO: 23352 - protein, 418 aa, unidentified
  REGION 1..418: note = Human oral metagenome
MLNNQKEYAFVLDAEGKKLDPTIVQNAWRLVRQKKAALIAKRPMTIQLKKVIDNPNDDEIRMGIDDGAKHVGLALVQKCKTKNKVIFIATMEQRNDVHKLMEQRKNYRRYRRYWKRYRKARFSNRVSVRRKGRIAPTILQKRQAVVRIFDRLNKYIRIDSIYLEDVAIDVRVLTDEKRLYSWQYQQSNRLDENLRKATILRDNCKCQLCGKRNCRLEVHHITPRRMSGANTIGNLITLCSECHSNVTGREMEFAEQLYSKIGKKKNNVSLQYASHVMVGKTWLREELSKRVPVFLTTGGDTANKRIDWNLKKSHEIDAICITNLEPESVGVKSWNIKPLRHQRKTMKVKEILGFRHRDIVYYTFKNGEYHEGYVTALYPSEGKQKEGLNFLSPTKHCKRVNPKKCQRLDRPDKFLWLV

SEQ ID NO: 23353 - protein, 402 aa, unidentified
  REGION 1..402: note = Human gut metagenome
LLFYRKEHGIMQYVYVLNKHGEPLMPCSPGKARLLLKQQKACVVRRTPFTIKLLYGSAGYKQPITLGVDAGSKHVGLSASTEKRELYSEEFTPRSDVVKLLSTRKQNRRSRRYRKTRYRAPRFDNRVHSKHKGWLAPSVEVKIQEHITVIKRICKILPISLVRVETAEFDTQRLKAMLAGKPLPVGTDYQLGEMYDEYNVRQYVLKRDHYTCQCCGAHNTAEKVVKLHVHHLESRKTGGNAPSNLVTLCTTCHKNLHKGKVTLDGKERGKPLRDAAFMGIMRKTLMARLKEELPIPVEGTYGYITKMRREQNDIKKSHTNDARCISKHPLAEPCSVCYRTKAIRHHNRQTHKANFSKKGIRKRSQMPYLVEGYRLWDKVLYKEQECFVSGRRSSGSFTLKKL

SEQ ID NO: 23354 - protein, 428 aa, unidentified
  REGION 1..428: note = Human gut metagenome
LKVFVLNMRGRPLMPCSPAKARHLLKAGKAVVRRRTPFTIQLRITTGETKQSVTLGVDAGAKHVGLSAATEKEEVFASEVELRQDITGLLAARLSLRPERRQRKTRYRAPRFLNRVRSKHKGWLAPSVENRIQAHMSRIDAICGLLPVTKIVIETASFDIQKIKHPDVEGTDYQQGDQLGFWNVREYVLFRDGHVCQHCHGHAKDKILNVHHLESRQTGGDAPNNLITLCETCHKACHAGKIKLKVKRGQSFRAEAFMGIMRWTLLDRMRKAHPGLPVENTYGYLTKNTRITLGLPKAHCVDAYCIAGNLKAVRRGVYLHQRQVRKHNRQIHKCTVLSKTLKDGTKIGYRKLNQTPHLVKNFRLFDKVRCLGQTGFIFGRRSSGYFDVRRLDGVKISSCINYRKLTLLEKRGTCLTELRKEDGASSPV

SEQ ID NO: 23355 - protein, 424 aa, unidentified
  REGION 1..424: note = Human gut metagenome
LVWNKRGKPLMPCSPAKARLLLKEKKAIVVRRTPFTIQLTIATGETKQPVSLGVDAGYKHVGLSASTEKAELYASEVELRQDVSDLLSARHALRQSRRNRKTRYRAPRFDNRIRTKRKGWLAPSVENRINAHLSRIEAVLRLLPVTKITVETASFDTQLLKNPDIAGKEYQEGEQLGFWNVREYVLFRDGHVCQHCHGRSKDPVLNVHHLESRRTGGSSPGNLITLCETCHKALHRGEIKLKAKRGHSFRAQAFMGIMRWEVLNRLKASHPELEVNNTYGYRTKHVRIRNGIAKSHCADAFCIAGNLGAERLGEFFFQKQTRRNNRQIHKLSILKGGIRKRNQAPFEVKGFRLFDKVAYKGEEGFIFGRRSSGFFDVRKLDGTCISAGISYKKLHLREKRRTYLTEIRKEEALPPLREGRGLRA

SEQ ID NO: 23356 - protein, 424 aa, unidentified; identical to SEQ ID NO: 11884
  REGION 1..424: note = Human gut metagenome

SEQ ID NO: 23357 - protein, 467 aa, Lactobacillus sp.
IRIGSPDSDKWQEPLFPALRKRRKSMKHENANRVFLLNKDGKPLMPCRPRKARLLLTSGKAFVVKKYPFTIQLKYGSYGYKQKVSLGVDTGQRHIGFAIVSQNKVLHQSEVELRQDVHKNLYTRKIYRRSKRNRKTRYRQAHFLNRVHGKRDGLWLPPSIKGKVSHNIAWIKRYLAVLPNPDLHIEVGKFDMAKMVNPEISGKQYQEGSLKDWKNYEYYVLARDEYTCQLCHKHGEGVKLVVHHIVYRSQGGTDRVDNLITLCTNCHTTKNHQPGGKLYKWMKAKKKVIKQLKGATFMNILRKRIMTAFPEASFQYGSQTYVDRKNLLLPKGHFMDAIAISGIKSVGQLSDTVTMISQFRKKKRSLHEATARKGRKQPNTSSKRNEKNTKHARGLWLNDYVRVIGNHAKGYVKGFKSNGYYVYLTDGLGNYVLNNGKNYINGQQCRLIMHNGNWQKAEQKLSLYKFK

SEQ ID NO: 23358 - protein, 199 aa, unidentified
  REGION 1..199: note = Human gut metagenome
LGKDSHSLRRGQFCQSLTVTTTRKETTSMYVYVLNQHGEPLMPCSPRKARTMLRDHKATVVRRTPFTIRLLHGCSGYTQRITLGVDAGSKFIGLSACTESKELFAAEVKPRNDVVDLLSTRRELRRSRRNRKTRYRVARFDNRVHSKHKGWLAPSVEVKIQEHITAIKKTCAILPISMVIVETAEFDTQRLKAMLEGKP

SEQ ID NO: 23359 - protein, 424 aa, unidentified; identical to SEQ ID NO: 3351
  REGION 1..424: note = Human gut metagenome

SEQ ID NO: 23360 - protein, 515 aa, unidentified
  REGION 1..515: note = Human gut metagenome
MTALEERLSKTEYIYVLGFDGKPQMPTRRKRHVLKLLKTGRARIAEDIPFTIRLTYRNAPVLQPVTLAEDPGRTNIGAAVLSPLGDLLFAAVIETRNKEIKKLMADRQKSRQASRRGERKARQRLAKRYGSMVKSGMVMRKLPMYAADRFVTCKFIRNTQARFCNRKRCPDWITPTVQHLVQTHLNIIRKISRYLPVTDIAFEVNRFAFMHMENPEAMGVDFQNGPLKGYGDVKEAIRTQQHGKCLMCKKPISHFHHIVPRSRGGSDTIQNLAGLCPECHTKVHTDTAFRKDFDEKKSGQLKKYGALSALNQAVPFICKKLLEEYGEEHVHFCRGLDTSLIRTALGFEKTKKNQMHEVDAYCIGLAALEVNEVETPAFDHTFQIRQFRRQDRSIIHHQTGRSYYQGKEKVAQNRKPGFEQKTTALSQWYEEQVRIHGEKEAEKLRSQLRVEKSCRHYNDMDRFLPGAVFLYEGKRYVLSGRITNGKYLRACGQGMKNFPAAECTFIRHNAGLVFI

SEQ ID NO: 23361 - protein, 426 aa, unidentified
  REGION 1..426: note = Bioreactor metagenome
MVFVLDANKKSLSPCHEAVARKLLKQGKAAIFRRYPFTIILKKVVEDTKNKQEYRLKIDYGSKHTGLAILQNNNVIWLGQIDHRTDIKKKLDERRMFRRSRRNRKIRYRKPRFLNRKRKEGWMSPSLESRINNIKTWVNRLQKLIPLTHISYENVKFDTQLMQNPEISGIEYQQGTLQGYEIREYLLEKFGRKCCYCGKENIPLEIEHIIPKSRGGTNRIDNLCLACHECNQKKGNMTAEEFGYPEVQRQVKETLKDTSVVNSTRWKVYDVLLRTSLPVECVTGALTKMNRIKLGLPKEHYFDACCVGQSTPDKLYFKTKDVLYIKAKGRGSHCRTNLDKYGFPRGYLARQKYFFGFQTGDMVKAEIPKGKYKGIWYGEVACRKSGSFDIKDKEGQRVVQGVNHKYFSVVQRFDGYSYRKEVAILT

SEQ ID NO: 23362 - protein, 433 aa, unidentified
  REGION 1..433: note = Human gut metagenome
MSTCVCVLSNSGERLMPTFRLGKVRRLLKDGKAKIVKHHPFTIQLLYDSKTNTQPIEICEDVGYNYIGISVKSESHEYVSAQYDTLQDEKEHHDDCRKMRRSRRNRLRYRKPRFDNRKRGEGWLAPSLRHKKELNVNVVKMYCAVMPITHATVEVGSFDTMLVKAIQEGKATPESADYQKGPRYKLATLREAVFYRDNYTCQVCGRKANEGAILHVHHMLYWKGRHGNSLSELITVCEKCHTPANHQKSGKLYGFGENVKFADLSGAAFMNTVRWQIVNELYAAFGKDFVTVTYGAMTKEKRIALHLEKSHNNDAYAMGEFHPNCRCTFEHYEKVRRNNRILEKFYDSRYIDIRTGEIATGKKLFNGRISRSHKKDSENLHKYRGKRTYAGHRALLRKKVNLNPGDLVSLNGKVLIVHGTHTNKKGAVNVEFK

SEQ ID NO: 23363 - protein, 442 aa, unidentified; identical to SEQ ID NO: 3234
  REGION 1..442: note = gut metagenome

SEQ ID NO: 23364 - protein, 414 aa, unidentified
  REGION 1..414: note = Human gut metagenome
MPCSPAKARLLLKEKKAIVKRRTPFTIQLTIAAGEAKQPVSLGIDAGYKHVGLSASTEKAELYASEVELRQDITDLLSARRALRQSRRNRKTRYRAPRFDNRISTKRKGWLAPSVENRINAHLSRIEAVLRLLPVTKITVETASFDLQLLKNPDISGKEYQEGEQLGFWNIREYVLCRDGHVCQHCYGRSKDPVLNVHHLESRRMGGDSPGNLITLCETCHKALHRGEITLKAKRGQSFRAEAFVGIMRWEVHNRLRALHPGIEVSNTYGYRTKHARIANGIAKSHCADAFCIAGNLGAERLGEFFFQKQTRRNNRQIHKLSILKGALRKRNQAPFEVKGFRLFDKVACQGEEGFIFGRRSSGFFDVRKLDGTRISAGISYKKLHLLEKRRTYLTEIRKEEALPPLPEGRGLRA

SEQ ID NO: 23365 - protein, 416 aa, unidentified
  REGION 1..416: note = Human gut metagenome
MVYILSKTGQPLMPTENHAKVRVLLKQQKAKVITNCPFTIQLLCNSTDYTQPVSLGLDAGSKHIGVSATTETKVLYEADVTLRNDIVDLLSTRREARRTRRSRKARYRKPRFNNRTRKDGWLAPSVQQKVDTHLTVVRKVLKILPISSITVETASFDIQKIKNPDIKDTNYQQGEQLGFWNVREYVLFRDGHKCQCCHGRSKDPVLNVHHIESRKTGGNAPNNLITLCETCHKGYHKGTVTLPKTIYRGMQFKDAAFMGIMRWVFYNRLKELYAAKDIPVAFTYGYITKNTRIEHGLSKEHFVDARCISGHPDAIPLKEVFYQKKVRCHNRQIHKYKILKGGIRKRNQAAYEVKGFRLYDTVLWKGQKCFIFGRRLTGRMDLRLIDGTHINASVGYKNLKLLRKRSNYLIEQRKAG

SEQ ID NO: 23366 - protein, 515 aa, unidentified
  REGION 1..515: note = Human gut metagenome
MTALEERLSKTEYIYVLSFDGKPQMPTRRKRHVLKLLKTGRARIAEDIPFTIRLAYRNAPAPQPVTLAEDPGRTNIGAAVLSPLGDLLFAAVIETRNKEIKKLMADRKKSRQASRRGERKARQRLAKRYGSMVKSGMVMRKLPMYAADKFVTCKFIRNTQARFCNRKRCPDWITPTVQHLVQTHLNIIRKISRFLPVTDIAIEVNRFAFIHMENPEAVGVDFQNGPLKGYDDVKEPIRTQQHGKCLMCKKPIGHFHHIVPRSRGGSDTIQNLAGLCPECHTKVHTDTAFRKYFDRKKSGQLKKYGALSALNQAVPFICKKLLEEYGEEHVHFCRGLDTSLIRTALGFEKTKKNQMHEVDAYCIGLAALEVNEVETPAFDHTFQIRQFRRQDRSIIHHQTGRSYYQGKEKVAQNRKPGFEQKTTALSQWYEEQVRIHGEKDAEKLRSQLRVEKSCRHYNDMDRFLPGAVFLYEGKRYVLSGRITNGKYLRACGQGMKNFPAAECTFIRHNAGLVFI

SEQ ID NO: 23367 - protein, 432 aa, unidentified
  REGION 1..432: note = Human gut metagenome
MSTSVFVLDKRHRPLMPCRPARARRLLRAGRARVVKRFPFVIRLVDRTVEQSEVQPVLIKLDPGSRETGAAVVRDDGKKRHHALAFFVIEHRGGAIRDALKARSAFRRRRRSQNLRCRSPRFLNRVKPKGWLPPSLRHRVETTLSFVRRMCRYLPVSGIATELVKFDSQKLQNPEVSGVKYQQGTLFEYEVREYLLEKFGRKCVYCGAEGVPLNIDHVVPRAKGGSNRVSNLVLACVSCNQKKGARSLEDFLKGKPEVLARVRRELKTPLRDAAAVNATRWVLFNELKATGLPVETGSGALTKLNRHAFGVEKEHWLDALCVGRLNGVVTRKGLNVLEIRCMGRGSRQRTRLTKYGFPRGYLMRQKCVHGFATGDMVEANVPKGKKAGLWRGRVAVRVSGSFNIQTPKGVIQGVGWKHCRLISHNDGYGYAW

SEQ ID NO: 23368 - protein, 300 aa, unidentified
  REGION 1..300: note = Human gut metagenome
MSTSVFVLDKKHRPLMPCRPARARRLLRAGRARVVKRFPFVIRLVDRTVEQSEVQPVLIKLDPGSRETGAAVVRDDEKKRHHALAFFVIKHRGGAIRDALKARSAFRRRRRSQNFRCRSPRFLNRVKPKGWLPPSLRHRVETTLSFVRRMCRYLPVSGIATELVKFDSQKLQNPEVSGVKYQQGTLFEYEVREYLLEKFGRKCVYCGAEGVPLNIDHVVPRAKGGSNRVSNLVLARVRRELKTPLRDAAAVNATRWVLFNELKATGLPVETGSGALTKLNRHAFGVEKEHWLDALCVGRL

SEQ ID NO: 23369 - protein, 512 aa, unidentified; identical to SEQ ID NO: 5947
  REGION 1..512: note = Human gut metagenome

SEQ ID NO: 23370 - protein, 400 aa, unidentified
  REGION 1..400: note = IscB polypeptide
MPCGTIKARKLLKQGKAKVFKRTPFTIQLLFATGETKQEIILGVDAGSKTIGLSATTDKQEVFSAEVELRNDIVDLLSTRRQNRRTRRNRLRYRQPRFLNRVGSKNKGWLAPSIENKIQTHLKIIEKLHKILPVTKIIVETASFDIHKIKNPEISGQEYQQGEQLSFWNVREYVLFRDGHQCQGEKGCKCKILNVHHIESRKTGGDSPNNLITLCEECHQAFHEGKLKLNLKRGKSFKDAAFMGIMRWAFYNKLKELYPQVQLTYGYITKNTRITNQLPKEHRIDALCITDNPTVKRLDTWYFIKQVRKHNRQIHKANILKGGNKKLNQSPYLVKGFRLFDKVEFDGKECFVFGRRSSGYFDLRTLEGTKVHASASVKKLKLLETRKTLLWERRKQGFGV

SEQ ID NO: 23371 - protein, 280 aa, unidentified
  REGION 1..280: note = Human gut metagenome
VKYKIDAHIRVVENVCSILPISRIVIEVAQFDTQKIKNPNISGKEYQEGDQLGFWNTREYVLARDGHKCQYCKGKSKDAILNVHHIESRKTGGDSPSNLITLCETCHKEYHKGNIDLKIKRGSSLRDAAVMGIMKWKLYEELRSRYDRVFMTFGYITKHNRIKYGIEKSHTSDAFVISMNINAKRIERQYLKRLIRRHNRQMHKMKILKGGKKKNNQAPFEVFGFRLFDKVLYNNKIFFVYGRRKSGSFNIRDFNGENSKDVSRKKFKLIRGKRHPIILK

SEQ ID NO: 23372 - protein, 361 aa, unidentified; identical to SEQ ID NO: 7533
  REGION 1..361: note = Human gut metagenome

SEQ ID NO: 23373 - protein, 420 aa, unidentified
  REGION 1..420: note = Human oral metagenome
MFVYVLDKNGQPLMPTERFGKVRRLLRDGKAKVVQRCPFTIRLLYEPETKIVQEIVLGVDTGSKHVGVACVGNDKVLYQAQIELRDDIKKKMDSRRVYRRNRRFRKTRYRKCRFLNRRNSIKKDRLPPSVKHKVQAHIDEIEFCKKILPISDENIILEVSQFDTALMKTPNLIHEKIRHWGYQQGFNYGHSSRRKAVLHRDNYTCQCCGKKNCQLQTHHIIFRSCGGSDDENNMITLCKECHKGVHDGTIVLNKKPKAKRLKHTTHMSIIRSRLLKEYPNAIETFGFVTSENRNHLKLKKDHYIDACVIASGGLRFEQSDTLYRKRRVSVQDRILTKGVRDEIKLPTGKVNGFKRYDKAQYFGEVCFIKGRRTKGDVVLMDIENTVLDFRGVGGCKNPSYKKLQRVNARKSVLCVLGWGI

SEQ ID NO: 23374 - protein, 428 aa, unidentified
  REGION 1..428: note = Human oral metagenome
MLVYVLKQNGQPFMPTARFGKIRRLLKAKKVKVVRREPFTIKLLYEPETDVVQECYCGVDTGSRHIGVAVVGNDKVLYQSQTELRNDIKRKMDARRAYRRNRRSRKTRYRKPRFLNRGNSTKSNRLPPSVKHKVQAHIDEIEFCKKILPVSDLIVEVSQFDTALMKDPRLISEKIKHWGYQQGFNYGYSSRREAILHRDNYTCQCCGKKNCRLEVHHIKFKNNGGTDDEENLITLCEDCHKGVHTGTVVLSKKPKKSKNLKYATHMSIIRSRLLKKYPNAIETFGFVTAENRNHLNLEKNHYIDACVIASGGLEFKELEVIFYKNRVSKGDYQLTKGIRGEQKLPTGKICGFRKFDKVEYLGEKCFIKGRMSSGFAILMNIFSEKVDFSSMPKGLKTPKLSNCNRISARSSCLCISQIRKERAIHVLS

SEQ ID NO: 23375 - protein, 388 aa, unidentified
  REGION 1..388: note = Human gut metagenome
VVKRTPFTIKLLHESAGYKQPITLGVDAGSKHVGLSASTETHELYCEEFTPRNDVVELLSTRRQNRRSRRYRKTRYRAPRFNNRVHSKHKGWLAPSVEVKIQEHITVIKRICRILPITLVRVETAEFDTQRLKAMLAGKPLPVGTDYQLGEMYDEYNVRQYVLKRDNYTCQCCGAHTTAKKAIKLHVHHLESRKVGGNAPSNLITLCTACHDNLHKGKVTLDGKKRGKTLRDAAFMGIMRNTLLIRLRNELNIPVQNTYGYITKLLREQNDIKKSHINDARCISKHPLAEPCSVCYRTKAIRHHNRQIHKAKILKGGIRKANQAPYIVKGFRLWDKVLYNGQECFISGRRSSGYFALKKLDGTAITNSISFRKLRLLEPAINYLIERM

SEQ ID NO: 23376 - protein, 426 aa, Moorena sp.; identical to SEQ ID NO: 3177

SEQ ID NO: 23377 - protein, 416 aa, unidentified; identical to SEQ ID NO: 4039
  REGION 1..416: note = Human gut metagenome

SEQ ID NO: 23378 - protein, 371 aa, Moorena sp.; identical to SEQ ID NO: 17842

SEQ ID NO: 23379 - protein, 431 aa, Moorena sp.
MRVFVLNKNRQPLDPCKPARARILLSSGKAKVYRRYPFTIILTEEIKEPITREHQLKIDPGAKTSGLAIVQGKRVIWGAELTHRGFQIRDALTSRRQLRRSRRNRKTRYRKPRFLNRTRPKGWLAPSLMSRAQNILTWVKKLTRLCPVTGISQELVRFDTQKLQNHEISGIEYQHGTLYGYELREYLLEKWNRKCAYCGAVDTQLEIEHIKPKSKGGSDRVSNLAIGRRPRYANACHPCNQAKSNQDIELFLSKNPSLLKRILNQAKRPLADAASVNTTRWKLYHELKSIGLPLEVGSGGLTKFNRCRQNLPKTHWLDAANVGKVETLIIEVTHPLIITAKGHGTRQLCRTNKYGFPTRHCSRIKFHKGFQTGDIVRAVVTKGKKIGTYVGRVATRKSGSFNISTKSGLVQGVSHKYCQFIHRKDGYAYTN

SEQ ID NO: 23380 - protein, 470 aa, unidentified
  REGION 1..470: note = Human gut metagenome
MSVFVVGLNGCRLMPTSERKARLLLKQGKAFVEQKVPFTIRLNYKTGSTTQLGYLGIDTGSQHIGVSVVREDGTVLHKEEIGLRDSMSKRKLLEAKASLRRGRRYRKTRYRHPKWRPKTKRVYCEVPDRKGRHWQKKKITFTSKRPKGWLPPSLQSKTDHHIRWIKKLQDLLPEGYRLSIELGRFDPARMKNLEIHGDLYQKGPQYDYENVRAYVLDRDRYTCQICKKKGGKLHVHHILYRSHGATDDPQYMVTVCSDCHSAQNHLPGGILYQWMQEQKRFSRGLRDATFMNILRKRLIRAFPEAVFTYGNVTKVDREKLKLPKSHGNDATAIALVKTGITAVKDKESVICIQQVRRKKRSLHEETPRKGRKEPNRTAARNNKNTKAVTVTKRQNKKKVSMTGCLFDRVELNGKKGWISGFTGKSCYVKDADDQYLSTSPKYKQVSLSKLRILHHCGNWIIGAKKTLGKG

SEQ ID NO: 23381 - protein, 387 aa, Moorena sp.
MVYVLNNQGQPLMPTERHGKVVQEVSLGIDAGSKHFGVSATTEQRELLAMQVEERDDVVKLIADRREARRTRRNRKTRYRAARFDNRRRKEGWFAPSSENRISAHLRVIKFVCSILPVGKTTIEVAQFDSQKIKDDKITGVEYQQGEQLGFWNVREYVLARDGHTCQYCKGKSKDKILNVHHLESRKTGGNAPNNLITLCETCHKAYHRGDIQLKARRGTSLRDAAAMSIMRWEVYNRAKQEFTNVHLTYGYMTKHSRIHNDIAKTHCADAFCITGNVDARRLTWFLGVRMQRRHNRSLHLYKPAKGGIRRPNIASHWIGKSRLQQYDYVEWNGQKAFVSGSQNGRPYLKNFEDKYIMTPKASVNAKTVKFIRRKRGSMIIEQLPKM

SEQ ID NO: 23382 - protein, 455 aa, unidentified; identical to SEQ ID NO: 10285
  REGION 1..455: note = Human gut metagenome

SEQ ID NO: 23383 - protein, 459 aa, unidentified
  REGION 1..459: note = Firmicutes bacterium
MQKLRERRLTNTPTVIPHDRSNCGLSLNSPEGRDSVTGLKTSPNSPDAALTAGGHAGQNLRVSVVYPHTKSFGVGVYVLNRRGKPLMPCSPRKARALLREDKARVVKRTPFTIQLTMTTGETKQSITLGVDSGYSRIGLSAVTNKQEVYSAGVNLRTDMVKLNSERRQYRRFRRSRKTWYRKPRFLNRKKPKGWLAPSIQNKFDTQIKLIGKAGEILPISQINIEVAAFDIQKIKNPDISGIEYQKGEQKGFWNVREYALHRDNHTCQHCKGKSKDPVLEVHHIVSRQIGGMRPDNLITLCSTCHEKVSKAGLKLNIQFSKEFKAETFMSTVRWMLVNKLKGLGNVVFHTYGYITKQKRRELRLPKSHSNDAFLIAGGTIQDRVGVEYLIQQVRKCNRKLFKGERSHIKNTSERIINGFERFDKVLWRRIECFIIGRRKTGYFDIRKLDGTKIHASALR

SEQ ID NO: 23384 - protein, 443 aa, Fervidicola sp.; identical to SEQ ID NO: 12449

SEQ ID NO: 23385 - protein, 423 aa, Moorena sp.
MRVFVLNKNRQPLDPCKPARARILLSNGKAKVYRRYPFTIILTEEIEEPITHNHQLKIDPGSKTSGLAIIQNNRVVWGCELTHRGFQIRDALTSRRQLRRARRHRKTRYRQPRFLNRTRPKGWLAPSLMSRVHNILTWVKKLTRLCPITGLSQELVRFDTQKLQNPEISGIEYQQGTLYGYELREYLLEKWNRKCAYCGAKGNHLEIEHIKPLSKGGSNRVSNLVIACHSCNQTKSNQEIEQLLSGKPEILKIILSQAKRPLADAAAVNTTRWKLYHELKLFGLPVEVGSGGLTKFNRCRQNLPKTHWLDAANVGKVDTLIVEDYKPLLVAAKGHGTRQICRTNKYGFPIRYCSRVKINKGFQTGDIVRAVVTKGKKIGTYVGRVATRKSGYFNISTKSGLVQGISHKYCQFIHRKDGYAYTD

SEQ ID NO: 23386 - protein, 426 aa, unidentified; identical to SEQ ID NO: 3614
  REGION 1..426: note = Human gut metagenome

SEQ ID NO: 23387 - protein, 524 aa, unidentified; identical to SEQ ID NO: 9992
  REGION 1..524: note = Human gut metagenome

SEQ ID NO: 23388 - protein, 469 aa, unidentified; identical to SEQ ID NO: 9316
  REGION 1..469: note = Human gut metagenome

SEQ ID NO: 23389 - protein, 430 aa, unidentified
  REGION 1..430: note = Groundwater metagenome
MAVFVLDKHKKPLMPCTEKRARLLLERRRAVVHKMSPFTIRLKDRTVEQSQLQPLRLKLDPGSKITGLAVLRENDSENRAAILLAELCHKPGIKEKLDVRKTQRRNRRNRKTRYREKRFDNRTRPSGWLPPSLQARVNQASNVVAKLQKLLPITAISTEHAKFDTQLLQNPAIAGIEYQQGELLGYEVREYLLEKWKRECAYCGKTDIPLEIEHITPKSRGGSDRISNLAIACRPCNQAKGNRTAEEFGHPEIQKQAKLPLKDAAMMNATRWALFNRLKETGLPVEYGTGARTKKQRIEHKFPKTHYYDACCVGAGTPANLAIGQKYVSIWKAIGRGTRRMCNIDKYGFPICHRQRKKNHFGFQTGDITAAAIPRGKYQGIHTGRVAVRASGYFDLKDVSGIRICQGIGHKHFRLLQRAGGWHYGKAKIA

SEQ ID NO: 23390 - protein, 424 aa, unidentified; identical to SEQ ID NO: 3434
  REGION 1..424: note = Human gut metagenome

SEQ ID NO: 23391 - protein, 413 aa, unidentified; identical to SEQ ID NO: 6473
  REGION 1..413: note = Human gut metagenome

SEQ ID NO: 23392 - protein, 473 aa, Marinobacter sp.; identical to SEQ ID NO: 19173

SEQ ID NO: 23393 - protein, 313 aa, unidentified
  REGION 1..313: note = Human gut metagenome
LYSQSKIAQSAQEYGVCRGGIENRRSRRNRKTRYRPPRFDNRVHSKHKGWLAPSVEVKIQEHITVIKRICRILPITLVRVETAEFDTQRLKAMLEGKPLPVGTDYQLGEMYDEYNVRQYVLKRDNYTCQCCGAHTTAKKAVKLHVHHLESRKMGGNAPGNLITLCITCHDALHKGKVSLDNKKRGKPMRDAAFMGIMRRTLMSRLREELPITVQGTYGYITKMQREQNDIKKSHVNDARCISKHPLAEPCSVCYRTKAIRHHNRQTHKANFSKGGIRKRSQMPYVVEGYRLWDKVLYKGQECFVSGRRTSGSF

SEQ ID NO: 23394 - protein, 438 aa, unidentified
  REGION 1..438: note = Human gut metagenome
LKDGKAKIIKHHPFTIQLLYDSKANTQPIEICEDVGYNYIGISVKSQSHEYVSAQYDTLQDEKACHDSCRKLRRTRRNRLRYRKPRFDNRKRGEGWLAPSLEHKKQLNIRLIERYVSVIPITHATVEVGSFDTMLVKAIEEGKATPESADYQKGPRYNLATLREAVFYRDNYICKVCGRKATEGAILHMHHMFYWKGRHGNSLSELITVCEKCHTPANHQKSGKLYGFGENVKFADLSGAAFMNTVRWQIVNELYAAFGKDFVTVTYGAMTKEKRIALHLEKSHNNDAYAMGSFHPVNRCAFEHYEKVKRNNRILEKFYDSQYIDTRTGELTNGKSLFNGRISRGHKKDSENLHKYRGKRICKGHRALRRKKLALNPGDLVSLNGEILVVHGTHTKKNGSVNVEFKTPSRGGKKSASLKKLKIVKTSNLMHSAWTKVS

SEQ ID NO: 23395 - protein, 441 aa, unidentified
  REGION 1..441: note = Human gut metagenome
MSVSVFVQDRKHRPLMPCRPARARRLLKSGRARVVRLFPFTIRLTDRLIEDSKLQPVLVKIDPGSRQTGVALVRADEKAHHHALFFVNLVHRGESIRDALTARRNCRRRRRGNLRHRAPRFLNRTKPQGWLPPSLRHRVDTATAWVAKLVKLAPVTGIVEELVKFDAQKLQNPEISGTEYQQGTLFEYEVREYLLEKFGRKCVYCGAENVPLNIDHVVPKARGGSNRISNLVLSCVNCNQKKDSQPVEVFLKNRPEVLDRIKRRLKTSLAHAATVNATRWSLFNALKAFGLPVETGSGALTKFNRHTFGVPKEHWLDALCAGRVNGVHYPEGMGILQVRCTGRGSYQRTRVDKYGFPRGYLTRQKRVHGFATGDMVEVVVPSGKKAGTYRGRVAVRKSGYFNIQTPEGVIQGIGWRHCRLLSFNDGYGYAWLRPAPHSSPV

SEQ ID NO: 23396 - protein, 442 aa, unidentified; identical to SEQ ID NO: 4522
  REGION 1..442: note = Human gut metagenome

SEQ ID NO: 23397 - protein, 427 aa, Enterococcus sp.; identical to SEQ ID NO: 5630

SEQ ID NO: 23398 - protein, 411 aa, unidentified; identical to SEQ ID NO: 5226
  REGION 1..411: note = Human gut metagenome

SEQ ID NO: 23399 - protein, 430 aa, Oscillochloris sp.; identical to SEQ ID NO: 12556

SEQ ID NO: 23400 - protein, 424 aa, unidentified; identical to SEQ ID NO: 3351
  REGION 1..424: note = Human gut metagenome

SEQ ID NO: 23401 - protein, 284 aa, unidentified
  REGION 1..284: note = Human gut metagenome
QYQQGPLYQKGSLENAVSEMQEHHCLFCEKPIEHYHHVVPKSENGSNTIANIVGLCTEHHNLVHKDATWQKKLAKEKVGLVKKYSALSVLNQIIPALTKEMNSLFPKHFFVTNGKSTYDYRTAHGVSKDHWLDAYCIACSVLPNDVCDSNINSHVPYELKQFRRHDRRVLHKANMSRVYTLNGKTVATNRHKAIKQTTDSLEEFRQSHPGDVCKLKVKEHHPAYRNLNRNYPGSVFLVDGQVHVMQGVSGSHNGKADGYYNTNGNAYPYYKCKFVVKNEGIVFA

SEQ ID NO: 23402 - protein, 442 aa, Lactobacillus sp.; identical to SEQ ID NO: 4549

SEQ ID NO: 23403 - protein, 420 aa, unidentified
  REGION 1..420: note = Human gut metagenome
MQYVYVLNKHGEPLMPCSPGKARLLLKQQKAHVIKRTPFTIKLLYGSAGYKQPITLGVDAGSKHVGLSASTEKRELYREEFTPRNDVVKLLSKRKQYRRSRRNRKTRYRAPRFNNRVHSKHKGWLAPSVEVKIQEHITVIKRICRILPISLVRVETAEFDTQRLKAMLEGKSLPVGTDYQLGEMYDEYNVRQYVLKRDNYTCQCCGAHTTKKKTVKLHVHHLESRQVGGNAPNNLITLCVDCHKALHAGKVKLDGKKRGKSLKDAAFMGIMRKTLMARLSKELPIPVQGTYGYITKMLREQNDIKKSHVNDARCISKHPLAEPCSVCYRTKAIRHHNRQTHKANFSKKGIRERSQTPYVVEGYRLWDKVLYKGQECFISGRRTSGSFALKRLDGTSISESVTFKKLRLLEPATNYLIERM

SEQ ID NO: 23404 - protein, 443 aa, unidentified
  REGION 1..443: note = Human gut metagenome
LTKDENRPSGRTTGLRAEQAEPAGIRKGDTLKVFVLNMRGKPLMPCSPAKARHMLKAGKAVVVRRTPFTIKLTIATGETKQDVTLGVDAGARHVGISATTEKEEVFASEVALRQDITGLLADRLAFRRARRNRKTRYRAPRFNNRVRSKHKGWLAPSVENRIQAHISRIEAVCRLLPVTKIVIETASFDIQKIRNPEVEGTGYQQGDQLGFWNVREYVLFRDGHICQHCRGRSKDPILNVHHLESRKTGGDAPNNLITLCETCHKAYHAGKIKLKVKRGQSFRAEAFMGIMRWTLLDRVRKTHPKLPVENTYGYLTKHKRIALGLPKTHCADAFCIAGNLKALRRGDFLFQQQTRKHNRQIHKCSILKGGVRTLNQAPFLVKGFRLFDKVRIGGQIGFVFGRRVRGTFNIRRLDKTVIGTDINCKKLSLLETRKTFLTELRKE

SEQ ID NO: 23405 - protein, 458 aa, Lactobacillus sp.; identical to SEQ ID NO: 6016

SEQ ID NO: 23406 - protein, 462 aa, unidentified; identical to SEQ ID NO: 2823
  REGION 1..462: note = Human gut metagenome

SEQ ID NO: 23407 - protein, 423 aa, unidentified; identical to SEQ ID NO: 4062
  REGION 1..423: note = Human gut metagenome

SEQ ID NO: 23408 - protein, 423 aa, unidentified; identical to SEQ ID NO: 3951
  REGION 1..423: note = Human gut metagenome

SEQ ID NO: 23409 - protein, 415 aa, unidentified; identical to SEQ ID NO: 10543
  REGION 1..415: note = Human gut metagenome

SEQ ID NO: 23410 - protein, 325 aa, unidentified
  REGION 1..325: note = Human gut metagenome
RKTRYRAPRFDNRIRTKRKGWLAPSVENRINAHLSRIETVIRLLPVTKISVETTSFDMQLLKNSDIAGKEYQESEQLGFWNVREYVLFRDGHVCQHCHGRSKDPVLNVHHLESRRTGGDSPGNLITLCETCHKELHRGEITLKAKRGQSFRAETFMGIMRWEVLDRLKASHPKLEVQNTYGYRTKHARIVNGIAKSHCADAFCIAGNLGAERLGEFLFQKQTRRNNRQIHKLSIPKGGIRKRNQVPFEVKGFRLFDKVACKGEEGFVFGRRSSGYFDVRKLDGTRISAGISYKKLHLLEKRQTYLTEIRKEEALPPLPEGRGLRA

SEQ ID NO: 23411 - protein, 470 aa, unidentified; identical to SEQ ID NO: 9228
  REGION 1..470: note = Human gut metagenome

SEQ ID NO: 23412 - protein, 411 aa, unidentified; identical to SEQ ID NO: 4865
  REGION 1..411: note = Human gut metagenome

SEQ ID NO: 23413 - protein, 416 aa, unidentified; identical to SEQ ID NO: 4565
  REGION 1..416: note = Human gut metagenome

SEQ ID NO: 23414 - protein, 518 aa, unidentified
  REGION 1..518: note = Human gut metagenome
MTPKKRKEASRMSEYIYVLGMDGDPQMPTKRKRHVEKLLQAGRARVFRQIPFTIQLTYENKPVLQPVTIAEDPGRSNIGMAVVSLSGELLSAAVVQTRNKEIVKLMEKRKQHRRASRNGERKARQRLAKKCHTMIKAGSLMRKLPMYGKDKRVRCNMIKNTEARFCNRKREDGWLTPSAEHLVRTHINLIHKMQKFLPITDVAIEINRFAFLSLEDPSISGVDFQNGPLKGYDDLNAAVEDLQDGHCLMCNSQIEHRHHIVPRSMQGSNTIGNIAGLCCKCHERVHKDSAFEDSLKKKKAGLNKRYAAVSALNQAIPFICKRLEQEFGKEHVHYCSGRDTSMVRRSLGYHKTKEEQLHEVDAWCIAVLSLQQIPEKAPSFDHVHEILQFRRQDRSRIKAQTSRAYYHERKKIAKNRKKAEGQKDDSLQGWRKRQVERYGEEQTRKMISQLKVKKSIRRYNRLDRLMPGAVFYYQGVRYVMRGQHSNGQYLQAVGMRDKDFPAKKCKIVVHNQGLVFVS

SEQ ID NO: 23415 - protein, 465 aa, unidentified
  REGION 1..465: note = Human gut metagenome
MSTCACVLSKNGERLMPTIRLGKVRHLLKDGKAKIIKHHPFTVQLLYDSETNIQPIEICEDVGYNYIGISVKSQSHEYVSAQYDTLQDEKSCHDACRRMRRTRRNRLRYRQKRFDNRKRDKGWLAPSLKHKKELNVNVIKMYCEVVPITHATVEVGSFDTMLVKAIEEGKATPEGADYQKGPRYNLATLREAVFYRDNYTCQVCGREASEGAILHVHHMFYWKGRHDNSLSELITVCEKCHTPANHQKGGKLYGFGEDIKFANLSGAAFMNTVRWQIVNELYAAFGKPFVTFTYGAMTKEKRIALHLEKSHNNDAYAMGEFHPNCRCTFEHYEKVRRNNRILEKFYDSRYIDIRTGEIATGKELFNGRINRSHKKDSENLHKYRGKRIRKGYRALRRKKVALNPGDLVSLNGEILTVHGTHTKKNGSVNVEFKTPSKSGKKSTSLKKLKIIKTISPMRSAWDKVS

SEQ ID NO: 23416 - protein, 451 aa, unidentified; identical to SEQ ID NO: 5203
  REGION 1..451: note = Human gut metagenome

SEQ ID NO: 23417 - protein, 395 aa, Moorena sp.; identical to SEQ ID NO: 14042

SEQ ID NO: 23418 - protein, 493 aa, unidentified; identical to SEQ ID NO: 2644
  REGION 1..493: note = gut metagenome

SEQ ID NO: 23419 - protein, 306 aa, unidentified
  REGION 1..306: note = Human gut metagenome
LAPSVEVKIQEHITAIRRVCGILPVSKVVVETAEFDLQLLKAIADGKPVPQGEDYQQGEMYGHYNVRQYVLWRDGYTCQCCGAHTTKKKEVRLHVHHLESRKVGGDAPDNQVTLCESCHEKLHKGLIAEKDFKKRKRKSTRDATFMGIMRKTLMQRLCSELPIPVIETRGYITKATREKLLVLPKSHTNDALAIAQGKQGFNVGYLPEIAQIDKIYTIRPVRHHNRQLYKATILKGGIRKSNQTKKYVFGYRLFDKVQFNGQDCFIFGRRTSGYFVVKTIDGKVIHNSASFKKLKLVERASNYLIA

SEQ ID NO: 23420 - protein, 428 aa, Thioploca sp.; identical to SEQ ID NO: 16155

SEQ ID NO: 23421 - protein, 430 aa, Citrobacter sp.; identical to SEQ ID NO: 5184

SEQ ID NO: 23422 - protein, 423 aa, Moorena sp.
MSNYTFVLDTNKKPLEPIHPGEARLLLKQGKAAVFRLYPFTIILKEKVPEIPETLSLKIDPGSKTTGIALLQNNKVIFCAELTHRGQAIKASLESRRALRRSRRSRHTRYRQPRFLNRTKPKGWLAPGLQHRVETTLTWVKKLIRLAPISSISQELVKFDLQKMENPEIVGVEYQQGELLGYEVREYLLNKWDRKCSYCGVKNIPLQVEHIHPKAKGGTNRISNLCLACEKCNQQKGTQLIEQFLAKKPEVLKRVLAQAKKPLKDAAAVNATRWGLFNQLKATGLPINKGSGGLTKFNRARLNLPKSHWIDAACVGKIDELKLLTNKPLLIKATGHGTRQMCRTDKFGFPSRYVPRFKFVKGFQTGDVVKAAVTSGKKIGNYAGRVAVRSSGSFNISASELVQGISHKYCQIIHKKDGYSYGF

SEQ ID NO: 23423 - protein, 536 aa, unidentified; identical to SEQ ID NO: 4526
  REGION 1..536: note = Human gut metagenome

SEQ ID NO: 23424 - protein, 453 aa, unidentified
  REGION 1..453: note = Human gut metagenome
MSVAVVSKTGMLLMPTSEYRARKLLKSKKAIIHGYHPFTIQLTERETGYIQPVELCMDTGYIHIGTSVKSEKHEYLGEQIDTLTDERQKHDACRMYRRQRRNRKRYRQPRFNNRERDDGWIAPSLEHKKTIHIQAISRICKVIPVTDITLEMGNFDTQVLKAREEGRPLPQGLDYQHGERYSVTTLREAVFLRDGYTCQCCGRTIKDGAILHAHHVIYRSQGGTNRISNLITVCDKCHTPANHKPGGKLYGWKPKVASFKGATYMTTIRWKLYNEVKALFLDIDIHITYGAETKERRRAFDITKSHVNDAFVMGQFHPKYRSKPVCYKKKRRNNRCLEKFYDAKYIDNRNGKTRTGQELFNGRISRNHKKDSENLHQYRRQKISTGKRTIRKQHYAIQPHDIVIFNGEKFETSGCHNNGTRVILLPQKKSVAIKKLNIYRYAGGYFKSAFNQK

SEQ ID NO: 23425 - protein, 252 aa, unidentified
  REGION 1..252: note = Human gut metagenome
MVYVQDIDGKPMMPTTRHGKVRRLLKANKATVVNLCPFTIRLTYATSGYKQEIVLGVDAGTKHVGLSATTKSKELYSSEVILRSDIVELLSTRRELRRTRRNRLRYRKPRFGNRVKSKHHGWVTPSVRHKVDAHIRVIDNICSTLPISRIIVEIAQFDTQKIKNPDISGNEYQEGDQLGFWNVREYVLARDGHKCQHCKGKSKDPILNVHHIESRKTGGDSPSNLITLCETCHKEYHKGNIDLKVKRGKSLR

SEQ ID NO: 23426 - protein, 458 aa, Lactobacillus sp.; identical to SEQ ID NO: 6016

SEQ ID NO: 23427 - protein, 477 aa, unidentified
  REGION 1..477: note = Human gut metagenome
MWLNSSEGKEQCCIRVNLGITLGKDSHSLRRGQFCQSLTVTTTRKETTSMYVYVLSQHGEPLMPCSPRKARTMLRDHKATVVRRTPFTIRLLHRSSEYKQDITLGVDAGSKFIGLSACTESKELFAAEVKPRNDVVDQLSTRRELRRSRRSRKTRYRAARFNNRVHSKHKGWLAPSVEVKIQEHITAIKRTCAILPIFMVIVETAEFDTQRLKAMLEGKPLPVGTDYQLGEMYDEYNVRQYVLKRDTYTCQCCGIQSTDKAPVKFAVHHKESRHVGGNAPNNLITLCEKCHRLLHAGVITLDEDKRKRGKSFRDAAFMGIMRKTLIQRLRSELSVPAKETYGYITKLLRDTHAIQKSHVNDARCIARVPDAQPSDTLYRIRAVRHHNRQLHKANPIKGSIRKRNQTPYEVFGFRLWDKVLFNGKECFITGRRVSGYFALKDFDGKKVHASASHKVLTKVESATSYLIERRTAVSSRV

SEQ ID NO: 23428 - protein, 456 aa, unidentified
  REGION 1..456: note = Human gut metagenome
MSTCVCVLSNSGERLMPTFRLGKVRHLLKDGKAKIVKHHPFTIQLLYDSKTNTQPIEICEDVGYNYIGISVKSQSHEYVSAQYDTLQDEKACHDSCRKLRRSRRNRLRYRKPRFDNRKRGEGWLAPSLRHKKELNVNVVKMYCAVMPITHATVEVGSFDTMLVKAIQEGKAIPEGADYQKGPRYNLATLREAVFYRDNYVCKVCGRKATEGAILHVHHMFYWKGRHGNSLSELITVCEKCHTPANHQKGGKLYGFGENVKFADLSGAAFMNTVRWQIVNELYAAFGKDFVTVTYGAMTKEKRIALHLEKSHNNDAYAMGNCHPAHRCEFGHYQKRCRNNRVLEKFYDATYIDTRTGDKAKGKELFNGRISRNHKKDSEDLHKYRSKKVSKGRRSIRRQRYAIQPYDTVRLESKSYITSGCHNKGTRLLIPANGKSKSVAISKVQVVCHAGAWIQII

SEQ ID NO: 23429 - protein, 422 aa, unidentified
  REGION 1..422: note = Human gut metagenome
LNKRGKPLMPCSPAKARLLLKEKKAIVVRRTPFTIQLTIATGESKQPVSLGVDAGYKHVGLSASTEKAELYASEVELRKDITDLLSARRALRQSRRNRKTRYRAPRFDNRIRTKRKGWLAPSVENRINAHLSRIEAVLRLLPVTKITVETASFDMLLLKNPDIAGKEYQEGEQLGFWNVREYVLFRDGHVCQHCYGRSKDPVLNVHHLESRRTGGDSPGNLITLCETCHEALHRGEIALKTKRGHSFRAEAFMGMMRWEVLNRLKASHSELEVNNTYGYRTKHARIVNGIDKSHCADAFCIAGNLGAERLCEFFFQKQTRRNNRQIHKLSILKGGIRKRNQAPFEIKGFRLFDKVACKGEESFIFGRRSSGYFDVRKLDGTRISAGISYKKLRLLEKRRTYLTEIRKEEALPPLPEGRGLRA

SEQ ID NO: 23430 - protein, 544 aa, unidentified
  REGION 1..544: note = Human gut metagenome
MKQKKQKVIVYILNKKGKPLMPTTRCGHVRKLLDSKKAVVVNSNPFTIRLKYDTPNGVQDVFAGIDSGRENIGSGVSNEDGDCLYLGELRTSNKSIKMKMNERAGFRRERRKHDRQNKQRKARKDHTEIQNGKADICRATISCKSVQISYPTAEESVTHKIIRGKEGKFANRHRDGDWITPSARQLVQIHMNDLKSICKILPISHVTLERVAFDFQKLENENIKAWEYGKGKLYGYDSPEEYIHDVQDGKCLVCGKPHIDYLHHIIPRNKGGSDKVSNIAGLCYDCHYGPMGVHNCQDTQDRLPELKNEANKQYKVSLLNSVMPVLIEEIDKFCKANSIMFSICEGHDTAKVRDMYDLQKDHCLDGFAISLVGRNVKSVDVMPDRIHQKQRYKKKSKNIIQKRNCREYYDGKKLVAINRHKGTDQKADSLEEYMNTYAETHTADECKMHFESLTVKPARRIYTFHKEGRICPLHIGDKVRYEKKNKIKGNTKVDTFICEGIYFSKDENKAKVEHNKTKSKKMKFCRAIESGCIPYIDYIKFALI

SEQ ID NO: 23431 - protein, 457 aa, unidentified
  REGION 1..457: note = Human gut metagenome
VWLYQAVYNLGEGFLPSSEERTAFYWLLIYRKEHGIMQYVYVLNKHGEPLMPCSPGKARLLLKQQKACVVKRTPFTIKLLYGSAGYKQPITLGVDAGSKHVGLSASTEKRELYREEFTPRNDVVDLLSTRRQNRRSRRNRKTRYRAPRFDNRVHSKHKGWLAPSVEVKIQEHITVIKRICRILPITLVRVETAEFDTQRLKAMLKGKPLPVGTDYQLGEMYDEYNVRQYVLKRDNYTCQCYGAHPTEKKPVRLHVHHLESRHVGGNAPNNLITLCVACHKALHEGKITLDKGKKRGKPLRDAAFMGIMRNTLLARLKDELNIPVKQTYGYITKLLREKNKIPKSHVNDARCIAKAPNAKPCDTMLYTRALRHHNRQIHKAKILNGGIRKKNQAPYLVKGFRLWDKVRYNGEECFITGRRSSGYFALKKYDGTVISNSASYKKLMLLEAATNYITERS

SEQ ID NO: 23432 - protein, 492 aa, unidentified; identical to SEQ ID NO: 4486
  REGION 1..492: note = Human gut metagenome

SEQ ID NO: 23433 - protein, 438 aa, Ktedonobacter sp.
MNQVFVLDTTKQPLNPVHPGYARLLLKQGKAAVYRRYPFTIRLSRRVEQPILSPLRIKVDPGSKTSGLALVNDASGDVVWAAELTHRGEQIKRDLDRRRAIRRKRRQRKTRYRKPRFTNRRKRRGTLPPSLESRVCNVLTWVCRLMKVCPVTNISQELVRFDTQALETPDIEGAQYQRGQLSGYEVREYVLLKWKHQCAYCDARDVPLELDHIDPRSRHGSNRVSNLTLACTPCNQRKSNQDVRQFLRDEPERLARILAQMKAPLRDAEAVNATRWMLNARLKTLGLPVECGSGGRTKCNRITRELPKTHWLDAVCVGRSTPESLIIKNIVPLQIRATGHGSRQMCRMDKYGFPRTGSKQHKRVQGFQTGDLVRAVVTSGTKQGTYVGKVAVRSRGTFNISTAHGVVTDIPHRFCVLVARSDGYSYQQGKEAAFPPSA

SEQ ID NO: 23434 - protein, 356 aa, unidentified
  REGION 1..356: note = Human gut metagenome
LQQTPSQGKHNLLLRQGRLIIKEVAYMSTVYVLNKNGKPLMPTTRCGHIRYLLKEKKARVVASKPFTIQLLYETNDVVQPLYLGIDPGRTNIGVAVVKTDGTAVFTAHLETRNKEIPKLMKKRKDSRRARRTNGRRCRRQRRAKANDTISKKCVKQATAQNGSVSKRAKEIGVIKRHLPGCEKEVLCIGIKNKEAKFSNRTRPEGWLTPTANQLLQTHINLVKKIRKFLPITDVVLEVNKFAFMRLDNPNVQKWQYQQGPLYQKASLEEAVSEMQERHCLFCKKPIAHYHHVVPQSENGSNTIDNIVGLCTKHHDLVHKDTTWQKKLAKKKTGLNKKYGAQSVLNQIIPALTERLN

SEQ ID NO: 23435 - protein, 446 aa, unidentified
  REGION 1..446: note = Human gut metagenome
LKGDLLLSAVTETRNKEITKLIDKRRACRRTSRNGERKARQRRAKRFGTTLKAGMLMRKLPKYDTDKFVTCKLIRNTESKFCNRKRPDGWLTPSARQLADTHINLIHKMQKYLPITDVAFEVNRFAFMLLKDPSVSGVDFQNGPLKGFDDLHDAVCELQDGTCLLCNRKIEHYHHIIPKSKNGSDTIDNIAGLCMCCHDKVHKNEKEAQRLQKKKKGLNKKYGALSVLNQAIPFICKRLEEEFGAEHVFYCTGRETAAVRNSFGYQKTKDNQLHEVDAWCIGILALGKIPKTLPDFSYTCRIRQFRRQDRSRIKAQTERTYKLEGKIVAKNRKKRTEQKTDSLEDWYQKQTALYGQKEADRMRSRLTAAKSQRRYNAPSRILPGTVFLYDGKRHVLSGQLTGGKYFRAVGDAKTNYPASKCRIVRKNEGLVFISQVITERVAVSHG

SEQ ID NO: 23436 - protein, 443 aa, Thiocapsa sp.
MVEENMTCFMQRKGEYPMVFVLDTNKCPLAPCHEAVARKLLKQGKAAIYKRYPFTIILKEIVDNFRPKTPYRLKIDHGSKHTGLAILRGQEVVWLGQLDHRTDIKERMDKRRAFRRARRNRKTRYRKPRFLNRRRKDGWLPPSLESRVQNIQTWVNRLKKLCPIGYISYENTKFDTQLMRNPEISGIEYQQGTLQGYEVREYLLEKFGRKCCYCGKENVPLEVEHIIPKSRGGTDRVDNLCLACHDCNQRKGSKTAEEFGYPHIQKQVKETLKDASAVNSTRWKVYEVLKQSGCEVECGTGARTKMNRIRLDLPKTHYFDACCVGESTPNHLYFKTKEVLFIRAKGRGSRSRTNLDRYGFPRGYLARQKFFFGFQTGDMVKAVIPRGKYQGVWFGEVSCRKTGSFDIKGKDGKRIAQGINYRYVQVIQRFDGYTYRREGMNIA

SEQ ID NO: 23437 - protein, 427 aa, Moorena sp.
MQNYVFVIDTNKQPLNPITPKKARRLLDKGKAAVFRMYPFTIILKREIENPSISPCQIKIDPGSKVTGFALVQNGQVIWGMELEHRGGLIKKKLESRCAIRRGRRNRNTRYRKPRFLNRKRPEGWLPPSLEHRILTIQTWVKRLIKFCMVNEIWIERVKFDTQKMQNPEINGIEYQQGELAGYEVREYLLEKWGRECTYCGKQNIPLQIEHIHPKSQGGSDRVSNLCLACEKCNQRKGNKPVEEFLKKKPSLLQKIKTKALSPLKDAAAVNATRNKLVKVLKSIKPIITGTGAQTKYNRTKLGFPKEHWIDAACVGDIETLVLRTSQPLFVTCKGQGGRQKAAPNKYGYPIRHNPLKPIKGWKTGDIAKHQKLGIGKVTPRTKGSFGFTPLGMKGYKSCKPQDISAVHRKDGYVYSFCKYLPGFTRE

SEQ ID NO: 23438 - protein, 548 aa, Moorena sp.
MRRISPGMQGPGLIPRLPNPKDAPRLWKHYYRMLVPYRRRALQATAPESYERRHHDMPKTKLEQELSKADYIYVLSADGDPLMPTRRRGHVKRLLNRGKARIVSHVPFVIQLKYNGPKNTQPLFGGIDPGRTNIGAAVVTPEGKCVYRSHTVSRNRDVPKKMKARKLHRQASRRGERLRRKRRARANGTTTEFSNGRMLPGYKKPVMVKDIVNTTAKFNYRKRHEKWLTPTANQLVQTHENLICRISAILPVTDWTIEANKFAFMKMDNGKCYGVDFQNGRMKGYKNSHEYVYARQNGVCPLCGAPIEHYHHIIPRSQGGSDLPENILGVCMKCHERIHKGELKAGMKGVMKKYGALSVLNQAIPYIWQWMTETYGEDHAHFCTGMETKTMRDDSGLSKDHDIDALCIACIGSGIAPDRRIPRTFEIVQFRRHNRANINHQCERTYRLDGRIVCRNRHKRFEQKGDSLEEFRQKYPDQVSRLTVTKSTRYYNNTSRLMPGTVFLFGGERYVLQSQFTGGSYYHAVGCERNFPAAKCTIIRENAGLVYI

SEQ ID NO: 23439 - protein, 441 aa, Moorena sp.
ANFTRFGSKHKTMCNYVFVLDASHKPLNPCRPVTARKLLTAGKAAVYRRYPFTIILKKQVEAEPKPMSLKIDPGSKITGLAIVYGNQVVWSAEIEHRGSKIKSALDSRRAVRRSRRNRKCRYRKPRFNNRKRPEGWLAPSLQHRVATTMTWVLKLMKLTPIGGISQELVRFDTQKLQNPEISGIEYQQGELMGYEVREYLYQKWGRQCVYCGAKSVKLEVEHIIPKSKGGTNRVNNLTLACHRCNQAKGNLDARDFLSGKPDVLKRILGRAKQPLLDAAAVNSTRWQLYQSLKETGLSVAVGTGGRTKYNRIKLGLPKGHWVDAACVGEVATLKIVTRQPLLIKAMGHGCRQVIQMDKYGFPRKGYKPKHPVKGWKTGDIVNVVAGKNAGLKGVRIKTVRAKGNFDLIGADQDSSNKVNSASRNYIQCVHRQDGYYYSFAK

SEQ ID NO: 23440 - protein, 426 aa, unidentified; identical to SEQ ID NO: 3604
  REGION 1..426: note = Cyanobacteria bacterium UBA11366

SEQ ID NO: 23441 - protein, 554 aa, Acidithiobacillus sp.; identical to SEQ ID NO: 7890

SEQ ID NO: 23442 - protein, 421 aa, Aphanothece sp.; identical to SEQ ID NO: 5997

SEQ ID NO: 23443 - protein, 477 aa, unidentified; identical to SEQ ID NO: 12969
  REGION 1..477: note = Human gut metagenome

SEQ ID NO: 23444 - protein, 429 aa, Moorena sp.
MCNYVFVLDANHKPLNPCRAVTARKLLTAGKAAVYRRYPFTIILKKQVEAEPKPMSLKIDPGSKMTGLAIVYGNQVVWSAEIEHRGSKIKSALDSRRAVRRSRRKRKCRYRKRRFNNRKRPEGWLAPSLQHRVATTMTWVLRLIKLTPIGSISQELVRFDTQKLQNPEISGIEYQQGELMGYEVREYLYQKWGRQCVYCGAHSVKLEVEHIVPKSKGGTNRVSNLTLACHRCNQAKGNLNAQDFLLGKPDVLKRILARAKQPLLDAAAVNSTRWKLYQSLKKTGLSVEVGTGGRTKYNRIKLGLPKSHWIDAACVGEVATLEIVTRQPLLIKAMGHGCRQVIQMDKYGFPRKGYKPKHPVKGWKTGDIVNVVAGKNAGLKGVRIKSVRAKGNFDLIGADQDSSNKVNSASRNYIQCVHRQDGYYYSFAK

SEQ ID NO: 23445 - protein, 405 aa, unidentified
  REGION 1..405: note = Human gut metagenome
RQIPFTIQLTYENKPVLQPVTIAEDPGRSNIGMAVVSLSGELLSAAVVQTRNKEIVKLMEKRKQHRRASRNGERKARQRLAKKCHTMIKTGFLMRKLPMYGKDKRVRCNVIKNTEAKFCNRKREDGWLTPSAEHLVRTHINLIHKMQKFLPITDVAIEINRFAFLSLEDPSISGVDFQNGPLKGYDDLNVAIEDLQDGHCLMCNSPIEHRHHIVPRSMQGSNTIGNIAGLCCKCHERVHKDARFEDRLKKKKAGLNKRYAAVSVLNQAIPFICKRLEQEFGKEHVHYCSGRDTSMVRRSLGYHKTKEEQLHEVDAWCIAVLSLQHVPEKAPEFDHVHEILQFRRQDRSRIKAQTSRAYYHEGKKIAKNRKKAEGQKDDSLQGWRKRQVERYGEEQTRKMISQLKV

SEQ ID NO: 23446 - protein, 380 aa, Moorena sp.; identical to SEQ ID NO: 3156

SEQ ID NO: 23447 - protein, 432 aa, Moorena sp.
MRVFVLDKNQKTLDPCRPARARILLKQGKAKVLKRYPFTIIMQEKEVENCVTHEHQLKIDPGAKTTGIVIIQGSKVIWGAELTHRGFQIREALTSRRQLRRSRRNRKTRYRQPRFLNRKRSEGWLAPSLMSRVDNILTWTKKLIRLCPIKGISQELVRFDTQKMENPEISGVEYQQGTLYGYEIREYLLEKWNRKCAYCGVDDIPLEIEHIKPKSKGGSDRVSNLTIACKKCNKAKGSQDIENFLSGKPNVLKQILSQSKKPLANAAAVNSTRWKLYNSLKSTGLPIETGSGGLTKYNRCRQNLPKTHWLDAANVGKVDHLYIESYQPLLITAKGHGTRQMCRTNKFGFPTRYVPRYKEIKGFQTGDIVKAIVTKGKKIGTYTGRVATRQTGSFNISTKPGLVQGISHKYCSVIHRKDGYSYSFVLQGMQWP

SEQ ID NO: 23448 - protein, 423 aa, unidentified
  REGION 1..423: note = Human gut metagenome
MVYVLDQNGQPLMPTSRHGKVRRMLQSGQAKVVNRCPFTIQLNYESGHQIQEISLGIDAGSKHIGVSATTKAKVLYEADVELRNDMVELLSSRRELRRGRRNRKTRYRKPRFQNRKRNEGWLAPSIRQKIETHMTVISKVCKILPIRKIIVETASFDIQKIRNPEIQGAEYQQGEQLGFWNVREYVLTRDNHTCQCCHGKSKDKILNVHHIESRKAGGNAPNNLITLCETCHTGHHQGTVKLPAEIKRGMSFKDATFMGIMRWTFYEDLKKKYEPFGISISNTYGYIMKHTRIEHDLQKEHYIDARCISGNPDALSNGEVYYQKKTRCHNRQIHKLTILKGGIRKKNQAEYVVKGFRLFDVVKARGTHWYIHGRRTNGSFVLKTLSGEKLEIVPNKIRFIIQQRGFITERRAVLTAANSAHRL

SEQ ID NO: 23449 - protein, 415 aa, unidentified
  REGION 1..415: note = Human gut metagenome
MVYVLANDGQPLMPTERHGKVCRMLKSGIAKVVKKCPFTIQLQYESERNVQPVALGIDAGSKHIGISATTKTKVLYESDVELRDDIVKLLATRRQLRRRRRSRKTRYRPARFDNRRRKEGWLTPSIRQKIESHLTVVANACKILPINQIIVETASFDIQKIKDPEIQGIEYQQGEQMDFWNIREYVLFRDGHTCQCCKGKSKDKVLNVHHIESRKTGGNAPNNLITLCETCHKGYHNGTVTLPKNIKRGMKFKDAAFMGIMRWTFYNTLKEQYEPDIPVHYTYGYITKNTRINHNLPKGHCIDARCISGNPDAVSDGTYYYQKKVRCHNRQIHKQTILKGGIRKSNQAEYLVRGFRLFDKVRYQGREYFIFGRRKSGFFDIRTLSGEKVNKGSISVKKLTFADTRKNYLIERRTV

SEQ ID NO: 23450 - protein, 420 aa, unidentified; identical to SEQ ID NO: 10900
  REGION 1..420: note = Human gut metagenome

SEQ ID NO: 23451 - protein, 381 aa, Moorena sp.; identical to SEQ ID NO: 15152

SEQ ID NO: 23452 - protein, 421 aa, Ktedonobacter sp.
MCLVYVLTPDSKPLMPCVPAIARLLLKEGQARVVRRTPFTIKLLTLPKTTYTQPVTLGVDTGSAVVGVASADESANILYLSEVELRNDIAATMKERASKRRNRRNRQTRYRQPRWLNRRKSIKQGRFSPTMRSKIDGHLREIRFVKSILPIRAIVLETGTFDPHALKNPEVLQNPSLYQKGINYGFANTKAYVLTRDSYMCQRCQGKSKDRRLEVHHLVFRRQGGSDDETNLLTLCKTCHDGLHAGTITLKRSGKKKGTLAHATQMNSIRVQLLKRLDTEETWGFVTKEHRLLAGLPKTHANDAAVMATRGKTPQFRTTQVILKKCIPDGDYQQTKGVRSEQPITTGKIRGFRKFDKVRYCGQEYFIKGRMSTGYAIFMGMDGKKVNLRPIPKFEKMKRVSARSSWIISQSIMPGFSSSTT

SEQ ID NO: 23453 - protein, 420 aa, unidentified
  REGION 1..420: note = Human gut metagenome
MVYVISQDGKPLMPCSDPIARLLLKQGKAKVKKREPFTIKLTYETTNHTQGLTLGVDTGSGTIGTAVSKDNGDIVYMSEVVVRNDITDKMTQRAKYRRNRRNRKTRYRKARWLNRASSIKKDRFSPTMQSKLHSHVREIEYIQSILPVTEMVFETGQFDMQLMKNPSLANPKVRPWGYQKGANYGFENTKAMVLNRDNYTCQCCKGKHKDSKLEVHHIVFRSQGGSDEESNLLTLCHTCHKDLHSGKINPKLSGKVKGNLKYATQMNSIRKQLFRFYPNAIETFGYVTKANRLHLGVDKEHYYDACTIATQGNAFNVKSNLYKKKCVSDGDFQKTKGIRSEQPIVTDKICGFRKFDKVRYFGNDYFIKGRMSTGYAILMDIDGNKIDFSTMPRGYKTPKLSNCKRITARSTVMTQVKVVR

SEQ ID NO: 23454 - protein, 529 aa, unidentified
  REGION 1..529: note = Human gut metagenome
MSTVYVLNKDGKPLMPTTRGGHVRHLLKNQKARVVRTKPFTIQLLYETNDVVQPLYLGIDPGRTNIGVAVVKTDGTAVFTAHLETRNKEIPKLMKKRKESRRARRTNGRRCRRQRRAKANDTISKKCVKQPTAQNGSISKRAKEIGIIKRRLPGCEKDVLCIGIKNKEARFNNRTRPEGWLTPTANQLLQTHINLVKKIQKFLPISDVVLEVNKFAFMQLDNPNIQKWQYQQGPLYKKESLERAVSEMQEHHCLFCDKPIDHYHHVVPQSENGSNTIANIVGLCAEHHNLVHKDAAWQKKLAEEKVGLNKKYGALSVLNQIIPALTKELSFLFPEHSFVTNGKSTYDYRATHGVSKDHWLDAYCIACSVLPSDVCDSNINNHMPYELKQFRRHDRRVLHKANTSRVYTLNGKKVATNRHKAAKQTADSLEEFRQSHPDDVCKLKVKEHHPAYRNLNRNYPGSVFFVGKQVHVMQGIASSKDGKATKYNDTSATTIAAGKCEFVAKNSGILFVQCKFRKVFSDETTKKLQ

SEQ ID NO: 23455 - protein, 448 aa, unidentified
  REGION 1..448: note = Human gut metagenome
MSTGLRAVQAEPAGIRKGDALKVFVLNMRGRPLMPCSPARARHLLKAGKAVVRRRTPFTIQLRIATGETKQSVTLGVDAGAKHVGLSAATEKEEVFASEVELRQDITGLLAARLSLRRDRRHRKTRYRAPRFLNRVRSKHKGWLAPSVENRIQAHMSRIDAVCRLLPVTKIVITTASFDVQKIKNPTIEGTDYQQGDQLGFWNVREYVLFRDGHICQHCRGRSKDPILNVHHLESRKTGGDAPNNLITLCETCHKAYHAGKIKLKVKRGQSFRAEAFMGIMRWTLLDRVRKAHPGLPVENTYGYLTKNTRITQGLPKTHCVDAYCIAGNLKAVRRGVYLHQRQVRKHNRQIHKCTVLSKTLKDGTKIGYRKLNQTPHLVKNFRLFDKVRCLGQTGFIFGRRSSGYFDVRRLDGVKISSCISYRKLTLLEKRSTYLTELRKEDGASSPV

SEQ ID NO: 23456 - protein, 544 aa, unidentified
  REGION 1..544: note = Human gut metagenome
MKQKKQKVMIYILNKKGKPLMPTTRCGHVRKLLDSKKAVVVNSNPFTIRLKYDTPNGIQDVFAGIDSGRENIGSGASNEDGDCLYLGELKTSNKSIKIKMTERTGFRRERRRHDRQSKQRKAKKDHTEIQNGNDDICRTTISCKSVQISYPVAEESVTHKIIRGKEGKFANRHRDEGWITPSARQLVQMHMNDLKSMCKILPISHVTLERVAFDFQKLENENIKVWEYGKGKLYGYDSPEEYIHDVQNGKCLVCGKPHIDYLHHIIPRSKGGSDKVSNIAGLCYDCHYGPMGVHNCQNTQDRLPELKSEANKQYKVSLLNSVMPVLIEEMDKFCKANSIMFSICEGHDTAKVRDMYDLQKDHCLDGFAISLVGRNVKSVDVMPDRIYQKQRYKKKSKNIIQKRNCREYYDDKKLVAVNRHKGTDQKADSLEEYMNTYAETHTADECKKHFDSLTVKPARRTYTFHKEWRICPFHIGDKVRYEKKNKIKGNTKVETFICESIHFYKDENKAKVEHNKTKSKRMKFCRVLEAGCTPYIDYRKLALM

SEQ ID NO: 23457 - protein, 557 aa, unidentified; identical to SEQ ID NO: 5269
  REGION 1..557: note = Human gut metagenome

SEQ ID NO: 23458 - protein, 318 aa, unidentified
  REGION 1..318: note = Human gut metagenome
LVKKIQKFLPISDVVLEVNKFAFMRLDNPNIQKWQYQQGPLYKKESLESAVSEIQEHHCLFCKKPIDHYHHVVPQHKNGSNTIGNIVGLCAKHHDLVHKDSAWEKKLAQKGTGLYKKYGALGVLNQIIPTLTNELSSLFPKHSFVTNGKSTYDYRAAHGVSKDHWLDAYCIACSVLPSNVCDSNINNHMPYELKQFRRHDRRVLNNENMNRVYTLNNKAVAINRHKAKDQKTVSLEEFRKEHPDDVCKLKVKEHHPTYRNMNRNFPGSVFLVGKQIHVMQGIASSKDGKATKYNDTSATAIAAGKCKFVAKNTGILFV

SEQ ID NO: 23459 - protein, 480 aa, unidentified; identical to SEQ ID NO: 2726
  REGION 1..480: note = Human gut metagenome

SEQ ID NO: 23460 - protein, 426 aa, unidentified
  REGION 1..426: note = Human gut metagenome
MVYVQNHLGQPLMPTQDHRKVRLLLKAGAAVVVRRTPFTIRLTTRTKTYVQPVILGVDAGSKTVGMSAATHEEEVFAAELTPRNDVVKNLADRREFRLSRRGRTTRYRQPRFNNRVHSKHKGWLAPSVEVKIQEHITSIKRACELLPIGKVVVETAEFDLQLLKSIADGMPVPQGENYQKGEMYGFYNVRQYVFFRDGYTCQCCGAHGKGIKFHTHHMESRKTGGNAPDDLVTVCDKCHKAFHAGLITDAKLKKRRRKSTRDAAFMGIMRKTLLQRLRAELPIPVVETRGYITKATRERLLKLPKSHTNDALAIAMGRHGFGIKEVTYMPQSDRIYQIKPVRHHNRQLHKAIPKKGGRRQRSQGPKYVQGFRRFDKVLYRGQECFIWGLRTRGYFQLKLLNGTKVHESAKASELILLEHRSGYLIA

SEQ ID NO: 23461 - protein, 372 aa, unidentified
  REGION 1..372: note = Human gut metagenome
KHIGLSATTEKDVMYEAEVELRNDIVKLLSTRREQRRSRRNRKTRYRKPRFDNRRRKDNWLAPSVQNKVDTHLTTVSKVTKMLPISKIIVEVASFDLQKLKADMEGIKRPEGVDYQNGEQSGFWNVREYVLSRDNHTCQCCKGKSKDKILNVHHIESRKTGGDAPNNLITLCEYCHSQYHKGNIKLPEKIKRGMSFKDAAFMGIMRWTFYNKLKEMYIPSGIEVKLTYGYITKNIRIKNQLPKEHCIDARCISGNPKAQSDGTVYKLKKVRCHNRQIHKCTINKGGARKLNQAPHTVFGFRLFDKVLYKNQECFIFGRRIDGRFAIRMLDGTKINEQLNYKKLKLVECAKHYITERRQVLCSAASYGVPAPD

SEQ ID NO: 23462 - protein, 415 aa, Parasutterella sp.
LMPCSPAKARLLLKEKKAIVVRRTPFTIQLTIATGEAKQPVSLGVDAGYKHVGLSASTEKAELYASEIELRQDITDLLSARRELRRARRNRKTRYRAPRFDNRIHTKRKGWLAPSVENRINAHLSRIEAVLRLLPVTKITVETASFDMQLLKNPDISGKEYQEGEQLGFWNVREYVLFRDGHVCQHCHGRSKDPVLNVHHLESRRTGGDSPGNLITLCETCHKALHRGEITLKAKRGQSFRAEAFMGIMRWEVLNRLKASHPELEVNNTYGYRTKHARISNGIAKSHCADAFCIAGYLGAKRLGKFFFQKQTRRNNRQIHKLSILKHGLRKRNQAPFEIKGFRLFDKVASKGEEGFIFGRRSSGYFDVRKLDGTRISAGISYKKLHLLEKRQTYITEIRKEKALPPLPEGRGLRA

SEQ ID NO: 23463 - protein, 400 aa, unidentified
  REGION 1..400: note = Human gut metagenome
AKIKKRTPFTIQLVYGSSGYTQEVILGVDAGSKTIGMSASTTKEELLSAEVKPRNDVVDLLSTRREFRRVRRNRKTRYRKPRFDNRVRSKHKGWLAPSVEVKIQEHITSIKRVCRILPVSKVVIETAEFDLQLLKAIADGKPVPQGEDYQKGEMYGHYNVRQYVLWRDDYTCQCCGAHATKKKEVRLHVHHLESRKVGGDAPDNQVTLCESCHEKLHKGLITEKDFKKRKRRSTRDATFMGIMRKTLMQRLCSELPIPVVETRGYITKATREKLLVLPKSHTNDALAIAQGKRGFNVGYLPGIIQTDKIYTIRPVRHHNRQLHKAAILKGGIRKSNQAGKYVFGYRLFDKVQFNGQDCFIWGRRTTGIFTIKTINGKMIKDGISFKKLKLAEKSTSYLIA

SEQ ID NO: 23464 - protein, 319 aa, unidentified; identical to SEQ ID NO: 4189
  REGION 1..319: note = metagenome

SEQ ID NO: 23465 - protein, 283 aa, Moorena sp.; identical to SEQ ID NO: 14303

SEQ ID NO: 23466 - protein, 494 aa, unidentified
  REGION 1..494: note = Human gut metagenome
MDKDMIYVLDTNGSPLAPTHRHKHIHMLIKTKQAKVVSYHPFTIQLLYESEIPRVVPNYIGGMDPGRTNIGTNVIDKTGKSVYASHIETRNKDIVVLMKKRSAHRHASRNGERARRIRRARFHNTTFLYGDHYRQLPKCEENVLVHDIKNTEARFCCRTRPDGWLTPTANQLLQTHISAVKQTMKILPITDFVIELNTFDFEKLKNPNIKKWQYEKGALYQTTLHDAIDEQQNHHCLLCQNPIEHYHHVVHRKQNGSDTIDNLVGLCEVCHDKVHKHNEIEAKLLNKKEGLKKEFAGISILNQIFYPFINWLMNIFGEDHVFITNGKETAQFRKTYNVPKTHELDAFCIACSILENSIIDYNCRVFEIKQFRRHNRQLINSTRERKYYSVDRVKTTKTLKNGKTVTKTELKNKTLVATNRKKRTEQKVDSLEEYHTKLRQKYDKIITKKIISGLIVSKSTRGYRNPKTLMPGAVFIYQGKHYVLSRTANEGRYY

SEQ ID NO: 23467 - protein, 419 aa, Moorena sp.; identical to SEQ ID NO: 18551

SEQ ID NO: 23468 - protein, 465 aa, unidentified
  REGION 1..465: note = Human gut metagenome
MNTCVCVLSNSGERLMPTFRLGKVRRLLKDGKAKIIKHHPFTIQLLYDSKTNTQPIEICEDVGYSYIGISVKSESHEYVSAQYDTLQDEKEHHDDCRMHRRTRRNRLRYRKPRFDNRKRGEGWLAPSLKHKKELNVNVVKMYCAVMSITHATVEVGSFDTMLVKAIQEGKVIPEGADYQKGPRYNLATLREAVFYRDNYVCKICGRKATEGAILHMHHMFYWKGRHGNSLDELLTVCEKCHTPANHQKSGKLYGFGEDVKFADLSGAAFMNTVRWQIVNELYAAFGKPFVTITYGAMTKEKRIALQLEKSHNNDAYAMGEFHPNHRCTFEHYEKVRRNNRILEKFYDSRYIDIRTGEITTGKALFNGRINRNHKKDSENLHKYRGKRIYAGHRALLRKKVNLNPGDFVSLNGETLVVHSTHTKKNGAVNVEFETPAKSGQKSASLKKLKIVKAANSIHPAWKKIS

SEQ ID NO: 23469 - protein, 424 aa, unidentified; identical to SEQ ID NO: 4955
  REGION 1..424: note = Human gut metagenome

SEQ ID NO: 23470 - protein, 470 aa, Anaerostipes sp.; identical to SEQ ID NO: 2825

SEQ ID NO: 23471 - protein, 348 aa, Anoxybacillus sp.; identical to SEQ ID NO: 18653

SEQ ID NO: 23472 - protein, 458 aa, unidentified
  REGION 1..458: note = Cyanobacteria bacterium UBA8553
  REGION 13..14: note = misc_feature - Xaa can be any naturally occurring amino acid
LTRRTLPERRDSXXKVFLIDQGKQPLNPIHPAQARQLLRDGKAAVFRRYPFTLILKEEVSLLTLASCAGITSRTQRRSNPNINSLRIKIDPGAKTTGLALVDDNTGEVVWVAELQHRGFQIRDALTSRRQLRRSRRNRKTRYRKPRFLNRTRPKGWLPPSLSSRVANILTWVKRLSSSSQIIAISTELVRFDTQKMEDVEISGVGYQQGTLAGYEVREFLLEKWDRTCAYCGAKDTKLEIEHIQPRSKSGSNRASNLCLACVPCNQKKGNQDIKDFLKDKPDLLKRILSHAKKPLADTAAVNATRWNLYENLKKTGLPVEVGTGGRTKYNRTVRGLEKTHYWDAACVGVSTPEQLITSGVKPLRIAAKGHGTRQQCRTDKWGFPVRYCSRTKFHKGFQTGDIVAAVVTSGKKIGIYVGRVATRATGSFNISTPDGLIQGISHKYCTHIHKKDGYSYVQ

SEQ ID NO: 23473 - protein, 241 aa, unidentified
  REGION 1..241: note = Human gut metagenome
MVYVQDINGKSLMPTTRHGKVRRLLKDKKAVVVNLCPFTIKLMYITPDYKQEIVLGVDAGTKHVGLSATTKSKELYASEVILRNDIVDLLSTRRELRRTRRSRLRYRKPRFNNRIKSKRQEWIAHSVKYKIDAHIRVVEKVYSILPVSHIIIEVAQFDTQKIKNPDISGKEYQEGDQLGFWNVREYVLTRDEHKCQHCKGKSKDKILNVHHIESRKTGGNSPSNLITLCKTCHKEYHKGNI

SEQ ID NO: 23474 - protein, 515 aa, unidentified; identical to SEQ ID NO: 3339
  REGION 1..515: note = Human gut metagenome

SEQ ID NO: 23475 - protein, 419 aa, Moorena sp.
MVYVINYDGQPLMPCSQAIARLLLKQGKAKCIKRTPFTIKLLYQTTNYTQGITLGVDTGSGKIGSSAVTENGNILYLSEIEVRNDITDKMTQRSKYRRNRRNRKTRYRKARWLNRKNSIKNDRFSPTMISKINSHLKEIKFVQSILPITKIILETATFDPHALKNPKVLSSKWLYQKGINYGFANTRAYVLNRDSYTCQYCKGKTKDRKLEVHHIIFRRNGGSDEAKNLITLCKTCHDNLHDGNISLKGGKAKGQLKHATQMNSIRQQLLKIVDCEETFGFITKEHRQILNLPKEHYMDAVAIASQGNNINFKTNQVLFKKCVSDGDYQQTKGVRSEQKIPTNKIMGFRKYDKVKYLDREYFIKGRMSSGFAILMDINGTKIDFNNAPKGMKTPKLNNMKRIGSRKTWIIQAETIQNIC

SEQ ID NO: 23476 - protein, 437 aa, unidentified
  REGION 1..437: note = Human oral metagenome
MNSHGHWQEGQFSERKAAEMLNNQKEYSFVLDVEGKKLDPTIVQNAWRLVRQKKATLIAKRPMTIQLKKVIDSPNDDEIRMGIDDGAKHVGLALVQKCKTKNKVVFVATMEHRNDVHKLIEQRRGYRQRRRYWKRYRKERFSNRASTRRKGRITPTILQKRQAVVRVVDRLSKDIRIDSIYLEDVAIDVRVLTDEKKLYSWQYQRSNRLDENLRKATILRDNCKCQLCGKRNCRLEVHHITPRRMNGANTIGNLITLCSECHSNVTGREIEFAEQLYSKIGKKKNNASLQYASHVMVGKTWLREELSKRTPVFLTTGGDTANKRIDWNLEKSHEIDAVCITNLEPESVGVKPWNVKPLRHQRKTMKVKEILGFRHRDIVCYTFKNGEYHEGYVTALYPSEGKQKEGLNFLSSTKHCKRVNPKKCQRLDRPDKFLWLA

SEQ ID NO: 23477 - protein, 447 aa, unidentified; identical to SEQ ID NO: 5309
  REGION 1..447: note = Human gut metagenome

SEQ ID NO: 23478 - protein, 399 aa, unidentified
  REGION 1..399: note = Human gut metagenome
LRVFLLNKRGKPLMPCSPAKARLLLKEKKAIVVRRTPFTIQLTIATGESKQPVSLGVDAGYKHVGLSASTEKAELYASEVELRPDVSDLLSARRTLRQSRRNRKTRYRAPRFDNRIRTKRKGWLAPSVENRINAHLSRIGAILRLLPVTKITVETASFDTQLLKNPDISGKEYQEGEQLGFWNVREYVLFRDGHACQHCHGRSKDPVLNVHHLESRRTGGDSPGNLLTLCETCHKALHRREIKLKTKRGQSFRAEAFMGIMRWEVLNRLKASHPELEVHNTYGYRTKHTRIVNGIDKSHCADAFCIAGNLGAKRLGEFFFQKQTRRNNRQIHKLSILKHGLRKRNQAPFEVKGFRLFDKVVCQGEEGFIFGRRSSGSFDVRKLDGTRISAGISCKKLRL

SEQ ID NO: 23479 - protein, 296 aa, unidentified
  REGION 1..296: note = Human gut metagenome
PSVENRINAHLSRIEAVLRLLPVTKITVETASFDLQLLKNPDISGKEYQEGEQLGFWNIREYVLCRDGHVCQHCYGRSKDPVLNVHHLESRRTGGDSPGNLITLCETCHKALHRGEITLKAKRGQSFRAEAFMGIMRSEVLNRLKASHPELEVNNTYGYRTKHARIANDIAKSHCADAFCIAGNLGAERLGEFFFQKQTRRNNRQIHKLSILKGGIRKRNQAPFEIKGFRLFDKVACKGEEGFIFGRRSSGYFDVRKLDGTRISAGISYKKLHLLEKRRTYLTEIRKEEAIPNSPA

SEQ ID NO: 23480 - protein, 443 aa, unidentified
  REGION 1..443: note = Human gut metagenome
LTKDENRPSGRTTGLRAEQAEPAGIRKGDTLKVFVLNMRGKPLMPCSPAKARHMLKAGKAFVVRRTPFTIKLTIATGETKQDVTLGVDAGARHVGISATTEKEEVFASEVALRQDITGLLADRLAFRRARRNRKTRYRAPRFNNRVRSKHKGWLASSVENRIQAHMSRIEAVCRLLPVTKIVIETASFDIQKIRNPEVEGTGYQQGDQLGFWNVREYVLFRDGHICQHCRGRSKDPILNVHHLESRKTGGDAPNNLITLCETCHKAYHAGKIKLKVKRGQSFRAEAFMGIMRWTLLDRVRKTHPKLPVENTYGYLTKHKRIALGLPKTHCADAFCIAGNLKALRRGDFLFQQQTRKHNRQIHKCSILKGGVRKLNQAPFLVKGFRLFDKVRIGGQIGFVFGRRVRGTFNIRRLDKTVIGTDINCKKLSLLETRKTFLTELRKE

SEQ ID NO: 23481 - protein, 417 aa, unidentified; identical to SEQ ID NO: 3910
  REGION 1..417: note = Human gut metagenome

SEQ ID NO: 23482 - protein, 392 aa, unidentified
  REGION 1..392: note = Marine metagenome
MAVFVLDKKKQPLMPCSEKRARLLLQRGRAVVHKRYPFTIRLKDRVGGSTQPLSLGIDPGSKTTGLALIREPDSQQRHVLCLFELIHRGYQIKKALQQRAAFRRRRRSANLRYRAPRFNNRIKPKGWLAPSLQHRVDTVMAWVNRLSKSEPITGISQELVRFDTQKLESPEISGVEYQQGTLLGYEVREYLLEKWGRECAYCGTADTPLEIEHVVPRSRGGSNRVSNLTLSCHPCNAEKDSQTLTDFFATNKGLKKRLKANGHTANARLERVQRQLKQPLRDASAVNATRWALFSALKTTDLPVAVSSGGRTKYNRQRLNIPKTHALDAACVGAFGKLYDWTVPTLTIKAMGRGSYQRTRLTKHGFPRGYLMRQKQVHGFQTGHGACDSTHR

SEQ ID NO: 23483 - protein, 429 aa, Moorena sp.; identical to SEQ ID NO: 6772

SEQ ID NO: 23484 - protein, 413 aa, unidentified; identical to SEQ ID NO: 3023
  REGION 1..413: note = Human gut metagenome

SEQ ID NO: 23485 - protein, 470 aa, unidentified; identical to SEQ ID NO: 2825
  REGION 1..470: note = Human gut metagenome

SEQ ID NO: 23486 - protein, 420 aa, unidentified; identical to SEQ ID NO: 2681
  REGION 1..420: note = Human gut metagenome

SEQ ID NO: 23487 - protein, 480 aa, unidentified
  REGION 1..480: note = Human gut metagenome
LYTKPLDNIGEGSLPPSGEINLKGMTFMVYVKSIDGKALMPTSNAKARKLLKQKKAKVVSLRPFVVKLTYKTKTEYTQKLNLGVDSGYSNIGFSVIDAKQEYIAGEVKLLEGMKKRLLEKASYRRIRRSRLRYRKARWNNRVKSKKKGWLAPSLKHKLDTHIKFIDYLKNILPIGKITIEVANFDIQKIKDDLISDVDYQNGDMFGFWNVREFVLHRDGHKCQNPNCKHKDKKEQILKVHHIRYRSEGGSDRPENLITLCSKCHTPANHKKGKFLYDWCVNGKKVRGFKDATFMSMIRWYLVNELKSKHNNVSITYGYITKNHRIQNGIEKSHLNDAFAIAKGTNQVRTKDRFLVIQDRLKNRSLEKFYDSKIIDIRTEKKVSGGDLNCGRSTRNKNLNTEDLRKYRGVKISKGQRRIRKQKYFYQPNDLVKYDGKVYTVKGTQNEGKYIALKEIKKVPKVELLIPYVFKKGLNWSYGLC

SEQ ID NO: 23488 - protein, 432 aa, unidentified; identical to SEQ ID NO: 6070
  REGION 1..432: note = Human gut metagenome

SEQ ID NO: 23489 - protein, 406 aa, unidentified; identical to SEQ ID NO: 9290
  REGION 1..406: note = Human gut metagenome

SEQ ID NO: 23490 - protein, 395 aa, Pseudomonas sp.; identical to SEQ ID NO: 19354

SEQ ID NO: 23491 - protein, 418 aa, unidentified; identical to SEQ ID NO: 2710
  REGION 1..418: note = Human gut metagenome

SEQ ID NO: 23492 - protein, 418 aa, unidentified
  REGION 1..418: note = Human gut metagenome
MSVFVVGLNGCRLMPVSERKARLLLKGGKASVYRKVPFTIKLNYKTGSTVQPGYLGIDTGSQHIGVSVVQKDGTVLHKEEIGLRDSMSKRKLLESRASSRRGRRYRKTRYRHPKWKPKTKRIYNEKADRKGRHWKKQKNTFTSKRQAGWLPPSLQSKTDHHIQWIRKLLDLLPEGYRLSIELGRFDPARMKDPEIHGELYQKGPQYDYENVRAYVLARDGYTCRVCKKKGGKLHVHHILYRSRGASDNPKYMAAVCSKCHTTENHLPGGILYQWMQDQKKFTRGLRDATFMNILKKRLRKAFPDAVFTYGNITKADREKLELPKSHGNDATAIALVKTEVKSVKDEEPVIHIQQVRRKKRSLHEETPRKGRKEPNRTASRSDKNTKSVTVTKGSGEKKASMTACLFDRVELDGKKGWI

SEQ ID NO: 23493 - protein, 454 aa, unidentified; identical to SEQ ID NO: 13904
  REGION 1..454: note = Human gut metagenome

SEQ ID NO: 23494 - protein, 423 aa, Moorena sp.
MRVFVLNKNRQPLDPCKPARARILLSVGKAKVYRRYPFTIILTEEVKQPITHDHQLKIDPGAKISGLAIVQGKRVIWGSELTHRGFQIQEALTSRRQLRRSRRNRKTRYRKPRFLNRTRSKGWLAPSLTSRVQNILTWVKKLSRFCPVTGISQELVRFDTQKLQNPEISGIEYQQGTLYGYELREYLLEKWNRKCAYCGVAGTQLEIEHIKPLSKGGSNRVSNLAIACRRCNQAKSNQDIELFLSKKPSILKRILSQAKRSLADAASVNTTRWKLYHVLKSIGLPVEVGSGGLTKFNRCRQSLPKTHWLDAANVGKVETLIIEVTLPLAISAKGHGTRQLCRTNKYGFPTRHCSRIKFHKGFQTGDIVRAVVTKGKKIGTYVGRVATRKSGSFNISTKSGLVQGISHKYCKFIHRKDGYAYAN

SEQ ID NO: 23495 - protein, 448 aa, unidentified; identical to SEQ ID NO: 5196
  REGION 1..448: note = Fermentation metagenome

SEQ ID NO: 23496 - protein, 423 aa, Arthrospira sp.; identical to SEQ ID NO: 2857

SEQ ID NO: 23497 - protein, 415 aa, unidentified
  REGION 1..415: note = Human gut metagenome
MIYVRSKDGKALMPSERRGRIGYLLRHGKAHVVSRVPFVVQLDYESTTYTQGVNLGIDAGSKHIGVSASSEKKELLAAQVELRSDVVNLLSTRRELRRTRRNRKTRYRKVRFDNRKRKDGWLAPSIEQKVECHLKVIRLVHKLLPITKTTIEVAQFDAQKIKNSDIKGEEYQQGEQMGFWNVREYVLARDGHKCVHCKGKSKDPILNVHHLESRKVGGNSPSNLVVLCETCHKAYHRGEFDLKIKRGTTLRDAAVMNIMRWSVYERAKAEFGNVYLTYGYITKHTRIENDIEKTHAADAFCIAKNVHARRSRTFFMCRCVPRHTRALHVANPKKSGIRRSCIASHKIGKSRFQRFDMVRWKGKECFIFGSTHGNVVLRKIDGVKVHETQAVSAKTIKFLKRIRNNILMEERASES

SEQ ID NO: 23498 - protein, 408 aa, unidentified; identical to SEQ ID NO: 17631
  REGION 1..408: note = Human gut metagenome

SEQ ID NO: 23499 - protein, 387 aa, unidentified
  REGION 1..387: note = Human gut metagenome
MVYVQDIDGKPMMPTTRHGKVRRLLKENKAVVVNTCPFTIKLTYKTSDYKQEIVLGVDSGTKHVGLSATTKSKELYASEVILRSDVVDLLSTRRGLRRTRRSRLRYRKQRFNNRVKSKKDGWIAPSVRHKIDSHVRIISFVYSILPVSKLIVEVAQFDTQKIKNPEISGKEYQEGEQLGFWNVREYVLARDGHKCQHCKGKSKDPILNIHHIESRKIGGDSPSNLITLCETCHKEFHKGNIKLKVSRGKSLRDAAVMGIMKWKLYEELKSRYDNVSMTFGYITKYNRINHGIEKSHVSDAFVISRNFNSCRLGYYYKRKLVRRHNRQIHKMKILKGGIRKRNQAPFKVFGFRLFDKVMFQGEEHFIYARRLSGQFNIRVIIGENKKY

SEQ ID NO: 23500 - protein, 431 aa, unidentified
  REGION 1..431: note = Human gut metagenome
MDAWDIIVVLNKRGKPLMPCSPAKARLLLKEKKAIVKRRTPFTIQLTIATGESKQPVSLGVDAGYKHVGLSASTEKAELYASEVELRQDITDLLSARRALRQSRRNCKTRYRAPRFDNRIRTKRKGWLAPSVENRINAHLSRIETVIRLLPVTKISVETTSFDMQLLKNSDIAGKEYQEGEQLGFWNVREYVLFRDGHVCQHCHGRSKDPVLNVHHLESRRTGGDSPGNLITLCETCHKALHRGEIKLKAKRGRSFRAETFMGIMRWGVLNRLKASHPKLEVHNTYGYRTKHARIANGIAKSHCADAFCIAGNFGAKRLGEFFFQKQTRRNNRQIHKLSILKGGIRKRNQAPFEVNGFRLFDKVACKGEEGFIFGRRSSGFFDVRKLDGTCISAGISYKKLHLLEKRRTYLTEIRKEEALPPPPEGRGLRA

SEQ ID NO: 23501 - protein, 470 aa, unidentified; identical to SEQ ID NO: 2949
  REGION 1..470: note = Human gut metagenome

SEQ ID NO: 23502 - protein, 274 aa, unidentified
  REGION 1..274: note = Human gut metagenome
LPITLVRVETAEFDTQRLKTMLEGKPLPVGKDYQLGEMYDEYNVRQYVLKRDNYTCQCCGVHTTAEKMVKLHVHHLESRKTGGNAPSNLITLCTTCHDALHKGKVSLDGKERGKPLRDAAFMGIMRKTLMGRLREELPISVQGTYGYITKMRREQNDIKKSHMNDALCIAKHPKAQHCENSYRSKAVRHHNRQIHKAKMLKGGIRKLNQAPYIVKGFRLWDKVLYNGQECFISGRRSSGYFALRKLDGTTITNSASFKKLQLLEATSSYLIERM

SEQ ID NO: 23503 - protein, 458 aa, unidentified; identical to SEQ ID NO: 4978
  REGION 1..458: note = Human gut metagenome

SEQ ID NO: 23504 - protein, 419 aa, unidentified
  REGION 1..419: note = Human gut metagenome
MYVYVLNKHGEPLMPCSAHKARVLLKNKKACVVKRTPFTIKLLYGSAGYKQPITLGVDAGSKHVGLSASTETHELYREEFTPRNDVVDLLSTRREFRRARRNRKTRYRAPRFNNRVHSKHKGWLAPSVEVKIQEHITVIKHVCQIMPILLVRVETAEFDTHRLKAMLEGKPLPVGTDYQLGEMYDEYNVRQYVLKRDNYTCQCCGAHATKTKQVKLHVHHLESRKTGGNAPSNLITLCPTCHKAIHEGKKTLGTKKRGKPLRDAAFMGIMRKTLLARLHKELSIPVQQTYGYITKMLREKNNLPKSHMNDALCIAKHPKAAPCENCYRSKAVRHHNRQIHKATILKGGIRKTNQAPYLVKGFRLWDKVRYNGQECFISGRRATGYFALRKLDGAIVTNSASYKKLRLLETAKNYLRERM

SEQ ID NO: 23505 - protein, 465 aa, unidentified
  REGION 1..465: note = Human gut metagenome
MNTCVCVLSNSGERLMPTFRLGKVRRLLKDGKAKIVKHHPFTIQLLYDSKTNTQPIEICEDVGYNYIGISVKSESHEYVSAQYDTLQDEKEHHDDCRMHRRTRRNRLRYRKPRFDNRKRGEGWLAPSLKHKKELNVNIVKMYCAVIPITHATVEVGSFDTMLVKAIQEGKAVPEGANYQKGPRYNLATLREAVFYRDNYACKVCGRKATEGAILHMHHMFYWKGRHGNSLGELLTVCEKCHTPANHQKSGKLYGYGEKIKFADLSGAAFMNAVRWQIVNELYTAFGKPFVTITYGAMTKEKRIALRLEKSHNNDAYAMGEFHPNHRCTFEHYEKVRRNNRILEKFYDSRYIDIRTGEIATGKELFNGRINRNHKKDSENLHRYRGKRTYAGHRALLRKKVNLNPGDLVSLNGEVLVVHGTHTNKKGAVNVEFKTPGKSGQKSASLKKLKIVKAADSMHSAWEKIS

SEQ ID NO: 23506 - protein, 424 aa, unidentified; identical to SEQ ID NO: 13009
  REGION 1..424: note = Human gut metagenome

SEQ ID NO: 23507 - protein, 430 aa, unidentified
  REGION 1..430: note = Terrestrial metagenome
MGELLRKEADYMLVYVINRHGKPLMPCKPQKARKLLKEQKAKVVKRTPFTIQLLYGSSGYKQDVTLGVDTGSKTIGLSATTENKEVFSAEVKLRTDIVDLLSTRRTLRRSRRNRKTRYRKARFLNKKKPKGWLAPSIKNKIDTHIKVVKMVYDILPITKIIVEVAQFDIHKINNPDIKGEEYQEGEQLGFYNVREYVLFRDKHTCQHCNGKSRDPILNVHHIESRKTGGNSPDNLITLCETCHRKYHAGELKLKGKRNSSFRDAAFMGIMRWAFYNKLKELYSNVSLTFGYITKNVRIKHNLEKSHRIDARCISGNPSTEESDCWYFFKQVRKQNRQLHKTNPKKGIRRENKAPGYVHGYQLFDKVEYLDRECFVFGRRSSGYFDLRTLDGEVVSRSASVGKLKLVERSSSLLCERREVSFLTALKHGVS

SEQ ID NO: 23508 - protein, 518 aa, unidentified
  REGION 1..518: note = Human gut metagenome
MGYVFVLDRDGNPLMPTTRCGKVRRMLKNGQAEVVSRIPFTIRLCYEPASKETQRLVYGCDPGRTNIGSAVVRENGYCVYLDKCTTRNREIPQLMARRRQHRQASRRGERLARKRLAKRLGTTTKKLLDRLLPGYEKPVRVKDIINTEARFNNRFRPKGWLTPTAMQLLRTHLNILKKVRKILPITDVVLEANKFAFMQLENPHIFRWQYQYGPLHGKGSVENAVKEQQRGTCIFCKHEIEHYHHIIPRSRGGSDTLPNMVGLCNACHDKVHKSEEWFQKLKKKKAGLNKKYGALSVLNQIIPYLVDQYAELFPDHTWVTAGYSTKQFREDHGIEKDHDRDAVCIACSILEKVDGIVFPEITYQMEQFRRHDRARIKSFRNRYYYLGKEKVAVNRKKAVLADPSGKEKNGKLKTQDSLEEWFAKEAESNGLQEAEKKCSRLRAVKSIRIRNNMQRPLPGSIFIFEGKRYLLTGNHGEYYQTKVAGKTVEFLKSKCEIAAGNQGLVYTSQVKSGASSHV

SEQ ID NO: 23509 - protein, 470 aa, unidentified; identical to SEQ ID NO: 2825
  REGION 1..470: note = Human gut metagenome

SEQ ID NO: 23510 - protein, 493 aa, unidentified; identical to SEQ ID NO: 2644
  REGION 1..493: note = Human gut metagenome

SEQ ID NO: 23511 - protein, 485 aa, unidentified
  REGION 1..485: note = Human oral metagenome
LVRHYSLIGTVLQSKTYHQRKERSVMLVYVLKQNGQPFMPTVRFGKVRRLLKTKKAKVVRREPFTIKLLYEPETDVVQECYCGVDTGSRHIGVAVVSNDKVLYQSQTELRNDIKRKMDARRAYRRNRRQRKTRYRQPRFLNRSNSTKSDRLPPSVKHKVQAHIDEIEFCKKILPISDSNLIIEVSQFDTALMKDPSLISEKIKHWGYQQGFNYGYSSRREAILHRDNYTCQCCGKKNCRLEVHHIKFKSDGGTDDEENLITLCEGCHKGVHAGTVTLDKKPKKSKNLKYATHMSIIRSYLLKKYPNAIETFGFVTSENRNHLQLKKDHHIDACIIASGGLNFEKLDVIYRKRRVSVQDRVLTKGVRGEQKLPTGKIFGFKKFDKVEYLGETCFIKARRSSGAFVLMDIDNNSIDFRDRGGKQNPSYMSIKRITTRESVLCISKRIEKEKRKIESDIENYKNLLRESEEKLRELTTKEGENNAIQD

SEQ ID NO: 23512 - protein, 428 aa, unidentified; identical to SEQ ID NO: 14464
  REGION 1..428: note = Human gut metagenome

SEQ ID NO: 23513 - protein, 417 aa, unidentified
  REGION 1..417: note = Human gut metagenome
MPCSPAKARLLLKQKEAIVKRRTPFTIQLTIATGEAKQPVALGVDSGYKHIGLSATTEKAELYASEVELRQDITDLLSARLALRRSRRSRKTRYRAPRFDNRVANKREGRLAPSVENRIAAHMSRVEAVMRVLPVTAITVETAAFDTQLLKNPDIAGAAYQQGEQLGFWNVREYVLFRDGHVCQHCRGKSKDPILNVHHIESRRTGGDAPNNLITLCETCHKAFHRGEIKLKVRRGKSFKAETFMGIMRWTLLERLKKAHPELRVRNTYGYLTKHKRISHGIAKSHCADAYCIADNLGAKRLEGFFFQKQTRKHNRQIHKLSILKGGLRKKNQAPYEVKGLRLFDKVICKGEEAFIFGRRTSGSFDVRRLDGTRISAGINYKKLRLLEPRTTYLTEFRKEAALPPLHKCRGFCAEFL

SEQ ID NO: 23514 - protein, 460 aa, unidentified; identical to SEQ ID NO: 7734
  REGION 1..460: note = Mouse gut metagenome

SEQ ID NO: 23515 - protein, 423 aa, unidentified; identical to SEQ ID NO: 3951
  REGION 1..423: note = Human gut metagenome

SEQ ID NO: 23516 - protein, 248 aa, unidentified
  REGION 1..248: note = Human gut metagenome
LPVGTDYQLGEMCDEYNVRQYVLNRDHYTCQCCGAHTTTKKTVKLHVHHLESRKVGGNAPSNLITLCTTCHDALHKGKVSLDNKKRGKPMRDAVFMGIMRKTLMARLREELPIPVQGTYGYITKMWREQNDIKKSHVNDARCISKHPLAEPCSVCYRTKAIRHHNRQTHKANFSKGGIRKRSQMPYVVGGYRLWDKVLYKGQECFVSGRRTSGSFTLKKLDGTRISKGVTFKKLRLLEPATNYLIERM

SEQ ID NO: 23517 - protein, 430 aa, unidentified; identical to SEQ ID NO: 15696
  REGION 1..430: note = Human gut metagenome

SEQ ID NO: 23518 - protein, 419 aa, Moorena sp.; identical to SEQ ID NO: 3955

SEQ ID NO: 23519 - protein, 522 aa, unidentified
  REGION 1..522: note = Human gut metagenome
MATDFIYVLDTDGTPLAPTHRHKHTRMLLKTGQAKVVCYRPYTIQLLYESETPRVVPQLIAGQDPGRTNQGTNVIDRTGKSVYAAHIETRNKEIPTLMKNRSANRRASRNGERARRIRKAKLHHTTFQYGDHNRKLPKCNETVPIHYIINTEAKFCCRTRPDGWLTPTANQLLQTHISEVKQLMKILPITDFVIELNKFDFAKLKDPTLQKWQYGKGSLYQTNLKDLIDEEQDHHCLLCKNPIEHYHHIVHKADNGSDTVENMVGLCKKCHTRVHKNQKVEEKVLSKKEGLEKKFAGTSILNQIFKPYIIWLIKTFGEDHVFITDGKTTAKFRNDYNVPKTHELDAYCIACSILENPTINYDCVVFEEKQFRHHNRQLINSTRERKYYHVDRVQTTKTLKNGKQVVKTELKNKTLVATNRKKRMDQKTDSLREYHMKLRQKYDKQTVKKIISGLVVVKSTRGYRDQNTIMPGAVFMYHGKHYVLSGTSNQGQYFRAVGQGKTNFPTKDCKIVRKNTGLVYLY

SEQ ID NO: 23520 - protein, 415 aa, unidentified
  REGION 1..415: note = Human gut metagenome
MVYVLANDGQPLMPTERHGKVCRMLKSGIAKVVKKCPFTIQLQYESERNVQPVALGIDAGSKHVGVSATTKAKVLYESDVELRDDIVKLLATRRQLRRRRRSRKTRYRPARFDNRRRKEGWLAPSIRQKIESHLTVVANVCKILPVSQIIVETASFDIQKIKNPDIQGIEYQQGEQMDFWNIREYVLFRDGHTCQCCKGKSKDKVLNVHHIESRKTGGNAPNNLITLCETCHKGYHNGTVTLPKNIKRGMKFKDAAFMGIMRWTFYNTLKEQYEPDIPVHYTYGYITKNTRINHNLPKGHCIDARCISGNPDAVSDGTYYYQNKVRCHNRQIHKQTILKGGIRKSNQAEYLVRGFRLFDKVRYQGREYFIFGRRKSGFFDIRTLSGEKVNKGSINVKRLTFVDTRKNYLTERRTV

SEQ ID NO: 23521 - protein, 421 aa, unidentified
  REGION 1..421: note = Human oral metagenome
MLVYVLKQNGQPFMPTSRFGKVRRLLKEGKAKVVRREPFTIRLLYEPETDVVQECYCGVDTGSKHIGVAVVSNNKVLYQSQTELRTNIKRKMDSRRMYRRSRRNRKTRYRKKRFLNRRNSIKKDRLPPSVQHKVQAHIDEIEFCKKILPVLDENIILEVSQFDTALMKNPSLMNEKIKHWGYQQGFNYGYSSRRGAILHRDNYTCQCCGKKNTRLEVHHIIFRSNGGTNDEENLLTLCEDCHKGVHAGTIVLDNKPKRMKLKYATHMSIIRSRLLKEYPEAIETFGFVTSENRNHLKLEKDHFIDACVIASGGLEFKPLDLTFYKRRVSKGDYQLCKGVRGEIKIPTRKVLGFRKFDRVKYLGKEYFIMSRASRGFARLMNIFGNKIDFSTMPKGYKTVKLSNCERVSARRSSLCFGQKLF

SEQ ID NO: 23522 - protein, 405 aa, unidentified
  REGION 1..405: note = Human gut metagenome
LKVFVLNMRGQPLMPCSPAKARHLLKAGKAVVRRRTPFTIQLRIATGETKQSVTLGVDAGAKHVGLSAATEKEEVFASEVELRQDITGLLAARLSLRRDRRHRKTRYRAPRFLNRVRSKHNGWLPPSVENRIQAHMSRIDAICGLLPVTKIVIETASFDIQKIKHPDVEGTDYQQGDQLGFWNVREYVLFRDGHVCQHCHGHAKDKILNVHHLESRQTGGDAPNNLITLCETCHKACHAGKIKLKVKRGQSFRAEAFMGIMRWTLLDRVRKAHPGLPVENTYGYLTKNTRITLGLPKAHCVDAYCIAGNLKAVQRGVYRHQRQVRKHNRQIHKCTVLSKTLKDGTKIGYRKLNQTPHLVKNFRLFDKVRCLGQTGFIFGRRSSGYFDVRRLDGVKIGSSRKSVER

SEQ ID NO: 23523 - protein, 417 aa, unidentified
  REGION 1..417: note = Human gut metagenome
MPCSPAKARLLLKEKKAIVKRRTPFTIQLTIATGEAKQPVTLGVDSGYKHIGLSATTEKAELYASQVELRQDITDLLSARLALRRSRRSRKTRYRAPRFNNRVASKRKGWLAPSVENRIAAHMSRVEAVMRVLPVTAVTVETAAFDTQLLKNPDIAGAAYQQGEQLGFWNVREYVLFRDGHVCQHCRGKSKDPILNVHHIESRRTGGDAPNNLITLCETCHKAFHRGEIELKVRRGKSFKAETFMGIMRWTLFERLKKAHPELRVRNTYGYLTKHKRISHGIAKSHCADAYCIADNLGAKRLSGYLFQKQTRKHNRQLHKLSILKGGLRKKNQAPYEVKGFRLFDKVICKGEEAFIFGRRTSGSFDVRRLDGTRISAGINYKKLRLLEPRTTYLTEFRKEAALPPLHKCRGFRAEFL

SEQ ID NO: 23524 - protein, 412 aa, unidentified; identical to SEQ ID NO: 4932
  REGION 1..412: note = Human gut metagenome

SEQ ID NO: 23525 - protein, 448 aa, Aneurinibacillus sp.; identical to SEQ ID NO: 9622

SEQ ID NO: 23526 - protein, 431 aa, unidentified; identical to SEQ ID NO: 7729
  REGION 1..431: note = Human gut metagenome

SEQ ID NO: 23527 - protein, 460 aa, unidentified; identical to SEQ ID NO: 7594
  REGION 1..460: note = Human gut metagenome

SEQ ID NO: 23528 - protein, 429 aa, Thioploca sp.
MQRVFVLDTKKKPLMPCHPARARKLLKKGKAAVYRRYPFTIILKERVDGQLQPVEIKFDPGSRTTGIALVGHFEGGSEVIWAGNLNHRGLQIKSNLVSRRAIRRSRRNRKTRYRPARFLNRRRPKSWLPPSLRSRVDNVKNWALKLSRLAPITQIAVETVRFDTQKMQNPEVSGMEYQQGELAGYEFREYLLEKWGRQCAYCGVQNVPLEVEHIQPRSKEGSNRVSNLTLACTKCNQKKGNKDVKDFLKGKPDRLKKIQAQAKASLRDTAAVNATRYAIGEALKTFGFVISFSSGGRTKFNRTQQGYPKEHWVDAACVGENGNPVAIPKAITPLIITAKGRGSRQKCRMNKYGFPRTGPKKHKRVKGFQTGDIVKAIVTKGKKIGTYVGRVAVRATGSFDIGSGIEAVGSISYKYCQLLQRSDGYDYLK

SEQ ID NO: 23529 - protein, 350 aa, unidentified
  REGION 1..350: note = Human gut metagenome
SEVELRKDINDLLSARRALRQSRRNRKTRYRAPRFDNRIRTKRKGWLAPSVENRINAHLSRIEAVLRLLPITKITVETASFDMQRLKNPDISGKEYQEGEQLGFWNVREYVLFRDGHVCRHCHGRSKDPVLNVHHLESRRTGSDSPDNLITLCETCHKALHRGEITLKAKRGQSFRAQAFMGIMRREVLNRLKASYPELKVHETYGYLTKNARIANGIVKSHGADAFCIAGNLGAERLGEFFFQKQTRRNNRQIRKLSILKGGIRKRNQAPFEAKGFRLFDKVACQGEEGFIFGRRSSGSFDVRKLDGTRISAGISCKKLRLLEKRRTYLTEIRKEEALPPLPEGRGLRA

SEQ ID NO: 23530 - protein, 516 aa, unidentified
  REGION 1..516: note = Methanobacteriaceae archaeon UBA541
MKYLDYTFVVDNNNVPCMPVTNNEAGYLIRCGLAKVINHDPFVIQRLDDYISESEIRDEITMKMDMGYMNVGFSVGTKDHEYLSGQVKLLNGISERLEQRASYRRTRRGRIRYRKNKNVDYKTIHNPTYKNGNEDNWIAPSVQHKIDSHVRLYRKIASWIPIDKVIIEIANFDIQAIKALKDGKEISGVDYQRGEMYGFENVKQYVRERDNYTCQICETDTIKKGTGLEVHHIIPRSQGGSNKPSNLISLCKKCHNKVHSNNNNNKYFRELQTRKINDTYKDATFMNTSRWRIYESIGSECPTYISYGYITSLNRKTNNLPKFHYVDAACIQKFTYKTLTRNIYLVEQKRCNDRCMSTFWDAKYIDSRDGKEKKGSELSYKRLPNATSKRTTRRKDVENDRIYRQRKTKKGEFRFVCNSRCLKAGDLIRINIGKRKGIIGEVTNSQIERDKYKIRFTYDGQDVKYPSISISKDEYNILKETGKCDSISIVRTRRGMIWRKYDRAKYESENVDQYSS

SEQ ID NO: 23531 - protein, 492 aa, unidentified
  REGION 1..492: note = Human gut metagenome
MTPVWEGRTFAYLPQSQKEEPAMSVFVVGLNGCRLMPVSERKARLILNDGKASVYRKVPFTIKLNYKTGSTTQPGYLGIDTGSQHIGVSVVREGGTVLHKEEIGLRDSMTKRKLLEAKASLRRGRRCRKTRYRHPKWRPKTKRVYCEVPDKKGRHWQKQKNTFISGRPEEWLPPSLQSKTDHHIRWIKKLQGLLPEWYRLSIELGRFDPARMKDPEIHGNLYQKGPQYDYENVRAYVLDRDRYTCQVCRRKGRKLHVHHILYRSQGASDTPQYMATGCSSCHTTENHLPGGILYQWMQEQKKFTRGLRDATFMNILRKRLMKTFPDAVFTYGNITKVDREKLKLPKSHGNDATAIALVRTGVTSVQDEEPVLYIQQVRRKKRSLHEETPRKGRKEPNRTAARNSKNTKAVTVTKRRDGKKVSVTACLFDRVELNGKKGWITGFTGKACRIVDTEGNYVAATDKYTQVNISSIRILHHTGNWVTGLKWNVGKR

SEQ ID NO: 23532 - protein, 470 aa, unidentified; identical to SEQ ID NO: 2949
  REGION 1..470: note = Human gut metagenome

SEQ ID NO: 23533 - protein, 482 aa, unidentified
  REGION 1..482: note = Human gut metagenome
LVWNVQAPWDVYPSPTLCGLCLKVLRGRNGDADKKPIPTLTKDENRPSGRTTGLRAEQAEPAGIRKGDTLKVFVLNMRSKPLMPCSPAKARHMLKAGKAVVVRRTPFTIKLTIATGETKQDVTLGVDAGARHVGISATTEKEEVFASEVALRQDITGLLADRLAFRRARRNRKTRYRAPRFNNRVRSKHKGWLAPSVENRIQAHISRIEAVCRLLPVTKIVIETASFDIQKIRNPEVEGTGYQQGDQLGFWNVREYVLFRDGHICQHCRGRSKDPILNVHHLESRKTGGDAPNNLITLCETCHKAYHAGKIKLKVKRGQSFRAEAFMGIMRWTLLDRVRKTHPKLPVENTYGYLTKHKRIALGLPKTHCADAFCIAGNLKALRRGDFLFQQQTRKHNRQIHKCSILKGGVRKLNQAPFLVKGFRLFDKVRIGGQIGFVFGRRVRGIFNIRRLDKTVIGTDINCKKLSLLETRKTFLTELRKE

SEQ ID NO: 23534 - protein, 397 aa, unidentified
  REGION 1..397: note = Human gut metagenome
LITGKHMSSTRYWHEEKFSERKVSEMTNYAFVLDANNKQLTPTKEQKAWFLIRKKRATLVSKYPMVIQLKKKIPDKEICKDEVRCGIDDGGLHVGVALVQKCQTRNKVVFKGVIEQRNDVKHLIDVRCGYRRYHRYHKRYRSARFNNRNSSKREERIAPSILQKRQATIRVINQLNKWINITNYWLEDVAIDIRALTDGYKPYRWQYQKSNRLDENIRKAVILRDGCKCMECGKSNCRLEVHHIKPRRLKGSSTLDNLITLCTKCHQKTESVEELYMDRYFALLNSSDNKNLNYAQHVMIGKKWLREQLSNLGMLYLTNGGDTANKRIDWDIAKSHSNDAICITDLRPDTCEIKEWAIKPMRRQSKAKTDNVLGIKHRDLVEYTFRNGKTHRGYVTA

SEQ ID NO: 23535 - protein, 447 aa, unidentified; identical to SEQ ID NO: 17795
  REGION 1..447: note = Human gut metagenome

SEQ ID NO: 23536 - protein, 419 aa, Moorena sp.
MQNYVFVIDTNFQALNPISPKKARKLLDKGKAAVFRMYPFTIILKTAIENPLLSPCQIKIDPGSKFTGFSLVQDNKVLWAMELQHRGSLIKKKLEARKALRSGRRGRNTRYRKPRFINRRRNDNWLPPSLEHRILTIQAWVERLIKFAPVSEIWIERVKFDPQKMSNPEISGIEYQQGSLAGYEVREYLLEKWGRKCTYCGKKDIPLQIEHIKPKSKGGSNRVSNLCLSCQKCNQKKGNKSVEDFLKNKPGLLQKIKSLAKKPLQDAAAVNATRNKLVKVMNGILPVITGTGAQTKYNRTRLGLPKQHWIDAACVGEVEFVELLTLQPLIVTCKGQGGRQKAALNKYGYPIRHNPLKPIKGWCSGDIAKNLLTGDFGRVNPRSSSNSFNFIVPGRKAVNIHCKNLIRVHRKDGYIYSFS

SEQ ID NO: 23537 - protein, 442 aa, Sutterella sp.; identical to SEQ ID NO: 3037

SEQ ID NO: 23538 - protein, 305 aa, unidentified
  REGION 1..305: note = Human gut metagenome
MVYVQDINGKPLMPTTRHGKVRRLLKDKKAVVVNLCPFTIKLMYVTSDYKQEIVLGVDAGTKHVGLSATTKSKELYSSEVILRNDIVDLLSTRRELRRARRNRLRYRKPRFNNRIKSKRPGWIAPSVKYKIDAHIRVVENVCSILPISRIVIEVAQFDTQKIKNPNISGKEYQEGDQLGFWNTREYVLARDGHKCQYCKGKSKDKILNVHHIESRKTGGDSPSNFITLCETCHKEYHKGNIDLKIKRGKSLRDAAVMGIMKWRLYEEIKSKYDRVSMTFGYVTKYNRINHGFEKSHVSDAFVISK

SEQ ID NO: 23539 - protein, 465 aa, unidentified
  REGION 1..465: note = Human gut metagenome
MSTCVCVLSNNGERLMPTIRLGKVRHLLKDGKAKIIKHHPFTIQLLYDSETNIQPIEICEDVGYNYIGISVKSQSHEYVSAQYDTLQDEKSCHDACRRMRRTRRNRLRYRQKRFDNRKRDKGWLAPSLKHKKELNVNVIKMYCEVVPITHATVEVGSFDTMLVKAIEEGKATPEGADYQKGPRYNLATLREAVFYRDNYTCQVCGREASEGAILHVHHMFYWKGRHDNSLSELITVCEKCHTPANHQKGGKLYGFGEDIKFANLSGAAFMNTVRWQIVNELYAAFGKPFVTFTYGAMTKEKRIALHLEKSHNNNAYAMGEFHPNCRCTFEHYEKVRRNNRILEKFYDSRYIDIRTGEIATGKELFNGRINRSHKKDSENLHKYRGKRIRKGYRALRRKKVALNPGDLVSLNGEILTVHGTHTKKNGSVNVEFKTPSKSGKKSTSLKKLKIIKTISPMRSAWDKVS

SEQ ID NO: 23540 - protein, 415 aa, unidentified
  REGION 1..415: note = gut metagenome
MVNRIEYCFVVDKNNKPLAPTKINKGWYLIRKGRAKLKSKYPMVIQLEKEVESDEGDKSHIACGIDDGSACVGLAIVQKCLTKNKVVFKGTIEQRQDVKHLMDVRRGYRKYRRYHKRYRKARFNNRSSSKSTCRSAPSIKQKKDAVLRVLYQLNKWVNIQEYYLEDVCIDIRAMVDGYKPYRWQYQKSNRLDENLRKATILRDGCRCQECGKSNCMLEVHHIRARRYGGADTIGNLITLCEKCHDKTKGREKDFEERYFNVIKSKPKRFDYAMHVMQGKVYLREKISELGILHLTNGGETANKRIEWNIVKTHSNDAICIADGIPDTCDIKEWIIKPMRRKSKAKTDNILGIKHRDLVTYTYKNGETHTGYVTALYPEQLALNFQSKTKHCKKVNARKCRLLWKFNKIYWLEQCV

SEQ ID NO: 23541 - protein, 397 aa, Moorena sp.
LRVYVINQKKEPLMPTTPRKARKLLEQGKAKVINREPFTIQLLVATGETKQDITLGVDAGSRYIGLSATTEKQELFSAEVELRNDIVDLLATRRQNRRSRRSRLRYRKPRFLNRVSSKNKGWLAPSIEHKINTHLRVINDVHKILPITKIIVEVASFDIQKIKNPAIEGAEYQQGDQLGFWNTREYVLHRDGHKCQHCLGRSKDVVLEVHHIESRKVGGDAPNNLITLCNTCHEAYHDGQINLKAKRGQSFKDATFMGIMRWTFYNKLKDLYPNIKMTYGYITKNTRITNKLPKSHRTDALCITGNPTVKRLDNWYYIKKVRKHNRQIHKANISKGGKKKLNQAPYLVKGFRLFDKVMYDNQECFIFGRRSSGYFDLRKLDGTVVHRSANCKYLKLL

SEQ ID NO: 23542 - protein, 429 aa, unidentified
  REGION 1..429: note = Human gut metagenome
QNLRVFVLNKRGQPLMPCSPAKARLLLKEKKAVVMRRTPFTIQLTQATGETVQPVKLGVDAGSKFIGLSASTDKAELYASEVELRTDVVDLLSSRRELRRARRNRKTRYRAPRFNNRVHSKNKGWLAPSVENKINAHLSRVDAVRQLLPVTKIVVETASFDIQKIKNLDIEGADYQWGEQLGFWNVREYVLFRDGHRCCYCHGKSKAPILNVHHLESRKTGGDAPNNLITLCETCHKAYHAGKIVLKAKRGQAFRDAAFMGIMRWTFFNRLKAQCPELDVRNTYGYLTKNTRIRHGLDKSHHTDAFCIAGNFGAKRLGEYFFQKQTRKHNRQIHKMSILKGGVRKRQQAPYEVKGFRLFDKVRYGSREAFIFGRRNSGYFDIRLLKGEKVSPAISYKYLQLLESRKTFLTQLIKEDAIPPATEVAGFLA

SEQ ID NO: 23543 - protein, 436 aa, Moorena sp.
MSNHVFVLDTNRQPLTPCNPGVARSLLKSRKASVFRCYPFTIILKKEVNSTPEPCQIKIDPGSKTTGIALLNGDKVIWAAELTHRGQQIKNDLESRRSLRRNRRGRKTRYRQPRFLNRTRPRGWLPPSLKHRVLTVLTWVKRLTRLCAVSSIAQELVKFDLQKMQNPEISGVEYQQGELQGYEVREYLLEKCGRKCAYCGAENVPLEIEHIHPRSKGGSNCVSNLTLACAPCNQAKGNQDIKQFLNGKPDLLKRVLVRAKAPLKDAVAINASRWALFNALKSTGLSVSTGSGAQTKFNRRRLGLLKTHWLDAACVGNIEALEVLTTQPLLIKSAGHGRRQVIQVDKYGFPRHNQAGELVRKSAQVKQIKGFQTGDIVRAIVPSGKKTGVYIGRVAIRSSGSFNIKTPNGTVEGISFKHCSFVQRKDGYSYSFSDGR

SEQ ID NO: 23544 - protein, 443 aa, unidentified
  REGION 1..443: note = Human gut metagenome
LTKDENRPSGRTTGLRAEQAEPAGIRKGDTLKVFVLNMRGKPLMPCSPAKARHMLKAGKAVVVRRTPFTIKLTIATGETKQDVTLGVDAGARHVGISATTEKEEVFASEVALRQDITGLLADRLAFRRARRNRKTRYRAPRFNNRVRSKHKGWLAPSVENRIQAHMSRIEAVCRLLPVTKIVIETASFDIQKIRNPEVEGTGYQQGDQLGFWNVREYVLFRDGHICQHCRGRSKDPILNVHHLESRKTGGDAPNNLITLCETCHKAYHAGKIKLKVKRGHSFRAEAFMGIMRWTLLNRMRKAHPSLPVENTYGYLTKHKRIALGLPKTHCADAFCIAGNLKALRRGDFLFQQQTRKHNRQIHRCSILKGGVRKLNQAPFLVKGFRLFDKVRIGGQIGFVFGRRVRGTFNIRRLDKTVIGTDINCKKLSLLETRKTFLTELRKE

SEQ ID NO: 23545 - protein, 415 aa, unidentified; identical to SEQ ID NO: 13008
  REGION 1..415: note = Human gut metagenome

SEQ ID NO: 23546 - protein, 414 aa, Moorena sp.
  SITE 414: note = misc_feature - Xaa can be any naturally occurring amino acid
MQNYVFVIDTNKQPLNPIPPKKARRLLDKGKAAVFRMYPFTIILKTAVDNPSGSPCQIKIDPGSQTTGFALVQNNQVIWGMELEHRGGFIKKKLESRKAVRRGRRNRHTRYRKPRFLNRKRSEGWLPPSLEHRVSTIETWVKRLTKFCPINEIWVERVKFDTQKMQKPEISGVEYQQGELAGYEVREYLLEKWGRECTYCGKQSVPLQIEHIQPKSFGGSNSAKPTLRERVSNLCLACEKCNQRKGNKPIEEFLKNKPILLQKIKTKTKQPLLDSAAVNTTRNKLVKVLQNILLVVTGTGAQTKYNRIKLGLPKQHWIDAACVGDIETLVLKTSQPLLVTCKGQGGRQKAALNKYGYPIRHNPLKPIKGWVTGDIAKHQKLGIGKVTPRSKGSFGFTPLGMKGYKSCKPQDISX

SEQ ID NO: 23547 - protein, 431 aa, unidentified; identical to SEQ ID NO: 6230
  REGION 1..431: note = metagenome

SEQ ID NO: 23548 - protein, 456 aa, unidentified; identical to SEQ ID NO: 7564
  REGION 1..456: note = Human gut metagenome

SEQ ID NO: 23549 - protein, 447 aa, Halolactibacillus sp.; identical to SEQ ID NO: 9617

SEQ ID NO: 23550 - protein, 475 aa, unidentified
  REGION 1..475: note = Human gut metagenome
MQLYLVSIFSQGLHNLLLRQKRFIVKEVAYMATVYVLNKDGKPLMPTTRCGHIRHLLKEKKARVVRTNPFTIKLVYETDDVVQPLYLGIDPGRTNIGVAVVKVDGTAVFTAHLETRNKEIPKLMAKRKEHRQGRRHYRRCKRQRRAAAHGTLSKKCKKQDTAQGGNISKRAQTIGVFERNLPGCEKSVLCIGIKNKEARFNNRVRPARWLTPTANQLLLTHVNFVKKICKFLPISDVVLEINKFAFMALDNPNIQKWQYQQGPLYQKGSLENAVSEQQDHHCLFCEKTIEHYDHVILRSENGSDTIANIVGLCAEHHDLIHKDDKLKEELAKKKQGLNKKYGALSVLNQIIPALTYELGSRFQGHFYVTTGKSTYDYRAAHSVSKDHWLDAYCIACSVLPDGCFDNTINSRVPYELKQFRRHDRQVCQQQNVKRKYYLDKKLVATNRHKAIKQETDSLEEYRNNGGTTDKLVVKE

SEQ ID NO: 23551 - protein, 436 aa, unidentified
  REGION 1..436: note = Human metagenome
MTKTLTTQTTQACVLDQQGKPLMPTTRLGKVYRLLKTKKAHIVSYEPFTIQLDYEPDTHIIQPMTLGVDSGAIHSGYSIANEHREYYSAEVIARDDISKRLLNRRMCRQNRRSRKIRYRKPRFNNRKNKRKGWLAPSLQQKVAVQINEIDHLHRYFPIETIIVETAEFDIQKIKNPDISGIEYQQGTLQGYNIRNYLLEKHNHKCFYCEKTVSGFEVEHMLPKSRGGSDRIDNLTLSCHDCNQKKDTSTAEEFIKQTLPAKKATMKLKQLPNEKRLFKYMAHMNTTRWTLYNTIKEKYPNVKMTYGYITKYNRIQAGLPKAHHIDAKCITGFATVPSIDQTVVKVKMRRHNRRLHRATFSKGHVRKDACLITVIFGFQLYDLVSFNNHRYYIKGRRSSGYFALISVEGLKDENRSYKKLTLLAHTNAYLTNHYVDL

SEQ ID NO: 23552 - protein, 512 aa, unidentified; identical to SEQ ID NO: 7699
  REGION 1..512: note = Human gut metagenome

SEQ ID NO: 23553 - protein, 430 aa, unidentified
  REGION 1..430: note = Human gut metagenome
PGKVYVISRLGHPLMPCSPAKARHLLDDGKAKVVKRTPFTIKLLYGSTEYTQPVILGVDAGSKTIGLSASTTKEELFAAEVMPRNDVVENLSTRREFRRARRNRTTRYRKSRFNNRVHSKNNGWLAPSVEVKIQEHITSIKRVCAILPISKIVVETAEFDLQLLKAVQDGKPVPEGEDYQKGEMYGSYDVRQYVLWRDNYTCTCCGVKGTDKKPVKLHVHHFESRKHGGNAPDNYGTLCEDCHKKLHLGIITDISLKTRKRPSTRDAAFMGIMRKTLMQRLITGLSIPVAETKGYITKAAREEILKLPKTHTNDALAIAQGRHGFGIREQAYVKPTNRIYTVRPVRHHNRQLHKATILKGGIRKLNQASKYIFGFRLYDKVLYQGGECFVWGRRTSGSFLLRTIDGTKVKDGVGYRNLTLLERSTNYLIA

SEQ ID NO: 23554 - protein, 356 aa, unidentified
  REGION 1..356: note = Human gut metagenome
MHMNDLKSMCKILPISHVTLERVAFDFQKLENENIKVWEYGKGKLYGYDSPEEYIHDVQNGKCLVCGKPHIDYLHHIIPRSKGGSDKVSNIAGLCYDCHYGPMGVHNCQNTQDRLPELKSEANKQYKVSLLNSVMPVLIEEMDKFCKANSIMFSICEGHDTAKVRDMYDLQKDHCIDGFAISLVDRNVKSVDVMPDRIYQKQRYKKKSKNIIQKRNCREYYDDKKLVAVNRHKGTDQKADSLEEYMNTYAETHTTDECKKHFDSLVVKPARRTYTFHKEWRICPFHIGDKVRYEKKNKIKGNTKVDTFICEGIRFVKDENKAEVKHNKTKSKKMKFCRVLESGCTPYVDYRKLALM

SEQ ID NO: 23555 - protein, 470 aa, unidentified; identical to SEQ ID NO: 2825
  REGION 1..470: note = Human gut metagenome

SEQ ID NO: 23556 - protein, 440 aa, Moorena sp.
MQNALVVSSTRQQLMPCSPARARILLRSHKAAVLRRYPFTIILKDRAEGDTQSVELKVDPGSKVTGIALAADYAKRGKTVVFAAEVQHRGQAVKDALDSRRAIRRGRRTRKTRYRAPRFDNRTREIGWLPPSLMSRVFNVTTWALRLQRFAPLSGIAVETVRFDTQLMVNPDISGVEYQQGTLAGYELREYLLQKWSRTCAYCKKRDIPLQVEHIVPRSRGGSDRVSNLTLACEPCNLKKGNMTAAEFGFQNIQRQAQSPLKDAAAVNATRYMIGDMLRILGLPIEFWSGGRTKFNRVQQGYAKAHWIDAACVGESGVSVSLNPDSQVLQVKAAGQGTRQMCRMDKFGFPRTSAKTERVVKGFRTGDIVRAIVPSGKKAGLHCGKVAVRSSGSFNVSTLAGVIQGISYKYCSVLHRADGYSYLKGEAIPLGNKLPGILAA

SEQ ID NO: 23557 - protein, 421 aa, Methanosarcina sp.
MLVFVINQNKKPLMPCKPSKARKLLQAGKAKVVRNTPFTIKLLFRSSGYTQPVTAGMDTGSKVVGCAAIANGKVLYQSEIYLRENVSKKMEQRKMYRRTRRSRKTRYRPARFDNRGNSKKEGRLAPSIRSKLEAHFREKRFVESLLPVTEWKVELASFDIHKITNPEVSGIGYQEGDLKGFYNIKAYVLDRDGYTCQHCRGKSKDSRLHCHHIVFRSQKGTDAPENLITLCETCHKALHNGEFKLSGKKSKTKHATEVGIIKSQIRKSGWNFAETFGYETKYRREQVLKLLKTHYFDAVAICCRDEQKVEVEESVFLKRNVSKGDYQQRTGKRSEKKIHTGKLFNLRKFDLVKTSKGIGFVKGKRSSGFFAISDMFGNKISDSVNVKKICERLRARTSTLIQQSRTGKFTHSSPELKTQGF

SEQ ID NO: 23558 - protein, 465 aa, unidentified; identical to SEQ ID NO: 8068
  REGION 1..465: note = Human gut metagenome

SEQ ID NO: 23559 - protein, 439 aa, Halomonas sp.; identical to SEQ ID NO: 19319

SEQ ID NO: 23560 - protein, 431 aa, unidentified
  REGION 1..431: note = Human gut metagenome
MPNKVYVINKHGRPLMPCSPAKARHLLDAGKAKIKKRTPFTIQLVYGSSGYTQEVILGVDAGSKTIGVSASTKKEELFAANVIPRNDVVDLLSTRRESRRARRNRKTRYRKPRFDNRVRSKHKGWLAPSVEVKIQEHITSIKRACRILPVSKVVVETAEFDLQLLKAIADGKPVPQGEDYQKGEMYGHYNVRQYVLWRDNYTCQCCGAHATKKKEVRLHVHHLESRKVGGDAPDNQVTLCESCHEKLHKGLIAEKDFKKRKRRSTRDATFMGIMRKTLMQRLCSELPIPVIETRGYITKATREKLLVLPKSHTNDALAIAQGKQGFNVGYLPGILQIDKIYTIRPVRHHNRQLHKAAILKGGIRKSNQAGKYVFGYRLFDKVQFNEQDCFIWGRRTTGIFTIKTINGKMIKDGISFKKLKLVEKSTSYLIA

SEQ ID NO: 23561 - protein, 451 aa, unidentified
  REGION 1..451: note = Human gut metagenome
VLSAWNPFQHWRRITTGRKTEETNLRVLVWNKRGKPLMPCSPAKARLLLKEKKAIVVRRTPFTIQLTIATGETKQPVSLGVDAGYKHVGLSASTEKAELYASEIELRQDITDLLSARRELRRARRNRKTRYRAPRFDNRIRTKRKGWLAPSVENRINAHLSRIEAVLRLLPVTKITVETASFDMQLLKNPEISGKEYQEGEQLGFWNVREYVLFRDGHVCQHCHGRSKDPVLNVHHLESRRTGGDSPGNLITLCETCHKALHRGEITLKAKRGQSFRAEAFMGIMRWEVLNRLKASHPELEVNNTYGYRTKHARISNGIAKSHCADAFCIAGNLGAKRLGEFFFQKQTRRNNRQIHKLSILKHGLRKRNQTPFEIKGFRLFDKVACKGEEGFIFGRRSSGYFDVRKLDGTRISAGISYKKLHLLEKRQTYITEIRKEKALPPLPEGGGLRA

SEQ ID NO: 23562 - protein, 420 aa, unidentified; identical to SEQ ID NO: 15856
  REGION 1..420: note = Human gut metagenome

SEQ ID NO: 23563 - protein, 512 aa, unidentified; identical to SEQ ID NO: 6489
  REGION 1..512: note = Human gut metagenome

SEQ ID NO: 23564 - protein, 445 aa, unidentified
  REGION 1..445: note = Fermentation metagenome
YGNSMELRITYCKVEYFQGVDTLVYVISIDGKPLMPCKPVIARLLLKQHKAKVIKKYPFTIKLLYKTKTEYTQPLTLGIDTGSSKIGSAVVDENNNVLYLSQVEVRNDITDKMKQRAKYRRNRRNRKTRYRKARWLNRKNSIKEDRFSPTIVSKINSHLKEINFVKSILPIQNVILETATFDPYALKNPAVLHNKWLYQKGVNYGFANTRAYVLDRDNYTCQYCKGKSKDSKLEVHHIIFRSQGGSDESKNLITLCKTCHGKLHNGKINLKKNGKVKGQLKHATQMNSIRQQLLRLLPEAAETFGFITKEHRQLMKLPKEHYYDAVAIACLNNIENTGLIGVNFKTKNILFKRCIADGDFQQTKGVRSEKRITTGKIQGFRKFDKVEYQGKEYFIKGRMSTGYAILMDIEGNKINLKPIPKFEKMKRMQARKSWIISQETIQNIC

SEQ ID NO: 23565 - protein, 441 aa, Acidithiobacillus sp.; identical to SEQ ID NO: 5206

SEQ ID NO: 23566 - protein, 477 aa, unidentified; identical to SEQ ID NO: 12969
  REGION 1..477: note = Human gut metagenome

SEQ ID NO: 23567 - protein, 400 aa, unidentified
  REGION 1..400: note = Human gut metagenome
VTTILKTCFAASNLAKIVVLMDAWDIIVILNKRGKPLMPCSPAKARLLLKEKKAIVVRRTPFTIQLTIATGEAKQPVSLGVDAGYKHVGLSASTEKAELYASEVELRQDVSDLLSARRALRQSRRNRNTRYRAPRFDNRIRTKRKGWLAPTVENRINVHLSRIETVLRLLPVTKITVETASFDTQLLKNPDIAGKEYQEGEQLGFWNVREYVLFRDGHVCQHCHGRSKDPVLNVHHLESRRTGGDSPGNLITLCETCHKALHRGEIKLKAKRGRSFRAETFMGIMRWGVLNRLKASHPKLEVHNTYGYRTKHARISNGIAKSHCADAFCIAGNLGAERLGEFFFQKQTRRNNRQIHKLSILKGALRKRNQAPFEVKGFRLFDKVACQGEEGFIFGRRSSG

SEQ ID NO: 23568 - protein, 404 aa, Ktedonobacter sp.
  REGION 319..332: note = misc_feature - Xaa can be any naturally occurring amino acid
  SITE 404: note = misc_feature - Xaa can be any naturally occurring amino acid
MPCTPKRARLLLGRGRAVVHRVKPFVIRLRDRRVEDSTLQPLALKIDPGSKTTGIAVARVQETEEGEVHHAVFLFEVAHRGDKVQGAKQTQRNARRRRRSANLRHRAPRFANRGIPKGWLPPSLLSRIGNVLTWTGRCRRWVAVSRIDVERVRFDTQLLQHPEIAGVAYQQGTLAGWEARAYLLLKYAYRCAYCGKTDCAFELDHIVPRSRGGSNRVSNLCLACHACNQAKGDKTAAEWGHPEVEAQAKQALKDAAAVNATRFKLVEALQVFGLPIGTWTGGRTRWNRARFGIDKTHALDALCVGQMAAVSAARLKTLXXXXXXXXXXXXXXLPDTSETRPWLSDRRPGASSGPCSSQNGGNPSGTRAGAQKRIVSCRLRRWGWSGVLPDGAESRWVWVCACLX

SEQ ID NO: 23569 - protein, 378 aa, Moorena sp.; identical to SEQ ID NO: 2642

SEQ ID NO: 23570 - protein, 419 aa, unidentified
  REGION 1..419: note = Human gut metagenome
MVYVISQDGKPLMPCSNSIARLLLKQSKAKVKKREPFTIKLTYETTNYTQDLTLGVDTGSGTIGTSVSKDNGDIIYMSEVVIRNDITGKMTQRAKYRRNRRNRKARYRKARWLNRANSIKNDRFSPTMQSKLHSHVKEIKYIKFILPITEMVFETGQFDTHLMKNPNLANPKIKHWGYQKGINYGFENTKAMVLNRDNYTCQYCKGKHKDSKLEVHHILFRSQGGSDEESNLITLCHTCHKDLHSGKINPKLSGKVKGNLKYATQMNSIRKQLFRFYPNAIETFGYVTKANRLHLGVDKEHYYDACTIATQGNIFTVKSNLYKKKCISDGDFQKTKGIRSEQPIITDKICGFRKFDKVRYFGNKYFIKGRMSTGYAVLMDIDGNKVDFSAMPKGYKTPKLSNCKRIMARSTEMIQTLVI

SEQ ID NO: 23571 - protein, 432 aa, Moorena sp.; identical to SEQ ID NO: 2970

SEQ ID NO: 23572 - protein, 507 aa, unidentified
  REGION 1..507: note = Human gut metagenome
MSEYIYVIGVDGNPQMPTKRKRHVEKLLQAGRARVFRQIPFTIQLTYENKPVLQPVTIAEDPGRSNIGMAVVSLSGELLSAAVVQTRNKEIVKLMEKRKQHRRASRNGERKARQRLAKKCHTMIKTGFLMRKLPMYGKDKRVRCNVIKNTEAKFCNRKREDGWLTPSAEHLVRTHINLIHKMQKFLPITDVAIEINRFAFLSLEDPSISGVDFQNGPLKGYDDLNVAIEDLQDGHCLMCNSPIEHRHHIVPRSMQGSNTIGNIAGLCCKCHERVHKDARFEDRLKKKKAGLNKRYAAVSALNQAIPFICKRLEQEFGKEHVHYCSGRDTSMVRRSLGYHKTKEEQLHEVDAWCIAVLSLQQIPEKAPSFDHVHEILQFRRQDRSRIKAQTSRAYYHEGKKIAKNRKKAEGQREDSLQEWRKQQVKRYVEEQTRKMISQLEIKKSIRRYNRLDRLMPGAVFYYQGIRYVMRGQHCEGTYLQAVGMGSKDFPAKKCKIVAHNEGLVFVS

SEQ ID NO: 23573 - protein, 468 aa, unidentified
  REGION 1..468: note = Human gut metagenome
LKENKARVVCTTPFTIQLNYDTPEITQDLILGIDPGRTNIGVAVVKEDGSCVFSAHLETRNKEVPLLMKKRAAFRRNHRTQDRRRKRQRRAIAAGTTVTEGSVERLLPGYEKPVVCRYIRNKEARFNNRSRPAGWLTPTANHLLRTHINLIAKVAKFLPITKVVVELNRFAFMAMDNPNIRRWEYQQGPLYGLGSVEDAVYAQQDGHCLFCKKPIDHYHHVIPRRKNGSETLANWCGLCAKHHDLVHKDKVWADKLVTRKEGVNKKYHALSVLNQIIPHLLEYLGDETLYDIYATNGRSTKGFRIAKNVPKEHYTDAYCIACSILDTDIKVSAPVEPFELKQFRRHDRQACIRQMVDRKYLLDGKVVAANRHKAIEQKSDSLAEFREACGAAVVSQLTVKPHPPQYKDMARIMPGAVMDFGGAVGILQGSEGFHNGKPDYYKSTKGERVLTRRCALLAQNAGTVFIPA

SEQ ID NO: 23574 - protein, 463 aa, Moorena sp.; identical to SEQ ID NO: 18956

SEQ ID NO: 23575 - protein, 423 aa, unidentified; identical to SEQ ID NO: 3951
  REGION 1..423: note = Human gut metagenome

SEQ ID NO: 23576 - protein, 458 aa, unidentified
  REGION 1..458: note = Human gut metagenome
MLTYVLAKDGTRLMPTYNIRKVRRLLKSGRAVIVGHRPGLTIRLMYDLPEQEAPHVQPVEICEDTGYAHIGVSVKSEKHEFAHEQYDLLANEKQRRDDRRKYRSERRSRKRHRTPRFDNRTASKQPGWLAPSIENKMLRHADIIDRYAKVLPLTSVVLEMGSFDTQELEAIQTGAKLPEGTDYQRGKRYQISTLREAVFYRDGYACQVCGKSIKDHAVLRVHHAGYWHGDHTDRMGNLVTVCTKCHTAANHKPGGRLYEWRPKVKPMTGAAFMNSVRWKLYEEVKRRFPGIEIHVTYGSHTKVERRALCLPKTHANDAYVMGEFHPAHRAHEVKYQKRRRGTRVLQRFYDAKYIDSRDGTKKSGSQLSCGRTNRSESRHSGRDLRQYRQVKVFKGRFSVRRKRYPWQPEDAAYLDGRRYTVVGTISCGKSVLLDPHRTSVPKKLRLIRKAESWCISNG

SEQ ID NO: 23577 - protein, 307 aa, unidentified
  REGION 1..307: note = Human gut metagenome
VVDNRLLSIKPLINIGEGVIYSSICTGLSLQTYQKRKEVPCMVYVLDINGQPLMPTTRHGKVRRLLNSHLAKVVKRCPFTIQLLYQSTKEIQPVSLGVDAGSKHIGMAATTEKKVVYQEELSPRNDVVKLLSLRRASRSSRRSRKTRYRKPKFNNRVHSKHKGWLAPSVEVKIQEHITAIKRICQILPISEIQVETAEFDFQRLKAMKEWKPLPVGTDYQLGEQYDFYNTRQYVLHRDGYTCQCCGTHDNNIKLHVHHIESRQTGGDAPSNLITLCEHCHKALHKGKLELPKGKKRGKSYRDATFMG

SEQ ID NO: 23578 - protein, 431 aa, unidentified; identical to SEQ ID NO: 7729
  REGION 1..431: note = Human gut metagenome

SEQ ID NO: 23579 - protein, 418 aa, unidentified; identical to SEQ ID NO: 4934
  REGION 1..418: note = Human gut metagenome

SEQ ID NO: 23580 - protein, 422 aa, unidentified; identical to SEQ ID NO: 5457
  REGION 1..422: note = Human gut metagenome

SEQ ID NO: 23581 - protein, 460 aa, unidentified
  REGION 1..460: note = Human gut metagenome
MVAVVDLSGRPLMPTNEYRARKLLKQNKAKIFGYRPFTIQLTERKSTEIQPIELCMDTGYIHIGISAKSERHEYLGMQIDTLTDEKLKRDDKRQYRRQRRNRKRYRAPRFDNRRRKEGWITPSLEHKKEIHIDAIQRICKVMPITDITLEMGNFDTQVLKAVEEGKPLPQDSDYQHGERYGIATLREAVFLRDGYKCQCCEKSVKDGAILHVHHIKYRSQGGTNRMSNLITVCDKCHTPKNHKPGGKLWNWKPKLAEFKGASYMTSIRWMLYNEVTAMLPNSSVHITYGAKTKESRRKLDIKKSHVNDAYVMGLFCPKHRTKPVYFKKKRRNNRVLEKFYDAKYIDSRDGKKQSGQELFNGRISRNHRKDSENLHLYRKQKVTKGRRSIRNRHYPIQPHDILLYQKKKYETAGCHNNGSRAILLPEKKSVALKQLTMYQYAGGYYRVPYESNKKEERTGS

SEQ ID NO: 23582 - protein, 442 aa, Sutterella sp.
MSTTVFVLDKKHRPLMPCRPARARRLLRAGRARGVKRFPFVIRLVDRTVEQSEVQPVLIKLDPGSRETGAAVVRDDGKKRHHALAFFVIEHRGGAIRDALKARSAFRRRRRSQNLRCRSPRFLNRVKPKGWLPPSLRHRVETTLSFVRRMCRYLPVSGIATELVKFDSQKLQNPEVSGVEYQQGTLFEYEVREYLLEKFGRKCVYCGAEGVPLNIDHVVPRAKGGSNRVSNLVLACMSCNQKKGARSLEDFLKGMPKVLARVRRELKTLLRDAAAVNATRWVLFNELKATGLPVETGSGALTKLNRHAFGVEKEHWLDALCVGRLNGVVTRKGLNVLEIRCMGRGSRQRTRLTKYGFPRGYLMRQKCVHGFATGDMVEANVPKGKKAGLWRGRVAVRVSGSFNIQTPKGVIQGVGWKHCRLISHNDGYGYAWLGHAPHSSPA

SEQ ID NO: 23583 - protein, 560 aa, unidentified
  REGION 1..560: note = Human gut metagenome
MANDYVFVVDRKGNPLIPTKRRGRVRHLLKEGKAVVIKTHPFTVKIKYDVGHYTQPMYEGIDSGRQNIGNAVSRENGENVLLEDVRTNNKSIKKNLMKRKVHRQERRRNNRHSRQRKAIHDGTEIKNGDDDKWHTDKDCKSVKVSYPAADNAVTHKVIRGKEGKFANRKRPDGWITPSARQIVQLTLNMVKETCSIMPIRRISFERVAFDFQKLANQNIHAWEYGKGPLYGFKTYKDCIYAEQKGKCPFCGKPITQYHHIIPRSAGGIDNVKNIIGLCDEHHTMVHNDAAFAETLSDAKAGVEQEYYAGLLNSAVPALIEALSVYCKEKSIELLITDGRTTRETRVKYGFDDKKDHCIDAYAISLADRNVKNISFAGRIIMKRRYKKKSKNIISARNQRIYVLDGQVIACNRHKAENQKENSLEEFLTQYRETHTEKKVQQMMHHIRILPAVRSYTFHKDGLKAICHPGDIVEYKKLNKTSGRMKRNIFVCTSVNFDGKDKYGNYCAAENHIGYDNGKGNGNRKAKFCTVLDSGCLQCTGIKRTDDYIAQLKADPSKKKG

SEQ ID NO: 23584 - protein, 451 aa, unidentified
  REGION 1..451: note = IscB polypeptide
MQKLQVEFKNVPRNTSLVPCSTNLVLNRDESLSVQDKVLACNNPEVNLARRSGHSFLVFILNKNGKPLMPCSFKKSKQLVREGKALVIKRSPFTIQMNYGSTGYRQKINLGIDSGYENIGFSARTDKEELISGTVKLDGRTKERLDEKRMYRRGRRNKLWYREPRWLNRTKPEGWLPPSIERRYQTHLILIERIKKLIPISKVIIEIAKFDIQKLENPDIKGKEYQQGSLYEYQNVRSYLMSREKGLCEYCKKDFKNSSSHIHHRKPRNKNGNNRLGNLMLLHRDCHKEIHKKPELLKKYEKTSVKSYKQSTFMSIINKRFFNDIKDLEVTYGNITFVNRNKLGLIKTHYNDAFVISGGITQKRIKPFKVTQKHRNNRVLQMNRKGFKPSIKRNRSIIAPLDLFWVNKIKYSCRGMYNKGKYILYGDVKKKEYFKMNSVEKYFNNGSLVWS

SEQ ID NO: 23585 - protein, 438 aa, unidentified
  REGION 1..438: note = Human oral metagenome
MVLVIDKRKQPCNAISEAYARILLRSKQAVIHRRYPFTIRLKNNNAVKKTALYVVKIDPGANVTGISIVDSEDKVIMLAELVHRGKTIKRNLDSRRAVRKSRRQRKTRYRQARFRNRTRPQGWLAPSVKSRADNVINFVRKLKRFLNINKVEIERVSFDAAQMSSDTKLYGVDYQQGALYQTELKSYLFKKHNGRCVYCGSKAAEIEHVIPKSEGGTDSVHNLVIACRKCNELKGKLSLKEFGKLMNKDFSHLESKELPKHAAIVQSARNYMFKEIAKIVPNIVGFDAWLTKYNREELNLPKQHYYDALSVGEIKDYKFLTDKVLIISAKGRGSRQMCLMDRFGFPRTSAKASKSVKGFQTGDIVKAVVPTGLKQGEYLGRVAVRASGSFNIETNKETIQGIGYRYCRIIQRSDGYLYDYKERDFLSAMNCRVSVASF

SEQ ID NO: 23586 - protein, 431 aa, unidentified
  REGION 1..431: note = Human gut metagenome
MPDKVYVISRLGHPLMPCSPAKARHLLDDKKAKVVKRMPFTIRLLYGSTKYIQPIILGVDAGSKTIGLSASTAKEEVFAAEVMPRNDVVENLSTRREFRRARRNRTTRYRKPRSDNRVRSNHERWLAPSVKVKIQEHITSIKRVCTILPISKVVIETAEFDLQLLKAIQEGKPIPEGEDYQKGEMYGSYNVCQYVLWRDNYTCICCGVRGTPNNPVRLHVHHFESRKYGGNAPDNHGTLCDDCHKKFHLGIITDVKLKTRRRQSTRDAAFMGIMRKTLMWRLRTELFIPVAETKGYITKATSEKLLVLPKSHTRDALAIAQGRHGFSIKEYAYVEPANHIYTVRPVRHHNRQLHKASILKGGIRKRNQASKYVFGFRLYDKVLYQEKACFVWGRRTSGTFLLRTIDGIKVKDGVSYRNLTLLERSSNYLIA

SEQ ID NO: 23587 - protein, 476 aa, unidentified
  REGION 1..476: note = Human gut metagenome
VMLASFFWWHSRMFLVLDSAEPAPSLRKHFICCAQAYHRCRDTVISAILHSYKKGNNMSEYIYVLGMDGRPQMPTRRKRHIDRLLSTGKAKVVEYVPFTVQLLYENHPVLQPVILAEDPGRTNIGVAAVSQKGELLFSAVVETRNKEITKFMEKRRKARQRLAKRCHTMIKAGQVMRKLPMFGEEKYITCRYIRNTESRFYNRRRKDGWLTPSAEQLVRTHINLVHRIQGFLPVTDVALEVNRFAFMQLEDPYITGVDFQNGPLKGYDDRKAAVYDQQDGQCLLCNKKPIEHYHHIVPVAKRGSDTLANIAGLCCRCHEKVHKDAGAARRLQNKKQGLTKKYGALSVLNQAIPFICKRLEEEFGEHVHYCSGRDTSRLRQSFGFHKTKDEPLHEVDAWCIGVLSLREIPEKCPDFTKVYQIKQFRRQNRRRINHQTERRYYLDGKLVAVNRKKRMGQTGRKDNQTKDSLADWFTKM

SEQ ID NO: 23588 - protein, 470 aa, unidentified; identical to SEQ ID NO: 2825
  REGION 1..470: note = Human gut metagenome

SEQ ID NO: 23589 - protein, 421 aa, Moorena sp.; identical to SEQ ID NO: 4289

SEQ ID NO: 23590 - protein, 509 aa, unidentified; identical to SEQ ID NO: 5057
  REGION 1..509: note = Human gut metagenome

SEQ ID NO: 23591 - protein, 422 aa, unidentified; identical to SEQ ID NO: 13422
  REGION 1..422: note = Human gut metagenome

SEQ ID NO: 23592 - protein, 472 aa, unidentified; identical to SEQ ID NO: 19299
  REGION 1..472: note = Human gut metagenome

SEQ ID NO: 23593 - protein, 439 aa, Moorena sp.
MKVWVLHQDGQPLMPTTPRTARRLLEAGQARIVARTPFTIQLLYPSRHSTQPITLGIDAGYATVGFSAVSEQAELVGGELKLLEGMSARLSERAMYRGGRRRRTRHRPPRFDNRRRAEGWLAPSIQHKLDSHLRLIDRLCAALPITRIVIEVASFDIQRLKNPAIAGEGYQQGEQASFWNLREYILHRDGHTCQNPTCANRAKEKVLQVHHLGYWRGDGSDRPANLITLCTRCHTSENHQPGGFLWGWQPALKSFRPETFMSLVRWRLVAAVGAEATYGYLTKSRRIELELPKSHANDAFVMAGGSTQARTDPLLLDQVRRNRRALQLWYDAKYIDIRTGEVVKAQVLNNGRRTRNRTLNGENQRRHRGPKVSKGRVSIRRRRYPYQPGDLVRYEGQVYRVQGMGGYGRNLKLAGRPKEIKAALVTPVRWRKGICQQVP

SEQ ID NO: 23594 - protein, 416 aa, unidentified
  REGION 1..416: note = Human gut metagenome
MVYVLSQNGQPLMPTENHAKVRALLKHGKAKVIQRCPFTIQLLYESTTHTQKINLGIDAGSKTIGVSATTDSKVLYESEVVLRNDIVELISGRRALRSSRRNRKTRYRKPRFDNRKRPDGWLAPSVRQKIETHITVVENVMKILPVTKIIVETASFDIQKIKNPEIEGVGYQHGEQLDFWNVKEYVLFRDGHTCQCCKGKSKDNILNVHHIESRKTGGNAPNNLITLCETCHKAYHKGIITLPKEIHRGMRFRDAAFMGVMRWAFYDRLKELYNLLGVEVINTYGYITKNTRITYDLPKEHYVDARCISGNPAAKPMDYYYLQKKVRCHNRQIHKNTILKGGIRKRNQASYEVKGFRLYDQVLWKGQKCFIFARRSTGRMDLRLLDGTHVNASVGYKNLKLLSMRKNYLIEQRKAG

SEQ ID NO: 23595 - protein, 462 aa, unidentified; identical to SEQ ID NO: 2823
  REGION 1..462: note = Human gut metagenome

SEQ ID NO: 23596 - protein, 466 aa, unidentified
  REGION 1..466: note = Sediment metagenome
LSRQTLPRKREALSRAHRSYSMSFVFVLDTNKQPLNSVHPGRARLLLKTGKAAVLKRYPFTLILKTVVEQPQVQPLRLKIDPGSRTTGIALVDDQSGQVLFAAELTHRGQEIKKALDNRRGVRRRRRARHTRYRQPRFHNRRRPKGWLAPSLMSRVENVMAWVNRLRKLCPMTAISMELVRFDLQKMDNPQIAGVEYQQGTLAGYECREYLLEKWGRACCYCGKQHNPLEVEHMVARANGGTHRVSNLCLACEPCNKCKGTQDITVFLKHQPDVPKRLQAQAKAPLKDATAVNATRWVLFERLKETGLPIECGSGGLTKYNRSTRTLPKTHWVDAACVGHSTPPVLQMSQVRPLLITAEGHGSRQMCLMNDLGFPRTKPKAKHFPHQFRTGDIVKAVVPAHLKSPGVHTGRMSAKAKGGFTISTNKGKVTDIGKKYCRILQKADGYGYAQGSAPAGAFLSSLSLKA

SEQ ID NO: 23597 - protein, 406 aa, unidentified
  REGION 1..406: note = Human gut metagenome
MVYVQDIYGRPLMPTTRHGKVRRLLKSKKATVVNLCPFTIRLLYDTTGYKQEITLGVDTGTKHVGLSATTKSKELYASEVILRSDVVDLLSTRRELRKIRRYRLRYRKPRFMNRIKSKKRGWIAPSIRQKIDPHIRIIGFVYSILPVSKLIIEVAQFDTQKIKNPEISGKEYQEGEQLGFWNVREYVLARDEHKCQHCKGKSKDPVLNVHHIESRKTGGDSPSNLITLCKTCHKEFHKGNIKLKVNRGESLRDAAVMSIMKWELYDELKSLYPNVKMTFGYITKYNRINHGIEKSHVSDAFVISRNFDSERLGYYYKRKLVRRHNRQIHKMKAPKGGNKRMNQSPFKVFGFRLFDKVMFQGKERFIYARRLRGIFNIRDINGENKKDISYKKLEYVSHGLISIVAG

SEQ ID NO: 23598 - protein, 419 aa, unidentified; identical to SEQ ID NO: 12986
  REGION 1..419: note = Human gut metagenome

SEQ ID NO: 23599 - protein, 476 aa, unidentified; identical to SEQ ID NO: 3164
  REGION 1..476: note = Human gut metagenome

SEQ ID NO: 23600 - protein, 413 aa, unidentified; identical to SEQ ID NO: 7841
  REGION 1..413: note = Mouse gut metagenome

SEQ ID NO: 23601 - protein, 429 aa, unidentified; identical to SEQ ID NO: 20788
  REGION 1..429: note = Human gut metagenome

SEQ ID NO: 23602 - protein, 457 aa, unidentified; identical to SEQ ID NO: 5177
  REGION 1..457: note = Human gut metagenome

SEQ ID NO: 23603 - protein, 449 aa, Scytonema sp.; identical to SEQ ID NO: 3592

SEQ ID NO: 23604 - protein, 357 aa, Moorena sp.
LLKLAQAAVYLRYPFTIILKYAVSHPKKQPTQLKIDPGSKTTGLAINRGDQVIWGAELTHRGQQIKNDLESRRALRRNRRNRKTRYRKARFLNRTRKPGWLPPSLESRVKNIVTWVNRICRYVPITGISQELVKFDLLAMQNPEISGKEYQQGELAGYEVREYLLQKWGRKCAYCGIENLPFEVEHIHPKSKGGSDRVSNLTLACRGCNLAKGNQDIRDFLSKKPDILSRILKQASQPLKDATAVNSTRWALFQQLKQTGLPIEVSTGGRTKYNRTRLELPKTHWLDAACVGNVEVLQVFTDQPLLIAAKGWGSRQMCTTNKYGFPVKHRTRCKTFFGFGTGDMVSACRHSRRQADR

SEQ ID NO: 23605 - protein, 396 aa, unidentified
  REGION 1..396: note = Human gut metagenome
VVRRTPFTIQLTIATGESKQPVSLGVDAGYKHVGLSASTEKAELYASEVELRKDITDLLSARRALRQSRRNRKTRYRAPRFDNRIRTKRKGWLAPSVENRINAHLSRIKAVLRLLPITKITVETASFDMQRLKNPDISGKEYQEGEQLGFWNVREYVLFRDGHVCRHCHGRSKDPVLNVHHLESRRTGSDSPDNLITLCVTCHKALHRGEITLKAKRGQSFRAQAFMGIMRREVLNRLKASYPELKVHETYGYLTKHARIANGIVKSHGADAFCIAGNLGAERLGEFFFQKQTRRNNRQIHKLSILKGGIRKRNQAPFEAKGFRLFDKVACQGEEGFIFGRRSSGYFDVRKLDGTRISAGISHKKLRLLEKRRTYLTEIRKEEALPPLPEGRGLRA

SEQ ID NO: 23606 - protein, 412 aa, unidentified
  REGION 1..412: note = Human gut metagenome
MTNYAFVLDANGKQLAPTKEQKAWFLIRKKRATLVSKYPMVIQLKKEIPDEQIYKDEICCGIDDGGLHVGISLVQKCKTKNKVVFKGTIEQRKDVKHLMEVRKGYRRYHRFHKRYRQARFNNRKSSKRKERIAPSILQKRQATIRVINQLNKWINITNYWLEDVAIDIRALTDGYKAYRWQYQQSNRLDENIRKAVILRDGCKCMECGKSNCKLEVHHIKPRRSNGSNTLGNLISLCKKCHQKTEEQEEVYMNRYFSMLNSSDNKNLNYAQHVMIGKKWLREQLSKLGTLTLATGGDTANKRIDWNIEKSHSNDAICIAGLQPDTCNVKEWTIKPMRRQSKAKTDNVLGINHRDLVEYTFRNGETHRGYVTALYPGQNAINFQSSTKHCKKVNAKKCKLIWKYSKIYWLANV

SEQ ID NO: 23607 - protein, 507 aa, unidentified; identical to SEQ ID NO: 21871
  REGION 1..507: note = Human gut metagenome

SEQ ID NO: 23608 - protein, 435 aa, Sutterella sp.
MSTTVFVLDKKHRPLMPCRPARARRLLRAGRARVVKRFPFVIRLVDRTVEQSEVQPVLIKLDPGSRETGAAVVRDDGKKRHHALAFFVIEHRGGAIRDALKARSAFRRRRRSQNLRCRSPRFLNRVKPKGWLPPSLRHRVETTLSFVRRMCRYLPVSGIATELVKFDSQKLQNPEVSGVEYQQGTLFEYEVREYLLEKFGRKCVYCGAEGVPLNIDHVVPRAKGGSNRVSNLVLACMSCNQKKGARSLEDFLKGKPKVLARVRRELKTPLRDAAAVNATRWVLFNELKATGLPVETGSGALTKLNRHAFGVEKEHWLDALCVGRLNGVVTRKGLNVLEIRCMGRGSRQRTRLTKYGFPRGYLMRQKCVHGFATGDMVEANVPKGKKAGLWRGRVAVRVSGSFNIQTPKGVIQGVGWKHCRLISHNDGYGYAWLGH

SEQ ID NO: 23609 - protein, 431 aa, unidentified
  REGION 1..431: note = metagenome
MDAWDIIVVLNKRGKPLMPCSPAKARLLLKEKKAIVKRRTPFTIQLTIATGESKQPVTLGVDAGYKHVGLSASTEKAELYASEVELRQDVSDLLSARRALRQSRRNRKTRYRAPRFDNRIRTKRKGWLAPSVENRINAHLSRIEAVLRLLPVTKISVETASFDMQLLKNPDIAGKEYPEGEQLGFWNVREYVLFRDRHVCQHCYGRSKDPVLNVHHLESRRTGGDSPGNLITLCETCHKALHRGDITLKAKRGKSFRAEAFMGIMRWEVHNRLRALHPGIEVSNTYGYRTKHARIANGIAKSHCADAFCIAGNLGAERLCEFFFQKQTRRNNRQIHKLSILKGGIRKRNQAPFEVKGFRLFDKVACQGEEGFIFGRRSSGFFDVRKLDGTRISAGISYKKLHLLEKRRTYLTEIRKEEALPPLPEGRGLRA

SEQ ID NO: 23610 - protein, 557 aa, unidentified; identical to SEQ ID NO: 10483
  REGION 1..557: note = Human gut metagenome

SEQ ID NO: 23611 - protein, 451 aa, unidentified
  REGION 1..451: note = Human gut metagenome
VTTILKTCFAAFNLAKVVVLMDAWDIIVVLNKRGKPLMPCSPAKARLLLKEKKAIVVRRTPFTIQLTIATGETKQPVSLGVDAGYKHVGLSASTEKAELYASEVELRQDVSDLLSARRALRQCRRNRKTRYRAPRFNNRLRTKRKGWLAPSVENRINAHLSRIEAVLRLLPVTKITVETASFDLQLLKNPDIAGKEYQEGEQLGFWNVREYVLFRDGHVCQHCHGRSKDPVLNVHHLESRRTGGDSPGNLVTLCETCHKALHRGEITLKAKRGQSFRAEAFMGIMRWEVLNRLKASHPELEVNNTYGYRTKHARIANDIAKSHCADAFCIAGNLGAERLGEFFFQKQTRRNNRQIHKLFILKGGIRKRNQAPFEVKGFRLFDKVACKGEEGFIFGRRSSGFFDVRKLDGTRISAGLSCKKLHLLEKRRTYLTEIRKEEVLPPLPEGRGLRA

SEQ ID NO: 23612 - protein, 413 aa, unidentified
  REGION 1..413: note = Human gut metagenome
MTSYSFVLDANGKQLAPTKEPKAWFLIRKKRAALVSKYPMVIQLKKKIQENEICKDEIRCGIDDGGLHVGIALVQKCKSKNKVVFKGTIEQRNDVKHLMEVRRNYRRYHRYHKRYRQARFDNRKSSKREGRIAPSILQKRQATIRVIHWLNKWINITNYWLEDVSVDIRALTDGYQSYRWQYQKSNRLDENIRKAAILRDGGKCMECGKSNCRLEVHHIKPKRRNGSNTLDNLITLCESCHQKTEGQEELYMDRYFSLLKSSDNKNLNYAQHVMIGKMWLRKQLSGLGVLYLTSGGDTANKRIDWNIEKSHTNDAVCITDLQPDTCDIKEWAIKPMRRQSKAKTDHVLGIHHRDLVEYTFKNGETHRGYVTALYPEQKAINFQSPTKHCKKVNARKCKLLWKYSKIYWFENAS

SEQ ID NO: 23613 - protein, 414 aa, Phocaeicola sp.
MPCSPAKARLLLKEKKAIVKRRTPFTIQLTIATGETKQPVSLGVDAGYKHVGLSASTEKAELYASEVELRQDITDLLSARRALRQSRRNRKTRYRAPRFDNRIRTKRKGWLAPSVENRINAHLSRIEAVLRLLPVTKITVETASFDMQLLKNPDISGKEYQEGEQLGFWNIREYVLCRDGHVCQHCYGRSKDPVLNVHHLESRRTGGDSPGNLITLCETCHKALHRGEITLKAKRGQSFRAEAFMGIMRSEVQNRLKASHPELEVNNTYGYRTKHARISNGIAKSHCADAFCIAGNLGAERLGEFFFQKQTRRNNRQIHKLSILKGGIRKRNQAPFEVKGFRLFDKVACQGEEGFIFGRRSSGYFDVRKLDGTHISAGISYKKLRLLEKRQTYLTEIRKEEALPPLPEGRGLRA

SEQ ID NO: 23614 - protein, 416 aa, unidentified
  REGION 1..416: note = Human gut metagenome
MVYVLDKNGQPLMPTDRHRKVRLMLQSGQAKVIKRCPFTIQLNYDSGHQTQEISLGIDAGSKHIGVSATTKIKVLYEADVELRNDIVNLLSSRRELRRGRRNRKTRYRQAKFNNRRRGNGWLAPSIRQKIGTHLTVVKNICKILPISRIMVETASFDIQKIKNPDIQGAEYQQGDQLGFWNNREYVLFRDNHTCQCCKGKSKDKILNVHHIESRKTGGNAPNNLITLCEICHTGYHKGAIQLPKTVKRGMRFKDAAFMGIMRWAFYEALKQQYEPVGTPVHNTYGYITKHTRIAYNLPKEHYVDARCISGNPEASSNGEYYYQKKVRCHNRQIHKLTVLKGGIRKQNQATYLVKGYRLFDKVSYQGKGYFVFGRRQSGFFDIRTLSGEKVNKGSLSCKKLKFIATRTHYLTERRAV

SEQ ID NO: 23615 - protein, 512 aa, unidentified
  REGION 1..512: note = Human gut metagenome
MSTVYVLNKDGKPLMPTTRGGHVRHLLKEQKARVVRTNPFTIQLLYETDNLVQPLYLGIDPGRTNIGVAVVKTDGTAVFTAHLETRNKEIPKLMQGRKKARRARRTNGRRCRRQRRAKANGTISKKCVKQATAQNGSVSKRANEIGVIKRHLPGCEKEVLCIGIKNKEAKFSNRTRPEGWLTPTANQLLQTHINLVKKIQKFLPISDVVLEINKFAFMRLDNPNVQKWQYQQGPLYQKASLEEAVSEMQEHHCLFCKNTIDHYHHVVPQSENGSNTIGNIVGLCTKHHDLVHKDTSWQEKLAKKKTGLNKRYGALSVLNQIIPALTKELSSLFPKHFFATNGKSTYDYRAAHGVSKDHWLDAYCIASSVLPNDACDNNINNHVPYELKQFRRHDRRALHKENMGRVYTLNGKSVATNRHKATEQTTDSLEEFRQCQPDDVCKLKVKEHHPEYRNPKRNFPGCVFLVGKHTHVIQGTSGSHNGKADGYYDTNGNSYSSGKCKFVAKNEGIVFT

SEQ ID NO: 23616 - protein, 461 aa, unidentified; identical to SEQ ID NO: 22444
  REGION 1..461: note = Human gut metagenome

SEQ ID NO: 23617 - protein, 412 aa, unidentified
  REGION 1..412: note = metagenome
MPCSPAKARLLLKEKKAIVKRRTPFTIQLTIATGETKQPVSLGVDAGYKHVGLSASTEKAELYASEVELRQDITDLLSARRALRQSRRNRKTRYRAPRFDNRIRTKRKGWLAPSVENRINAHLSRIEAVLRLLPVTKITVETASFDLQLLKNPDISGKEYQEGEQLGFWNIREYVLCRDGHVCQHCYGRSKDPVLNVHHLESRRTGGDSPGNLITLCETCHKALHRGEITLKAKRGQSFRAEAFMGIMRWEVHNRLRALHPGIEVSNTYGYRTKHARIANGIAKSHCADAFAGNLGAERLCEFFFQKQTRRNNRQIHKLSILKGGIRKRNQAPFEVKGFRLFDKVACKGEEGFIFGRRSSGFFDVRKLDGTRISAGISCKKLHLLEKRRTYLTEIRKEEALPPLPEGRGLRA

SEQ ID NO: 23618 - protein, 195 aa, unidentified
  REGION 1..195: note = Human gut metagenome
RTLCDDCHKKFHLGIITDVKLKTRRRQSTRDAAFMGIMRKTLMWRLRTELFIPVAETKGYITKATREKLLVLPKSHTRDALAIAQGRHGFGIKEYAYVEPANHIYTVRPVRHHNRQLHKASILKGGIRKRNQASKYVFGFRLYDKVLYQGKACFVWGRRTSGTFLLRTIDGIKVKDGVSYRNLTLLERSSNYLIA

SEQ ID NO: 23619 - protein, 451 aa, Aphanothece sp.; identical to SEQ ID NO: 6675

SEQ ID NO: 23620 - protein, 464 aa, unidentified; identical to SEQ ID NO: 6574
  REGION 1..464: note = Human gut metagenome

SEQ ID NO: 23621 - protein, 460 aa, unidentified
  REGION 1..460: note = IscB polypeptide
MQKFKEKLKNTPTNAQLVCSSVNSQLNKDENPSVESMVLSLNNSEVDQFVLKEQKQDLRVPVVYVLNMRGKPLMPTNCRKAKKLLKTGKAKVIKRIPFTIQLKYPTGEAKQNITLGIDIGYSNIGFSAISEKQELISGTVVLENKMVKRLEEKSMYRRGRRNKLWYRKPRFLNRVSTKKEGWIPPSIERRFQTHISLIERIKKLLPISKLRIEVAKFDIQKLENPNIEGEGYKKGNLYNYRNRIAYLIAREKGNCQFCGKPYKKGDGWRLHHIFGKEKDRSQDWALLHESCHIELHQKHLEDVLRKQKSKSYKESTFMNIIRWKFRETFPEAEITFGNITFQDRVELNLEKSHVNDAFIIAKGKNQSRGFEYTIEQKQKNNRCLQLNRKGFKPSIRKQRYLHQPQDLIKVNSRIFKVKGIHSYGKQIMLKDLLGNILNKAVKKLDEYHFYQGTLKWRICG

SEQ ID NO: 23622 - protein, 442 aa, Lactobacillus sp.; identical to SEQ ID NO: 4322

SEQ ID NO: 23623 - protein, 502 aa, unidentified; identical to SEQ ID NO: 2616
  REGION 1..502: note = Human gut metagenome

SEQ ID NO: 23624 - protein, 436 aa, unidentified; identical to SEQ ID NO: 22457
  REGION 1..436: note = Human gut metagenome

SEQ ID NO: 23625 - protein, 512 aa, unidentified
  REGION 1..512: note = Human gut metagenome
MSTVYVLNKDGKPLMPTTRGGHVRHLLKEQKARVVRTNPFTIQLLYETDNLVQPLYLGIDPGRTNIGVAVVKTDGTAVFTAHLETRNKEIPKLMQGRKKARRARRTNGRRCRRQRRAKANGTISKKCVKQATAQNGSVSKRANEIGVIKRHLPGCEKEVLCIGIKNKEAKFSNRTRPEGWLTPTANQLLQTHINLVKKIQKFLPISDVVLEINKFAFMRLDNPNVQKWQYQQGPLYQKASLEEAVSEMQEHHCLFCKNTIDHYHHVVPQSENGSNTIGNIVGLCTKHHDLVHKDTSWQEKLAKKKTGLNKRYGALSVLNQIIPALTKELSSLFPKHFFATNGKSTYDYRAAHGVSKDHWLDAYCIAGSVLPNDACDNNINNHVPYELKQFRRHDRRALHKENMGRVYTLNGKSVATNRHKAIKQTTDSLEEFRQRQPNDVCKLKVKEHHPEYRNPKRNFLGCVFLVGKHTHVMQGTSGSHNGKADGYYDTNGNSYSSGKCKFVVKNEGIVFT

SEQ ID NO: 23626 - protein, 453 aa, unidentified
  REGION 1..453: note = Human gut metagenome
MYVAVIGSTGKKLQPTSSYRARKLLNSKRAKICSYRPIFTIRLLDREDGKTQPIELKMDTGYQYIGVSICSEKHEYVNHQYDMLPDEAERHNDCRKYRRTRRNKKRYRKARWNNRKSNLVTKGKYAPSIRHKKDIHVDLYKRFQKVIPITTVVIEAGQFDTQVLKAVEEGNPLPQGTDYQQGERYGFATLKEAVLSRDNYQCICCGKGIKESKILSVHHLGYRKGDRSNRMSNLATVCTDCHTSKNHQPGGKLYDLKPQLKNFKGATFMSTVRWDMVNEFKNINPTVKIIVTYGAMTKLKRADLNIKKTHSNDAYAMGNFHPKHRTDFEHYQKCRRNNRILCKFYDAKYTDVRDNSIKTGKQIGCNRTNRRELRNSDKNERIYRGHKLKKGRNSIRQQHYSYRPGDIILYQGQKFTVAGINNKGKTVTLKEIKKVPSVKKVQLVKHVGGWRQI

SEQ ID NO: 23627 - protein, 476 aa, unidentified
  REGION 1..476: note = Human gut metagenome
LAASGTEGVSHPGLPGKYKHKGGQLMSVAVISKTGERLMPTSEYRARKLLKSGKAIKHSYHPFTIQLTERETGDIQPIELCMDTGYIHIGISVKSEKHEYLAEQIDTLTDERGRHDACRMYRRQRRSRKRYRQARFNNRKRDQGWIAPSLEHKKKIHIQAISRINNVMPITDITLEMGNFDTQVLKAKEEGKPLPQGADYQHGERYGIATLREAVFSRDGYKCQCCGRTIKDGAILHIHHIKYRSQGGTNSMSNLATVCDKCHTPKNHKPGGKLYNWKPKLSSFKGATFMTAIRWQLYNEVKALFPDIDIHITYGAATKERRRKLDIDKSHVNDAFVMGQFHPKHRIKAILCKKKRRNNRCLEKFYDAKYIDSRDGKKRSGQELFNGRINRNHKKDSENLHQYRLQKVTAGKRTVRKQHYKIQPHDIVIYENRKRETAGCHCNGTRMMLLPDKKSASIKKVKIYKYAGGYFKSAFN

SEQ ID NO: 23628 - protein, 416 aa, unidentified; identical to SEQ ID NO: 12821
  REGION 1..416: note = Human gut metagenome

SEQ ID NO: 23629 - protein, 291 aa, unidentified
  REGION 1..291: note = Human gut metagenome
LSRIEAVLRLLPVTKITVETASFDMQLLKNPDIAGKEYQEGEQLGFWNVREYVLFRDGHVCHHCYGRSKDPVLNVHHLESRRTGGDSPGNLITLCETCHKALHRGEITLKAKRGQSFRAEAFMGIMRWEVLNRLKASHPELEVNNTYGYRTKHARIANDIAKSHCADAFCIAGNLGAERLGEFFFQKQTRRNNRQIHKLSILKGGRRKRNQASFEVKGFRLFDKVACKGEESFIFSRRSSGYFDVRKLDGTRISAGISYKKLRLLEKRRTYLTEIRKEAFPPLPEGRSLRA

SEQ ID NO: 23630 - protein, 465 aa, unidentified; identical to SEQ ID NO: 3603
  REGION 1..465: note = Human gut metagenome

SEQ ID NO: 23631 - protein, 431 aa, unidentified; identical to SEQ ID NO: 15055
  REGION 1..431: note = Human gut metagenome

SEQ ID NO: 23632 - protein, 396 aa, Moorena sp.
LTYETTKYTQPITLGIDAGYQSIGFSAITEKKELLAGECQLLQGQVERNRERLMYRRQRRNRLRYRKSRFDNRRKPEGWLAPSLQNKLDTHIRLVEKIKSILPITQVIVEVANFDIQAIKNPGIQGVAYQQGEQYNFWNLREYILHRDNHECQNPGCKNRSKNQELQVHHIGYWKEDYTDRPGNLITLCDKCHRPENHREGKFLWGWQPKVKSFRAETFMSTIRWKLVRTLGCEYTYGYITKSRRIELKLEKSHVNDAFVIAGGTNQSRTIPITIQQVRRNNRSLQKFYDAKYIDLRTGEKASGQELNCGRRTRNKNLNTENLRKYRGKKLSPGRVNIRKQRYPYQPGDTVLYEGQKCTVKGVQNLGIYIKLSELSKPVKTSEVSILYYGKGLRVW

SEQ ID NO: 23633 - protein, 406 aa, unidentified
  REGION 1..406: note = Human gut metagenome
LLKEKKAIVKRRTPFTIQLTIATGETKQPVSLGVDAGYKHVGLSASTEKAELYASEVELRQDITDLLSARRALRQSRRNRKTRYRAPRFNNRLCTKRKGWLAPSVENRINAHLSRIKAVLRLLPVTKITVETASFDLQLLKNPDISGKEYQEGEQLGFWNIREYVLCRDGHVCQHCYGRSKDPVLNVHHLESRRTGGDSPGNLITLCETCHKALHRGEITLKAKRGQSFRAEAFMGIMRSEVPNRLKASHPELEVNNTYGYRTKHARIANDIAKSHCADAFCIAGNLGAERLGEFFFQKQTRRNNRQIHKLSILKGGIRKRNQAPFEVKGFRLFDKVACQGEEGFIFGRRSTGFFDVRKLDGTCISAGISYKKLHLLEKRRTYLTEIRKEEALPPLPEGRGLRAKM

SEQ ID NO: 23634 - protein, 335 aa, unidentified
  REGION 1..335: note = Human gut metagenome
VQTHLNIIRKISRYLPVTDIAFEVNRFAFMHMENPKAMGVDFQNGPLKGYDDVKEAICTQQHGKCLMCKKPIAHFHHIVPRSRGGSDTIQNLAGLCPECHTKVHTDTTFRKDFDRKKSGQLKKYGALSALNQAVPFICKKLLEEYGEEHVHFCGGLDTSLIRTALGFEKTKKNQMHEVDAYCIGLAALEINEVETPAFDHTFQIRQFRRQDRSIIHHQTGRSYYQGKEKVAQNRKPGFEQKTTALSQWYEEQVRIHGEKEAEKLRSQLRVEKSSRHYNDMDRFLPGAVFLYEGKRYVLSGRITNGKYLRACGQGMKNFPAAECTFIRHNAGLVFI

SEQ ID NO: 23635 - protein, 477 aa, unidentified; identical to SEQ ID NO: 10137
  REGION 1..477: note = Human gut metagenome

SEQ ID NO: 23636 - protein, 421 aa, Moorena sp.; identical to SEQ ID NO: 5881

SEQ ID NO: 23637 - protein, 423 aa, Moorena sp.; identical to SEQ ID NO: 14011

SEQ ID NO: 23638 - protein, 477 aa, Blautia sp.; identical to SEQ ID NO: 2707

SEQ ID NO: 23639 - protein, 452 aa, Moorena sp.; identical to SEQ ID NO: 13319

SEQ ID NO: 23640 - protein, 461 aa, unidentified
  REGION 1..461: note = uncultured beta proteobacterium
LMPCSENRARKLLDSGRARVHKLFPFCIRLTDRLIEDSALQPMRLSLDPGSKETGLAVSRIAETIDVRTGEIAPVMHICFLIELVHRGAAIKKSLEARAAMRGRRRSANLRYRAPRFGNRPRAKGWLAPSLKHRVDTTCSWVRRLTCLAPITHLAKELVRFDMQLMQNPEICGVEYQQGSLQGYEVREYLLEKFHRTCAYCDAKDIPLQMEHIHPKANGGSNRVSNLTLACGPCNSKKAARDIKDFLAKDSVRLKRILAQAKAPLRDAAAVNSTRWALFNALKATGLAVETGTGGQTKWNRSRLGIVKTHALDAACVGTVYDVQGVNAPALRVTCTGRGSRCKTRLDQYGFPRTYLSKQKTAFGFKTGDMVIANVTKGIKTGVHKGRLAIRLSGSFNVQSGLKGIPAVQGISYKYCRITQRADGYGYSQPEQPKKGRRDQGRASHAALYLPGLNAQVSRAF

SEQ ID NO: 23641 - protein, 413 aa, unidentified; identical to SEQ ID NO: 3220
  REGION 1..413: note = Human gut metagenome

SEQ ID NO: 23642 - protein, 406 aa, unidentified; identical to SEQ ID NO: 6031
  REGION 1..406: note = Human gut metagenome

SEQ ID NO: 23643 - protein, 428 aa, unidentified
  REGION 1..428: note = Human gut metagenome
LKVFVLNMRGQPLMPCSPAKARHLLKAGKAVVKRRTPFTIQLRIATGETKQNVTLGVDAGAKHVGLSATTEKEEVFASEVELRQDITGLLAARLSLRRDRRHRKTRYRAPRFLNRVRSKHKGWLAPSVENRIQAHMSRIDAVCRLLPVTKIVIETASFDIQKIKDPSVEGTDYQQGDQLGFWNVREYVLFRDGHVCQHCHGYSKDKILNVHHLESRQTGGDAPNNLITLCETCHKACHAGKIKLKVKRGQSFREEAFMGIMRWTLLDRVRKAHPGLPVENTYGYLTKNTRITLGLPKAHCVDAYCIAGNLKAVRRGVYLHQRQVRKHNRQIHKCTVLSKTLKDGTKIGYRKLNQTPHLVKSFRLFDKVRCLGQIGFIFGRRSSGYFDVRRLDGVKLSPSISWRKLTLLEKRSTYLTELRKQDGASSPV

SEQ ID NO: 23644 - protein, 430 aa, Pseudoalteromonas sp.; identical to SEQ ID NO: 8414

SEQ ID NO: 23645 - protein, 431 aa, unidentified
  REGION 1..431: note = Human gut metagenome
MPNKVYVINKHGRPLMPCSPAKARHLLDAGKAKVKKRTPFTIQLVYGSSGYTQEVILGVDAGSKTIGMSASTTKEELLSAEVKPRNDVVDLLSTRREFRRARRNRKTRYRKPRFDNRVRSKHRGWLAPSVEVKIQEHITSIKRVCRILPVSKVVVETAEFDLQLLKAIADGKPVPQGEDYQKGEMYGHYNVRQYVLWRDGYTCKCCGAHTTKKKEVRLHVHHLESRKVGGDAPDNQVTLCESCHEKLHKGLIAEKDFKKRKRRSTRDATFMGIMRKTLMQRLCSELPIPVVETRGYITKATREKLLVLPKSHTNDALAIAQGKQGFNVGYLPGIVQIDKICTIRPVRHHNRQLHKATILKGGIRKSNQAEKYVFGYRLFDKVQFNGQDCFIWGRRTTGIFTIKTINGKMIKDGISFKKLKLVEKSTSYLIA

SEQ ID NO: 23646 - protein, 425 aa, unidentified
  REGION 1..425: note = Firmicutes bacterium
MIINEEKQCKVYVLSKDNKPLMPTNGVKAAMLLKKNIAKVVRKTPFTIKLLFEPKTNYVQPLTLGVDLGSKFIGSAVKNEINDDVIYKSQVELRDNIKDNMDRRRAYRRARRNRKTRYRKPRFLNRASSKRNDRLNPTLKSKLDNHLKEIKFVSKILPIKNIILETTKFDIHKLKNPNVKGILYQKGDLYGWENARQYVLHRDEFKCQQCKGKSKQKKLDVYHIICKSEGGSDDVENLICVCLDCRYAIQNGEIKLKHQGKKKYSVDATQANIISSQLQKKLELEGIKFETTSGHITKVNRSELKLEKSHVNDAIGIVSRGKEVKDRLKVLYKRCIADGGYQREVCVKGLSKPRVYKVGKQRGFKTFDEVLYRGNKYFIKEINKEIYTYLMDVFGNKVDFVKPKMPKLENLKIINRRKTWIMQVA

SEQ ID NO: 23647 - protein, 418 aa, unidentified; identical to SEQ ID NO: 2425
  REGION 1..418: note = Human gut metagenome

SEQ ID NO: 23648 - protein, 382 aa, unidentified
  REGION 1..382: note = metagenome
LLYDSTHYTQDIVLGVDAGSKHIGLSATTETKELYASDVELRNDIVDLISTRRQNRRSRRNRKIRYRKARFQNRVSGKKNWLAPSIRQKVDTHMTVVSRVCMILPVTKIIVETASFDIQKIKDPDISGTGYQQGEQLDFWNVREYVLSRDGHTCQCCKGKSKDPVLNVHHIESRKTGGDAPNNLITLCETCHKSYHSGAVQLPKAIHRGMRFKDAAFMGIMRWAFYNKLKEVYEPQDIEVSMTFGYLTKNTRIRHYLPKEHYIDARCISGHPEAIPNNEVFYQKKVRCHNRQIHKNTILKGGVRKRNQAGYLVKGFRLFDKVAYEGREYFIFGRRQSGFFDLRDLSGCKVNKGSLSYRKIGFLEPRQYYLCERRVMDTQGCA

SEQ ID NO: 23649 - protein, 449 aa, unidentified
  REGION 1..449: note = Human oral metagenome
LATDNSPRFVGSRICFDRCENRNKEGGRTLVYVISKTGQPIMPTENHAKVRMLLKSGKAKVVKRTPFTIQLTGTSKTFTQEVTLGVDAGSKHVGLSASTAKKELFSAELRPRNDVVDLMSSRRALRRSRRNRTTRYRQARFNNRVHSKHKGWLAPSVEVKIWNHIQGIRFVAKLLPVKTIRVETAEFDLQRLKALEAGEPVPVGTDYQLGEMYGQYNVRQYVLHRDGYTCQCCGAHGTDKKPVKLHVHHLESRKTGGDSPDNLIALCEDCHIGYHAGTVALPTTKRRRKSTRDAAFMGIMRKTMLERLRNMFSETNICSTYGYITKYWREKKNIVKTHTSDAFVIAKNFDAERLDRFLLIVPKRQHNRQIHKCKINKGGTRKLNQTPKFVFGYQLFDRVMCMGQEGFVFARRSSGAFDIRKLNGEKIRASISYKKLKRLESRNTLLVSY

SEQ ID NO: 23650 - protein, 488 aa, unidentified; identical to SEQ ID NO: 9276
  REGION 1..488: note = Human gut metagenome

SEQ ID NO: 23651 - protein, 482 aa, unidentified
  REGION 1..482: note = Human gut metagenome
LVWNVQAPWDVYPSPTLCGLCLKVLRGRNGDADKKPIPTLTKDENRPSGRTTGLRAEQAEPAGIRKGDTLKVFVLNMRGKPLMPCSPAKARHMLKAGKAVVVRRTPFTIKLTIATGETKQDVTLGVDAGARHVGISATTEKEEVFASEVALRQDITGLLADRLAFRRARRNRKTRYRAPRFNNRVRSKHKGWLAPSVENRIQAHISRIEAVCRLLPVTKIVIETASFDIQKIRNPEVEGTGYQQGDQLGFWNVREYVLFRDGHICQHCRGRSKDPILNVHHLESRKTGGDAPNNLITLCETCHKAYHAGKIKLKVKRGQSFRAEAFMGIMRWTLLDRVRKTHPKLPVENTYGYLTKHKRIALGLPKTHCADAFCIAGNLKALRRGDFLFQQQTRKHNRQIHKCSILKGGVRKLNQAPFLVKGFRLFDKVRIGGQIGFVFGRRVRGTFNIRRLDKTVIGTDINCKKLSLLETRKTFLTELRKE

SEQ ID NO: 23652 - protein, 438 aa, Lactobacillus sp.; identical to SEQ ID NO: 4646

SEQ ID NO: 23653 - protein, 431 aa, Moorena sp.
MQRAFVLDQNKKPLMPCHPARARELLRKRKARIFKLYPFTIILTEREAGTVQNVAFKIDPGSKQTGIVLAADFKRGKRVIWAAVLEHRGQQIKNALESRRAIRRSRRTRQTRYRPARFLNRHTDKGRLPPSLQSRIENVWTWLCRLNRACSISNIAQELVRFDTQLLQNAEISGVEYQQGALQGFEVREYLLEKWQRKCAYCGKKDVPLEVEHIHPKSRGGSNRISNLTLACHECNQAKDTQTAAEFGHPEIQQQAKLPLKDATAVNATRWALYSRLQTTGLPIEIGTGGRTKFNRVTQGYPKAHWIDAACVGESGEWIYLNPEQAYLHIKATGHGSRQMCRTNQYGFPTRHRLRQKQHFGFQTGDMVKAIVPAGKYTGTHIGRVACRATGSFDITTATGKVTVSHKHIKTMHHSDGYSYTKGLGAIPPRT

SEQ ID NO: 23654 - protein, 460 aa, unidentified
  REGION 1..460: note = Human gut metagenome
TIQLKYENIPVLQPVTLAEDPGRTNIGVAVLSPLGNLMFAAVIETRNKEIKKLMADRKAHRQASRRGERRARQRLAKKYGTIIKAGMAMRKLPQYAADKFVACKFIRNTEARFCNRKRRTDWLTPTVNHLVQTHLNVIKKISRYLPVTDIAIEVNRFAFMQMENPNASGVDFQNGPLKGFNDVKAAIREQQHGKCLMCKNDIEHFHHMVPRSKGGSDTIQNQVGLCPKCHAKVHTDTSFRKKLGDKKSGLLKKYGALSALNQAIPFICKGLLEEYGEKHVRFCTGKETSLIRTSLGYEKTNENQMHEVDAYCIGLAMLGVKNIKFQQFDNTYKIKQFRRQNRSIIHHQTERSYYLGKQKIATNRKPRFEQTGDAISDWYEKQLKTCENGEAGKLLSALKVKKSSRFYNSKGRLMPGTIFFYNGQRHVISGQLTGGRYLRAYGDTKTNYPISKCKILKHNE

SEQ ID NO: 23655 - protein, 202 aa, unidentified
  REGION 1..202: note = Human gut metagenome
GNAPDNHGTLCDDCHKKFHLGIITDVKLKTRRRQSTRDAAFMGIMRKTLMWRLRTELFIPVAETKGYITKATREKLLVLPKSHTRDALAIAQGRHGFGIKEYAYVEPANHIYTVRPVRHHNRQLHKASILKGGIRKRNQASKYIFGFRLYDKVLYQGKACFVWGRRTSGTFLLRTIDGIKVKDGVSYRNLTLLERSSNYLIA

SEQ ID NO: 23656 - protein, 384 aa, unidentified
  REGION 1..384: note = Human gut metagenome
MVYVINKQGQALMPTERFGKVRRLLKNSLAHVVCRIPFTIQLDYDTTDYTQPVSLGVDAGSKHIGISATTSEKELYAADVELRNDIVDKLSTRRELRRTRRSRLRYRKARFNNRVSSKRKGWLAPSVENKIQTHLTVVENIHKFLPITNIVVETASFDIQKINNPSISGSEYQQGEQLDFFNVREYVLFRDNHICQHCKGKSKDKVLNVHHIESRKTGGDSPKNLITLCETCHKAYHRGEFKLNIKRGKSFRDSAFMGIMRWSFYNRLKNIYPNVSMTFGYITKNTRITNNLPKDHYVDARCISGNPVAKPLGYYFYQKKVRCQNRQIHKANFLKGGRKKLNQAPFLVKGFRLFDLVEYQKELYYIFGRRSSGSFDIRKALMNK

SEQ ID NO: 23657 - protein, 540 aa, unidentified
  REGION 1..540: note = Human gut metagenome
KQKVMVYILNKKGKPLMPTTRCGHVRKLLDSKKAVVVSSNPFTIRLKYDTPNGVQDVFAGIDSGRENIGSGASNEDGDCLYLGELKTSNKSIKMKMTERAGFRKERRSHDRQNKQRKARKDHTEIQNGNADICRTTISCKSVQISYPAAEKSVTHKIIRGKEGKFANRHRDEGWITPSARQLVQMHMNDLKSMCRILPISHVTLERVAFDFQKLENENIKAWEYGKGKLYGYDSPEEYIHDVQGGKCLICGKPHIDYLHHIIPRSKGGSNKVSNLAGLCYDCHYGPMGVHNCQDTQDRLPELKNEANKQYKVSLLNSVMPVLIEEMDKFCKANSIIFSICGGHDTAKVRDMYDLQKDHCIDGFAISLAGRNVKSVDVMPDRIHQKQRYKKKSKNIIQKRNCREYYDGKKLAAVNRHKGTDQKADSLEEYMNTYAETHTADECKKHFESLTVKPARRTYTFHKEGRICPFHIGDKVRYEKKNKIKGNTKVETFICEGIRFPKDENKAKVEHNKTKSKKMKFCRVLEPGCTPYIDYRKLVLI

SEQ ID NO: 23658 - protein, 268 aa, unidentified; identical to SEQ ID NO: 10068
  REGION 1..268: note = Human gut metagenome

SEQ ID NO: 23659 - protein, 431 aa, unidentified; identical to SEQ ID NO: 4463
  REGION 1..431: note = Human gut metagenome

SEQ ID NO: 23660 - protein, 439 aa, unidentified
  REGION 1..439: note = Human gut metagenome
GSQPVERPRRQNLRVFVFNKRGKPLMPCSPAKARLLLKEKKAIVVRRTPFTIQLTIATGESKQPVSLGVDAGYKHVGLSASTEKAELYASEVELRQDITDLLSARRALRQSRRNRKTRYRAPRFDNRIRTKRKGWLAPSVENRINAHLSRIEAVLRLLPITKITVETASFDMQRLKNPDISGKEYQEGEQLGFWNVREYVLFRDGHVCRHCHGRSKDPVLNVHHLESRRTGSDSPDNLITLCETCHKALHRGEITLKAKRGQSFRAQAFMGIMRREVLNRLKASYPELKVHETYGYLTKHARIANGIVKSHGADAFCIAGNLGAERLGEFFFQKQTRRNNRQIHKLSILKGGIRKRNQAPFEAKGFRLFDKVACQGEEGFIFGRRSSGSFDVRKLDGTRISAGISCKKLRLLEKRRTYLTEIRKEEALPPLPEGRGLRA

SEQ ID NO: 23661 - protein, 302 aa, unidentified
  REGION 1..302: note = Human gut metagenome
PSVENRINAHLSRIEAVLRLLPVTKITVETASFDLQLLKNPDISGKEYQEGEQLGFWNIREYVLCRDGHVCQHCYGRSKDPVLNVHHLESRRTGGDSPGNLITLCETCHKALHRGEITLKPKRGQSFRAEAFMGIMRWEVLGRLKASHPELEVNNTYGYRTKHARIANDIAKSHCADAFCIAGNLGAERLGEFFFQKQTRRNNRQIHKLSILKGGIRKRNQAPYEIKGFRLFDKVACQGEEGFIFGRRSSGFFDVRKVDGTRISAGISYKKLHLLEKRRTYLTEIRKEEVLPPLPEGRGLRA

SEQ ID NO: 23662 - protein, 428 aa, unidentified
  REGION 1..428: note = Human gut metagenome
LKVFVLNMRGQPLMPCSPAKARHLLKAGKAVVKRRTPFTIQLRIATGETKQSVTLGVDAGAKHVGLSAATEKEEVFASEVELRQDITGLLAARLSLRRDRRHRKTRYRAPRFLNRVRSKHKGWLAPSVENRIQAHMSRIDAVCRLLPVTKIVIETASFDIQKIKDPSVEGTDYQQGDQLGFWNVREYVLFRDGHVCQHCHGRSKDKILNVHHLESRQTGGDAPNNLITLCETCHKACHAGKIKLKVKRGQSFRAEAFMGIMRWTLLDRMRKAHSGLPVENTYGYLTKNTRITLGLPKTHCVDAYCIAGNLKAVRRGVYLHQRQMRKHNRQIHKCTVLSKTLKDGTKIGYRKLNQTPHLVKSFRLFDKVRCLGQTGFIFGRRSSGYFDVRRLDGVKLSPSISWRKLTLLEKRSTYLTELRKEDGASSPV

SEQ ID NO: 23663 - protein, 636 aa, unidentified
  REGION 1..636: note = Sutterellaceae bacterium
LTIATGETKQPVSLGVDAGYEHVGLSASTEKAELYASEVELRQDITDLLSARRALRQSRRNRKTRYRAPRFDNRIRTKRKGWLALSLENRINAHLSRIEAVLRLLPVTKITVETASFDLQLLKNPDISGKEYQEGEQLGFWNIREYVLCRDGHVCQHCYGRSKDPVLNVHHLESRGTGGDSPGNLITLCETCHKALHRGEITLKAKRGQSFRAEAFMGIMHWEVHNRLRALHPGIEVSNTYGYRTKHARIANGIAKSHCADAFCIAGNLGAERLCEFFFQKQTRRNNRQIHTLSILKGGIRKRNQAPFEVKGFRLFDKVACQGEEGFIFGRRSSGFFDVRKLDGTRISAGISCKKLHLLEKRRTYLTEIRKEEALPPPCLKAGAPRLNVMNNIDFHGIEEIWSSLSTSSLLWLTVTLAAYLFAQKLYKWSNWNSLLNPVAVSIVTVVLLLMATHTPYQTYFSGAQFIHFLLGPTTVALAVPLYDLRIQLAKNWLPILLGLFAGAVTAITSTVLIAGLLGASPETIISLAPKSVTTPIAMSIAEKLGGLPALSASLVVLTGVLGSICAGPLFLLLKVDSSSAKGFALGLSAHGMGTSRAFQIDSTAGAYGSLAIGLTGLTTALLAPLLTPLLMKLFF

SEQ ID NO: 23664 - protein, 311 aa, unidentified
  REGION 1..311: note = Marine metagenome
LSRLAPVTAISQELVRFDTQKLDNPEISGVEYQQGTLLGYEVREYLLEKWGRECAYCGTTDTPLEIEHVVPRSRGGSNRVSNLTLSCHPCNAEKDSQTLTDFFATNKGLKKRLKANGLSADAQLERVQRQLKQPMRDASAVNATRWALFSALKTTDLPVAVSSGGRTKYNRQRLNIPKTHALDAACVGAFGKLYDWTVPTLTIKAMGRGSYQRTRLTKHGFPRGFLMRQKQVHGFQTGDMVRAIVPTGKKAGTHTGRVAIRKTGSFNIQAEYGAVQGISHKYCTLIQRSDGYGYYVTLFSNLTGEAGRAVA

SEQ ID NO: 23665 - protein, 413 aa, unidentified; identical to SEQ ID NO: 10778
  REGION 1..413: note = Human gut metagenome

SEQ ID NO: 23666 - protein, 433 aa, Moorena sp.
VPDVKSLFNNHEEYLLLLTGDFKDIMLVYVINKNGNPLMPCKPAKARKLLRDNKAKVVNRCPFTIQLQWDCEENIQEVTIGIDKGSGISGFSCVANEQILMSGEIHHRTDIKDKMDARRGNRKNRRARKWYRPKRFLNRASSKRSGRLPPSIKSNVEEVIRVVRQIPLPIIKIVIEDVQVDIARLNNPDLQGKEYQQSSRLSENLRIATLMRDDYQCTQCNKKSNLDAHHIIWKEHGGKDTIENLITLCKQCHKKVHKEKLKLNVEGVSGFKDKIAQRTMQGKAYLYEKLSQQAPLSKVFGYQTYSYRKSLSLPKEHDIDALCVATLETGEVIPPNRENFYLIKFRPRQTRRQFHDLPRKGMGRLRYQVNAQSFGFRKGDIVRVKVKWVKQINSIYSSGYLAFKRVRGEPNSAKPKDCQLLQRGQTVIWEKAV

SEQ ID NO: 23667 - protein, 386 aa, Alistipes sp.; identical to SEQ ID NO: 22948

SEQ ID NO: 23668 - protein, 435 aa, Moorena sp.
MQNYIFIIDTNKQPLNPISPKKARRLLEKGKAAVFRMYPFTIILKTAIRQSRRCANDNPTISPCQIKIDPGSKKTGFALVQDDQVIWGMELEHRGGLIKKKLESRGAARRGRRNRNTRYRKPRFLNRKRPKGWLTPSLEHRILTIQTWVKRLIKFCPVNEIWVERVKFDTQKMQNPEINGVEYQQGELAGYEVREYLLEKWGRECAYCGKQNIPLQIEHIHPKSKGGSDSAKPTLRERVSNLCLACEKCNQRKGNKPIEEFLKKKPSLLQKIKTKAKQSLKDPAAVNATRNKLVKVLRRMKPVVTGTGAQTKYNRTKLGFPKEHWIDAACVGDIKPLSLRTTQPLLVNCKGQGGRQKAALNKYGYPIRHNPLKPIKGWMTGDIARHQKLGIGKVTPRSKGSFGFTPLGMKGYKSCKSQDISAIHRKDGYIYSFCK

SEQ ID NO: 23669 - protein, 424 aa, unidentified; identical to SEQ ID NO: 13009
  REGION 1..424: note = Human gut metagenome

SEQ ID NO: 23670 - protein, 473 aa, unidentified
  REGION 1..473: note = Human gut metagenome
LYIKMTSCTCTVFPAYNYAKASSSQGKHNLLLRQERLIVKEVAYMSTVYVLNKDGKPLMPTTRCGHVRHLLKEQKARVVTSKPFTIQLLYEADDVVQSLYLGIDPGRTNIGVAVVKADGTAVFTAHLETRNKEIPKLMKKRKESRRARRTNGRRCRRQRRAKANGTISKKCVKHDTAQNGSVSKRAKEIGVIKRHLPGCEKDVLCIGIKNKEAKFSNRTRPEGWLTPTTNQLLQTHINLVKKIQKFLPISDVVLEINKFAFMRLDNPNVQKWQYQQGPLYQKANLEETVSEMQEHHCLFCKKKIDHYHHVVPQHKNGSNTIDNIIGLCTQHHDLVHKDATWQKRLAKKKTGLNKKYGALSVLNQIIPALTKELSSLFPKHFFVTNGKSTYDYRAAHGVSKDHWLDAYCIACSVLPNDTCDKTINSRVPYELKQFRRHDRRALNNENMSRVYTFNGKMVATNRHKATEQTTDSL

SEQ ID NO: 23671 - protein, 341 aa, unidentified
  REGION 1..341: note = Human gut metagenome
SDLLSARRALRQSRRNRKTRYRAPRFDNRIRTKRKGWLAPSVENRINAHLSRIGAILRLLPVTKITVETASFDTQLLKNPDISGKEYQEGEQLGFWNVREYVLFRDGHACQHCHGRSKDPVLNVHHLESRRTGGDSPGNLLTLCETCHKALHRREIKLKTKRGQSFRAEAFMGIMRWEVLNRLKASHPELEVHNTYGYRTKHTRIVNGIDKSHCADAFCIAGNLGAKRLGEFFFQKQTRRNNRQIHKLSILKGGIRKRNQAPFEVNGFRLFDKVACQGEEGFIFGRRSSGFFDVRKLDGTRISAGISYKKLHLLEKRRTYLTEIRKEEALPPLPEGRGLRA

SEQ ID NO: 23672 - protein, 329 aa, Nostoc sp.; identical to SEQ ID NO: 8539

SEQ ID NO: 23673 - protein, 447 aa, unidentified; identical to SEQ ID NO: 3915
  REGION 1..447: note = Human gut metagenome

SEQ ID NO: 23674 - protein, 439 aa, unidentified; identical to SEQ ID NO: 23291
  REGION 1..439: note = Human metagenome

SEQ ID NO: 23675 - protein, 283 aa, unidentified; identical to SEQ ID NO: 15642
  REGION 1..283: note = uncultured cyanobacterium

SEQ ID NO: 23676 - protein, 436 aa, unidentified
  REGION 1..436: note = Human gut metagenome
MQYVYVLNKHGEPLMPCSSGKARLLLKQQKACVVKRTSFTIKLLFGSTGYKQPITLGVDAGSKHVGLSASTEKRELYCEEFTPRNDVVDLLSTRKQNRRSRRNRKTRYRAPRFDNRVHSKHKGWLAPSVEVKIQEHITVIKRICRILPITLVRVETAEFDTQRLKAMLEGKPLPVGTDYQLGEMYDEYNVRQYVLKRDHYTCQCCGAHTTTKKTVKLHVHHLESRKVGGNAPSNLITLCTTCHDALHKGKVSLDGKERGKPLRDAAFMGIMRKTLMARLRDELSIPVQGTYGYITKMRREQNDIKKSHVNDARCISKHPLAEPCSVCYRTKAIRHHNRQIHKANFSKGGIRKRSQMPYVVEGYRLWDKVLYKGQECFVSGRRASGSFTLKKLDGTRISKGVTFKKIAAIRACNKLSNRKDVNGQFLPRLKSRDSLP

SEQ ID NO: 23677 - protein, 431 aa, unidentified; identical to SEQ ID NO: 21531
  REGION 1..431: note = Human gut metagenome

SEQ ID NO: 23678 - protein, 466 aa, unidentified; identical to SEQ ID NO: 4644
  REGION 1..466: note = Human gut metagenome

SEQ ID NO: 23679 - protein, 406 aa, Moorena sp.; identical to SEQ ID NO: 9574

SEQ ID NO: 23680 - protein, 515 aa, unidentified
  REGION 1..515: note = Human gut metagenome
MTALEERLSKTEYIYVLGFDGKPQMPTRRKRHVLKLLKTGRARIAEDIPLTIRLTYRNAPVLQPVTLAEDPGRTNIGAAVLSPLGDLLFAAVIETRNKEIKKLMADRKKSRQASRRGERKARQRLAKRYGSMVKSGMVMRKLPMYAADRFVTCKFIRNTQARFCNRKRCPDWITPTVQHLVQTHLNIIRKISRYLPVTDIAFEVNRFAFMHMENPEAMGVDFQNGPLKGYDDVKEAICTQQHGKCLMCKKPISHFHHIVPRSRGGSDTIQNLAGLCPECHTKVHTDTAFRKDFDEKKSGQLKKYGALSALNQAVPFICKKLLEEYGEEHVHFCRGLDTSLIRTALGFEKTKKDQMHEVDAYCIGLAALEVNEVETPAFDHTFQIRQFRRQDRSIIHHQTGRSYYQGKEKVAQNRKPGFEQKTTALSQWYKEQVRIHGEKEAEKLRSQLRVEKSCRHYNDMDRFLPGAVFLYEGKRYVLSGRITNGKYLRACGQGMKNFPAAECTFIRHNAGLVFI

SEQ ID NO: 23681 - protein, 426 aa, Calothrix sp.; identical to SEQ ID NO: 17573

SEQ ID NO: 23682 - protein, 417 aa, unidentified
  REGION 1..417: note = metagenome
MPCSPAKARLLLKEKKAIVKRRTPFTIQLTIATGEAKQPVALGVDSGYKHIGLSATTEKAELYASEVELRQDITDLLSARLALRRSRRSRKTRYRAPRFDNRVASKREGWLAPSVENRIAAHMSRVEAVMRVLPVTAITVETAAFDTQLLKNPDIAEAAYQQGEQLGFWNVREYVLFRDGHVCQHCRGKSKDPILNVHHIESRRTGGDAPNNLITLCETCHKAFHRGEIELKVRRGKSFKAETFMGIMRWTLFERLKKAHPELRVRNTYGYLTKHKRISHGIAKSHCADAYCIADNLGAKRLEGFFFQKQTRKHNRQIHKLSILKGGLRKKNQAPYEVKGFRLFDKVICKGEEAFIFGRRTSGSFDVRRLDGTRISAGINYKKLRLLEPRTTYLTEFRMEAALPPLHECRGFRAEFL

SEQ ID NO: 23683 - protein, 400 aa, unidentified
  REGION 1..400: note = Human gut metagenome
AKVKKRTPFTIQLVYGSSGYTQEVILGVDAGSKTIGMSASTKKEEVFAADVTPRNDVVDLMSTRREFRRARRNRKIRYRKPRFDNRVRSKHKGWLAPSVEVKIQEHITAIRRVCGILPVSKVVVETAEFDLQLLKAIADGKPVPQGEDYQKGEMYGHYNVRQYVLWRDNYTCQCCGTHPSKKKEVRLHVHHLESRKVGGDAPDNQVTLCESCHEKLHKGLIAEKDFKKRKRKSTRDATFMGIMRKTLMQRLCSELPIPVVKTRGYITKATREKLLVLPKSHTNDALAIAQGKQGFNVGYLPGIVQIDKICTIRPVRHHNRQLHKATILKGGIRKSNQTEKYVFGYRLFDKVQFNGQDCFIWGRRTTGIFTIKTINGKMIKDGISFKKLKPVEKSTGYLIA

SEQ ID NO: 23684 - protein, 381 aa, unidentified
  REGION 1..381: note = Human gut metagenome
QLFTIKLLYETTNYTQDLTLGVDTGSGTIGTAVSTNNSKIVYASEVVIRNDITDKMTQRAKYRRNRRNRKTRYRKARFLNRKNSIRADRFNPTMVSKLYSHVKEIEYIKSILPIKTLVLEIGQFDPHLMQNPELKYKPWGYQKGKNYGFANTKEMVLNRDNYTCQYCKGKRKNSKLEVHHIIYRSNHGSDDENNLITLCQTCHKLLHNGEIKLNLKGKSKGTLKYATQMNSIRKQLLRIYPEAIETFGFVTKDNRLNINVDKHHYLDACVIATGGKEFQICCNIYKKRCISKGDFQQTKGVRSEQKLNTKKICGFRKFDKVKYFGKEYFIKGRMSTGYAVLMDIEGKKIDFSDMPKGYKSVKLNNCKRISARKSQLITLYS

SEQ ID NO: 23685 - protein, 397 aa, Moorena sp.
MKVYVQDKNGNPLDPTMPARARILLKRSRAEVVVRTPFTIRIVDREGGYTKDVILGTDPGYSIIGFSAVTKKEELIAGVVELRSDIPKKLEQKRSYRRGRRTRNTRYRQPRFNNRKRENGWLAPSVREKKDTHQKLINKLKEILPITNTVVEVAKFDTQKMQNPEISGLEYQQGTLQGYHIREYLLEKWDRKCAYCGKTDVPLQVEHIIPPKRGGSDRVSNLTIACEKCNQKKGNKTAEEFGYSEIQKKAKKSLKEAAFMNIVRWEIVDELDCDYTYGYITKQRRIELGLEKSHLNDAFIIAGGECQKRAKEYSVYQRRRNNRSIQTNRKGYGRSIRKKKYKFQPGDLVRKDHCECKVKGVFNYGKWVRLVNQFGEVINSNIKNVELVKYGKGLSFT

SEQ ID NO: 23686 - protein, 430 aa, Moorena sp.; identical to SEQ ID NO: 9043

SEQ ID NO: 23687 - protein, 411 aa, unidentified; identical to SEQ ID NO: 8372
  REGION 1..411: note = Human gut metagenome

SEQ ID NO: 23688 - protein, 289 aa, Parasutterella sp.; identical to SEQ ID NO: 15206

SEQ ID NO: 23689 - protein, 325 aa, unidentified
  REGION 1..325: note = Human oral metagenome
LWGVDKLIEQRRGYRQRRRYWKRYRKERFSNRASTRRKGRITPTILQKRQAVVRVVDRLSKYIRIDSIYLEDVAIDVRVLTDEKRLYSWQYQQSNRLDENLRKATILRDRCQCQMCGKRNCRLEVHHITPRRMNGANTIGNLITLCADCHSKVTGCEMEFAEQLYSKIGKKKNNAGLQYSSHVMVGKTWLREELSKRAPIFITTGGDTANKRIDWSLEKSHEIDAVCITNLEPESVGVKPWNVKPLRHQRKTMKVKEILRFRHRDIVCYTFKNGEYHEGYVTALYPSEGKQKEGLNFLSPTKHCKRVNPKKCQRLDRPDKFLWLA

SEQ ID NO: 23690 - protein, 460 aa, unidentified; identical to SEQ ID NO: 20157
  REGION 1..460: note = IscB polypeptide

SEQ ID NO: 23691 - protein, 375 aa, unidentified
  REGION 1..375: note = Human gut metagenome
VSKRAKEISVIKRHLPGCEKDVLCIGIKNKEAKFNNRTRPTGWLTPTANQLLQTHINLVKKIQKFLPISDVVLEVNKFAFMQLDNPNSQKWQYQKGPLYQKESLKSAVSEMQEHHCLFCKKKIDHYHHVVPQHKNGSNTIDNIVGLCTQHHDLVHKDATWQKRLAKKKTGLNKKYGALSVLNQIIPALTKELSSLFPKHFFVTNGKSTYDYRAAHGVSKDHWLDAYCIACSVLPNDTCDKTINSRVPYALKQFRRHDRRALNNENMSRVYTFNGKMVATNRHKATEQTTDSLEEFRQRQPNDVCNLKVKEHHPTYRNMSRNYPGSIFLVEKQVHIMQGIAGSKDGKATTYKDTNANSIAAGKCKFVAKNSGILFV

SEQ ID NO: 23692 - protein, 439 aa, unidentified; identical to SEQ ID NO: 17763
  REGION 1..439: note = IscB polypeptide

SEQ ID NO: 23693 - protein, 435 aa, unidentified; identical to SEQ ID NO: 11554
  REGION 1..435: note = Fermentation metagenome

SEQ ID NO: 23694 - protein, 392 aa, Moorena sp.; identical to SEQ ID NO: 5076

SEQ ID NO: 23695 - protein, 403 aa, Moorena sp.; identical to SEQ ID NO: 15470

SEQ ID NO: 23696 - protein, 403 aa, unidentified
  REGION 1..403: note = Human gut metagenome
RCRRQRRAKANGTISKKCVKQTTAQNGSISKHAKEIGVIKRRLPGCEKDILCIGIKNKEAKFNNRTRPEGWLTPTANQLLQTHINLVKKIRKFLPISDVVLEINKFAFMQLDNPNVQKWQYQQGPLYQKASLEEAVSEMQEHHCLFCKKPIAHYHHVVPQSENGSNTIGNIVGLCTKHHDLVHKDTAWQKKLTKKKTGLNKKYGALSVLNQIIPALTKELSSLFPKHFFVTNGKSTYDYRAAHGVSKDHWLDAYCIACSVLPNDTCDKTINSRVPYELKQFRRHDRRALNNENMSRVYTFNGKMVATNRHKATEQTTDSLEEFRQRQPNDVCNLKVKEHHPTYRNMNRNYPGSVFLVGNQVHVMQGIAGSKDGEATTYKDTNANSIAAGKCKFVAKNSGILFV

SEQ ID NO: 23697 - protein, 415 aa, Parasutterella sp.; identical to SEQ ID NO: 23462

SEQ ID NO: 23698 - protein, 396 aa, unidentified
  REGION 1..396: note = Human gut metagenome
AKANGTISKKCVKQTTAQNGSVSKRAKEIGVIKRHLPGCEKDVLCIGIKNKEAKFSNRTKSEGWLTPTANQLLQTHINLVKKIRKFLPISDVVLEINKFAFMQLDNPNVQKWQYQQGPLYQKANLEEAVSEMQEHHCLFCKKPIAHYHHVVPQSENGSNTIGNIVGLCTKHHDLVHKDTAWQKKLAKKKTGLNKKYGALSVLNQIIPALTKELGSLFPKHFFATNGKSTYDYRAAHGVRKDHWLDAYCIACSVLPNDVCDKNINSRVLYELKQFRRHDRRALNNENMSRVYTLNENVVATNRHKATKQTTDSLEEFRQNHPDDACKLKVKEHHPTYRNMSRNYPGSVFLVGNQVHVMQGVAGSKDGKATTYKDTNANSIAAGKCKFVAKNSGILFV

SEQ ID NO: 23699 - protein, 421 aa, Moorena sp.
MKVYVINKDGRQLMPCRPAKARKLLRDEKAKSVKRLPFTIQLKWDCEENIQKITVGIDKGSHTTGYCAIANGEILMSGYINHRTDVKKKMQGRAANRRQRRSRLWYRKARFDNREAAKRAFRLPVSIKTNVEEVIRTINKLPLPIKVVIIEDVQIDIAKLNDAKLNGKYYQQSNRLHENLRLVSRFKFFEEKLKPRKLIRDHFTCQYCKAKQTPLEAHHIHYRKNGGSETIKNLITVCSNCHDGIHDGTITLKKKGVDGFKDQIAQRTMQGKNYLYSKLNKKYKVSKVYGYETSAFRKEQGLPKAHDADALAVATLRTGEVIPFHKDHFYHINFRATQTRRQYHVQPKKGKGRVKYQVNQRVGKFSKGDIVLVKEKFLKQINSIYSNGRLAFRRIPGEPFSSTPSNCRLLERQSSLVFSSI

SEQ ID NO: 23700 - protein, 363 aa, unidentified
  REGION 1..363: note = Human gut metagenome
GLSASTEKAELYASEVELRQDITDLLSARRALRQSRRNRKTRYRAPRFDNRISTKRKGWLAPSVENRINAHLSRIEAVLRLLPVTKITVETASFDLQLLKNPDISGKEYQEGEQLGFWNIREYVLCRDGHVCQHCYGRSKDPVLNVHHLESRRTGGDSPDNLLTLCETCHKALHRGEITLKAKRGQSFRAEAFVGIMRWEVHNRLRALHPGIEVSNTYGYRTKHARIANGIAKSHCADAFCIAGNLGAERLCEFFFQKQTRRNNRQIHKLSILKGALRKRNQAPFEVKGFRLFDKVACQGEEGFIFGRRSSGFFDVRKLDGTRISAGISYKKLHLLEKRQTYLMEIRKEEAFPPLPEGRGLRA

SEQ ID NO: 23701 - protein, 412 aa, unidentified; identical to SEQ ID NO: 5053
  REGION 1..412: note = Human metagenome

SEQ ID NO: 23702 - protein, 376 aa, unidentified
  REGION 1..376: note = Human gut metagenome
PVSLGVDAGYKHVGLSASTENAELYASEVELRQDVSDLLSARRALRQSRRNRNTRYRAPRFDNRIRTKRKGWLAPSVENRINAHLSRIETVIRLLPVTKITVETTSFDMQLLKNSDIAGKKYQEGEQLGFWNVREYVLFRDGHVCQHCHGRSKDPVLNVHHLESRRTGGDSPGNLITLCETCHKALHRGEITLKAKRGQSFRAETFMGIMRWEVLDRLKASHPKLEVQNTYGYRTKHARISNGIAKSHCADAFCIAGNLGAERLGEFFFQKQTRRNNRQIHKLSILKGGIRKRNQAPYEIKGFRLFDKVACQGEEGFIFGRRSSGYFDVRKLNGTHISAGISCKKLRLLEKRQTYLTEIRKEKALPPLPEGRGLRA

SEQ ID NO: 23703 - protein, 428 aa, Moorena sp.
MQNYVFVIDANKQPLNPIHPRKARRLLDKGKAAVFRMYPFTIILKTPIRQSRRCANASPTIPPCQIKIDPGSKVTGFALVQDNQVIWAMELEHRGGLIKKKLESRRAVRRGRRNRNTRYRKPRFLNRKRPEGWLAPSLEHRVLTIQTWVKRLIKFCPVNEIWVERVKFDTQKMPNPEISGVEYQQGELAGYEVREYLLEKWGRECTYCGKQNVPLQIEHIHPKSKGGSGRVSNLCLACEKCNQRKGNKPVEDFLKKKPKLLQKIKTKAKQPLKDAAAVNATRNKLVKVLREVKSVTTGTGAQTKYNRTKLGLPKQHWIDAACVGDIETLVLKTSQPLLVTCFGQGGRQKAALNKYGYPIRHNPLKSIKGWCSGDIAKNLLTGEFGRVNPRSKSNSFNYTVSGKKAISLHVKNLARVHRKDGYTYGFCQ

SEQ ID NO: 23704 - protein, 431 aa, unidentified
  REGION 1..431: note = Human gut metagenome
MPDKVYVISRLGHPLMPCSPAKARHLLDDGKAKVVKRTPFTIKLLYGSTEYTQPVILGVDAGSKTIGLSASTTKEELFAAEVMPRNDVVENLSTRREFRRARRNRTTRYRKPRFNNRVHSKNNGWLAPSVEVKIQEHITSIKRVCAILPISKIVVETAEFDLQLLKAVQDGKPVPEGEDYQKGEMYGSYDVRQYVLWRDNYTCTCCGVKGTDKKPVKLHVHHFESRKHGGNAPDNYGTLCEDCHKKLHLGIITPDILKKRKRRSTRDAAFMGIMRKTLMQRLITGLSIPVAETKGYITKAAREEILKLPKTHTNDALAIAQGRHGFGIREQAYVKPTNRIYTVRPVRHHNRQLHKATMLKGGIRKLNQASKYIFGFRLYDKVLYQGGECFVWGRRRSGSFLLRTIDGTKVKDGVGYRNLTLLERSTNYLIA

SEQ ID NO: 23705 - protein, 512 aa, unidentified; identical to SEQ ID NO: 5549
  REGION 1..512: note = Human gut metagenome

SEQ ID NO: 23706 - protein, 414 aa, unidentified
  REGION 1..414: note = Human gut metagenome
MVYVINKQGQALMPTERFGKVRRLLKKSLAHVVCRIPFTIQLDYDTTDYTQPVSLGVDAGSKHIGISATTSDKELYAADVELRNDIVDKLSTRRELRRTRRGRLRYRKARFNNRISSKRKGWLAPSVENKIQTHLTVVEKIHKFLPITNIVVETASFDIQKINNPSISGSGYQQGEQLDFFNVREYVLFRDNHTCQHCKGKSKDKVLNVHHIESRKTGGDSPNNLITLCETCHKAYHRGEFELNVKRGKSFRDAAFMGIMRWGFYDRLKNIYPNVSMTFGYITKNTRITNNLPKDHYVDARCISGNPMAKPLGYYFYQKKVRCQNRQIHKANFLKGGRKKLNQAPFLVKGFRLFDLVEYKKDLYYIFGRRSNGSFDIRKLDGTKVNKGSINCKHLRLISTRKSILTEKRTKVNL

SEQ ID NO: 23707 - protein, 514 aa, unidentified; identical to SEQ ID NO: 15959
  REGION 1..514: note = Human gut metagenome

SEQ ID NO: 23708 - protein, 292 aa, unidentified
  REGION 1..292: note = Human gut metagenome
LSRIEAVLRLLPVTKITVETASFDLQLLKNPDISGKEYQEGEQLGFWNIREYVLCRDGHVCQHCYGRSKDPVLNVHHLESRRTGGDSPGNLITLCETCHKALHRGEITLKAKRGQSFRAEAFMGIMRWEVLGRLKASHPELEVNNTYGYRTKHARIANDIAKSHCADAFCIAGNLGAERLGEFFFQKQTRRNNRQIHKLSILKGGIRKRNQAPFEVNGFRLFDKVACQGEEGFIFGRRSSGFFDVRKLDGTRISAGISYKKLHLLEKRRTYLTEIRKEEVLPPLPEGRGLRA

SEQ ID NO: 23709 - protein, 438 aa, Moorena sp.
MLVYVKNKNGNPLMPCKPAKARKLLRDKKAKVVNLNPFIIKLQWDCEENVQEVAVGIDKGSSVTGFSCVGNGKILMSGEIHHRTDIKGKMDARRANRRNRRNRKWYRPARFNNRASSRRSGRLPPSIKANVEEVIRVVGQLPLPISHIIVEDVAVDLRRLSNLDVKGSEYQESNRLDENLRLACLTRDDFACQKCNKKETLLEAHHIVWKTKGGKDSIYNLITLCFSCHDKVHKKGESGKVRIKGGKVVKGMDGFSDKIAQRTMQGKTLMYQELEKIALLSTVYGYQTSAYRKSLSLPKTHDIDALCVATLLNNPLPPLLRGTGEVILSSAFPGTSVTHHREIFYTIKFRQRQTRRQFHDLPQKGVGRVRYQVNASLEGFRKGDIVRVEGKWVKQINSIYSSGYLAFARVGGEPSVAKPKDCKLLQRGQTIVWEKVPP

SEQ ID NO: 23710 - protein, 372 aa, Moorena sp.
MSNFVFVLDTNRKPLYPCTPGMARSLLKAGKAAVFRMFPFTIILKKAVEAIAEPLQLKIDPGSKVTGFAILLGAQLIWAAELTHRGQSIKSSLESRRSLRRGRRNRHTRYRQPRFLNRTRPQGWLAPSLMHRVLTIQTWVKRLMGFAPINSIAQELVRFDMQQIQNPEISGTQYQQGTLYQYEIREYLLAKWNRTCAYCNAQNIPLEIEHIVPKAQGGTNRVSNLTLACVPCNQKKGTQDIKDFLSKKPDLTQRILSQAKQPLKDAAAVNSTRWVLFNALKGTGLPVMTGSGGQTKFNRTSQGLPKTHFFDAACVGEIPTLEILTAQPLLIKATGRVGVKNVGLINMVFLLDTCLTPLLSRGFRRGILPKLL

SEQ ID NO: 23711 - protein, 405 aa, unidentified; identical to SEQ ID NO: 6076
  REGION 1..405: note = Human gut metagenome

SEQ ID NO: 23712 - protein, 286 aa, unidentified; identical to SEQ ID NO: 16765
  REGION 1..286: note = Human gut metagenome

SEQ ID NO: 23713 - protein, 305 aa, unidentified
  REGION 1..305: note = Human gut metagenome
WLAPSVENRINAHLSRIEAVLRLLPITKITVETASFDMQRLKNPDISGKEYQEGEQLGFWNVREYVLFRDGHVCRHCHGRSKDPVLNVHHLESRRTGSDSPDNLITLCETCHKALHRGEITLKAKRGQSFRAQAFMGIMRREVLNRLKASYPELKVHETYGYLTKHARIANGIVKSHGADAFCIAGNLGAERLGEFFFQKQTRRNNRQIHKLSILKGGIRKRNQAPFEAKGFRLFDKVACQGEEGFIFGRQSSGSFDVRKLDGTRISAGISCKKLRLLEKRRTYLTQIRKEEALPPLPEGRGRRA

SEQ ID NO: 23714 - protein, 431 aa, unidentified; identical to SEQ ID NO: 2746
  REGION 1..431: note = Human gut metagenome

SEQ ID NO: 23715 - protein, 419 aa, Geobacillus sp.; identical to SEQ ID NO: 2623

SEQ ID NO: 23716 - protein, 502 aa, unidentified; identical to SEQ ID NO: 2616
  REGION 1..502: note = Human gut metagenome

SEQ ID NO: 23717 - protein, 456 aa, unidentified
  REGION 1..456: note = Human gut metagenome
MSVFVVGLNGCRLMPTSERKARLLLKEGKASVYRKVPFTIKLNYKTGSTVQPGYLGIDTGSQHIGITAVREDGTVLHKEEIGLRDSMTKRKLLESKASLRRGRRYRKTRYRHPKWRPETKRVYCEVPDKKGRHWKKQKSTFTSGRSEGWLPPSLQSKTDHHIRWIRKLQGLLPEGYRLSIELGRFDPARMKDPGIHGDLYQKGPQYDYENVRAYVLDRDRYTCQVCKKKGGKLHVHHILYRSQGASDNPQYMATVCSSCHTTENHQPGGVLYQWMQEQKKFTRGLRDATFMNILRKRFRKTFPDAVFTYGNITKVDREKLKLPKSHGNDATAIALVRTGVTSVKNEEPVLYIQQVRRKKRSLHEETPRKGRKEPNRKAARNSKNIKAVTFTKRRGGKKTSVTACLFDRVELNGKKGWISGFTGTSCYMKDAEDNYIRTSGKYNQVSLSKLRILHHC

SEQ ID NO: 23718 - protein, 420 aa, unidentified; identical to SEQ ID NO: 8221
  REGION 1..420: note = gut metagenome

SEQ ID NO: 23719 - protein, 478 aa, unidentified
  REGION 1..478: note = Human gut metagenome
VRTKPFTIQLLYETDDVVQLLYLGIDPGRTNIGVAVVKTDGTAVFTAHLETRNKEIPKLMKKRKESRRARRTNGRRCRRQRRAKANGTLSKKCVKQTTAQNGSVSKRAKKIGVIKRHLPGCEKEALCIGIKNKEAKFNNRTRPEGWLTPTANQLLQTHINLVKKIQKFLPISDVVLEVNKFAFMRLDNPNIQKWQYQQGPLYQKASLEEAVSEMQEHHCLFCKNTIDHYHHVVPQHKNGRNTIDNIVGLCTKHHDLVHKETAWQEKLAKKKTGLNKKYGALSVLNQIIPALTKELSSIFPKHFFVTTGKSTYDYRAAHGVSKDNWLDAYCIACSVLPNDVCNSSINNRVPYELKQFRRHDRRALHKENMSRVYTLNGKKVATNRHKATEQTADSLEEFRQNHPDDVCKLKVKENHSEYRNPKRNFPGCVFLVGKRTHVMQGTSGSHNGKADGYYDTNGNSYSSGKCKFVAKNEGIVFA

SEQ ID NO: 23720 - protein, 431 aa, unidentified; identical to SEQ ID NO: 4463
  REGION 1..431: note = Human gut metagenome

SEQ ID NO: 23721 - protein, 396 aa, unidentified
  REGION 1..396: note = Human gut metagenome
VVRRTPFTIQLTIATGESKQPVSLGVDAGYKHVGLSASTEKAELYASEVELRKDITDLLSARRALRQSRRNRKTRYRAPRFDNRIRTKRKGWLAPSVENRINAHLSRIEAVLRLLPITKITVETASFDMQRLKNPDISGKEYQEGEQLGFWNVREYVLFRDGHVCRHCHGRSKDPVLNVHHLESRRTGSDSPDNLITLCVTCHKALHRGEITLKAKRGQSFRAQAFMGIMRREVLNRLKASYPELKVHETYGYLTKHARIANGIVKSHGADAFCIAGNLGAERLGEFFFQKQTRRNNRQIHKLSILKGGIRKRNQAPFEAKGFRLFDKVACQREEGFIFGRRSSGSFDVRKLDGTRISVGISCKKLRLLEKRRTYLTEIRKEEALPPLPEGRGLRA

SEQ ID NO: 23722 - protein, 349 aa, unidentified
  REGION 1..349: note = Human gut metagenome
IKNKETKFTNRTRPEGWLTPTANQLLQTHINLVRKMQKFLPISDVVLEVNKFAFMRLDNPNIQKWQYQQGPLYKKESLESAVSEIQEHHCLFCKKPIDHYHHVVPQHKNGSNTIGNIVGLCAKHHDLVHKDSAWEKKLAKKSTGLYKKYGALGVLNQIIPTLTNELSSLFPKHSFVTNGKSTYDYRAAHGVSKDHWLDAYCIACSVLPSNVCDSNINNHMPYELKQFRRHDRRVLNNENMNRVYTLNNKAVAINRHKAKDQKTVSLEEFRKEHPDDVCKLKVKEHHPTYRNMNRNFPGSVFLVGKQIHVMQGIASSKDGKATKYNDTSATAIAAGKCKFVAKNTGILFV

SEQ ID NO: 23723 - protein, 327 aa, unidentified
  REGION 1..327: note = Human gut metagenome
MPITHATVEVGSFDTMLVKAIQEGKAIPEGADYQKGPRYNLATLREAVFYRDNYVCKVCGRKATEGAILHMHHMFYWKGRHGNSLNELLTVCEKCHTPANHQKSGKLYGFGEDVKFADLSGAAFMNTVRWQIVNELYAAFGKPFVTITYGAMTKEKRIALQLEKSHNNDAYAMGEFHPNHRCAFEHYEKVRRNNRILEKFYDSQYIDIRTGEIATGKELFNGRINRNHKKDSENLHKYRGKRTYAGHRALLRKKVNLNPGDLVSLNGEPLVVLGTHTRKNGAVNVEFETPSKSGRKSASLKKLKIVKAADSIHPAWEKVSQIIQRKK

SEQ ID NO: 23724 - protein, 463 aa, unidentified
  REGION 1..463: note = Human gut metagenome
LAGKIQHKGGQLMSVAVISKTGERLMPTSEYRTRKLLKSGKAIKYSYHPFTIQLTERKTGNIQPIELCMDTGYIHIGISVKSEKHEYLTEQIDTLTDERSRHNARRMYRSQRRNRKRYRQPRFNNRKKDKGWIAPSLEHKKNIHVQAISRINNVMPLTDITMEMGNFDTQVLKAKEEGRPLPQGVDYQHGERYSIATLREAVFARDGYKCQCCGRTIKDGAILHVHHIKYRSQGGTNSISNLATVCDKCHTPKNHKPGGKLYGWKPKLPSFKGATFMTTIRWQLYNEAKALFPDIDIHITYGAATKERRRELNIDKSHINDAFVMGQFHPRHRIKAVLYKKKRRNNRCLEKFYDAKYIDSRDGKKRSGQELFNGRINRNHKKDSENLHQYRLQKVTAGKRTVRKQHYSVQPHDIIIYESRKRETTGCHCNGARVMLLPDKKSVSIKKIKIYRYAGGYFKSTFN

SEQ ID NO: 23725 - protein, 361 aa, unidentified; identical to SEQ ID NO: 7533
  REGION 1..361: note = Human gut metagenome

SEQ ID NO: 23726 - protein, 372 aa, Moorena sp.; identical to SEQ ID NO: 23710

SEQ ID NO: 23727 - protein, 431 aa, unidentified
  REGION 1..431: note = Human gut metagenome
MPDKVYVISRLGHPLMPCSPAKARHLLDDKKAKVVKRMPITIRLLYGSTKYIQPIILGVDAGSKTIGLSASTAKGEVFAAEVMPRNDVVENLSTRREFRRARRNRTTRYRKPRSDNRVRSNHERWLAPSVKVKIQEHITSIKRVCTILPISKVVIETAEFDLQLLKAIQEGKPIPEGEDYQKGEMYGSYNVCQYVLWRDNYTCICCGVRGTPKNPVRLHVHHFESRKYGGNAPDNHGTLCDDCHKKFHLGIIADVKLKTRRRQSTRDAAFMGIMRKTLMWRLRTELFIPVAETKGYITKATREKLLVLPKSHTRDALAIAQGRHGFSIKEYAYVEPANHIYTVRPVRHHNRQLHKASILKGGIRKRNQASKYVFGFRLYDKVLYQGKACFVWGRRTSGTFLLRTIDGIKVKDGVSYRNLTLLERSSNYLIA

SEQ ID NO: 23728 - protein, 405 aa, unidentified
  REGION 1..405: note = Human gut metagenome
LDDKKAKVVKRMPFTIRLLYGSTKYIQPIILGVDAGSKTIGLSASTAKEEVFAAEVMPRNDVVENLSTRREFRRARRNRTTRYRKPRSDNRVRSNHERWLAPSVKVKIQEHITSIKRVCTILPISKVVIETAEFDLQLLKAIQEGKPIPEGEDYQKGEMYGSYNVCQYVLWRDNYTCICCGVRGTPKNPVRLHVHHFESRKYGGNAPDNHGTLCDDCHKKFHLGIITDVKLKTRRRQSTRDAAFMGIMRKTLMWRLRTELFIPVAETMGYITKATREKLLVLPKSHTRDALAIAQGRHGFGIKEYAYVEPANHIYTVRPVRHHNRQLHKASILKGGIRKRNQASKYVFGFRLYDKVLYQGKACFVWGRRTSGTFLLRTIDGIKVKDGVSYRNLTLLERSSNYLIA

SEQ ID NO: 23729 - protein, 418 aa, unidentified
  REGION 1..418: note = Human gut metagenome
MVYVLSKTGQPLMPTENHAKVRVLLKQQKAKIVHRCPFTIQLLYDSTDYTQQVSLGIDAGSRHIGVSATTETKVLYEADVTLRNDIVDLLSTRREARRTRRSRKTRYRKPRFNNRTRKDDWLAPSVKQKMDTHLTTLRKVTEILPVNSITVETASFNIQKIKNPNIASTGYQQGEQLDFWNVREYVLFRDGHKCQCCKWKSKDPVLNVHHIESRKTGGNAPNNLITLCETCHKGYHNGTVSLPKNIRRGMKFNDAAFIGAMRWAFFNRVKETYEPLGIMVNMTYGYITKNTMIEHNLPKDHFIDARCISGHPDATSDGTVFYQKKVRCHNRQIHKQKILKGGIRKRNQAPYLVKGFRMFEKVKYHGKQYFIFGRRSSGFFDLRTLDGTKVNKGSVSYKKIRSLDMPRSYLTEERKAIV

SEQ ID NO: 23730 - protein, 247 aa, unidentified; identical to SEQ ID NO: 21678
  REGION 1..247: note = Human gut metagenome

SEQ ID NO: 23731 - protein, 451 aa, unidentified; identical to SEQ ID NO: 2436
  REGION 1..451: note = Human gut metagenome

SEQ ID NO: 23732 - protein, 315 aa, unidentified
  REGION 1..315: note = Human gut metagenome
MRLDNPDIQKWQYQQGPLYKKESLESAVSEMQEHHCLFCKKPIDHYHHVVPKSENGSNTIANIVGLCAEHHNLVHKDVAWQEKLAEEKTGLNKKYGALSVLNQIIPALTNKLSVLFPKHFFVTAGKSTHDYRAAHGVSKDHWLDAYCIACSVLPSNVCDSNINNHVPYELKQFRRHDRRVLHKANMSRVYTLNGKAVATNRHKAIKQTTDSLEEFRQNYPDDVYKLKVKEHHPAYRNLNRNYPGSVFLVGKQAHVMQGIASSKDGKTTKYNDTNATTITAGKCKFVAKNSGILFVQCKFRKALSDGTTKKLQYPV

SEQ ID NO: 23733 - protein, 413 aa, unidentified; identical to SEQ ID NO: 2605
  REGION 1..413: note = Human gut metagenome

SEQ ID NO: 23734 - protein, 413 aa, unidentified; identical to SEQ ID NO: 2605
  REGION 1..413: note = Human gut metagenome

SEQ ID NO: 23735 - protein, 413 aa, unidentified; identical to SEQ ID NO: 2636
  REGION 1..413: note = Human gut metagenome

SEQ ID NO: 23736 - protein, 413 aa, unidentified; identical to SEQ ID NO: 2636
  REGION 1..413: note = Human gut metagenome

SEQ ID NO: 23737 - protein, 408 aa, unidentified
  REGION 1..408: note = Human gut metagenome
MVYVLNINGEPLMPTERYGKVRRILKSGRAKVVKRTPFTIQLLYEATNCTQPVTLGVDAGYKHIGLSATTESKEIYSSEVVERCDIVNLLKTKRECRRTRRNNKTRYRKPRFNNRVRSKHKGWLAPSVEHKIQTHIKVIQNVCSIVPVTKIRIETAEFDVHKIKNPEVQGIGYQQGEKYGFVNTRNYVLWRDNHTCRCCGKSKGVLFVVNAKGIITVAPEDLYTVCKECLDNHIKGIKPLKFKKKRHFAPPTQMGIMRNTLLDRLKNSVNVPVENTYGYVTKGIREEYGINKSHTNDAYCIAGNLQAKRLNEYYLQKKVRCHNRQIHKMNTLKGGKKKLNQAPYIVKGYKLNDKVLYDNQICFISGRRTSGYFAIKDIFGKTLSSSVSYKKLRLLETAKHYTLERIAR

SEQ ID NO: 23738 - protein, 413 aa, unidentified; identical to SEQ ID NO: 2815
  REGION 1..413: note = Human gut metagenome

SEQ ID NO: 23739 - protein, 413 aa, unidentified; identical to SEQ ID NO: 2858
  REGION 1..413: note = Human gut metagenome

SEQ ID NO: 23740 - protein, 411 aa, unidentified; identical to SEQ ID NO: 2867
  REGION 1..411: note = Human gut metagenome

SEQ ID NO: 23741 - protein, 413 aa, unidentified; identical to SEQ ID NO: 2636
  REGION 1..413: note = Human gut metagenome

SEQ ID NO: 23742 - protein, 413 aa, unidentified; identical to SEQ ID NO: 2636
  REGION 1..413: note = Human gut metagenome

SEQ ID NO: 23743 - protein, 413 aa, unidentified; identical to SEQ ID NO: 3014
  REGION 1..413: note = Human gut metagenome

SEQ ID NO: 23744 - protein, 413 aa, unidentified; identical to SEQ ID NO: 3023
  REGION 1..413: note = Human gut metagenome

SEQ ID NO: 23745 - protein, 413 aa, unidentified; identical to SEQ ID NO: 2636
  REGION 1..413: note = Human gut metagenome

SEQ ID NO: 23746 - protein, 416 aa, unidentified; identical to SEQ ID NO: 3087
  REGION 1..416: note = Human gut metagenome

SEQ ID NO: 23747 - protein, 413 aa, unidentified; identical to SEQ ID NO: 3119
  REGION 1..413: note = Human gut metagenome

SEQ ID NO: 23748 - protein, 413 aa, unidentified; identical to SEQ ID NO: 2636
  REGION 1..413: note = Human gut metagenome

SEQ ID NO: 23749 - protein, 412 aa, unidentified; identical to SEQ ID NO: 3155
  REGION 1..412: note = Human gut metagenome

SEQ ID NO: 23750 - protein, 413 aa, unidentified; identical to SEQ ID NO: 2636
  REGION 1..413: note = Human gut metagenome

SEQ ID NO: 23751 - protein, 413 aa, unidentified; identical to SEQ ID NO: 3220
  REGION 1..413: note = Human gut metagenome

SEQ ID NO: 23752 - protein, 413 aa, unidentified; identical to SEQ ID NO: 2636
  REGION 1..413: note = Human gut metagenome

SEQ ID NO: 23753 - protein, 413 aa, unidentified; identical to SEQ ID NO: 3290
  REGION 1..413: note = Human gut metagenome

SEQ ID NO: 23754 - protein, 413 aa, unidentified; identical to SEQ ID NO: 3295
  REGION 1..413: note = Human gut metagenome

SEQ ID NO: 23755 - protein, 413 aa, unidentified; identical to SEQ ID NO: 2636
  REGION 1..413: note = Human gut metagenome

SEQ ID NO: 23756 - protein, 416 aa, unidentified; identical to SEQ ID NO: 3447
  REGION 1..416: note = Human gut metagenome

SEQ ID NO: 23757 - protein, 413 aa, unidentified; identical to SEQ ID NO: 3476
  REGION 1..413: note = Human gut metagenome

SEQ ID NO: 23758 - protein, 415 aa, unidentified; identical to SEQ ID NO: 3548
  REGION 1..415: note = Human gut metagenome

SEQ ID NO: 23759 - protein, 413 aa, unidentified; identical to SEQ ID NO: 3290
  REGION 1..413: note = Human gut metagenome

SEQ ID NO: 23760 - protein, 413 aa, Moorena sp.
MTTYAFVLDANNKQLAPTKEQKAWFLIRKKRATLLSRYPMVIQLKKKIPDQEICKDEIRCGIDDGGLHVGVALVQKCQTRNKVIFKGTIEQRNDVKHLMDVRRGFRRYHRDHKRYRPVRFNNRKSSKRKERIAPSILQKRQATIRVINQLNKWVNITNYWLEDVAIDIRALTDGYKPYRWQYQKSNRLDENIRKAVILRDGCKCMECGKSNCRLEVHHIKPRRLKGSNTLGNLITLCTGCHQKTEGVEELYMNRYFALLNSSDNKNLNYAQHVMIGKKWLRKQLSKLGMLHLTNGGDTANKRIDWGIAKSHSNDAICITDLRPDTCEIKEWVIKPMRRQSKAKTDNVLGIKHSDLVEYTFMNGETHRGYVTALYPEQNALNFQSPTKHCKKVNARKCKVLWKYSKIYWLDNVS

SEQ ID NO: 23761 - protein, 413 aa, unidentified; identical to SEQ ID NO: 3587
  REGION 1..413: note = Human gut metagenome

SEQ ID NO: 23762 - protein, 413 aa, unidentified; identical to SEQ ID NO: 2636
  REGION 1..413: note = Human gut metagenome

SEQ ID NO: 23763 - protein, 413 aa, Blautia sp.; identical to SEQ ID NO: 3616

SEQ ID NO: 23764 - protein, 413 aa, unidentified; identical to SEQ ID NO: 3621
  REGION 1..413: note = Human gut metagenome

SEQ ID NO: 23765 - protein, 415 aa, unidentified; identical to SEQ ID NO: 3635
  REGION 1..415: note = Human gut metagenome

SEQ ID NO: 23766 - protein, 413 aa, unidentified; identical to SEQ ID NO: 2636
  REGION 1..413: note = Human gut metagenome

SEQ ID NO: 23767 - protein, 413 aa, unidentified; identical to SEQ ID NO: 3621
  REGION 1..413: note = Human gut metagenome

SEQ ID NO: 23768 - protein, 413 aa, unidentified; identical to SEQ ID NO: 3694
  REGION 1..413: note = Human gut metagenome

SEQ ID NO: 23769 - protein, 413 aa, unidentified; identical to SEQ ID NO: 3695
  REGION 1..413: note = Human gut metagenome

SEQ ID NO: 23770 - protein, 412 aa, Deinococcus sp.; identical to SEQ ID NO: 3738

SEQ ID NO: 23771 - protein, 413 aa, unidentified; identical to SEQ ID NO: 3751
  REGION 1..413: note = Human gut metagenome

SEQ ID NO: 23772 - protein, 413 aa, Moorena sp.
MTCYAFVLDANNKQLAPTKEQKAWFLIRKKRATLVSKYPMVIQLKKKIPDQEICKDEIRCGIDDGGLHVGVALVQKCQTRNKVIFKGTIEQRNDVKHLMDVRRGFRRYHRDHKRYRPARFDNRKSSKRKVRIAPSILQKRQATIRVINQLNKWINITNYWLEDVAIDIRALTDGYKPYRWQYQKSNRLDENIRKAVILRDGCKCMECGKSNCRLEVHHIKPRRLKGSNTLGNLITLCTGCHQKTEGVEELYMNRYFALLNSSDNKNLNYAQHVMIGKKWLREQLSKLGMLHLTNGGDTANKRIDWGIAKSHSNDAICITDLRPDTCEIKEWVIKPMRRQSKAKTDNVLGIKQRDLVEYTFMNGETHRGYVTALYPEQNALNFQSPTKNCKKVNARKCKVLWKYSKIYWLDNVS

SEQ ID NO: 23773 - protein, 408 aa, unidentified; identical to SEQ ID NO: 3792
  REGION 1..408: note = Human gut metagenome

SEQ ID NO: 23774 - protein, 401 aa, Sharpea sp.; identical to SEQ ID NO: 3798

SEQ ID NO: 23775 - protein, 413 aa, unidentified; identical to SEQ ID NO: 3290
  REGION 1..413: note = Human gut metagenome

SEQ ID NO: 23776 - protein, 413 aa, unidentified; identical to SEQ ID NO: 2636
  REGION 1..413: note = Human gut metagenome

SEQ ID NO: 23777 - protein, 413 aa, unidentified; identical to SEQ ID NO: 2636
  REGION 1..413: note = Human gut metagenome

SEQ ID NO: 23778 - protein, 413 aa, unidentified; identical to SEQ ID NO: 2605
  REGION 1..413: note = Human gut metagenome

SEQ ID NO: 23779 - protein, 413 aa, unidentified; identical to SEQ ID NO: 3587
  REGION 1..413: note = Human gut metagenome

SEQ ID NO: 23780 - protein, 413 aa, unidentified; identical to SEQ ID NO: 4011
  REGION 1..413: note = Human gut metagenome

SEQ ID NO: 23781 - protein, 413 aa, unidentified; identical to SEQ ID NO: 2636
  REGION 1..413: note = Human gut metagenome

SEQ ID NO: 23782 - protein, 413 aa, unidentified; identical to SEQ ID NO: 2605
  REGION 1..413: note = Human gut metagenome

SEQ ID NO: 23783 - protein, 413 aa, unidentified; identical to SEQ ID NO: 4044
  REGION 1..413: note = Human gut metagenome

SEQ ID NO: 23784 - protein, 413 aa, unidentified; identical to SEQ ID NO: 4088
  REGION 1..413: note = Human gut metagenome

SEQ ID NO: 23785 - protein, 347 aa, unidentified; identical to SEQ ID NO: 4100
  REGION 1..347: note = Human gut metagenome

SEQ ID NO: 23786 - protein, 413 aa, unidentified; identical to SEQ ID NO: 2636
  REGION 1..413: note = Human gut metagenome

SEQ ID NO: 23787 - protein, 413 aa, unidentified; identical to SEQ ID NO: 2636
  REGION 1..413: note = Human gut metagenome

SEQ ID NO: 23788 - protein, 413 aa, unidentified; identical to SEQ ID NO: 2636
  REGION 1..413: note = Human gut metagenome

SEQ ID NO: 23789 - protein, 413 aa, unidentified; identical to SEQ ID NO: 2636
  REGION 1..413: note = Human gut metagenome

SEQ ID NO: 23790 - protein, 359 aa, unidentified; identical to SEQ ID NO: 4400
  REGION 1..359: note = Human gut metagenome

SEQ ID NO: 23791 - protein, 413 aa, unidentified; identical to SEQ ID NO: 4409
  REGION 1..413: note = Human gut metagenome

SEQ ID NO: 23792 - protein, 413 aa, Moorena sp.
MTSYAFVLDADNKQLAPTKEQKAWFLIRKKRATLLSRYPMVIQLKKKISDQEICKDEIRCGIDDGGLHVGVALVQKCQTRNKVIFKGTIEQRNDVKHLMDVRRGFRRYHRDHKRYRPVRFDNRKSSKRKGRIAPSILQKRQSTIRVINQLNKWVNITNYWLEDVAIDIRALTDGYKPYRWQYQKSNRLDENIRKAVILRDGCQCMECGKSNCRLEVHHIKPRRLKGSNTLGNLITLCTGCHQKTEGVEELYMNRYFALLNSSDNKNLNYAQHVMIGKKWLRKQLSNLGMLHLTNGGDTANKRIDWGIAKSHSNDAICITDLRPDTCEIKEWVIKPMRRQSKAKTDNVLGIKHRDLVEYTFMNGETHRGYVTALYPEQNVLNFQSPTKHCKKVNARKCKVLWKYSKIYWLDNVS

SEQ ID NO: 23793 - protein, 401 aa, unidentified; identical to SEQ ID NO: 4496
  REGION 1..401: note = Human gut metagenome

SEQ ID NO: 23794 - protein, 413 aa, unidentified; identical to SEQ ID NO: 2636
  REGION 1..413: note = Human gut metagenome

SEQ ID NO: 23795 - protein, 413 aa, unidentified; identical to SEQ ID NO: 4512
  REGION 1..413: note = Human gut metagenome

SEQ ID NO: 23796 - protein, 413 aa, unidentified; identical to SEQ ID NO: 2636
  REGION 1..413: note = Human gut metagenome

SEQ ID NO: 23797 - protein, 413 aa, unidentified; identical to SEQ ID NO: 3290
  REGION 1..413: note = Human gut metagenome

SEQ ID NO: 23798 - protein, 413 aa, unidentified; identical to SEQ ID NO: 2636
  REGION 1..413: note = Human gut metagenome

SEQ ID NO: 23799 - protein, 413 aa, unidentified; identical to SEQ ID NO: 2636
  REGION 1..413: note = Human gut metagenome

SEQ ID NO: 23800 - protein, 413 aa, unidentified; identical to SEQ ID NO: 3220
  REGION 1..413: note = Human gut metagenome

SEQ ID NO: 23801 - protein, 413 aa, unidentified; identical to SEQ ID NO: 2636
  REGION 1..413: note = Human gut metagenome

SEQ ID NO: 23802 - protein, 413 aa, unidentified; identical to SEQ ID NO: 4651
  REGION 1..413: note = Human gut metagenome

SEQ ID NO: 23803 - protein, 413 aa, unidentified; identical to SEQ ID NO: 4704
  REGION 1..413: note = Human gut metagenome

SEQ ID NO: 23804 - protein, 413 aa, unidentified; identical to SEQ ID NO: 4752
  REGION 1..413: note = Human gut metagenome

SEQ ID NO: 23805 - protein, 413 aa, unidentified; identical to SEQ ID NO: 4790
  REGION 1..413: note = Human gut metagenome

SEQ ID NO: 23806 - protein, 413 aa, unidentified; identical to SEQ ID NO: 3295
  REGION 1..413: note = Human gut metagenome

SEQ ID NO: 23807 - protein, 416 aa, unidentified; identical to SEQ ID NO: 4821
  REGION 1..416: note = Human gut metagenome

SEQ ID NO: 23808 - protein, 438 aa, unidentified; identical to SEQ ID NO: 4848
  REGION 1..438: note = metagenome

SEQ ID NO: 23809 - protein, 413 aa, unidentified; identical to SEQ ID NO: 4858
  REGION 1..413: note = Human gut metagenome

SEQ ID NO: 23810 - protein, 413 aa, unidentified; identical to SEQ ID NO: 2605
  REGION 1..413: note = Human gut metagenome

SEQ ID NO: 23811 - protein, 413 aa, unidentified; identical to SEQ ID NO: 2605
  REGION 1..413: note = Human gut metagenome

SEQ ID NO: 23812 - protein, 413 aa, Sharpea sp.; identical to SEQ ID NO: 4953

SEQ ID NO: 23813 - protein, 413 aa, unidentified; identical to SEQ ID NO: 2636
  REGION 1..413: note = Human gut metagenome

SEQ ID NO: 23814 - protein, 413 aa, unidentified; identical to SEQ ID NO: 2605
  REGION 1..413: note = Human gut metagenome

SEQ ID NO: 23815 - protein, 413 aa, unidentified; identical to SEQ ID NO: 3621
  REGION 1..413: note = Human gut metagenome

SEQ ID NO: 23816 - protein, 413 aa, unidentified; identical to SEQ ID NO: 3476
  REGION 1..413: note = Human gut metagenome

SEQ ID NO: 23817 - protein, 416 aa, unidentified; identical to SEQ ID NO: 5042
  REGION 1..416: note = Human gut metagenome

SEQ ID NO: 23818 - protein, 412 aa, unidentified; identical to SEQ ID NO: 5053
  REGION 1..412: note = Human metagenome

SEQ ID NO: 23819 - protein, 406 aa, unidentified; identical to SEQ ID NO: 5123
  REGION 1..406: note = Human gut metagenome

SEQ ID NO: 23820 - protein, 413 aa, unidentified; identical to SEQ ID NO: 3476
  REGION 1..413: note = Human gut metagenome

SEQ ID NO: 23821 - protein, 413 aa, unidentified; identical to SEQ ID NO: 2636
  REGION 1..413: note = Human gut metagenome

SEQ ID NO: 23822 - protein, 413 aa, Blautia sp.; identical to SEQ ID NO: 2636

SEQ ID NO: 23823 - protein, 413 aa, Moorena sp.; identical to SEQ ID NO: 2636

SEQ ID NO: 23824 - protein, 413 aa, unidentified; identical to SEQ ID NO: 5199
  REGION 1..413: note = Human gut metagenome

SEQ ID NO: 23825 - protein, 412 aa, unidentified; identical to SEQ ID NO: 3155
  REGION 1..412: note = Human gut metagenome

SEQ ID NO: 23826 - protein, 413 aa, unidentified; identical to SEQ ID NO: 5215
  REGION 1..413: note = Human gut metagenome

SEQ ID NO: 23827 - protein, 413 aa, unidentified; identical to SEQ ID NO: 2636
  REGION 1..413: note = Human gut metagenome

SEQ ID NO: 23828 - protein, 413 aa, unidentified; identical to SEQ ID NO: 5263
  REGION 1..413: note = Human gut metagenome

SEQ ID NO: 23829 - protein, 408 aa, unidentified; identical to SEQ ID NO: 23737
  REGION 1..408: note = Human gut metagenome

SEQ ID NO: 23830 - protein, 418 aa, unidentified; identical to SEQ ID NO: 5338
  REGION 1..418: note = Human gut metagenome

SEQ ID NO: 23831 - protein, 413 aa, unidentified; identical to SEQ ID NO: 2605
  REGION 1..413: note = Human gut metagenome

SEQ ID NO: 23832 - protein, 413 aa, unidentified; identical to SEQ ID NO: 5348
  REGION 1..413: note = Human gut metagenome

SEQ ID NO: 23833 - protein, 413 aa, Blautia sp.; identical to SEQ ID NO: 5365

SEQ ID NO: 23834 - protein, 338 aa, unidentified; identical to SEQ ID NO: 5370
  REGION 1..338: note = Human gut metagenome

SEQ ID NO: 23835 - protein, 412 aa, unidentified; identical to SEQ ID NO: 3155
  REGION 1..412: note = Human gut metagenome

SEQ ID NO: 23836 - protein, 413 aa, unidentified; identical to SEQ ID NO: 2605
  REGION 1..413: note = Human gut metagenome

SEQ ID NO: 23837 - protein, 413 aa, unidentified; identical to SEQ ID NO: 2636
  REGION 1..413: note = Human gut metagenome

SEQ ID NO: 23838 - protein, 413 aa, unidentified; identical to SEQ ID NO: 5477
  REGION 1..413: note = Human gut metagenome

SEQ ID NO: 23839 - protein, 413 aa, unidentified; identical to SEQ ID NO: 2605
  REGION 1..413: note = Human gut metagenome

SEQ ID NO: 23840 - protein, 369 aa, unidentified; identical to SEQ ID NO: 5527
  REGION 1..369: note = Human gut metagenome

SEQ ID NO: 23841 - protein, 409 aa, unidentified; identical to SEQ ID NO: 5570
  REGION 1..409: note = Human gut metagenome

SEQ ID NO: 23842 - protein, 413 aa, unidentified; identical to SEQ ID NO: 2636
  REGION 1..413: note = Human gut metagenome

SEQ ID NO: 23843 - protein, 413 aa, unidentified; identical to SEQ ID NO: 2605
  REGION 1..413: note = Human gut metagenome

SEQ ID NO: 23844 - protein, 413 aa, unidentified; identical to SEQ ID NO: 2605
  REGION 1..413: note = Human gut metagenome

SEQ ID NO: 23845 - protein, 413 aa, unidentified; identical to SEQ ID NO: 5643
  REGION 1..413: note = Human gut metagenome

SEQ ID NO: 23846 - protein, 413 aa, unidentified; identical to SEQ ID NO: 3023
  REGION 1..413: note = Human gut metagenome

SEQ ID NO: 23847 - protein, 413 aa, unidentified; identical to SEQ ID NO: 5673
  REGION 1..413: note = Human gut metagenome

SEQ ID NO: 23848 - protein, 413 aa, unidentified; identical to SEQ ID NO: 2605
  REGION 1..413: note = Human gut metagenome

SEQ ID NO: 23849 - protein, 413 aa, unidentified; identical to SEQ ID NO: 3220
  REGION 1..413: note = Human gut metagenome

SEQ ID NO: 23850 - protein, 413 aa, unidentified; identical to SEQ ID NO: 2605
  REGION 1..413: note = Human gut metagenome

SEQ ID NO: 23851 - protein, 438 aa, unidentified; identical to SEQ ID NO: 4848
  REGION 1..438: note = metagenome

SEQ ID NO: 23852 - protein, 413 aa, unidentified; identical to SEQ ID NO: 2636
  REGION 1..413: note = Human gut metagenome

SEQ ID NO: 23853 - protein, 415 aa, unidentified; identical to SEQ ID NO: 5821
  REGION 1..415: note = Human gut metagenome

SEQ ID NO: 23854 - protein, 413 aa, unidentified; identical to SEQ ID NO: 2636
  REGION 1..413: note = Human gut metagenome

SEQ ID NO: 23855 - protein, 413 aa, unidentified; identical to SEQ ID NO: 3587
  REGION 1..413: note = Human gut metagenome

SEQ ID NO: 23856 - protein, 413 aa, unidentified; identical to SEQ ID NO: 2636
  REGION 1..413: note = Human gut metagenome

SEQ ID NO: 23857 - protein, 412 aa, unidentified; identical to SEQ ID NO: 3155
  REGION 1..412: note = Human gut metagenome

SEQ ID NO: 23858 - protein, 413 aa, unidentified; identical to SEQ ID NO: 5965
  REGION 1..413: note = Human gut metagenome

SEQ ID NO: 23859 - protein, 412 aa, unidentified; identical to SEQ ID NO: 5980
  REGION 1..412: note = Human oral metagenome

SEQ ID NO: 23860 - protein, 415 aa, unidentified; identical to SEQ ID NO: 6044
  REGION 1..415: note = Human gut metagenome

SEQ ID NO: 23861 - protein, 405 aa, unidentified; identical to SEQ ID NO: 6076
  REGION 1..405: note = Human gut metagenome

SEQ ID NO: 23862 - protein, 413 aa, unidentified; identical to SEQ ID NO: 3014
  REGION 1..413: note = Human gut metagenome

SEQ ID NO: 23863 - protein, 413 aa, unidentified; identical to SEQ ID NO: 2636
  REGION 1..413: note = Human gut metagenome

SEQ ID NO: 23864 - protein, 365 aa, unidentified; identical to SEQ ID NO: 6196
  REGION 1..365: note = Human gut metagenome

SEQ ID NO: 23865 - protein, 413 aa, unidentified; identical to SEQ ID NO: 2636
  REGION 1..413: note = Human gut metagenome

SEQ ID NO: 23866 - protein, 413 aa, Moorena sp.; identical to SEQ ID NO: 2636

SEQ ID NO: 23867 - protein, 412 aa, unidentified; identical to SEQ ID NO: 6276
  REGION 1..412: note = Human gut metagenome

SEQ ID NO: 23868 - protein, 413 aa, unidentified; identical to SEQ ID NO: 6295
  REGION 1..413: note = Human gut metagenome

SEQ ID NO: 23869 - protein, 413 aa, unidentified; identical to SEQ ID NO: 6368
  REGION 1..413: note = Human gut metagenome

SEQ ID NO: 23870 - protein, 413 aa, unidentified; identical to SEQ ID NO: 3295
  REGION 1..413: note = Human gut metagenome

SEQ ID NO: 23871 - protein, 413 aa, unidentified; identical to SEQ ID NO: 6421
  REGION 1..413: note = Human gut metagenome

SEQ ID NO: 23872 - protein, 413 aa, unidentified; identical to SEQ ID NO: 3587
  REGION 1..413: note = Human gut metagenome

SEQ ID NO: 23873 - protein, 413 aa, unidentified; identical to SEQ ID NO: 2636
  REGION 1..413: note = Human gut metagenome

SEQ ID NO: 23874 - protein, 413 aa, unidentified; identical to SEQ ID NO: 3290
  REGION 1..413: note = Human gut metagenome

SEQ ID NO: 23875 - protein, 413 aa, unidentified; identical to SEQ ID NO: 3751
  REGION 1..413: note = Human gut metagenome

SEQ ID NO: 23876 - protein, 413 aa, unidentified; identical to SEQ ID NO: 6529
  REGION 1..413: note = Human gut metagenome

SEQ ID NO: 23877 - protein, 413 aa, unidentified; identical to SEQ ID NO: 2636
  REGION 1..413: note = Human gut metagenome

SEQ ID NO: 23878 - protein, 413 aa, unidentified; identical to SEQ ID NO: 2636
  REGION 1..413: note = Human gut metagenome

SEQ ID NO: 23879 - protein, 413 aa, unidentified; identical to SEQ ID NO: 2636
  REGION 1..413: note = Human gut metagenome

SEQ ID NO: 23880 - protein, 413 aa, unidentified; identical to SEQ ID NO: 2636
  REGION 1..413: note = Human gut metagenome

SEQ ID NO: 23881 - protein, 413 aa, unidentified; identical to SEQ ID NO: 3695
  REGION 1..413: note = Human gut metagenome

SEQ ID NO: 23882 - protein, 416 aa, unidentified; identical to SEQ ID NO: 6623
  REGION 1..416: note = Human gut metagenome

SEQ ID NO: 23883 - protein, 413 aa, unidentified; identical to SEQ ID NO: 3587
  REGION 1..413: note = Human gut metagenome

SEQ ID NO: 23884 - protein, 348 aa, unidentified; identical to SEQ ID NO: 6679
  REGION 1..348: note = Human gut metagenome

SEQ ID NO: 23885 - protein, 432 aa, Sharpea sp.; identical to SEQ ID NO: 6688

SEQ ID NO: 23886 - protein, 347 aa, unidentified; identical to SEQ ID NO: 4100
  REGION 1..347: note = Human gut metagenome

SEQ ID NO: 23887 - protein, 413 aa, unidentified; identical to SEQ ID NO: 2636
  REGION 1..413: note = Human gut metagenome

SEQ ID NO: 23888 - protein, 392 aa, unidentified; identical to SEQ ID NO: 6800
  REGION 1..392: note = Human gut metagenome

SEQ ID NO: 23889 - protein, 413 aa, unidentified; identical to SEQ ID NO: 2636
  REGION 1..413: note = Human gut metagenome

SEQ ID NO: 23890 - protein, 413 aa, unidentified; identical to SEQ ID NO: 6529
  REGION 1..413: note = Human gut metagenome

SEQ ID NO: 23891 - protein, 412 aa, unidentified; identical to SEQ ID NO: 6913
  REGION 1..412: note = Human gut metagenome

SEQ ID NO: 23892 - protein, 416 aa, unidentified; identical to SEQ ID NO: 6923
  REGION 1..416: note = Human gut metagenome

SEQ ID NO: 23893 - protein, 413 aa, unidentified; identical to SEQ ID NO: 2605
  REGION 1..413: note = Human gut metagenome

SEQ ID NO: 23894 - protein, 413 aa, unidentified; identical to SEQ ID NO: 2636
  REGION 1..413: note = Human gut metagenome

SEQ ID NO: 23895 - protein, 418 aa, unidentified; identical to SEQ ID NO: 7032
  REGION 1..418: note = Human gut metagenome

SEQ ID NO: 23896 - protein, 413 aa, unidentified; identical to SEQ ID NO: 7099
  REGION 1..413: note = Human gut metagenome

SEQ ID NO: 23897 - protein, 413 aa, unidentified; identical to SEQ ID NO: 7120
  REGION 1..413: note = Human gut metagenome

SEQ ID NO: 23898 - protein, 438 aa, unidentified; identical to SEQ ID NO: 4848
  REGION 1..438: note = metagenome

SEQ ID NO: 23899 - protein, 413 aa, unidentified; identical to SEQ ID NO: 3587
  REGION 1..413: note = Human gut metagenome

SEQ ID NO: 23900 - protein, 413 aa, unidentified; identical to SEQ ID NO: 2815
  REGION 1..413: note = Human gut metagenome

SEQ ID NO: 23901 - protein, 413 aa, unidentified; identical to SEQ ID NO: 7256
  REGION 1..413: note = Human gut metagenome

SEQ ID NO: 23902 - protein, 413 aa, unidentified; identical to SEQ ID NO: 5965
  REGION 1..413: note = Human gut metagenome

SEQ ID NO: 23903 - protein, 413 aa, unidentified; identical to SEQ ID NO: 2636
  REGION 1..413: note = Human gut metagenome

SEQ ID NO: 23904 - protein, 412 aa, unidentified; identical to SEQ ID NO: 3155
  REGION 1..412: note = Human gut metagenome

SEQ ID NO: 23905 - protein, 413 aa, unidentified; identical to SEQ ID NO: 7302
  REGION 1..413: note = Human gut metagenome

SEQ ID NO: 23906 - protein, 412 aa, unidentified; identical to SEQ ID NO: 6913
  REGION 1..412: note = Human gut metagenome

SEQ ID NO: 23907 - protein, 413 aa, unidentified; identical to SEQ ID NO: 2636
  REGION 1..413: note = Human gut metagenome

SEQ ID NO: 23908 - protein, 413 aa, unidentified; identical to SEQ ID NO: 2636
  REGION 1..413: note = Human gut metagenome

SEQ ID NO: 23909 - protein, 413 aa, unidentified; identical to SEQ ID NO: 5215
  REGION 1..413: note = Human gut metagenome

SEQ ID NO: 23910 - protein, 414 aa, Clostridium sp.
MTNYVFVIDANGKQLAPTKEQKAWYLIRKKGATLVNKYPMVIQLNKVIKDNNICKDEIRCGIDDGGLHVGIALIQRCQTKNKVLFKGTIEQRNDVKHLMQVRKKYRQYHRYHKRYRPARFNNRSSSKRQSRIAPSIFQKRQAIIRVINQLNKWINIKNYWLEDVSIDIRALTDGYKPYSWQYQKSNRLDENIRKAIILRDGCKCMECGKANCRLEVHHIKPRRLNGSNTIDNLIILCKKCHQKTEGKEELFMNKYFSLLGKSKDNKNLNYASHVMIGKNWLREQLSNLGELYLTNGGDTANKRIDWNIEKTHSNDAICITELKPDTTDIKDWIIKAMRRQSKAKTDNVLGIKHRDLVEYKYKNGEIHRGYVTALYPEIKALNFQSPTKHCKKVNARKCKLLWKYNKIYWLDNVN

SEQ ID NO: 23911 - protein, 413 aa, unidentified; identical to SEQ ID NO: 7540
  REGION 1..413: note = Human gut metagenome

SEQ ID NO: 23912 - protein, 413 aa, unidentified; identical to SEQ ID NO: 7541
  REGION 1..413: note = Human gut metagenome

SEQ ID NO: 23913 - protein, 413 aa, unidentified; identical to SEQ ID NO: 2636
  REGION 1..413: note = Human gut metagenome

SEQ ID NO: 23914 - protein, 413 aa, unidentified; identical to SEQ ID NO: 3220
  REGION 1..413: note = Human gut metagenome

SEQ ID NO: 23915 - protein, 413 aa, unidentified; identical to SEQ ID NO: 3295
  REGION 1..413: note = Human gut metagenome

SEQ ID NO: 23916 - protein, 416 aa, unidentified; identical to SEQ ID NO: 3087
  REGION 1..416: note = Human gut metagenome

SEQ ID NO: 23917 - protein, 413 aa, unidentified; identical to SEQ ID NO: 2636
  REGION 1..413: note = Human gut metagenome

SEQ ID NO: 23918 - protein, 411 aa, Clostridium sp.; identical to SEQ ID NO: 7735

SEQ ID NO: 23919 - protein, 413 aa, unidentified; identical to SEQ ID NO: 3476
  REGION 1..413: note = Human gut metagenome

SEQ ID NO: 23920 - protein, 413 aa, unidentified; identical to SEQ ID NO: 2636
  REGION 1..413: note = Human gut metagenome

SEQ ID NO: 23921 - protein, 416 aa, unidentified; identical to SEQ ID NO: 7785
  REGION 1..416: note = Human gut metagenome

SEQ ID NO: 23922 - protein, 413 aa, unidentified; identical to SEQ ID NO: 7120
  REGION 1..413: note = Human gut metagenome

SEQ ID NO: 23923 - protein, 413 aa, unidentified; identical to SEQ ID NO: 7841
  REGION 1..413: note = Mouse gut metagenome

SEQ ID NO: 23924 - protein, 413 aa, unidentified; identical to SEQ ID NO: 7847
  REGION 1..413: note = Human gut metagenome

SEQ ID NO: 23925 - protein, 413 aa, unidentified; identical to SEQ ID NO: 2636
  REGION 1..413: note = Human gut metagenome

SEQ ID NO: 23926 - protein, 413 aa, Blautia sp.; identical to SEQ ID NO: 5365

SEQ ID NO: 23927 - protein, 413 aa, Blautia sp.; identical to SEQ ID NO: 2636

SEQ ID NO: 23928 - protein, 413 aa, unidentified; identical to SEQ ID NO: 3695
  REGION 1..413: note = Human gut metagenome

SEQ ID NO: 23929 - protein, 413 aa, unidentified; identical to SEQ ID NO: 3119
  REGION 1..413: note = metagenome

SEQ ID NO: 23930 - protein, 413 aa, unidentified; identical to SEQ ID NO: 5215
  REGION 1..413: note = metagenome

SEQ ID NO: 23931 - protein, 413 aa, unidentified; identical to SEQ ID NO: 7980
  REGION 1..413: note = Human gut metagenome

SEQ ID NO: 23932 - protein, 413 aa, unidentified; identical to SEQ ID NO: 2636
  REGION 1..413: note = Human gut metagenome

SEQ ID NO: 23933 - protein, 413 aa, unidentified; identical to SEQ ID NO: 2636
  REGION 1..413: note = Human gut metagenome

SEQ ID NO: 23934 - protein, 413 aa, unidentified; identical to SEQ ID NO: 8048
  REGION 1..413: note = Human gut metagenome

SEQ ID NO: 23935 - protein, 413 aa, unidentified; identical to SEQ ID NO: 8063
  REGION 1..413: note = Human gut metagenome

SEQ ID NO: 23936 - protein, 438 aa, unidentified; identical to SEQ ID NO: 4848
  REGION 1..438: note = metagenome

SEQ ID NO: 23937 - protein, 413 aa, unidentified; identical to SEQ ID NO: 2636
  REGION 1..413: note = Human gut metagenome

SEQ ID NO: 23938 - protein, 413 aa, unidentified; identical to SEQ ID NO: 2636
  REGION 1..413: note = Human gut metagenome

SEQ ID NO: 23939 - protein, 413 aa, unidentified; identical to SEQ ID NO: 2636
  REGION 1..413: note = Human gut metagenome

SEQ ID NO: 23940 - protein, 413 aa, unidentified; identical to SEQ ID NO: 8144
  REGION 1..413: note = Human gut metagenome

SEQ ID NO: 23941 - protein, 413 aa, unidentified; identical to SEQ ID NO: 2636
  REGION 1..413: note = Human gut metagenome

SEQ ID NO: 23942 - protein, 413 aa, unidentified; identical to SEQ ID NO: 8203
  REGION 1..413: note = Human gut metagenome

SEQ ID NO: 23943 - protein, 413 aa, unidentified; identical to SEQ ID NO: 8063
  REGION 1..413: note = Human gut metagenome

SEQ ID NO: 23944 - protein, 413 aa, unidentified; identical to SEQ ID NO: 5215
  REGION 1..413: note = Human gut metagenome

SEQ ID NO: 23945 - protein, 413 aa, unidentified; identical to SEQ ID NO: 3587
  REGION 1..413: note = Human gut metagenome

SEQ ID NO: 23946 - protein, 413 aa, unidentified; identical to SEQ ID NO: 8255
  REGION 1..413: note = Human gut metagenome

SEQ ID NO: 23947 - protein, 413 aa, unidentified; identical to SEQ ID NO: 8260
  REGION 1..413: note = Human gut metagenome

SEQ ID NO: 23948 - protein, 413 aa, unidentified; identical to SEQ ID NO: 2636
  REGION 1..413: note = Human gut metagenome

SEQ ID NO: 23949 - protein, 361 aa, unidentified; identical to SEQ ID NO: 8295
  REGION 1..361: note = Human gut metagenome

SEQ ID NO: 23950 - protein, 413 aa, unidentified; identical to SEQ ID NO: 2636
  REGION 1..413: note = Human gut metagenome

SEQ ID NO: 23951 - protein, 413 aa, Moorena sp.; identical to SEQ ID NO: 2636

SEQ ID NO: 23952 - protein, 413 aa, unidentified; identical to SEQ ID NO: 8345
  REGION 1..413: note = Human gut metagenome

SEQ ID NO: 23953 - protein, 413 aa, unidentified; identical to SEQ ID NO: 3290
  REGION 1..413: note = Human gut metagenome

SEQ ID NO: 23954 - protein, 413 aa, unidentified; identical to SEQ ID NO: 2636
  REGION 1..413: note = Human gut metagenome

SEQ ID NO: 23955 - protein, 413 aa, unidentified; identical to SEQ ID NO: 2636
  REGION 1..413: note = Human gut metagenome

SEQ ID NO: 23956 - protein, 413 aa, unidentified; identical to SEQ ID NO: 2636
  REGION 1..413: note = Human gut metagenome

SEQ ID NO: 23957 - protein, 413 aa, unidentified; identical to SEQ ID NO: 8396
  REGION 1..413: note = Human gut metagenome

SEQ ID NO: 23958 - protein, 413 aa, unidentified; identical to SEQ ID NO: 2636
  REGION 1..413: note = Human gut metagenome

SEQ ID NO: 23959 - protein, 413 aa, unidentified; identical to SEQ ID NO: 3476
  REGION 1..413: note = Human gut metagenome

SEQ ID NO: 23960 - protein, 413 aa, unidentified; identical to SEQ ID NO: 7541
  REGION 1..413: note = Human gut metagenome

SEQ ID NO: 23961 - protein, 413 aa, unidentified; identical to SEQ ID NO: 5215
  REGION 1..413: note = Human gut metagenome

SEQ ID NO: 23962 - protein, 413 aa, unidentified; identical to SEQ ID NO: 3295
  REGION 1..413: note = Human gut metagenome

SEQ ID NO: 23963 - protein, 413 aa, unidentified; identical to SEQ ID NO: 2815
  REGION 1..413: note = Human gut metagenome

SEQ ID NO: 23964 - protein, 413 aa, unidentified; identical to SEQ ID NO: 2636
  REGION 1..413: note = Human gut metagenome

SEQ ID NO: 23965 - protein, 413 aa, unidentified; identical to SEQ ID NO: 2858
  REGION 1..413: note = Human gut metagenome

SEQ ID NO: 23966 - protein, 413 aa, unidentified; identical to SEQ ID NO: 3476
  REGION 1..413: note = Human gut metagenome

SEQ ID NO: 23967 - protein, 413 aa, unidentified; identical to SEQ ID NO: 2636
  REGION 1..413: note = Human gut metagenome

SEQ ID NO: 23968 - protein, 433 aa, unidentified; identical to SEQ ID NO: 8543
  REGION 1..433: note = Human gut metagenome

SEQ ID NO: 23969 - protein, 413 aa, unidentified; identical to SEQ ID NO: 8553
  REGION 1..413: note = Human gut metagenome

SEQ ID NO: 23970 - protein, 413 aa, unidentified; identical to SEQ ID NO: 3220
  REGION 1..413: note = Human gut metagenome

SEQ ID NO: 23971 - protein, 413 aa, unidentified; identical to SEQ ID NO: 2636
  REGION 1..413: note = Human gut metagenome

SEQ ID NO: 23972 - protein, 413 aa, unidentified; identical to SEQ ID NO: 2636
  REGION 1..413: note = Human gut metagenome

SEQ ID NO: 23973 - protein, 413 aa, unidentified; identical to SEQ ID NO: 2636
  REGION 1..413: note = Human gut metagenome

SEQ ID NO: 23974 - protein, 413 aa, unidentified; identical to SEQ ID NO: 2636
  REGION 1..413: note = Human gut metagenome

SEQ ID NO: 23975 - protein, 414 aa, Moorena sp.; identical to SEQ ID NO: 8775

SEQ ID NO: 23976 - protein, 412 aa, unidentified; identical to SEQ ID NO: 3155
  REGION 1..412: note = Human gut metagenome

SEQ ID NO: 23977 - protein, 413 aa, unidentified; identical to SEQ ID NO: 2636
  REGION 1..413: note = Human gut metagenome

SEQ ID NO: 23978 - protein, 413 aa, unidentified; identical to SEQ ID NO: 2636
  REGION 1..413: note = Human gut metagenome

SEQ ID NO: 23979 - protein, 413 aa, unidentified; identical to SEQ ID NO: 2636
  REGION 1..413: note = Human gut metagenome

SEQ ID NO: 23980 - protein, 413 aa, unidentified; identical to SEQ ID NO: 2636
  REGION 1..413: note = Human gut metagenome

SEQ ID NO: 23981 - protein, 413 aa, Blautia sp.; identical to SEQ ID NO: 2636

SEQ ID NO: 23982 - protein, 413 aa, unidentified; identical to SEQ ID NO: 3476
  REGION 1..413: note = Human gut metagenome

SEQ ID NO: 23983 - protein, 413 aa, unidentified; identical to SEQ ID NO: 2636
  REGION 1..413: note = Human gut metagenome

SEQ ID NO: 23984 - protein, 413 aa, unidentified; identical to SEQ ID NO: 4858
  REGION 1..413: note = Human gut metagenome

SEQ ID NO: 23985 - protein, 413 aa, unidentified; identical to SEQ ID NO: 2636
  REGION 1..413: note = Human gut metagenome

SEQ ID NO: 23986 - protein, 416 aa, unidentified; identical to SEQ ID NO: 8974
  REGION 1..416: note = Human gut metagenome

SEQ ID NO: 23987 - protein, 413 aa, unidentified; identical to SEQ ID NO: 2636
  REGION 1..413: note = Human gut metagenome

SEQ ID NO: 23988 - protein, 413 aa, Moorena sp.; identical to SEQ ID NO: 8977

SEQ ID NO: 23989 - protein, 412 aa, unidentified; identical to SEQ ID NO: 8978
  REGION 1..412: note = Human gut metagenome

SEQ ID NO: 23990 - protein, 413 aa, unidentified; identical to SEQ ID NO: 9007
  REGION 1..413: note = Human gut metagenome

SEQ ID NO: 23991 - protein, 413 aa, unidentified; identical to SEQ ID NO: 3476
  REGION 1..413: note = Human gut metagenome

SEQ ID NO: 23992 - protein, 413 aa, unidentified; identical to SEQ ID NO: 2636
  REGION 1..413: note = Human gut metagenome

SEQ ID NO: 23993 - protein, 413 aa, unidentified; identical to SEQ ID NO: 2636
  REGION 1..413: note = Human gut metagenome

SEQ ID NO: 23994 - protein, 413 aa, unidentified; identical to SEQ ID NO: 2636
  REGION 1..413: note = Human gut metagenome

SEQ ID NO: 23995 - protein, 413 aa, unidentified; identical to SEQ ID NO: 5215
  REGION 1..413: note = Human gut metagenome

SEQ ID NO: 23996 - protein, 413 aa, unidentified; identical to SEQ ID NO: 9101
  REGION 1..413: note = Human gut metagenome

SEQ ID NO: 23997 - protein, 413 aa, unidentified; identical to SEQ ID NO: 2636
  REGION 1..413: note = Human gut metagenome

SEQ ID NO: 23998 - protein, 413 aa, unidentified; identical to SEQ ID NO: 9208
  REGION 1..413: note = Human gut metagenome

SEQ ID NO: 23999 - protein, 413 aa, unidentified; identical to SEQ ID NO: 9225
  REGION 1..413: note = Human gut metagenome

SEQ ID NO: 24000 - protein, 413 aa, unidentified; identical to SEQ ID NO: 9267
  REGION 1..413: note = Human gut metagenome

SEQ ID NO: 24001 - protein, 438 aa, unidentified; identical to SEQ ID NO: 4848
  REGION 1..438: note = metagenome

SEQ ID NO: 24002 - protein, 374 aa, unidentified; identical to SEQ ID NO: 9349
  REGION 1..374: note = Human gut metagenome

SEQ ID NO: 24003 - protein, 413 aa, unidentified; identical to SEQ ID NO: 3476
  REGION 1..413: note = Human gut metagenome

SEQ ID NO: 24004 - protein, 413 aa, unidentified; identical to SEQ ID NO: 9404
  REGION 1..413: note = Human gut metagenome

SEQ ID NO: 24005 - protein, 413 aa, unidentified; identical to SEQ ID NO: 2815
  REGION 1..413: note = Human gut metagenome

SEQ ID NO: 24006 - protein, 413 aa, unidentified; identical to SEQ ID NO: 2636
  REGION 1..413: note = Human gut metagenome

SEQ ID NO: 24007 - protein, 413 aa, unidentified; identical to SEQ ID NO: 2636
  REGION 1..413: note = Human gut metagenome

SEQ ID NO: 24008 - protein, 413 aa, Moorena sp.; identical to SEQ ID NO: 2636

SEQ ID NO: 24009 - protein, 415 aa, unidentified; identical to SEQ ID NO: 6044
  REGION 1..415: note = Human gut metagenome

SEQ ID NO: 24010 - protein, 413 aa, unidentified; identical to SEQ ID NO: 8063
  REGION 1..413: note = Human gut metagenome

SEQ ID NO: 24011 - protein, 415 aa, unidentified; identical to SEQ ID NO: 3548
  REGION 1..415: note = Human gut metagenome

SEQ ID NO: 24012 - protein, 413 aa, unidentified; identical to SEQ ID NO: 9509
  REGION 1..413: note = Human gut metagenome

SEQ ID NO: 24013 - protein, 413 aa, unidentified; identical to SEQ ID NO: 2636
  REGION 1..413: note = Human gut metagenome

SEQ ID NO: 24014 - protein, 413 aa, unidentified; identical to SEQ ID NO: 2636
  REGION 1..413: note = Human gut metagenome

SEQ ID NO: 24015 - protein, 413 aa, unidentified; identical to SEQ ID NO: 3476
  REGION 1..413: note = Human gut metagenome

SEQ ID NO: 24016 - protein, 413 aa, unidentified; identical to SEQ ID NO: 2636
  REGION 1..413: note = Human gut metagenome

SEQ ID NO: 24017 - protein, 413 aa, unidentified; identical to SEQ ID NO: 9225
  REGION 1..413: note = Human gut metagenome

SEQ ID NO: 24018 - protein, 413 aa, unidentified; identical to SEQ ID NO: 9544
  REGION 1..413: note = Human gut metagenome

SEQ ID NO: 24019 - protein, 413 aa, unidentified; identical to SEQ ID NO: 5215
  REGION 1..413: note = Human gut metagenome

SEQ ID NO: 24020 - protein, 413 aa, unidentified; identical to SEQ ID NO: 3220
  REGION 1..413: note = Human gut metagenome

SEQ ID NO: 24021 - protein, 413 aa, unidentified; identical to SEQ ID NO: 2636
  REGION 1..413: note = Human gut metagenome

SEQ ID NO: 24022 - protein, 413 aa, unidentified; identical to SEQ ID NO: 9577
  REGION 1..413: note = Human gut metagenome

SEQ ID NO: 24023 - protein, 415 aa, unidentified; identical to SEQ ID NO: 9591
  REGION 1..415: note = Human gut metagenome

SEQ ID NO: 24024 - protein, 413 aa, unidentified; identical to SEQ ID NO: 9603
  REGION 1..413: note = Human gut metagenome

SEQ ID NO: 24025 - protein, 412 aa, Coprococcus sp.; identical to SEQ ID NO: 9618

SEQ ID NO: 24026 - protein, 413 aa, unidentified; identical to SEQ ID NO: 9603
  REGION 1..413: note = Human gut metagenome

SEQ ID NO: 24027 - protein, 413 aa, unidentified; identical to SEQ ID NO: 2636
  REGION 1..413: note = Human gut metagenome

SEQ ID NO: 24028 - protein, 413 aa, unidentified; identical to SEQ ID NO: 2636
  REGION 1..413: note = Human gut metagenome

SEQ ID NO: 24029 - protein, 415 aa, unidentified; identical to SEQ ID NO: 9638
  REGION 1..415: note = Human gut metagenome

SEQ ID NO: 24030 - protein, 413 aa, unidentified; identical to SEQ ID NO: 2636
  REGION 1..413: note = Human gut metagenome

SEQ ID NO: 24031 - protein, 413 aa, unidentified; identical to SEQ ID NO: 2636
  REGION 1..413: note = Human gut metagenome

SEQ ID NO: 24032 - protein, 413 aa, unidentified; identical to SEQ ID NO: 2636
  REGION 1..413: note = Human gut metagenome

SEQ ID NO: 24033 - protein, 413 aa, unidentified; identical to SEQ ID NO: 9710
  REGION 1..413: note = Human gut metagenome

SEQ ID NO: 24034 - protein, 416 aa, unidentified; identical to SEQ ID NO: 9717
  REGION 1..416: note = Human gut metagenome

SEQ ID NO: 24035 - protein, 413 aa, unidentified; identical to SEQ ID NO: 9776
  REGION 1..413: note = Human gut metagenome

SEQ ID NO: 24036 - protein, 413 aa, unidentified; identical to SEQ ID NO: 2636
  REGION 1..413: note = Human gut metagenome

SEQ ID NO: 24037 - protein, 413 aa, unidentified; identical to SEQ ID NO: 2636
  REGION 1..413: note = Human gut metagenome

SEQ ID NO: 24038 - protein, 413 aa, unidentified; identical to SEQ ID NO: 9603
  REGION 1..413: note = Human gut metagenome

SEQ ID NO: 24039 - protein, 413 aa, unidentified; identical to SEQ ID NO: 2636
  REGION 1..413: note = Human gut metagenome

SEQ ID NO: 24040 - protein, 413 aa, unidentified; identical to SEQ ID NO: 9864
  REGION 1..413: note = Human gut metagenome

SEQ ID NO: 24041 - protein, 413 aa, unidentified; identical to SEQ ID NO: 9873
  REGION 1..413: note = Human gut metagenome

SEQ ID NO: 24042 - protein, 413 aa, unidentified; identical to SEQ ID NO: 9883
  REGION 1..413: note = Human gut metagenome

SEQ ID NO: 24043 - protein, 413 aa, unidentified; identical to SEQ ID NO: 2636
  REGION 1..413: note = Human gut metagenome

SEQ ID NO: 24044 - protein, 413 aa, unidentified; identical to SEQ ID NO: 2636
  REGION 1..413: note = Human gut metagenome

SEQ ID NO: 24045 - protein, 413 aa, unidentified; identical to SEQ ID NO: 2636
  REGION 1..413: note = Human gut metagenome

SEQ ID NO: 24046 - protein, 413 aa, unidentified; identical to SEQ ID NO: 2636
  REGION 1..413: note = Human gut metagenome

SEQ ID NO: 24047 - protein, 413 aa, unidentified; identical to SEQ ID NO: 9950
  REGION 1..413: note = Human gut metagenome

SEQ ID NO: 24048 - protein, 413 aa, unidentified; identical to SEQ ID NO: 2636
  REGION 1..413: note = Human gut metagenome

SEQ ID NO: 24049 - protein, 413 aa, unidentified; identical to SEQ ID NO: 7541
  REGION 1..413: note = Human gut metagenome

SEQ ID NO: 24050 - protein, 413 aa, unidentified; identical to SEQ ID NO: 4790
  REGION 1..413: note = Human gut metagenome

SEQ ID NO: 24051 - protein, 414 aa, unidentified; identical to SEQ ID NO: 10015
  REGION 1..414: note = Human gut metagenome

SEQ ID NO: 24052 - protein, 413 aa, unidentified; identical to SEQ ID NO: 2636
  REGION 1..413: note = Human gut metagenome

SEQ ID NO: 24053 - protein, 413 aa, unidentified; identical to SEQ ID NO: 10057
  REGION 1..413: note = Human gut metagenome

SEQ ID NO: 24054 - protein, 413 aa, unidentified; identical to SEQ ID NO: 2636
  REGION 1..413: note = Human gut metagenome

SEQ ID NO: 24055 - protein, 413 aa, unidentified; identical to SEQ ID NO: 2636
  REGION 1..413: note = Human gut metagenome

SEQ ID NO: 24056 - protein, 413 aa, Moorena sp.; identical to SEQ ID NO: 2636

SEQ ID NO: 24057 - protein, 413 aa, unidentified; identical to SEQ ID NO: 2636
  REGION 1..413: note = Human gut metagenome

SEQ ID NO: 24058 - protein, 413 aa, unidentified; identical to SEQ ID NO: 2636
  REGION 1..413: note = Human gut metagenome

SEQ ID NO: 24059 - protein, 432 aa, unidentified; identical to SEQ ID NO: 10248
  REGION 1..432: note = Human gut metagenome

SEQ ID NO: 24060 - protein, 413 aa, unidentified; identical to SEQ ID NO: 3220
  REGION 1..413: note = Human gut metagenome

SEQ ID NO: 24061 - protein, 413 aa, unidentified; identical to SEQ ID NO: 2636
  REGION 1..413: note = Human gut metagenome

SEQ ID NO: 24062 - protein, 413 aa, unidentified; identical to SEQ ID NO: 7541
  REGION 1..413: note = Human gut metagenome

SEQ ID NO: 24063 - protein, 413 aa, unidentified; identical to SEQ ID NO: 2636
  REGION 1..413: note = Human gut metagenome

SEQ ID NO: 24064 - protein, 413 aa, unidentified; identical to SEQ ID NO: 2636
  REGION 1..413: note = Human gut metagenome

SEQ ID NO: 24065 - protein, 413 aa, unidentified; identical to SEQ ID NO: 10403
  REGION 1..413: note = Human gut metagenome

SEQ ID NO: 24066 - protein, 413 aa, unidentified; identical to SEQ ID NO: 2636
  REGION 1..413: note = Human gut metagenome

SEQ ID NO: 24067 - protein, 413 aa, unidentified; identical to SEQ ID NO: 2636
  REGION 1..413: note = Human gut metagenome

SEQ ID NO: 24068 - protein, 413 aa, unidentified; identical to SEQ ID NO: 10449
  REGION 1..413: note = Human gut metagenome

SEQ ID NO: 24069 - protein, 413 aa, unidentified; identical to SEQ ID NO: 10467
  REGION 1..413: note = Human gut metagenome

SEQ ID NO: 24070 - protein, 413 aa, unidentified; identical to SEQ ID NO: 2636
  REGION 1..413: note = Human gut metagenome

SEQ ID NO: 24071 - protein, 413 aa, unidentified; identical to SEQ ID NO: 2636
  REGION 1..413: note = Human gut metagenome

SEQ ID NO: 24072 - protein, 413 aa, unidentified; identical to SEQ ID NO: 7541
  REGION 1..413: note = metagenome

SEQ ID NO: 24073 - protein, 412 aa, unidentified; identical to SEQ ID NO: 10534
  REGION 1..412: note = Human metagenome

SEQ ID NO: 24074 - protein, 415 aa, Clostridium sp.; identical to SEQ ID NO: 10543

SEQ ID NO: 24075 - protein, 413 aa, unidentified; identical to SEQ ID NO: 2636
  REGION 1..413: note = Human gut metagenome

SEQ ID NO: 24076 - protein, 416 aa, unidentified; identical to SEQ ID NO: 10554
  REGION 1..416: note = Human gut metagenome

SEQ ID NO: 24077 - protein, 413 aa, unidentified; identical to SEQ ID NO: 3616
  REGION 1..413: note = Human gut metagenome

SEQ ID NO: 24078 - protein, 413 aa, unidentified; identical to SEQ ID NO: 3587
  REGION 1..413: note = metagenome

SEQ ID NO: 24079 - protein, 413 aa, unidentified; identical to SEQ ID NO: 2636
  REGION 1..413: note = Human gut metagenome

SEQ ID NO: 24080 - protein, 413 aa, unidentified; identical to SEQ ID NO: 2636
  REGION 1..413: note = Human gut metagenome

SEQ ID NO: 24081 - protein, 413 aa, unidentified; identical to SEQ ID NO: 2636
  REGION 1..413: note = Human gut metagenome

SEQ ID NO: 24082 - protein, 413 aa, unidentified; identical to SEQ ID NO: 10591
  REGION 1..413: note = Human gut metagenome

SEQ ID NO: 24083 - protein, 413 aa, unidentified; identical to SEQ ID NO: 2636
  REGION 1..413: note = Human gut metagenome

SEQ ID NO: 24084 - protein, 374 aa, unidentified; identical to SEQ ID NO: 10634
  REGION 1..374: note = Human gut metagenome

SEQ ID NO: 24085 - protein, 413 aa, unidentified; identical to SEQ ID NO: 10655
  REGION 1..413: note = Human gut metagenome

SEQ ID NO: 24086 - protein, 413 aa, unidentified; identical to SEQ ID NO: 2636
  REGION 1..413: note = Human gut metagenome

SEQ ID NO: 24087 - protein, 413 aa, unidentified; identical to SEQ ID NO: 3290
  REGION 1..413: note = Human gut metagenome

SEQ ID NO: 24088 - protein, 413 aa, unidentified; identical to SEQ ID NO: 2636
  REGION 1..413: note = Human gut metagenome

SEQ ID NO: 24089 - protein, 413 aa, Blautia sp.; identical to SEQ ID NO: 3119

SEQ ID NO: 24090 - protein, 413 aa, unidentified; identical to SEQ ID NO: 2636
  REGION 1..413: note = Human gut metagenome

SEQ ID NO: 24091 - protein, 413 aa, unidentified; identical to SEQ ID NO: 2636
  REGION 1..413: note = Human gut metagenome

SEQ ID NO: 24092 - protein, 413 aa, unidentified; identical to SEQ ID NO: 2636
  REGION 1..413: note = Human gut metagenome

SEQ ID NO: 24093 - protein, 413 aa, unidentified; identical to SEQ ID NO: 7541
  REGION 1..413: note = Human gut metagenome

SEQ ID NO: 24094 - protein, 413 aa, unidentified; identical to SEQ ID NO: 10778
  REGION 1..413: note = Human gut metagenome

SEQ ID NO: 24095 - protein, 413 aa, unidentified; identical to SEQ ID NO: 10785
  REGION 1..413: note = Human gut metagenome

SEQ ID NO: 24096 - protein, 413 aa, unidentified; identical to SEQ ID NO: 3476
  REGION 1..413: note = Human gut metagenome

SEQ ID NO: 24097 - protein, 397 aa, unidentified; identical to SEQ ID NO: 10847
  REGION 1..397: note = Human gut metagenome

SEQ ID NO: 24098 - protein, 432 aa, unidentified; identical to SEQ ID NO: 10851
  REGION 1..432: note = Human gut metagenome

SEQ ID NO: 24099 - protein, 413 aa, unidentified; identical to SEQ ID NO: 10896
  REGION 1..413: note = Human gut metagenome

SEQ ID NO: 24100 - protein, 413 aa, unidentified; identical to SEQ ID NO: 10950
  REGION 1..413: note = metagenome

SEQ ID NO: 24101 - protein, 401 aa, Sharpea sp.; identical to SEQ ID NO: 3798

SEQ ID NO: 24102 - protein, 413 aa, unidentified; identical to SEQ ID NO: 6529
  REGION 1..413: note = Human gut metagenome

SEQ ID NO: 24103 - protein, 413 aa, unidentified; identical to SEQ ID NO: 11000
  REGION 1..413: note = Human gut metagenome

SEQ ID NO: 24104 - protein, 413 aa, unidentified; identical to SEQ ID NO: 2636
  REGION 1..413: note = Human gut metagenome

SEQ ID NO: 24105 - protein, 413 aa, unidentified; identical to SEQ ID NO: 11048
  REGION 1..413: note = Human gut metagenome

SEQ ID NO: 24106 - protein, 413 aa, Blautia sp.; identical to SEQ ID NO: 3616

SEQ ID NO: 24107 - protein, 413 aa, unidentified; identical to SEQ ID NO: 3295
  REGION 1..413: note = Human gut metagenome

SEQ ID NO: 24108 - protein, 413 aa, unidentified; identical to SEQ ID NO: 2636
  REGION 1..413: note = Human gut metagenome

SEQ ID NO: 24109 - protein, 413 aa, unidentified; identical to SEQ ID NO: 11100
  REGION 1..413: note = Human gut metagenome

SEQ ID NO: 24110 - protein, 413 aa, unidentified; identical to SEQ ID NO: 2636
  REGION 1..413: note = Human gut metagenome

SEQ ID NO: 24111 - protein, 413 aa, unidentified; identical to SEQ ID NO: 2636
  REGION 1..413: note = Human gut metagenome

SEQ ID NO: 24112 - protein, 374 aa, unidentified; identical to SEQ ID NO: 11229
  REGION 1..374: note = Human gut metagenome

SEQ ID NO: 24113 - protein, 413 aa, unidentified; identical to SEQ ID NO: 11236
  REGION 1..413: note = Human gut metagenome

SEQ ID NO: 24114 - protein, 413 aa, unidentified; identical to SEQ ID NO: 2636
  REGION 1..413: note = Human gut metagenome

SEQ ID NO: 24115 - protein, 413 aa, unidentified; identical to SEQ ID NO: 11242
  REGION 1..413: note = Human gut metagenome

SEQ ID NO: 24116 - protein, 413 aa, unidentified; identical to SEQ ID NO: 3220
  REGION 1..413: note = Human gut metagenome

SEQ ID NO: 24117 - protein, 354 aa, unidentified; identical to SEQ ID NO: 11254
  REGION 1..354: note = Human gut metagenome

SEQ ID NO: 24118 - protein, 415 aa, unidentified; identical to SEQ ID NO: 3548
  REGION 1..415: note = Human gut metagenome

SEQ ID NO: 24119 - protein, 413 aa, unidentified; identical to SEQ ID NO: 3587
  REGION 1..413: note = Human gut metagenome

SEQ ID NO: 24120 - protein, 413 aa, unidentified; identical to SEQ ID NO: 2636
  REGION 1..413: note = Human gut metagenome

SEQ ID NO: 24121 - protein, 437 aa, unidentified; identical to SEQ ID NO: 11424
  REGION 1..437: note = Human gut metagenome

SEQ ID NO: 24122 - protein, 413 aa, unidentified; identical to SEQ ID NO: 11449
  REGION 1..413: note = Human gut metagenome

SEQ ID NO: 24123 - protein, 413 aa, unidentified; identical to SEQ ID NO: 5215
  REGION 1..413: note = Human gut metagenome

SEQ ID NO: 24124 - protein, 413 aa, Moorena sp.; identical to SEQ ID NO: 2636

SEQ ID NO: 24125 - protein, 413 aa, unidentified; identical to SEQ ID NO: 2636
  REGION 1..413: note = Human gut metagenome

SEQ ID NO: 24126 - protein, 413 aa, unidentified; identical to SEQ ID NO: 2636
  REGION 1..413: note = Human gut metagenome

SEQ ID NO: 24127 - protein, 413 aa, unidentified; identical to SEQ ID NO: 11523
  REGION 1..413: note = Human gut metagenome

SEQ ID NO: 24128 - protein, 413 aa, unidentified; identical to SEQ ID NO: 2636
  REGION 1..413: note = Human gut metagenome

SEQ ID NO: 24129 - protein, 374 aa, unidentified; identical to SEQ ID NO: 11546
  REGION 1..374: note = Human gut metagenome

SEQ ID NO: 24130 - protein, 416 aa, unidentified; identical to SEQ ID NO: 7785
  REGION 1..416: note = Human gut metagenome

SEQ ID NO: 24131 - protein, 413 aa, unidentified; identical to SEQ ID NO: 10655
  REGION 1..413: note = Human gut metagenome

SEQ ID NO: 24132 - protein, 413 aa, unidentified; identical to SEQ ID NO: 2636
  REGION 1..413: note = Human gut metagenome

SEQ ID NO: 24133 - protein, 415 aa, unidentified; identical to SEQ ID NO: 11584
  REGION 1..415: note = Human oral metagenome

SEQ ID NO: 24134 - protein, 413 aa, unidentified; identical to SEQ ID NO: 2636
  REGION 1..413: note = Human gut metagenome

SEQ ID NO: 24135 - protein, 413 aa, unidentified; identical to SEQ ID NO: 2636
  REGION 1..413: note = Human gut metagenome

SEQ ID NO: 24136 - protein, 413 aa, unidentified; identical to SEQ ID NO: 2636
  REGION 1..413: note = Human gut metagenome

SEQ ID NO: 24137 - protein, 413 aa, Blautia sp.; identical to SEQ ID NO: 3290

SEQ ID NO: 24138 - protein, 413 aa, unidentified; identical to SEQ ID NO: 2636
  REGION 1..413: note = Human gut metagenome

SEQ ID NO: 24139 - protein, 413 aa, unidentified; identical to SEQ ID NO: 11717
  REGION 1..413: note = Human gut metagenome

SEQ ID NO: 24140 - protein, 416 aa, unidentified; identical to SEQ ID NO: 11728
  REGION 1..416: note = Human gut metagenome

SEQ ID NO: 24141 - protein, 413 aa, unidentified; identical to SEQ ID NO: 2636
  REGION 1..413: note = Human gut metagenome

SEQ ID NO: 24142 - protein, 413 aa, unidentified; identical to SEQ ID NO: 11757
  REGION 1..413: note = Human gut metagenome

SEQ ID NO: 24143 - protein, 413 aa, unidentified; identical to SEQ ID NO: 11784
  REGION 1..413: note = Human gut metagenome

SEQ ID NO: 24144 - protein, 413 aa, unidentified; identical to SEQ ID NO: 2636
  REGION 1..413: note = Human gut metagenome

SEQ ID NO: 24145 - protein, 413 aa, unidentified; identical to SEQ ID NO: 11796
  REGION 1..413: note = Human gut metagenome

SEQ ID NO: 24146 - protein, 413 aa, Blautia sp.; identical to SEQ ID NO: 3119

SEQ ID NO: 24147 - protein, 413 aa, unidentified; identical to SEQ ID NO: 4651
  REGION 1..413: note = Human gut metagenome

SEQ ID NO: 24148 - protein, 416 aa, unidentified; identical to SEQ ID NO: 11813
  REGION 1..416: note = metagenome

SEQ ID NO: 24149 - protein, 413 aa, unidentified; identical to SEQ ID NO: 2636
  REGION 1..413: note = Human gut metagenome

SEQ ID NO: 24150 - protein, 413 aa, unidentified; identical to SEQ ID NO: 2636
  REGION 1..413: note = Human gut metagenome

SEQ ID NO: 24151 - protein, 415 aa, unidentified; identical to SEQ ID NO: 11853
  REGION 1..415: note = Human gut metagenome

SEQ ID NO: 24152 - protein, 413 aa, unidentified; identical to SEQ ID NO: 3220
  REGION 1..413: note = Human gut metagenome

SEQ ID NO: 24153 - protein, 415 aa, unidentified; identical to SEQ ID NO: 11876
  REGION 1..415: note = Human gut metagenome

SEQ ID NO: 24154 - protein, 413 aa, unidentified; identical to SEQ ID NO: 4790
  REGION 1..413: note = Human gut metagenome

SEQ ID NO: 24155 - protein, 413 aa, unidentified; identical to SEQ ID NO: 2815
  REGION 1..413: note = Human gut metagenome

SEQ ID NO: 24156 - protein, 412 aa, unidentified; identical to SEQ ID NO: 11932
  REGION 1..412: note = Human oral metagenome

SEQ ID NO: 24157 - protein, 413 aa, unidentified; identical to SEQ ID NO: 11940
  REGION 1..413: note = Human gut metagenome

SEQ ID NO: 24158 - protein, 413 aa, unidentified; identical to SEQ ID NO: 3023
  REGION 1..413: note = Human gut metagenome

SEQ ID NO: 24159 - protein, 415 aa, unidentified; identical to SEQ ID NO: 11973
  REGION 1..415: note = Human metagenome

SEQ ID NO: 24160 - protein, 413 aa, unidentified; identical to SEQ ID NO: 11978
  REGION 1..413: note = Human gut metagenome

SEQ ID NO: 24161 - protein, 413 aa, unidentified; identical to SEQ ID NO: 2636
  REGION 1..413: note = Human gut metagenome

SEQ ID NO: 24162 - protein, 413 aa, unidentified; identical to SEQ ID NO: 12039
  REGION 1..413: note = Human gut metagenome

SEQ ID NO: 24163 - protein, 413 aa, unidentified; identical to SEQ ID NO: 3220
  REGION 1..413: note = Human gut metagenome

SEQ ID NO: 24164 - protein, 413 aa, unidentified; identical to SEQ ID NO: 3616
  REGION 1..413: note = Human gut metagenome

SEQ ID NO: 24165 - protein, 412 aa, unidentified; identical to SEQ ID NO: 8978
  REGION 1..412: note = Human gut metagenome

SEQ ID NO: 24166 - protein, 413 aa, unidentified; identical to SEQ ID NO: 2636
  REGION 1..413: note = Human gut metagenome

SEQ ID NO: 24167 - protein, 413 aa, unidentified; identical to SEQ ID NO: 12220
  REGION 1..413: note = Human gut metagenome

SEQ ID NO: 24168 - protein, 415 aa, unidentified; identical to SEQ ID NO: 11876
  REGION 1..415: note = Human gut metagenome

SEQ ID NO: 24169 - protein, 413 aa, unidentified; identical to SEQ ID NO: 12223
  REGION 1..413: note = Human gut metagenome

SEQ ID NO: 24170 - protein, 413 aa, unidentified; identical to SEQ ID NO: 3023
  REGION 1..413: note = Human gut metagenome

SEQ ID NO: 24171 - protein, 413 aa, unidentified; identical to SEQ ID NO: 2636
  REGION 1..413: note = Human gut metagenome

SEQ ID NO: 24172 - protein, 413 aa, unidentified; identical to SEQ ID NO: 8345
  REGION 1..413: note = Human gut metagenome

SEQ ID NO: 24173 - protein, 413 aa, unidentified; identical to SEQ ID NO: 3476
  REGION 1..413: note = Human gut metagenome

SEQ ID NO: 24174 - protein, 413 aa, unidentified; identical to SEQ ID NO: 4790
  REGION 1..413: note = Human gut metagenome

SEQ ID NO: 24175 - protein, 413 aa, unidentified; identical to SEQ ID NO: 2636
  REGION 1..413: note = Human gut metagenome

SEQ ID NO: 24176 - protein, 413 aa, unidentified; identical to SEQ ID NO: 2636
  REGION 1..413: note = Human gut metagenome

SEQ ID NO: 24177 - protein, 378 aa, Moorena sp.; identical to SEQ ID NO: 12349

SEQ ID NO: 24178 - protein, 407 aa, unidentified; identical to SEQ ID NO: 12361
  REGION 1..407: note = Human gut metagenome

SEQ ID NO: 24179 - protein, 438 aa, unidentified; identical to SEQ ID NO: 12384
  REGION 1..438: note = Human gut metagenome

SEQ ID NO: 24180 - protein, 413 aa, unidentified; identical to SEQ ID NO: 12390
  REGION 1..413: note = Human gut metagenome

SEQ ID NO: 24181 - protein, 438 aa, unidentified; identical to SEQ ID NO: 4848
  REGION 1..438: note = Human gut metagenome

SEQ ID NO: 24182 - protein, 415 aa, unidentified; identical to SEQ ID NO: 10543
  REGION 1..415: note = Human gut metagenome

SEQ ID NO: 24183 - protein, 413 aa, unidentified; identical to SEQ ID NO: 12452
  REGION 1..413: note = Human gut metagenome

SEQ ID NO: 24184 - protein, 413 aa, unidentified; identical to SEQ ID NO: 6529
  REGION 1..413: note = Human gut metagenome

SEQ ID NO: 24185 - protein, 413 aa, unidentified; identical to SEQ ID NO: 12513
  REGION 1..413: note = Human gut metagenome

SEQ ID NO: 24186 - protein, 413 aa, unidentified; identical to SEQ ID NO: 2636
  REGION 1..413: note = Human gut metagenome

SEQ ID NO: 24187 - protein, 413 aa, unidentified; identical to SEQ ID NO: 3476
  REGION 1..413: note = Human gut metagenome

SEQ ID NO: 24188 - protein, 413 aa, Blautia sp.; identical to SEQ ID NO: 3290

SEQ ID NO: 24189 - protein, 413 aa, unidentified; identical to SEQ ID NO: 3587
  REGION 1..413: note = Human gut metagenome

SEQ ID NO: 24190 - protein, 412 aa, Deinococcus sp.; identical to SEQ ID NO: 3738

SEQ ID NO: 24191 - protein, 413 aa, unidentified; identical to SEQ ID NO: 2636
  REGION 1..413: note = Human gut metagenome

SEQ ID NO: 24192 - protein, 413 aa, Sharpea sp.; identical to SEQ ID NO: 4953

SEQ ID NO: 24193 - protein, 413 aa, unidentified; identical to SEQ ID NO: 3023
  REGION 1..413: note = Human gut metagenome

SEQ ID NO: 24194 - protein, 410 aa, unidentified; identical to SEQ ID NO: 12646
  REGION 1..410: note = Human gut metagenome

SEQ ID NO: 24195 - protein, 413 aa, unidentified; identical to SEQ ID NO: 3290
  REGION 1..413: note = Human gut metagenome

SEQ ID NO: 24196 - protein, 413 aa, unidentified; identical to SEQ ID NO: 3295
  REGION 1..413: note = Human gut metagenome

SEQ ID NO: 24197 - protein, 374 aa, Moorena sp.; identical to SEQ ID NO: 12692

SEQ ID NO: 24198 - protein, 412 aa, unidentified; identical to SEQ ID NO: 6913
  REGION 1..412: note = Human gut metagenome

SEQ ID NO: 24199 - protein, 413 aa, unidentified; identical to SEQ ID NO: 2636
  REGION 1..413: note = Human gut metagenome

SEQ ID NO: 24200 - protein, 413 aa, unidentified; identical to SEQ ID NO: 2636
  REGION 1..413: note = Human gut metagenome

SEQ ID NO: 24201 - protein, 413 aa, unidentified; identical to SEQ ID NO: 2636
  REGION 1..413: note = Human gut metagenome

SEQ ID NO: 24202 - protein, 413 aa, unidentified; identical to SEQ ID NO: 3023
  REGION 1..413: note = Human gut metagenome

SEQ ID NO: 24203 - protein, 413 aa, unidentified; identical to SEQ ID NO: 12823
  REGION 1..413: note = Human gut metagenome

SEQ ID NO: 24204 - protein, 413 aa, unidentified; identical to SEQ ID NO: 10591
  REGION 1..413: note = Human gut metagenome

SEQ ID NO: 24205 - protein, 413 aa, unidentified; identical to SEQ ID NO: 2636
  REGION 1..413: note = Human gut metagenome

SEQ ID NO: 24206 - protein, 438 aa, unidentified; identical to SEQ ID NO: 4848
  REGION 1..438: note = Human gut metagenome

SEQ ID NO: 24207 - protein, 413 aa, unidentified; identical to SEQ ID NO: 12877
  REGION 1..413: note = Human gut metagenome

SEQ ID NO: 24208 - protein, 413 aa, unidentified; identical to SEQ ID NO: 7099
  REGION 1..413: note = Human gut metagenome

SEQ ID NO: 24209 - protein, 413 aa, unidentified; identical to SEQ ID NO: 11236
  REGION 1..413: note = metagenome

SEQ ID NO: 24210 - protein, 411 aa, unidentified; identical to SEQ ID NO: 2867
  REGION 1..411: note = Human gut metagenome

SEQ ID NO: 24211 - protein, 413 aa, unidentified; identical to SEQ ID NO: 12915
  REGION 1..413: note = Lachnospiraceae bacterium

SEQ ID NO: 24212 - protein, 413 aa, unidentified; identical to SEQ ID NO: 10403
  REGION 1..413: note = Human gut metagenome

SEQ ID NO: 24213 - protein, 413 aa, unidentified; identical to SEQ ID NO: 2636
  REGION 1..413: note = Human gut metagenome

SEQ ID NO: 24214 - protein, 413 aa, unidentified; identical to SEQ ID NO: 2636
  REGION 1..413: note = Human gut metagenome

SEQ ID NO: 24215 - protein, 413 aa, unidentified; identical to SEQ ID NO: 5215
  REGION 1..413: note = Human gut metagenome

SEQ ID NO: 24216 - protein, 413 aa, unidentified; identical to SEQ ID NO: 3621
  REGION 1..413: note = Human gut metagenome

SEQ ID NO: 24217 - protein, 413 aa, Blautia sp.; identical to SEQ ID NO: 3476

SEQ ID NO: 24218 - protein, 413 aa, Moorena sp.; identical to SEQ ID NO: 2636

SEQ ID NO: 24219 - protein, 413 aa, unidentified; identical to SEQ ID NO: 2605
  REGION 1..413: note = Human gut metagenome

SEQ ID NO: 24220 - protein, 413 aa, unidentified; identical to SEQ ID NO: 13176
  REGION 1..413: note = Human gut metagenome

SEQ ID NO: 24221 - protein, 413 aa, unidentified; identical to SEQ ID NO: 2636
  REGION 1..413: note = Human gut metagenome

SEQ ID NO: 24222 - protein, 413 aa, unidentified; identical to SEQ ID NO: 13291
  REGION 1..413: note = Human gut metagenome

SEQ ID NO: 24223 - protein, 413 aa, unidentified; identical to SEQ ID NO: 2636
  REGION 1..413: note = Human gut metagenome

SEQ ID NO: 24224 - protein, 413 aa, Blautia sp.; identical to SEQ ID NO: 9603

SEQ ID NO: 24225 - protein, 413 aa, unidentified; identical to SEQ ID NO: 3220
  REGION 1..413: note = Human gut metagenome

SEQ ID NO: 24226 - protein, 413 aa, unidentified; identical to SEQ ID NO: 2636
  REGION 1..413: note = Human gut metagenome

SEQ ID NO: 24227 - protein, 422 aa, unidentified; identical to SEQ ID NO: 13422
  REGION 1..422: note = Human gut metagenome

SEQ ID NO: 24228 - protein, 413 aa, unidentified; identical to SEQ ID NO: 2636
  REGION 1..413: note = Human gut metagenome

SEQ ID NO: 24229 - protein, 410 aa, unidentified; identical to SEQ ID NO: 13480
  REGION 1..410: note = Human gut metagenome

SEQ ID NO: 24230 - protein, 412 aa, unidentified; identical to SEQ ID NO: 6276
  REGION 1..412: note = Human gut metagenome

SEQ ID NO: 24231 - protein, 413 aa, unidentified; identical to SEQ ID NO: 13517
  REGION 1..413: note = Human gut metagenome

SEQ ID NO: 24232 - protein, 413 aa, unidentified; identical to SEQ ID NO: 10467
  REGION 1..413: note = Human gut metagenome

SEQ ID NO: 24233 - protein, 413 aa, unidentified; identical to SEQ ID NO: 11784
  REGION 1..413: note = Human gut metagenome

SEQ ID NO: 24234 - protein, 413 aa, unidentified; identical to SEQ ID NO: 3476
  REGION 1..413: note = Human gut metagenome

SEQ ID NO: 24235 - protein, 438 aa, unidentified; identical to SEQ ID NO: 4848
  REGION 1..438: note = Human gut metagenome

SEQ ID NO: 24236 - protein, 380 aa, Moorena sp.; identical to SEQ ID NO: 13675

SEQ ID NO: 24237 - protein, 413 aa, unidentified; identical to SEQ ID NO: 4790
  REGION 1..413: note = Human gut metagenome

SEQ ID NO: 24238 - protein, 409 aa, unidentified; identical to SEQ ID NO: 13747
  REGION 1..409: note = Human gut metagenome

SEQ ID NO: 24239 - protein, 413 aa, unidentified; identical to SEQ ID NO: 2636
  REGION 1..413: note = Human gut metagenome

SEQ ID NO: 24240 - protein, 438 aa, unidentified; identical to SEQ ID NO: 4848
  REGION 1..438: note = metagenome

SEQ ID NO: 24241 - protein, 415 aa, unidentified; identical to SEQ ID NO: 6044
  REGION 1..415: note = Human gut metagenome

SEQ ID NO: 24242 - protein, 415 aa, unidentified; identical to SEQ ID NO: 5821
  REGION 1..415: note = Human metagenome

SEQ ID NO: 24243 - protein, 413 aa, unidentified; identical to SEQ ID NO: 13902
  REGION 1..413: note = Human gut metagenome

SEQ ID NO: 24244 - protein, 413 aa, unidentified; identical to SEQ ID NO: 2636
  REGION 1..413: note = Human gut metagenome

SEQ ID NO: 24245 - protein, 412 aa, unidentified; identical to SEQ ID NO: 6913
  REGION 1..412: note = Human gut metagenome

SEQ ID NO: 24246 - protein, 413 aa, unidentified; identical to SEQ ID NO: 5965
  REGION 1..413: note = Human gut metagenome

SEQ ID NO: 24247 - protein, 413 aa, unidentified; identical to SEQ ID NO: 14027
  REGION 1..413: note = Human gut metagenome

SEQ ID NO: 24248 - protein, 413 aa, unidentified; identical to SEQ ID NO: 3220
  REGION 1..413: note = Human gut metagenome

SEQ ID NO: 24249 - protein, 413 aa, unidentified; identical to SEQ ID NO: 2636
  REGION 1..413: note = Human gut metagenome

SEQ ID NO: 24250 - protein, 412 aa, unidentified; identical to SEQ ID NO: 6913
  REGION 1..412: note = Human gut metagenome

SEQ ID NO: 24251 - protein, 413 aa, Moorena sp.; identical to SEQ ID NO: 2636

SEQ ID NO: 24252 - protein, 413 aa, unidentified; identical to SEQ ID NO: 12039
  REGION 1..413: note = Human gut metagenome

SEQ ID NO: 24253 - protein, 413 aa, unidentified; identical to SEQ ID NO: 14141
  REGION 1..413: note = Human gut metagenome

SEQ ID NO: 24254 - protein, 416 aa, unidentified; identical to SEQ ID NO: 14152
  REGION 1..416: note = Human gut metagenome

SEQ ID NO: 24255 - protein, 438 aa, unidentified; identical to SEQ ID NO: 14156
  REGION 1..438: note = Human gut metagenome

SEQ ID NO: 24256 - protein, 413 aa, unidentified; identical to SEQ ID NO: 2636
  REGION 1..413: note = Human gut metagenome

SEQ ID NO: 24257 - protein, 413 aa, unidentified; identical to SEQ ID NO: 14184
  REGION 1..413: note = Human gut metagenome

SEQ ID NO: 24258 - protein, 413 aa, unidentified; identical to SEQ ID NO: 3587
  REGION 1..413: note = Human gut metagenome

SEQ ID NO: 24259 - protein, 413 aa, unidentified; identical to SEQ ID NO: 14237
  REGION 1..413: note = Human gut metagenome

SEQ ID NO: 24260 - protein, 413 aa, unidentified; identical to SEQ ID NO: 2636
  REGION 1..413: note = Human gut metagenome

SEQ ID NO: 24261 - protein, 413 aa, unidentified; identical to SEQ ID NO: 8345
  REGION 1..413: note = Human gut metagenome

SEQ ID NO: 24262 - protein, 415 aa, unidentified; identical to SEQ ID NO: 14316
  REGION 1..415: note = Human gut metagenome

SEQ ID NO: 24263 - protein, 416 aa, unidentified; identical to SEQ ID NO: 14330
  REGION 1..416: note = Human gut metagenome

SEQ ID NO: 24264 - protein, 413 aa, unidentified; identical to SEQ ID NO: 3476
  REGION 1..413: note = Human gut metagenome

SEQ ID NO: 24265 - protein, 413 aa, unidentified; identical to SEQ ID NO: 3695
  REGION 1..413: note = Human gut metagenome

SEQ ID NO: 24266 - protein, 413 aa, Blautia sp.; identical to SEQ ID NO: 3476

SEQ ID NO: 24267 - protein, 415 aa, unidentified; identical to SEQ ID NO: 10543
  REGION 1..415: note = Human gut metagenome

SEQ ID NO: 24268 - protein, 411 aa, Clostridium sp.; identical to SEQ ID NO: 7735

SEQ ID NO: 24269 - protein, 438 aa, unidentified; identical to SEQ ID NO: 14647
  REGION 1..438: note = metagenome

SEQ ID NO: 24270 - protein, 413 aa, unidentified; identical to SEQ ID NO: 14648
  REGION 1..413: note = Human gut metagenome

SEQ ID NO: 24271 - protein, 416 aa, unidentified; identical to SEQ ID NO: 6623
  REGION 1..416: note = Human gut metagenome

SEQ ID NO: 24272 - protein, 380 aa, unidentified; identical to SEQ ID NO: 14713
  REGION 1..380: note = Human gut metagenome

SEQ ID NO: 24273 - protein, 413 aa, unidentified; identical to SEQ ID NO: 8260
  REGION 1..413: note = Human gut metagenome

SEQ ID NO: 24274 - protein, 416 aa, unidentified; identical to SEQ ID NO: 6623
  REGION 1..416: note = Human gut metagenome

SEQ ID NO: 24275 - protein, 413 aa, unidentified; identical to SEQ ID NO: 2605
  REGION 1..413: note = Human gut metagenome

SEQ ID NO: 24276 - protein, 413 aa, unidentified; identical to SEQ ID NO: 14876
  REGION 1..413: note = Human gut metagenome

SEQ ID NO: 24277 - protein, 413 aa, unidentified; identical to SEQ ID NO: 3587
  REGION 1..413: note = Human gut metagenome

SEQ ID NO: 24278 - protein, 412 aa, Coprococcus sp.; identical to SEQ ID NO: 9618

SEQ ID NO: 24279 - protein, 413 aa, unidentified; identical to SEQ ID NO: 2636
  REGION 1..413: note = Human gut metagenome

SEQ ID NO: 24280 - protein, 413 aa, unidentified; identical to SEQ ID NO: 3616
  REGION 1..413: note = Human gut metagenome

SEQ ID NO: 24281 - protein, 438 aa, unidentified; identical to SEQ ID NO: 4848
  REGION 1..438: note = Human gut metagenome

SEQ ID NO: 24282 - protein, 413 aa, Blautia sp.; identical to SEQ ID NO: 10403

SEQ ID NO: 24283 - protein, 413 aa, unidentified; identical to SEQ ID NO: 15151
  REGION 1..413: note = Human gut metagenome

SEQ ID NO: 24284 - protein, 412 aa, unidentified; identical to SEQ ID NO: 15155
  REGION 1..412: note = Human metagenome

SEQ ID NO: 24285 - protein, 413 aa, unidentified; identical to SEQ ID NO: 15157
  REGION 1..413: note = gut metagenome

SEQ ID NO: 24286 - protein, 405 aa, unidentified; identical to SEQ ID NO: 15158
  REGION 1..405: note = Human gut metagenome

SEQ ID NO: 24287 - protein, 438 aa, unidentified; identical to SEQ ID NO: 4848
  REGION 1..438: note = Human gut metagenome

SEQ ID NO: 24288 - protein, 413 aa, unidentified; identical to SEQ ID NO: 15240
  REGION 1..413: note = metagenome

SEQ ID NO: 24289 - protein, 375 aa, unidentified; identical to SEQ ID NO: 15243
  REGION 1..375: note = Human gut metagenome

SEQ ID NO: 24290 - protein, 413 aa, unidentified; identical to SEQ ID NO: 3119
  REGION 1..413: note = Human gut metagenome

SEQ ID NO: 24291 - protein, 413 aa, unidentified; identical to SEQ ID NO: 2605
  REGION 1..413: note = Human gut metagenome

SEQ ID NO: 24292 - protein, 413 aa, unidentified; identical to SEQ ID NO: 3220
  REGION 1..413: note = Human gut metagenome

SEQ ID NO: 24293 - protein, 411 aa, unidentified; identical to SEQ ID NO: 2867
  REGION 1..411: note = Human gut metagenome

SEQ ID NO: 24294 - protein, 438 aa, unidentified; identical to SEQ ID NO: 4848
  REGION 1..438: note = Human gut metagenome

SEQ ID NO: 24295 - protein, 413 aa, unidentified; identical to SEQ ID NO: 15509
  REGION 1..413: note = Human gut metagenome

SEQ ID NO: 24296 - protein, 413 aa, unidentified; identical to SEQ ID NO: 3220
  REGION 1..413: note = Human gut metagenome

SEQ ID NO: 24297 - protein, 413 aa, unidentified; identical to SEQ ID NO: 12513
  REGION 1..413: note = Human gut metagenome

SEQ ID NO: 24298 - protein, 415 aa, unidentified; identical to SEQ ID NO: 10543
  REGION 1..415: note = Human gut metagenome

SEQ ID NO: 24299 - protein, 413 aa, unidentified; identical to SEQ ID NO: 2636
  REGION 1..413: note = Human gut metagenome

SEQ ID NO: 24300 - protein, 413 aa, unidentified; identical to SEQ ID NO: 3220
  REGION 1..413: note = Human gut metagenome

SEQ ID NO: 24301 - protein, 413 aa, unidentified; identical to SEQ ID NO: 15854
  REGION 1..413: note = Human gut metagenome

SEQ ID NO: 24302 - protein, 413 aa, unidentified; identical to SEQ ID NO: 2636
  REGION 1..413: note = Human gut metagenome

SEQ ID NO: 24303 - protein, 413 aa, unidentified; identical to SEQ ID NO: 12223
  REGION 1..413: note = Human gut metagenome

SEQ ID NO: 24304 - protein, 415 aa, unidentified; identical to SEQ ID NO: 15940
  REGION 1..415: note = Human gut metagenome

SEQ ID NO: 24305 - protein, 412 aa, unidentified; identical to SEQ ID NO: 3155
  REGION 1..412: note = Human gut metagenome

SEQ ID NO: 24306 - protein, 413 aa, unidentified; identical to SEQ ID NO: 16077
  REGION 1..413: note = Human gut metagenome

SEQ ID NO: 24307 - protein, 411 aa, unidentified; identical to SEQ ID NO: 16081
  REGION 1..411: note = Fermentation metagenome

SEQ ID NO: 24308 - protein, 413 aa, unidentified; identical to SEQ ID NO: 3290
  REGION 1..413: note = Human gut metagenome

SEQ ID NO: 24309 - protein, 413 aa, unidentified; identical to SEQ ID NO: 3476
  REGION 1..413: note = Human gut metagenome

SEQ ID NO: 24310 - protein, 413 aa, unidentified; identical to SEQ ID NO: 16315
  REGION 1..413: note = Human gut metagenome

SEQ ID NO: 24311 - protein, 413 aa, unidentified; identical to SEQ ID NO: 16324
  REGION 1..413: note = Human gut metagenome

SEQ ID NO: 24312 - protein, 413 aa, unidentified; identical to SEQ ID NO: 3587
  REGION 1..413: note = Human gut metagenome

SEQ ID NO: 24313 - protein, 412 aa, unidentified; identical to SEQ ID NO: 3155
  REGION 1..412: note = Human gut metagenome

SEQ ID NO: 24314 - protein, 413 aa, unidentified; identical to SEQ ID NO: 8063
  REGION 1..413: note = Human gut metagenome

SEQ ID NO: 24315 - protein, 415 aa, unidentified; identical to SEQ ID NO: 3548
  REGION 1..415: note = Human gut metagenome

SEQ ID NO: 24316 - protein, 426 aa, unidentified; identical to SEQ ID NO: 16508
  REGION 1..426: note = Human gut metagenome

SEQ ID NO: 24317 - protein, 415 aa, unidentified; identical to SEQ ID NO: 16542
  REGION 1..415: note = Human gut metagenome

SEQ ID NO: 24318 - protein, 413 aa, unidentified; identical to SEQ ID NO: 16543
  REGION 1..413: note = Lachnospiraceae bacterium UBA2888

SEQ ID NO: 24319 - protein, 412 aa, unidentified; identical to SEQ ID NO: 16549
  REGION 1..412: note = Human gut metagenome

SEQ ID NO: 24320 - protein, 413 aa, Moorena sp.; identical to SEQ ID NO: 16574

SEQ ID NO: 24321 - protein, 413 aa, unidentified; identical to SEQ ID NO: 10655
  REGION 1..413: note = Human gut metagenome

SEQ ID NO: 24322 - protein, 413 aa, unidentified; identical to SEQ ID NO: 3587
  REGION 1..413: note = Human gut metagenome

SEQ ID NO: 24323 - protein, 413 aa, unidentified; identical to SEQ ID NO: 2636
  REGION 1..413: note = Human gut metagenome

SEQ ID NO: 24324 - protein, 416 aa, unidentified; identical to SEQ ID NO: 6623
  REGION 1..416: note = Human gut metagenome

SEQ ID NO: 24325 - protein, 413 aa, unidentified; identical to SEQ ID NO: 3220
  REGION 1..413: note = Human gut metagenome

SEQ ID NO: 24326 - protein, 438 aa, unidentified; identical to SEQ ID NO: 4848
  REGION 1..438: note = Human gut metagenome

SEQ ID NO: 24327 - protein, 412 aa, unidentified; identical to SEQ ID NO: 3155
  REGION 1..412: note = Human gut metagenome

SEQ ID NO: 24328 - protein, 413 aa, unidentified; identical to SEQ ID NO: 17000
  REGION 1..413: note = Human gut metagenome

SEQ ID NO: 24329 - protein, 413 aa, unidentified; identical to SEQ ID NO: 17022
  REGION 1..413: note = Human gut metagenome

SEQ ID NO: 24330 - protein, 413 aa, unidentified; identical to SEQ ID NO: 3220
  REGION 1..413: note = Human gut metagenome

SEQ ID NO: 24331 - protein, 413 aa, unidentified; identical to SEQ ID NO: 17062
  REGION 1..413: note = Human gut metagenome

SEQ ID NO: 24332 - protein, 413 aa, unidentified; identical to SEQ ID NO: 3476
  REGION 1..413: note = metagenome

SEQ ID NO: 24333 - protein, 413 aa, unidentified; identical to SEQ ID NO: 3587
  REGION 1..413: note = Human gut metagenome

SEQ ID NO: 24334 - protein, 429 aa, unidentified; identical to SEQ ID NO: 17143
  REGION 1..429: note = Human gut metagenome

SEQ ID NO: 24335 - protein, 354 aa, unidentified; identical to SEQ ID NO: 17228
  REGION 1..354: note = Human gut metagenome

SEQ ID NO: 24336 - protein, 438 aa, unidentified; identical to SEQ ID NO: 12384
  REGION 1..438: note = Human gut metagenome

SEQ ID NO: 24337 - protein, 413 aa, unidentified; identical to SEQ ID NO: 2636
  REGION 1..413: note = Human gut metagenome

SEQ ID NO: 24338 - protein, 416 aa, unidentified; identical to SEQ ID NO: 6623
  REGION 1..416: note = Human gut metagenome

SEQ ID NO: 24339 - protein, 413 aa, unidentified; identical to SEQ ID NO: 3220
  REGION 1..413: note = Human gut metagenome

SEQ ID NO: 24340 - protein, 413 aa, unidentified; identical to SEQ ID NO: 11796
  REGION 1..413: note = Human gut metagenome

SEQ ID NO: 24341 - protein, 432 aa, Sharpea sp.; identical to SEQ ID NO: 6688

SEQ ID NO: 24342 - protein, 413 aa, unidentified; identical to SEQ ID NO: 2636
  REGION 1..413: note = Human gut metagenome

SEQ ID NO: 24343 - protein, 413 aa, unidentified; identical to SEQ ID NO: 17543
  REGION 1..413: note = Human gut metagenome

SEQ ID NO: 24344 - protein, 413 aa, unidentified; identical to SEQ ID NO: 3220
  REGION 1..413: note = Human gut metagenome

SEQ ID NO: 24345 - protein, 413 aa, unidentified; identical to SEQ ID NO: 11796
  REGION 1..413: note = Human gut metagenome

SEQ ID NO: 24346 - protein, 413 aa, unidentified; identical to SEQ ID NO: 17626
  REGION 1..413: note = Human gut metagenome

SEQ ID NO: 24347 - protein, 499 aa, unidentified; identical to SEQ ID NO: 17701
  REGION 1..499: note = Wastewater metagenome

SEQ ID NO: 24348 - protein, 413 aa, unidentified; identical to SEQ ID NO: 3695
  REGION 1..413: note = Human gut metagenome

SEQ ID NO: 24349 - protein, 413 aa, unidentified; identical to SEQ ID NO: 11242
  REGION 1..413: note = Human gut metagenome

SEQ ID NO: 24350 - protein, 493 aa, unidentified; identical to SEQ ID NO: 17845
  REGION 1..493: note = Human oral metagenome

SEQ ID NO: 24351 - protein, 413 aa, unidentified; identical to SEQ ID NO: 2636
  REGION 1..413: note = Human gut metagenome

SEQ ID NO: 24352 - protein, 413 aa, unidentified; identical to SEQ ID NO: 3751
  REGION 1..413: note = Human gut metagenome

SEQ ID NO: 24353 - protein, 340 aa, unidentified; identical to SEQ ID NO: 17898
  REGION 1..340: note = Human gut metagenome

SEQ ID NO: 24354 - protein, 415 aa, unidentified; identical to SEQ ID NO: 3635
  REGION 1..415: note = Human gut metagenome

SEQ ID NO: 24355 - protein, 357 aa, unidentified; identical to SEQ ID NO: 17903
  REGION 1..357: note = Human gut metagenome

SEQ ID NO: 24356 - protein, 413 aa, unidentified; identical to SEQ ID NO: 17955
  REGION 1..413: note = Human gut metagenome

SEQ ID NO: 24357 - protein, 380 aa, unidentified; identical to SEQ ID NO: 17973
  REGION 1..380: note = Human gut metagenome

SEQ ID NO: 24358 - protein, 412 aa, unidentified; identical to SEQ ID NO: 16549
  REGION 1..412: note = Human gut metagenome

SEQ ID NO: 24359 - protein, 412 aa, unidentified; identical to SEQ ID NO: 18030
  REGION 1..412: note = Human gut metagenome

SEQ ID NO: 24360 - protein, 412 aa, unidentified; identical to SEQ ID NO: 10534
  REGION 1..412: note = Human metagenome

SEQ ID NO: 24361 - protein, 416 aa, unidentified; identical to SEQ ID NO: 18097
  REGION 1..416: note = Human gut metagenome

SEQ ID NO: 24362 - protein, 413 aa, unidentified; identical to SEQ ID NO: 9873
  REGION 1..413: note = Human gut metagenome

SEQ ID NO: 24363 - protein, 413 aa, unidentified; identical to SEQ ID NO: 3476
  REGION 1..413: note = Human gut metagenome

SEQ ID NO: 24364 - protein, 413 aa, unidentified; identical to SEQ ID NO: 3621
  REGION 1..413: note = Human gut metagenome

SEQ ID NO: 24365 - protein, 415 aa, unidentified; identical to SEQ ID NO: 10543
  REGION 1..415: note = Human gut metagenome

SEQ ID NO: 24366 - protein, 416 aa, unidentified; identical to SEQ ID NO: 7785
  REGION 1..416: note = Human gut metagenome

SEQ ID NO: 24367 - protein, 413 aa, unidentified; identical to SEQ ID NO: 5477
  REGION 1..413: note = Human gut metagenome

SEQ ID NO: 24368 - protein, 413 aa, unidentified; identical to SEQ ID NO: 7541
  REGION 1..413: note = Human gut metagenome

SEQ ID NO: 24369 - protein, 415 aa, unidentified; identical to SEQ ID NO: 15940
  REGION 1..415: note = Human gut metagenome

SEQ ID NO: 24370 - protein, 413 aa, unidentified; identical to SEQ ID NO: 3220
  REGION 1..413: note = Human gut metagenome

SEQ ID NO: 24371 - protein, 413 aa, unidentified; identical to SEQ ID NO: 3587
  REGION 1..413: note = Human gut metagenome

SEQ ID NO: 24372 - protein, 413 aa, unidentified; identical to SEQ ID NO: 3290
  REGION 1..413: note = Human gut metagenome

SEQ ID NO: 24373 - protein, 416 aa, unidentified; identical to SEQ ID NO: 18455
  REGION 1..416: note = metagenome

SEQ ID NO: 24374 - protein, 413 aa, Roseburia sp.; identical to SEQ ID NO: 18461

SEQ ID NO: 24375 - protein, 412 aa, unidentified; identical to SEQ ID NO: 18463
  REGION 1..412: note = Human oral metagenome

SEQ ID NO: 24376 - protein, 415 aa, unidentified; identical to SEQ ID NO: 11853
  REGION 1..415: note = Human gut metagenome

SEQ ID NO: 24377 - protein, 413 aa, unidentified; identical to SEQ ID NO: 10655
  REGION 1..413: note = Human gut metagenome

SEQ ID NO: 24378 - protein, 413 aa, unidentified; identical to SEQ ID NO: 2858
  REGION 1..413: note = Human gut metagenome

SEQ ID NO: 24379 - protein, 413 aa, unidentified; identical to SEQ ID NO: 3220
  REGION 1..413: note = Human gut metagenome

SEQ ID NO: 24380 - protein, 412 aa, unidentified; identical to SEQ ID NO: 5980
  REGION 1..412: note = Human oral metagenome

SEQ ID NO: 24381 - protein, 412 aa, unidentified; identical to SEQ ID NO: 3155
  REGION 1..412: note = Human gut metagenome

SEQ ID NO: 24382 - protein, 415 aa, unidentified; identical to SEQ ID NO: 18693
  REGION 1..415: note = Human gut metagenome

SEQ ID NO: 24383 - protein, 413 aa, Blautia sp.; identical to SEQ ID NO: 3616

SEQ ID NO: 24384 - protein, 367 aa, unidentified; identical to SEQ ID NO: 18719
  REGION 1..367: note = Human gut metagenome

SEQ ID NO: 24385 - protein, 413 aa, unidentified; identical to SEQ ID NO: 8345
  REGION 1..413: note = Human gut metagenome

SEQ ID NO: 24386 - protein, 413 aa, unidentified; identical to SEQ ID NO: 3220
  REGION 1..413: note = Human gut metagenome

SEQ ID NO: 24387 - protein, 416 aa, unidentified; identical to SEQ ID NO: 18779
  REGION 1..416: note = Human gut metagenome

SEQ ID NO: 24388 - protein, 413 aa, unidentified; identical to SEQ ID NO: 11236
  REGION 1..413: note = metagenome

SEQ ID NO: 24389 - protein, 413 aa, unidentified; identical to SEQ ID NO: 9603
  REGION 1..413: note = Human gut metagenome

SEQ ID NO: 24390 - protein, 432 aa, unidentified; identical to SEQ ID NO: 18870
  REGION 1..432: note = Human gut metagenome

SEQ ID NO: 24391 - protein, 412 aa, unidentified; identical to SEQ ID NO: 6913
  REGION 1..412: note = Human gut metagenome

SEQ ID NO: 24392 - protein, 333 aa, unidentified; identical to SEQ ID NO: 18886
  REGION 1..333: note = Human gut metagenome

SEQ ID NO: 24393 - protein, 412 aa, unidentified; identical to SEQ ID NO: 18030
  REGION 1..412: note = Human gut metagenome

SEQ ID NO: 24394 - protein, 413 aa, unidentified; identical to SEQ ID NO: 19039
  REGION 1..413: note = Human gut metagenome

SEQ ID NO: 24395 - protein, 413 aa, unidentified; identical to SEQ ID NO: 3023
  REGION 1..413: note = Human gut metagenome

SEQ ID NO: 24396 - protein, 415 aa, unidentified; identical to SEQ ID NO: 10543
  REGION 1..415: note = Human gut metagenome

SEQ ID NO: 24397 - protein, 413 aa, unidentified; identical to SEQ ID NO: 3695
  REGION 1..413: note = Human gut metagenome

SEQ ID NO: 24398 - protein, 413 aa, Lactobacillus sp.; identical to SEQ ID NO: 19286

SEQ ID NO: 24399 - protein, 415 aa, unidentified; identical to SEQ ID NO: 10543
  REGION 1..415: note = Human gut metagenome

SEQ ID NO: 24400 - protein, 413 aa, unidentified; identical to SEQ ID NO: 19308
  REGION 1..413: note = Human gut metagenome

SEQ ID NO: 24401 - protein, 416 aa, unidentified; identical to SEQ ID NO: 6623
  REGION 1..416: note = Human gut metagenome

SEQ ID NO: 24402 - protein, 413 aa, unidentified; identical to SEQ ID NO: 2636
  REGION 1..413: note = Human gut metagenome

SEQ ID NO: 24403 - protein, 413 aa, unidentified; identical to SEQ ID NO: 4044
  REGION 1..413: note = Human gut metagenome

SEQ ID NO: 24404 - protein, 413 aa, unidentified; identical to SEQ ID NO: 7541
  REGION 1..413: note = Viral metagenome

SEQ ID NO: 24405 - protein, 412 aa, unidentified; identical to SEQ ID NO: 19426
  REGION 1..412: note = Human gut metagenome

SEQ ID NO: 24406 - protein, 353 aa, unidentified; identical to SEQ ID NO: 19460
  REGION 1..353: note = Human gut metagenome

SEQ ID NO: 24407 - protein, 413 aa, unidentified; identical to SEQ ID NO: 3695
  REGION 1..413: note = Human gut metagenome

SEQ ID NO: 24408 - protein, 415 aa, unidentified; identical to SEQ ID NO: 19565
  REGION 1..415: note = Human gut metagenome

SEQ ID NO: 24409 - protein, 413 aa, unidentified; identical to SEQ ID NO: 19635
  REGION 1..413: note = Human gut metagenome

SEQ ID NO: 24410 - protein, 413 aa, unidentified; identical to SEQ ID NO: 19639
  REGION 1..413: note = Human gut metagenome

SEQ ID NO: 24411 - protein, 413 aa, unidentified; identical to SEQ ID NO: 19643
  REGION 1..413: note = Human gut metagenome

SEQ ID NO: 24412 - protein, 411 aa, unidentified; identical to SEQ ID NO: 2867
  REGION 1..411: note = Human gut metagenome

SEQ ID NO: 24413 - protein, 413 aa, unidentified; identical to SEQ ID NO: 11242
  REGION 1..413: note = Human gut metagenome

SEQ ID NO: 24414 - protein, 412 aa, unidentified; identical to SEQ ID NO: 5980
  REGION 1..412: note = Human oral metagenome

SEQ ID NO: 24415 - protein, 413 aa, Blautia sp.; identical to SEQ ID NO: 3616

SEQ ID NO: 24416 - protein, 413 aa, unidentified; identical to SEQ ID NO: 3295
  REGION 1..413: note = Human gut metagenome

SEQ ID NO: 24417 - protein, 412 aa, unidentified; identical to SEQ ID NO: 3155
  REGION 1..412: note = Human gut metagenome

SEQ ID NO: 24418 - protein, 413 aa, unidentified; identical to SEQ ID NO: 5965
  REGION 1..413: note = Human gut metagenome

SEQ ID NO: 24419 - protein, 413 aa, unidentified; identical to SEQ ID NO: 2636
  REGION 1..413: note = Human gut metagenome

SEQ ID NO: 24420 - protein, 413 aa, unidentified; identical to SEQ ID NO: 20091
  REGION 1..413: note = Human gut metagenome

SEQ ID NO: 24421 - protein, 413 aa, unidentified; identical to SEQ ID NO: 3295
  REGION 1..413: note = Human gut metagenome

SEQ ID NO: 24422 - protein, 390 aa, unidentified; identical to SEQ ID NO: 20158
  REGION 1..390: note = Human gut metagenome

SEQ ID NO: 24423 - protein, 413 aa, unidentified; identical to SEQ ID NO: 3023
  REGION 1..413: note = Human gut metagenome

SEQ ID NO: 24424 - protein, 415 aa, unidentified; identical to SEQ ID NO: 10543
  REGION 1..415: note = Human gut metagenome

SEQ ID NO: 24425 - protein, 416 aa, unidentified; identical to SEQ ID NO: 18097
  REGION 1..416: note = Human gut metagenome

SEQ ID NO: 24426 - protein, 412 aa, unidentified; identical to SEQ ID NO: 3155
  REGION 1..412: note = Human gut metagenome

SEQ ID NO: 24427 - protein, 413 aa, unidentified; identical to SEQ ID NO: 3220
  REGION 1..413: note = Human gut metagenome

SEQ ID NO: 24428 - protein, 413 aa, unidentified; identical to SEQ ID NO: 3587
  REGION 1..413: note = Human gut metagenome

SEQ ID NO: 24429 - protein, 413 aa, unidentified; identical to SEQ ID NO: 20523
  REGION 1..413: note = Human gut metagenome

SEQ ID NO: 24430 - protein, 418 aa, unidentified; identical to SEQ ID NO: 7032
  REGION 1..418: note = Human gut metagenome

SEQ ID NO: 24431 - protein, 415 aa, unidentified; identical to SEQ ID NO: 10543
  REGION 1..415: note = Human gut metagenome

SEQ ID NO: 24432 - protein, 415 aa, unidentified; identical to SEQ ID NO: 11876
  REGION 1..415: note = Human gut metagenome

SEQ ID NO: 24433 - protein, 413 aa, unidentified; identical to SEQ ID NO: 20630
  REGION 1..413: note = Human gut metagenome

SEQ ID NO: 24434 - protein, 413 aa, unidentified; identical to SEQ ID NO: 20658
  REGION 1..413: note = Human gut metagenome

SEQ ID NO: 24435 - protein, 341 aa, unidentified; identical to SEQ ID NO: 20661
  REGION 1..341: note = Human gut metagenome

SEQ ID NO: 24436 - protein, 413 aa, unidentified; identical to SEQ ID NO: 10655
  REGION 1..413: note = Human gut metagenome

SEQ ID NO: 24437 - protein, 415 aa, unidentified; identical to SEQ ID NO: 3548
  REGION 1..415: note = Human gut metagenome

SEQ ID NO: 24438 - protein, 413 aa, unidentified; identical to SEQ ID NO: 3476
  REGION 1..413: note = Human gut metagenome

SEQ ID NO: 24439 - protein, 422 aa, unidentified; identical to SEQ ID NO: 20791
  REGION 1..422: note = Human oral metagenome

SEQ ID NO: 24440 - protein, 415 aa, unidentified; identical to SEQ ID NO: 20866
  REGION 1..415: note = Human gut metagenome

SEQ ID NO: 24441 - protein, 413 aa, unidentified; identical to SEQ ID NO: 3587
  REGION 1..413: note = Human gut metagenome

SEQ ID NO: 24442 - protein, 413 aa, unidentified; identical to SEQ ID NO: 20961
  REGION 1..413: note = Human gut metagenome

SEQ ID NO: 24443 - protein, 413 aa, unidentified; identical to SEQ ID NO: 12039
  REGION 1..413: note = Human gut metagenome

SEQ ID NO: 24444 - protein, 413 aa, unidentified; identical to SEQ ID NO: 20979
  REGION 1..413: note = Human gut metagenome

SEQ ID NO: 24445 - protein, 415 aa, unidentified; identical to SEQ ID NO: 6044
  REGION 1..415: note = Human gut metagenome

SEQ ID NO: 24446 - protein, 413 aa, unidentified; identical to SEQ ID NO: 3295
  REGION 1..413: note = Human gut metagenome

SEQ ID NO: 24447 - protein, 413 aa, unidentified; identical to SEQ ID NO: 21034
  REGION 1..413: note = Human gut metagenome

SEQ ID NO: 24448 - protein, 412 aa, unidentified; identical to SEQ ID NO: 3155
  REGION 1..412: note = metagenome

SEQ ID NO: 24449 - protein, 416 aa, unidentified; identical to SEQ ID NO: 7785
  REGION 1..416: note = Human gut metagenome

SEQ ID NO: 24450 - protein, 411 aa, unidentified; identical to SEQ ID NO: 2867
  REGION 1..411: note = Human gut metagenome

SEQ ID NO: 24451 - protein, 413 aa, unidentified; identical to SEQ ID NO: 5477
  REGION 1..413: note = Human gut metagenome

SEQ ID NO: 24452 - protein, 413 aa, unidentified; identical to SEQ ID NO: 5965
  REGION 1..413: note = Human gut metagenome

SEQ ID NO: 24453 - protein, 413 aa, Blautia sp.; identical to SEQ ID NO: 9603

SEQ ID NO: 24454 - protein, 363 aa, unidentified; identical to SEQ ID NO: 21272
  REGION 1..363: note = Human gut metagenome

SEQ ID NO: 24455 - protein, 413 aa, unidentified; identical to SEQ ID NO: 21278
  REGION 1..413: note = Human gut metagenome

SEQ ID NO: 24456 - protein, 415 aa, unidentified; identical to SEQ ID NO: 6044
  REGION 1..415: note = Human gut metagenome

SEQ ID NO: 24457 - protein, 413 aa, unidentified; identical to SEQ ID NO: 7120
  REGION 1..413: note = Human gut metagenome

SEQ ID NO: 24458 - protein, 413 aa, unidentified; identical to SEQ ID NO: 21435
  REGION 1..413: note = Human gut metagenome

SEQ ID NO: 24459 - protein, 415 aa, unidentified; identical to SEQ ID NO: 21527
  REGION 1..415: note = gut metagenome

SEQ ID NO: 24460 - protein, 413 aa, unidentified; identical to SEQ ID NO: 21582
  REGION 1..413: note = Human gut metagenome

SEQ ID NO: 24461 - protein, 413 aa, unidentified; identical to SEQ ID NO: 2636
  REGION 1..413: note = Human gut metagenome

SEQ ID NO: 24462 - protein, 413 aa, unidentified; identical to SEQ ID NO: 3295
  REGION 1..413: note = Human gut metagenome

SEQ ID NO: 24463 - protein, 411 aa, unidentified; identical to SEQ ID NO: 2867
  REGION 1..411: note = Human gut metagenome

SEQ ID NO: 24464 - protein, 412 aa, unidentified; identical to SEQ ID NO: 6913
  REGION 1..412: note = Human gut metagenome

SEQ ID NO: 24465 - protein, 413 aa, unidentified; identical to SEQ ID NO: 21825
  REGION 1..413: note = Human gut metagenome

SEQ ID NO: 24466 - protein, 415 aa, unidentified; identical to SEQ ID NO: 11876
  REGION 1..415: note = Human gut metagenome

SEQ ID NO: 24467 - protein, 413 aa, unidentified; identical to SEQ ID NO: 3023
  REGION 1..413: note = Human gut metagenome

SEQ ID NO: 24468 - protein, 413 aa, unidentified; identical to SEQ ID NO: 3023
  REGION 1..413: note = Human gut metagenome

SEQ ID NO: 24469 - protein, 413 aa, unidentified; identical to SEQ ID NO: 7540
  REGION 1..413: note = Human gut metagenome

SEQ ID NO: 24470 - protein, 438 aa, unidentified; identical to SEQ ID NO: 21974
  REGION 1..438: note = Human gut metagenome

SEQ ID NO: 24471 - protein, 413 aa, unidentified; identical to SEQ ID NO: 3220
  REGION 1..413: note = Human gut metagenome

SEQ ID NO: 24472 - protein, 413 aa, unidentified; identical to SEQ ID NO: 15509
  REGION 1..413: note = Human gut metagenome

SEQ ID NO: 24473 - protein, 392 aa, unidentified; identical to SEQ ID NO: 22007
  REGION 1..392: note = Human gut metagenome

SEQ ID NO: 24474 - protein, 413 aa, unidentified; identical to SEQ ID NO: 3295
  REGION 1..413: note = Human gut metagenome

SEQ ID NO: 24475 - protein, 413 aa, unidentified; identical to SEQ ID NO: 22070
  REGION 1..413: note = Human gut metagenome

SEQ ID NO: 24476 - protein, 413 aa, unidentified; identical to SEQ ID NO: 5965
  REGION 1..413: note = Human gut metagenome

SEQ ID NO: 24477 - protein, 412 aa, unidentified; identical to SEQ ID NO: 22092
  REGION 1..412: note = Human gut metagenome

SEQ ID NO: 24478 - protein, 415 aa, unidentified; identical to SEQ ID NO: 3635
  REGION 1..415: note = Human gut metagenome

SEQ ID NO: 24479 - protein, 413 aa, unidentified; identical to SEQ ID NO: 7541
  REGION 1..413: note = Human gut metagenome

SEQ ID NO: 24480 - protein, 412 aa, unidentified; identical to SEQ ID NO: 6276
  REGION 1..412: note = Human gut metagenome

SEQ ID NO: 24481 - protein, 406 aa, unidentified; identical to SEQ ID NO: 22453
  REGION 1..406: note = Human gut metagenome

SEQ ID NO: 24482 - protein, 413 aa, unidentified; identical to SEQ ID NO: 22494
  REGION 1..413: note = Mouse gut metagenome

SEQ ID NO: 24483 - protein, 380 aa, unidentified; identical to SEQ ID NO: 22515
  REGION 1..380: note = Human gut metagenome

SEQ ID NO: 24484 - protein, 413 aa, unidentified; identical to SEQ ID NO: 22531
  REGION 1..413: note = Human gut metagenome

SEQ ID NO: 24485 - protein, 413 aa, unidentified; identical to SEQ ID NO: 3220
  REGION 1..413: note = Human gut metagenome

SEQ ID NO: 24486 - protein, 413 aa, unidentified; identical to SEQ ID NO: 22579
  REGION 1..413: note = Human gut metagenome

SEQ ID NO: 24487 - protein, 413 aa, unidentified; identical to SEQ ID NO: 3587
  REGION 1..413: note = Human gut metagenome

SEQ ID NO: 24488 - protein, 415 aa, unidentified; identical to SEQ ID NO: 10543
  REGION 1..415: note = Human gut metagenome

SEQ ID NO: 24489 - protein, 413 aa, unidentified; identical to SEQ ID NO: 22614
  REGION 1..413: note = Human gut metagenome

SEQ ID NO: 24490 - protein, 413 aa, unidentified; identical to SEQ ID NO: 3476
  REGION 1..413: note = Human gut metagenome

SEQ ID NO: 24491 - protein, 413 aa, unidentified; identical to SEQ ID NO: 22668
  REGION 1..413: note = Human gut metagenome

SEQ ID NO: 24492 - protein, 413 aa, unidentified; identical to SEQ ID NO: 15509
  REGION 1..413: note = Human gut metagenome

SEQ ID NO: 24493 - protein, 415 aa, unidentified; identical to SEQ ID NO: 3635
  REGION 1..415: note = Human gut metagenome

SEQ ID NO: 24494 - protein, 414 aa, Clostridium sp.; identical to SEQ ID NO: 8775

SEQ ID NO: 24495 - protein, 415 aa, unidentified; identical to SEQ ID NO: 22742
  REGION 1..415: note = Wastewater metagenome

SEQ ID NO: 24496 - protein, 432 aa, unidentified; identical to SEQ ID NO: 22779
  REGION 1..432: note = Human gut metagenome

SEQ ID NO: 24497 - protein, 413 aa, unidentified; identical to SEQ ID NO: 3220
  REGION 1..413: note = Human gut metagenome

SEQ ID NO: 24498 - protein, 416 aa, unidentified; identical to SEQ ID NO: 22829
  REGION 1..416: note = Human gut metagenome

SEQ ID NO: 24499 - protein, 409 aa, unidentified; identical to SEQ ID NO: 22890
  REGION 1..409: note = Human gut metagenome

SEQ ID NO: 24500 - protein, 413 aa, unidentified; identical to SEQ ID NO: 22925
  REGION 1..413: note = Human gut metagenome

SEQ ID NO: 24501 - protein, 413 aa, unidentified; identical to SEQ ID NO: 5477
  REGION 1..413: note = Human gut metagenome

SEQ ID NO: 24502 - protein, 374 aa, unidentified; identical to SEQ ID NO: 22942
  REGION 1..374: note = Human gut metagenome

SEQ ID NO: 24503 - protein, 432 aa, unidentified; identical to SEQ ID NO: 22962
  REGION 1..432: note = Human gut metagenome

SEQ ID NO: 24504 - protein, 413 aa, unidentified; identical to SEQ ID NO: 22992
  REGION 1..413: note = Mouse gut metagenome

SEQ ID NO: 24505 - protein, 416 aa, unidentified; identical to SEQ ID NO: 10554
  REGION 1..416: note = Human gut metagenome

SEQ ID NO: 24506 - protein, 413 aa, unidentified; identical to SEQ ID NO: 23035
  REGION 1..413: note = Human gut metagenome

SEQ ID NO: 24507 - protein, 413 aa, unidentified; identical to SEQ ID NO: 5965
  REGION 1..413: note = Human gut metagenome

SEQ ID NO: 24508 - protein, 413 aa, unidentified; identical to SEQ ID NO: 7541
  REGION 1..413: note = Human gut metagenome

SEQ ID NO: 24509 - protein, 406 aa, unidentified; identical to SEQ ID NO: 23199
  REGION 1..406: note = Human gut metagenome

SEQ ID NO: 24510 - protein, 411 aa, unidentified; identical to SEQ ID NO: 2867
  REGION 1..411: note = Human gut metagenome

SEQ ID NO: 24511 - protein, 413 aa, unidentified; identical to SEQ ID NO: 5477
  REGION 1..413: note = Human gut metagenome

SEQ ID NO: 24512 - protein, 415 aa, unidentified; identical to SEQ ID NO: 10543
  REGION 1..415: note = Human gut metagenome

SEQ ID NO: 24513 - protein, 415 aa, unidentified; identical to SEQ ID NO: 10543
  REGION 1..415: note = Human gut metagenome

SEQ ID NO: 24514 - protein, 413 aa, unidentified; identical to SEQ ID NO: 3023
  REGION 1..413: note = Human gut metagenome

SEQ ID NO: 24515 - protein, 397 aa, unidentified; identical to SEQ ID NO: 23534
  REGION 1..397: note = Human gut metagenome

SEQ ID NO: 24516 - protein, 422 aa, unidentified; identical to SEQ ID NO: 13422
  REGION 1..422: note = Human gut metagenome

SEQ ID NO: 24517 - protein, 413 aa, unidentified; identical to SEQ ID NO: 7841
  REGION 1..413: note = Mouse gut metagenome

SEQ ID NO: 24518 - protein, 412 aa, unidentified; identical to SEQ ID NO: 23606
  REGION 1..412: note = Human gut metagenome

SEQ ID NO: 24519 - protein, 413 aa, unidentified; identical to SEQ ID NO: 23612
  REGION 1..413: note = Human gut metagenome

SEQ ID NO: 24520 - protein, 413 aa, unidentified; identical to SEQ ID NO: 3220
  REGION 1..413: note = Human gut metagenome

SEQ ID NO: 24521 - protein, 425 aa, unidentified; identical to SEQ ID NO: 23646
  REGION 1..425: note = Firmicutes bacterium

SEQ ID NO: 24522 - protein, 413 aa, unidentified; identical to SEQ ID NO: 10778
  REGION 1..413: note = Human gut metagenome

SEQ ID NO: 24523 - protein, 412 aa, unidentified; identical to SEQ ID NO: 5053
  REGION 1..412: note = Human metagenome

SEQ ID NO: 24524 - protein, 405 aa, unidentified; identical to SEQ ID NO: 6076
  REGION 1..405: note = Human gut metagenome

SEQ ID NO: 24525 - protein, 464 aa, unidentified
  REGION 1..464: note = Human gut metagenome
MPVCVLSANGERLMPTENYGKVRHLLKDGRAVIAKRNPFTIQLTYETSTYTQPIELCVGTGYEHIGVSIKAKAKEVVSQQYDLLTNERSRHDDCRAYRRTRRNRLRYRAARFNNRVSSKMPGWIAPSLDNKVERHLDIISRYLSVMPVKDVFIKAATYDTQLLAALEAGEPVPQGKDYQHGPQYGYDTLREAVFERDHYTCVYCKRGLKDGAILHVHHAYYWKGLHGNSMRELATCCEKCNTPANHKEGGKLWGFDKPLRKYTGEAFMNSVRWILYQRAMARFQGAAEVHMTYGVISKRVRTNLGLPYSCATDAYCMGELRPEARCETEVFQKYRRNNRVLSKFYDAKYYDTREKGVIRSGNELSSGRTNRNHNLDGENLRRFRGCKKSKGRTSTRKQRYAMQPGDIVVYGNRKYVSKGCSSYGKALSLLTDGKPLMVSMKKIQLVRHKGGWVRLPHAAAEAKK

SEQ ID NO: 24526 - protein, 443 aa, Scytonema sp.
MKVYVVNKHGKPLMPTTPRKARLLLKEGKAKIYCRAPFTIQLIYGSSGYTQPGNLGIDAGYQNIGYSVVNEKEELIGGEVQMLKGVSERLTERKKYRQQRRNRKRYRAPRFDNRRRKDNWLAPSIQHKLDTHHKIIDKIQKIVPVKKITIEVASFDIQRIKDAEIQGVGYQQGEKYGFDNLREYILHRDGHKCQNPNCKNKDVNPILEVHHLGFWKEDRTDRPANLITLCNKCHASKNHKKSGFLCGWEPKLKSFKGETFMTTVRWRLTNDGRYSSTYGYITKGIRREFKIEKSHHNDAFVVAGGTIQKRVESLILEQIRRNKRSMEQFYDAKYIDSRDGSTKSGSELSSGRRTRNKQKNGENLRLYRKHKVSKGQRRIKKYRYRYQPKDLVQFEGQVYEVIGMQNLGTGVKLKNYPGVKNKVVNVNKVNPVKRRSGLCQIVP

SEQ ID NO: 24527 - protein, 443 aa, Scytonema sp.; identical to SEQ ID NO: 24526

SEQ ID NO: 24528 - protein, 443 aa, Scytonema sp.; identical to SEQ ID NO: 24526

SEQ ID NO: 24529 - protein, 443 aa, Scytonema sp.; identical to SEQ ID NO: 24526

SEQ ID NO: 24530 - protein, 442 aa, Scytonema sp.
MKVYVVNKHGRPLMPTTPRKARLLLNVGKANIYCREPFTIQLIYGSSGYTQRGDLGIDAGYQNIGYSVVNEKEELIGGEVQMLRGMSERLTERKKYRQQRRNRRRHRASRLNNRKCKEGWLSPSTQHKLDTHHKIIDLVKSVVPVKEVVVEVASFDIQKIKDGTIEGVGYQQGEQYDFDNLREYILHRDGHKCQNPNCKNKSCAPILQVHHIGFWKEDRTDRPANLITLCDKCHTPKNHKKNGFLFGWEPKLNSFKGETFMSTVRWRLTLEGEYRVTYGYITKGVRRDFNIEKSHHNDAFVIAGGTTQRRTEPLMLEQIRRNKRSMEQFYDAKYIDSRDGSIKSGSELSSGRRTRNKQKNGENLRLYRKQKTSDGQRRIKKQRYRYQPKDFVQFEGKIYEVIGMQNLGTGVKLKNYPGIKNKVVNVGKVKSIKRRSGLRTKL

SEQ ID NO: 24531 - protein, 478 aa, unidentified
  REGION 1..478: note = Human gut metagenome
MTGNCTRSVKGKNKMPVCVLSANGERLMPTENYGKVRHLLKDGRAVIAKRNPFTIQLTYDTSTYTQPIEMCVGTGYEHIGVSIKTKAKEVVSQQYDMLTNERSRHDDCRAYRRTRRNRLRYRAARFNNRVSGKKPGWIAPSLDNKVERHLDIISRYLSVMPVTDVFIKAATYDTQLLAALEAGEPVPQGKDYQHGPQYGYDTLREAVFERDHYTCVYCKRGLKDGAILHVHHAYYWKGLHGNSMRELATCCEKCNTPANHKEGGKLWGFDKPLRKYTGEAFMNSVRWILYQRAMARFQGVAEVHMTYGVISKRVRTNLGLPYSCATDAYCMGELRPEARCETEVFQKYRRNNRVLSKFYDAKYYDTREKGVIRSGNELSSGRTNRNHNLDGENLRRFRGCKKSKGRTSTRKQRYAMQPGDIVVYGNRKYVSKGCSSYGRALSLLTDGKPLMVSMKKIQLVRHKGGWVRLPHAAAEAKK

SEQ ID NO: 24532 - protein, 464 aa, unidentified; identical to SEQ ID NO: 24525
  REGION 1..464: note = Human gut metagenome

SEQ ID NO: 24533 - protein, 443 aa, Tolypothrix sp.
MKIYVVNKYGKPLMPTSPRKARSLLKEGKAKIYSRDPFTIQLVYGSSGYTQPGNLGIDAGYQNIGYSVVNEKEELIGGEVRMLKGMSERLTERKKYRCQRRNRKRYRAPRFDNRRRKDNWLAPSIQHKLDIHHKIIDKIQKIVPVKEVTIEVASFDIQKIKDAEIQGVGYQQGEQHGFDNLREYILHRDAHKCQNPNCKNKDTNPILEVHHLGFWKEDRTDRPANLVTLCDKCHIPKNHKKSGFLYGWQPRLKSFKGETFMTTIRWRLTKEGKYSSTYGYITKSIRRKFKIEKSHHNDAFVIAGGTIQKRVESLILEQIRRNKRSMEQFYDAKYIDARDGSTKSGSELSSGRRTRNKQKNGENLRLYRKHKVSKGQCRIKKYRYRYQPKDLVQFEGRVYEVVGMQNLGTGVKLKNYPGVKNKVVNVNKVNSVKRRSGLCEIVL

SEQ ID NO: 24534 - protein, 478 aa, unidentified; identical to SEQ ID NO: 24531
  REGION 1..478: note = Human gut metagenome

SEQ ID NO: 24535 - protein, 452 aa, Lactobacillus sp.
MSKIKKVDYIYVVDSNGTPLMPTSRLGMVRRWLKTGQAKWYGNSRNTIQFVRPVTTNTQDLTLGVDAGFHLGLSVVGNNREYYVSESLRKSEKDRITSRRESRRTRRNRLRYRKARFDNRRHKDGWLAPSIQHRLDFTIKEIKRLYTFLPITNLVVEVTPFDNQKLLNPNIKGWQYQKGKMYGFKTIKDYLLARDNYRDALDGKQYPASQLRVHHLVQRKDGGSNQPDNLVLLSDINHNQANHNNGILAKLRENRQKMLDYRGAYFMSILAARLSDYFDEYTTTQGYLTANLRQKYEIEKSHLNDAFVIAGGTDTTFRTNNIYSRQKLRNNNRVLQLFYDAKYIDSRDGKQKAGKELSSGRTRRSRELNYTNLRQFRKEKVKKGRVSIRRNHYQLRPHDVVLNTKTNRIERVKSVISRGKSVILQSGKSSTVKNIVSLYHVNGMLETKMENI

SEQ ID NO: 24536 - protein, 454 aa, Lactobacillus sp.
MPQKKVEYIYVVDSKGEPVMPTSRLGMVRRWLKSGQAIWYGNSRKTIQFVRPITTNTQELTLGVDAGFHLGLSVVSVDNQREYYASESVRDSKREKEKLEHRRDLRRGRRNRLRHRKKRFKNRKRQKKSLAPSVQHLLDFTIREIKRLYEFLPISKLVVEVAPFDNQKLANPNIKPWEYTQGRMHGFKSVKDYLLARDGYRDALDGKVYPASQLRVHHLVQRKDGGTNQPDNLVLLSDVNHNQANHVDGTLAKLAAERQTDLNTNYRGAYFMSVLAKRLPTYFANYIQTQGYITANLRTLYGIEKSHRNDAFIIAGGTDTCLRTSNIYSRTKVANNNRVLQKFYDARYIDSRDGKIKPGKKLSSGRTKRSRELDYKNQRIYRQEKVTKGRVSIRRNHYQLRPHDIVLNTKTNRIETVRSVVNRGKSVVFQTGKSTKPTNVRCLHHINGLREEKM

SEQ ID NO: 24537 - protein, 433 aa, unidentified
  REGION 1..433: note = Human gut metagenome
MQSHIRAFVLDKDRKPLMPCHAAKARKLLKKGKAAVFRRFPFTIILKERTREASAIQDVLVKVDPGSKSTGLAVVRKDEKNVHHALAFICLNHRGSKIRDALTSRRQLRRGRRSRNLRYRAPRFLNRKKPKGWLAPSLQHRVDAVMSWMNRLTRLVPVAGFVQELVKFDTQLMQNAAISGVEYQQGELAGYELKEYLLEKFDRKCVYCGKSGVVLNVEHIIPKARGGSNRVSNLAIACAQCNQKKGAMPIEDFLKKKPALLAQIRKQLKTPLRDATAVNATRWALYRNLQATGCTVEVGSGALTKFNRHAFSVPKEHWLDALCAGRIDGVADWANLRPLQAYCIGRGSHKRTRTDKYGFPLCYFSRYKRPNDFGTGDYVRVKVTRGRNTGIWIGRATLTDGKLSVETKAGRVKATFLNSKCLFKSDGYKYQYL

SEQ ID NO: 24538 - protein, 478 aa, unidentified; identical to SEQ ID NO: 24531
  REGION 1..478: note = Human gut metagenome

SEQ ID NO: 24539 - protein, 453 aa, Moorena sp.
MMSEVQKVNYIYVVDSNGTPLMPTSRLGMVRRWLKTGQARWFGNSRKIIQFVRPVTTNTQELTLGVDAGFHLGLAVVGNQREYYASESLRKSEKDRITSRRELRRTRRNRLRHRQARFDNRRRKDGWLAPSMQHRLDFTIKEIKCLYTFLPITKLVVEVTPFNNQKLLNSNIKPWEYTHGKMNGFKTIKDYLLARDNYRDALDGKQYPASQLRVHHLVQRKDGGTNQPDNLVLLSDINHSQANHNNGSLAKLRENRQKALDYRGAYFMNILATRLGDYFDEYTTTQGYLTANLRQEYQIEKSHLNDAFIIAGGTDTTLRTNNVYSRQKLRNNNRVLQKFYDARYIDSRDNKTKTGKELSSGRTRRSRELNYTNLRQFRKTKVKRGRISIRRNHYQLRPYDVVLNTQTNKIETVKSVQNSGTVIKFQTGKTCSIKNVVSLYHVNGMLEKKIENI

SEQ ID NO: 24540 - protein, 443 aa, unidentified
  REGION 1..443: note = Human gut metagenome
MMKVFVLDKDHKPLMPCGPARARKLLKAGRARVHKLQPFTIRIVDRSLADSVVQKVVVKVDPGSKETGIAVVREDEEETHHALYFINLKHRGAAIRDALTSRRQLRRGRRSRNLRYRAPRFLNRSKPKGWLPPSLQHRVDTTLSWVNRLRRLAPVSGIAQELVKFDTQRMQNPEISGVEYQQGELAGYELKEYLLEKFGRRCVYCAKSGVPLNVEHIVPKARGGSNRLSNLAIACVECNQKKGARPIEEFLKGKPELLARIRKRLKTPLRDAASVNATRWALFEALRATGLPIRTGSGALTKFNRHCFGVPKEHWFDALCVGRINGVSYEPGMKVLNVSCTGRGQYKRTRTDKFGFPICHFMRTKRPHGVGLGDLVRMTVQKGKHPGIWTGRAFPSNDGSVVLILPEFRIKGRARNCSILSLSDGYGYCLTDSETAKPTSFGK

SEQ ID NO: 24541 - protein, 443 aa, unidentified
  REGION 1..443: note = Human gut metagenome
VRHLLKDGRAVIAKRNPFTIQLTYDTSTYTQPIEMCVGTGYEHIGVSIKTKAKEVVSQQYDMLTNERSRHDDCRAYRRTRRNRLRYRAARFNNRVSGKKPGWIAPSLDNKVERHLDIISRYLSVMPVTDVFIKAATYDTQLLAALEAGEPVPQGKDYQHGPQYGYDTLREAVFERDHYTCVYCKRGLKDGAILHVHHAYYWKGLHGNSMRELATCCEKCNTPANHKEGGKLWGFDKPLRKYTGEAFMNSVRWILYQRAMARFQGVAEVHMTYGVISKRVRTNLGLPYSCATDAYCMGELRPEARCETEVFQKYRRNNRVLSKFYDAKYYDTREKGVIRSGNELSSGRTNRNHNLDGKNLRRFRGCKKSKGRTSTRKQRYAMQPGDIVVYGNRKYVSKGCSSYGRALSLLTDGKPLMVSMKKIQLVRHKGGWVRLPHAAAEAKK

SEQ ID NO: 24542 - protein, 431 aa, Acidithiobacillus sp.
MMQRVLVLDRLKQPLMPCHPARARELLREGKAAVFRRFPFTLILKEREGGITQATGVKLDPGSKKTGVALVAAFQRRGNVVIWAAELEHRGATIRKLLEQRLGHRRHRRGNLRYRAPRFDNRSRREGWLAPSLQHRVDTTLSWTKKLMRLAPVTALSMELVKFDMQQMQNPEISGVEYQQGALQGYEVKEYLLEKWGRECAYCDAENVPLEVDHIQPKSKGGSNRVSNLTLACHDCNQRKGNLPIATFLAQQPERLRRIQVRAKAPLRDAAAVNSTRWALFQRLKATNLPVEVASGGRTKWNRSRQQYPKAHWIDAACVGVSGEAVTCDPEQVPLQMKAMGHGERQRARLSAHGFPVGHKAVSKSAYGFQTGDMVKAHIPKGKFQGVHCGRVAIRSRPSFALSTPKKAKPFDVHPKYLTIVHRSDGYVYNT

SEQ ID NO: 24543 - protein, 500 aa, unidentified
  REGION 1..500: note = Human gut metagenome
MTGSYTAAPPQTEHHAVDVPHRMTGNCTRSVKGKNKMPVCVLSANGERLMPTENYGKVRHLLKDGRAVIAKRNPFTIQLTYDTSTYTQPIEMCVGTGYEHIGVSIKTKAKEVVSQQYDMLTNERSRHDDCRAYRRTRRNRLRYRAARFNNRVSGKKPGWIAPSLDNKVERHLDIISRYLSVMPVTDVFIKAATYDTQLLAALEAGEPVPQGKDYQHGPQYGYDTLREAVFERDHYTCVYCKRGLKDGAILHVHHAYYWKGLHGNSMRELATCCEKCNTPANHKEGGKLWGFDKPLRKYTGEAFMNSVRWILYQRAMARFQGVAEVHMTYGVISKRVRTNLGLPYSCATDAYCMGELRPEARCETEVFQKYRRNNRVLSKFYDAKYYDTREKGVIRSGNELSSGRTNRNHNLDGENLRRFRGCKKSKGRTSTRKQRYAMQPGDIVVYGNRKYVSKGCSSYGRALSLLTDGKPLMVSMKKIQLVRHKGGWVRLPHAAAEAKK

SEQ ID NO: 24544 - protein, 425 aa, Sporosarcina sp.
MLVFVVNKHGEALMPCPPRKARMLLNEGKAKIVGYQPFSIQLLYGSSGYKQSVKVGVKLGEKHIGIAVTSVGHVLMKGEVELRTDVKSLIETRKIYRRIRRQRKTRYRKARFLNRKKPKGWLPPSLESRNANTFRWINRFSSLLPGPTLHIEIGKFEVQKLINPSVGGVSPQLSNSEGYYNTRYFVFARDNYSCQVCKKKNKVVKTHHIIYKTEGGSDRADNLITVCTDCHTSGNHRPGEIFWQWMQSGKKLRSYKEPPFTNTLRSRVYEQYPDAILSYGSETTPHRKLIGLEKSLVNEAIAITGIPAIMKMTETTFMAKQFRKKKRSLHEATARKGRKLSNTKSRRNAKNTRASRGFFLNDEVRTICGNIGYISGFTGKNACYVKSITGEYIVISEKKHKQQPLKGLVRRSHQGNWRYQLLHNA

SEQ ID NO: 24545 - protein, 478 aa, unidentified
  REGION 1..478: note = gut metagenome
MTGNCTRSVKGKNKMPVCVLSANGERLMPTENYGKVRHLLKDGRAVIAKRNPFTIQLTYDTSTYTQPIEMCVGTGYEHIGVSIKTKAKEVVSQQYDMLTNERSRHDDCRAYRRTRRNRLRYRAARFNNRVSGKKPGWIAPSLDNKVERHLDIISRYLSVMPVTDVFIKAATYDTQLLAALEAGEPVPQGKDYQHGPQYGYDTLREAVFERDHYTCVYCKRGLKDGAILHVHHAYYWKGLHGNSMRELATCCEKCNTPANHKEGGKLWGFDKPLRKYTGEAFMNSVRWILYQRAMARFQGVAEVHMTYGVISKRVRTNLGLPYSCATDAYCMGELRPEARCETEVFQKYRRNNRVLSKFYDAKYYDTREKGVIRSGNELSSGRTNRNHNLDGENLRRFRGCKKSKGRTSTRKQRYAMQPGDIVVYGNRKYASKGCSSYGRALSLLTDGKPLVVSMKKIQLVRHKGGWVRLPQAAAGAKE

SEQ ID NO: 24546 - protein, 427 aa, Acidiferrobacter sp.
MQRVLVLDKNRQPLMPCHPARARELLREGKAAVFRRFPFTIILKDRTGGAVQDVCLKLNPGSRVTGLALVAQFIRRGSTVIWAGELAHRGAAIRKALEQRRGHRRLRRAHLRYRAPRFDNRTKPEGWLAPSLQHRVDTTMTWVCRLRQWVPVTNLSTMLHRFDTQALQNPEISGVEYQQGELQGYEVREYLLEKWGRQCAYCDAEHAPLTIDHIHPTSRGGSDRVSNLTLACFPCNQRKSNRPLTEFLAHDPKRLARIEAQRKAPLRDAAAVNSTRWALFGTLKKTGLPVEVGTGGRTKYNRVRQGYVKAHWIDAACVGKSGDAVSLHSEQRSLAIEAMGHGERQRTRLNRHGFPVGHKTGTKSFSGFQTGDLVRARVLKGKHAGIHVGRVAIRFRPSFALKTAADIFDVHPKYLSLIQRSDGYAYQ
